United States Patent Application Publication US 2023/0075314 A1 - sequence listing, part 3

SEQ ID NO: 8453 - protein, 478 aa, Artificial Sequence
  source: /note="Description of Artificial Sequence: Synthetic polypeptide"
MDMRVPAQLLGLLLLWLRGARCQVQLVQSGAEVKKPGASVKVSCKASGYTFTGYYMHWVRQAPGQGLEWMGWINPNSGGTNYAQKFQGRVTMTRDTSISTAYMELSRLRSDDTAVYFCARDQMSIIMLRGVFPPYYYGMDVWGQGTTVTVSSASTKGPSVFPLAPCSRSTSESTAALGCLVKDYFPEPVTVSWNSGALTSGVHTFPAVLQSSGLYSLSSVVTVPSSNFGTQTYTCNVDHKPSNTKVDKTVERKCCVECPPCPAPPVAGPSVFLFPPKPKDTLMISRTPEVTCVVVDVSHEDPEVQFNWYVDGVEVHNAKTKPREEQFNSTFRVVSVLTVVHQDWLNGKEYKCKVSNKGLPAPIEKTISKTKGQPREPQVYTLPPSREEMTKNQVSLTCLVKGFYPSDIAVEWESNGQPENNYKTTPPMLDSDGSFFLYSKLTVDKSRWQQGNVFSCSVMHEALHNHYTQKSLSLSPGK

SEQ ID NO: 8454 - DNA, 645 bp, Artificial Sequence
  source: /note="Description of Artificial Sequence: Synthetic polynucleotide"
gaaatcgttctgacccagtccccggctaccctgtccctgtccccaggtgaacgtgctaccctgtcctgcaaagcttccaaacgggttaccacctacgtttcctggtaccagcagaaacccggtcaggctcctcgtctgctgatctacggtgcttccaaccgttacctcggtatcccagctcgtttctccggttccggttccggtaccgacttcaccctgaccatctcctccctggaacccgaagacttcgctgtttactactgcagtcagtcctacaactacccctacaccttcggtcagggtaccaaactggaaatcaaacgcactgtggctgcaccatctgtcttcatcttccctccatctgatgagcagttgaaatccggaactgcctctgttgtgtgcctgctgaataacttctatccgcgcgaggccaaagtacagtggaaggtggataacgccctccaatccggtaactcccaggagagtgtcacagagcaggacagcaaggacagcacctacagcctcagcagcaccctgaccctgagcaaagcagactacgagaaacacaaagtctacgcctgcgaagtcacccatcagggcctgagttctccagtcacaaagagcttcaaccgcggtgagtgctaa

SEQ ID NO: 8455 - DNA, 705 bp, Artificial Sequence
  source: /note="Description of Artificial Sequence: Synthetic polynucleotide"
atggaaaccccagctcagcttctcttcctcctgctactctggctcccagataccaccggagaaattgtgttgacgcagtctccaggcaccctgtctttgtctccaggggaaagagccaccctctcctgcagggccagtcagagtgttagcagcggctacttaacctggtaccagcagaaacctggccaggctcccagactcctcatctatggtgcatccagcagggccactggcatcccagacaggttcagtggcagtgggtctgggacggacttcactctcaccatcagcagactggagcctgaagattttgcagtgtattactgtcagcagtatggtaactcactgagcaggtttggccaggggaccaagctggagatcaaacgtacggtggctgcaccatctgtcttcatcttcccgccatctgatgagcagttgaaatctggaactgcctctgttgtgtgcctgctgaataacttctatcccagagaggccaaagtacagtggaaggtggataacgccctccaatcgggtaactcccaggagagtgtcacagagcaggacagcaaggacagcacctacagcctcagcagcaccctgacgctgagcaaagcagactacgagaaacacaaagtctacgcctgcgaagtcacccatcagggcctgagctcgcccgtcacaaagagcttcaacaggggagagtgt

SEQ ID NO: 8456 - DNA, 705 bp, Artificial Sequence
  source: /note="Description of Artificial Sequence: Synthetic polynucleotide"
atggaaaccccagctcagcttctcttcctcctgctactctggctcccagataccaccggagaaattgtgttgacgcagtctccaggcaccctgtctttgtctccaggggaaagagccaccctctcctgcagggccagtcagagtgttagcagcggctacttaacctggtaccagcagaaacctggccaggctcccaggctcctcatctatggtgcatccagcagggccactggcatcccagacaggttcagtggcagtgggtctgggacagacttcactctcaccatcagcagactggagcctgaagattttgcagtgtattactgtcagcagtatggtaactcactgtgcaggtttggccaggggaccaagctggagatcaaacgtacggtggctgcaccatctgtcttcatcttcccgccatctgatgagcagttgaaatctggaactgcctctgttgtgtgcctgctgaataacttctatcccagagaggccaaagtacagtggaaggtggataacgccctccaatcgggtaactcccaggagagtgtcacagagcaggacagcaaggacagcacctacagcctcagcagcaccctgacgctgagcaaagcagactacgagaaacacaaagtctacgcctgcgaagtcacccatcagggcctgagctcgcccgtcacaaagagcttcaacaggggagagtgt

SEQ ID NO: 8457 - DNA, 714 bp, Artificial Sequence
  source: /note="Description of Artificial Sequence: Synthetic polynucleotide"
atggacatgagggtgcccgctcagctcctggggctcctgctgctgtggctgagaggtgcgcgctgtcagtctgtgctgactcagccaccctcagcgtctgggacccccgggcagagagtcaccatctcttgttctggaagcagctccaacatcggcagtaattatgtatactggtaccagcagctcccaggagcggcccccaaactcctcatctttaggaataatcagcggccctcaggggtccctgaccgcttctctggctccaagtctggcacctcagcctccctggccatcagtgggctccggtccgaggatgaggctgattattactgtgcagcatgggatgacagcctgagtggttgggtgttcggcggagggaccaagctgaccgtcctaggtcagcccaaggccaaccccactgtcactctgttcccgccctcctctgaggagctccaagccaacaaggccacactagtgtgtctgatcagtgacttctacccgggagctgtgacagtggcctggaaggcagatggcagccccgtcaaggcgggagtggagaccaccaaaccctccaaacagagcaacaacaagtacgcggccagcagctacctgagcctgacgcccgagcagtggaagtcccacagaagctacagctgccaggtcacgcatgaagggagcaccgtggagaagacagtggcccctacagaatgttca

SEQ ID NO: 8458 - DNA, 714 bp, Artificial Sequence
  source: /note="Description of Artificial Sequence: Synthetic polynucleotide"
atggacatgagggtgcccgctcagctcctggggctcctgctgctgtggctgagaggtgcgcgctgtcagtctgtgctgactcagccaccctcagcgtctgggacccccgggcagagagtcaccatctcttgttctggaagcagctccaacatcggcagtaattatgtatactggtaccagcagctcccaggagcggcccccaaactcctcatctttaggagtaatcagcggccctcaggggtccctgaccgattctctggctccaagtctggcacctcagcctccctggccatcagtgggctccggtccgaggatgaggctgattattactgtgcagcatgggatgacagcctgagtggttgggtgttcggcggagggaccaagctgaccgtcctaggtcagcccaaggccaaccccactgtcactctgttcccgccctcctctgaggagctccaagccaacaaggccacactagtgtgtctgatcagtgacttctacccgggagctgtgacagtggcctggaaggcagatggcagccccgtcaaggcgggagtggagaccaccaaaccctccaaacagagcaacaacaagtacgcggccagcagctacctgagcctgacgcccgagcagtggaagtcccacagaagctacagctgccaggtcacgcatgaagggagcaccgtggagaagacagtggcccctacagaatgttca

SEQ ID NO: 8459 - DNA, 714 bp, Artificial Sequence
  source: /note="Description of Artificial Sequence: Synthetic polynucleotide"
atggacatgagggtgcccgctcagctcctggggctcctgctgctgtggctgagaggtgcgcgctgtcagtctgtgctgactcagccaccctcagcgtctgggacccccgggcagagggtcaccatctcttgttctggaagcagttccaatatcggaagtaatactgtgaactggtaccagcagctcccaggaacggcccccaaactcctcatctatactaataatcagcggccctcaggggtccctgaccgattctctggctccaagtctggcacctcagcctccctggccatcagtggactccagtctgaggatgaggctgatttttactgtgcagcgcgggatgagagcctgaatggtgtggtattcggcggagggaccaagctgaccgtcctaggtcagcccaaggccaaccccactgtcactctgttcccgccctcctctgaggagctccaagccaacaaggccacactagtgtgtctgatcagtgacttctacccgggagctgtgacagtggcctggaaggcagatggcagccccgtcaaggcgggagtggagaccaccaaaccctccaaacagagcaacaacaagtacgcggccagcagctacctgagcctgacgcccgagcagtggaagtcccacagaagctacagctgccaggtcacgcatgaagggagcaccgtggagaagacagtggcccctacagaatgttca

SEQ ID NO: 8460 - DNA, 714 bp, Artificial Sequence
  source: /note="Description of Artificial Sequence: Synthetic polynucleotide"
atggacatgagggtgcccgctcagctcctggggctcctgctgctgtggctgagaggtgcgcgctgtcagtctgtgctgactcagtcaccctcagcgtctgggacccccgggcagagagtcaccatctcttgttctggaagcagctccaacatcggcagtaattatgtatactggtaccagcagctcccaggagcggcccccaaactcctcatccttaggaataatcagcggccctcaggggtccctgaccgattctctggctccaagtctggcacctcagcctccctgaccatcagtgggctccggtccgaggatgaggctgactattattgtgcagcatgggatgacagcctgagtggttgggtgttcggcggagggaccaagctgaccgtcctaggtcagcccaaggccaaccccactgtcactctgttcccgccctcctctgaggagctccaagccaacaaggccacactagtgtgtctgatcagtgacttctacccgggagctgtgacagtggcctggaaggcagatggcagccccgtcaaggcgggagtggagaccaccaaaccctccaaacagagcaacaacaagtacgcggccagcagctacctgagcctgacgcccgagcagtggaagtcccacagaagctacagctgccaggtcacgcatgaagggagcaccgtggagaagacagtggcccctacagaatgttca

SEQ ID NO: 8461 - DNA, 714 bp, Artificial Sequence
  source: /note="Description of Artificial Sequence: Synthetic polynucleotide"
atggacatgagggtgcccgctcagctcctggggctcctgctgctgtggctgagaggtgcgcgctgtcagtctgtgttgacgcagccgccctcagtgtctgaggccccaggacagaaggtcaccatctcctgctctggaagcagctccaacattgggaataattatgtatcctggtaccagcagctcccaggaacagcccccaaactcctcatttatgacaataataagcgaccctcagggattcctgaccgattctctggctccaagtctggcacgtcagccaccctgggcatcaccggactccagactggggacgaggccgattattactgcggaacatgggatagccgcctgagtgctgtggttttcggcggagggaccaagctgaccgtcctaggtcagcccaaggccaaccccactgtcactctgttcccgccctcctctgaggagctccaagccaacaaggccacactagtgtgtctgatcagtgacttctacccgggagctgtgacagtggcctggaaggcagatggcagccccgtcaaggcgggagtggagaccaccaaaccctccaaacagagcaacaacaagtacgcggccagcagctacctgagcctgacgcccgagcagtggaagtcccacagaagctacagctgccaggtcacgcatgaagggagcaccgtggagaagacagtggcccctacagaatgttca

SEQ ID NO: 8462 - DNA, 714 bp, Artificial Sequence
  source: /note="Description of Artificial Sequence: Synthetic polynucleotide"
atggacatgagggtgcccgctcagctcctggggctcctgctgctgtggctgagaggtgcgcgctgtcagtctgtgttgacgcagccgccctcagtgtctgcggccccaggacagaaggtcaccatctcctgctctggaagcagctccaacattgggaataattatgtatcctggtaccagcagctcccaggaacagcccccaaactcctcatttatgacaataataagcgaccctcagggattcctgaccgattctctggctccaagtctggcacgtcaaccaccctgggcatcaccggactccagactggggacgaggccgattattactgcggaacatgggatagccgcctgagtgctgtggttttcggcggagggaccaagctgaccgtcctaggtcagcccaaggccaaccccactgtcactctgttcccgccctcctctgaggagctccaagccaacaaggccacactagtgtgtctgatcagtgacttctacccgggagctgtgacagtggcctggaaggcagatggcagccccgtcaaggcgggagtggagaccaccaaaccctccaaacagagcaacaacaagtacgcggccagcagctacctgagcctgacgcccgagcagtggaagtcccacagaagctacagctgccaggtcacgcatgaagggagcaccgtggagaagacagtggcccctacagaatgttca

SEQ ID NO: 8463 - DNA, 714 bp, Artificial Sequence
  source: /note="Description of Artificial Sequence: Synthetic polynucleotide"
atggacatgagggtgcccgctcagctcctggggctcctgctgctgtggctgagaggtgcgcgctgtcagtctgtgttgacgcagccgccctcagtgtctgcggccccaggacagaaggtcaccatctcctgctctggaagcagctccaacattgggaataattatgtatcctggtaccagcagctcccaggaacagcccccaaactcctcatttatgacaataataagcgaccctcagggattcctgaccgattctctggctccaagtctggcacgtcagccaccctgggcatcaccggactccagactggggacgaggccgattattactgcggaacatgggatagccgcctgagtgctgtggttttcggcggagggaccaagctgaccgtcctaggtcagcccaaggccaaccccactgtcactctgttcccgccctcctctgaggagctccaagccaacaaggccacactagtgtgtctgatcagtgacttctacccgggagctgtgacagtggcctggaaggcagatggcagccccgtcaaggcgggagtggagaccaccaaaccctccaaacagagcaacaacaagtacgcggccagcagctacctgagcctgacgcccgagcagtggaagtcccacagaagctacagctgccaggtcacgcatgaagggagcaccgtggagaagacagtggcccctacagaatgttca

SEQ ID NO: 8464 - DNA, 714 bp, Artificial Sequence
  source: /note="Description of Artificial Sequence: Synthetic polynucleotide"
atggacatgagggtgcccgctcagctcctggggctcctgctgctgtggctgagaggtgcgcgctgtcagtctgtgttgacgcagccgccctcagtgtctgcggccccaggacagaaggtcaccatctcctgctctggaagcagctccaacattgggaataattatgtatcctggtaccagcagttcccaggaacagcccccaaactcctcatttatgacaataataagcgaccctcagggattcctgaccgattctctggctccaagtctggcacgtcagccaccctgggcatcaccggactccagactggggacgaggccgattattactgcggaacatgggatagccgcctgagtgctgtggttttcggcggagggaccaagctgaccgtcctaggtcagcccaaggccaaccccactgtcactctgttcccgccctcctctgaggagctccaagccaacaaggccacactagtgtgtctgatcagtgacttctacccgggagctgtgacagtggcctggaaggcagatggcagccccgtcaaggcgggagtggagaccaccaaaccctccaaacagagcaacaacaagtacgcggccagcagctacctgagcctgacgcccgagcagtggaagtcccacagaagctacagctgccaggtcacgcatgaagggagcaccgtggagaagacagtggcccctacagaatgttca

SEQ ID NO: 8465 - DNA, 708 bp, Artificial Sequence
  source: /note="Description of Artificial Sequence: Synthetic polynucleotide"
atggacatgagggtgcccgctcagctcctggggctcctgctgctgtggctgagaggtgcgcgctgtgacatccagatgacccagtctccatcctccctgtctgcatctgtaggagacagagtcaccatcacttgccgggcaagtcagggcattagaaaggatttaggctggtatcagcagaaaccagggaaagcccctaagcgcctgatctatggagcatccagtttgcaaagtggggtcccatcaaggttcagcggcagtggatctgggacagaattcactctcacaatcagcagcctgcagcctgaagattttgcaacttattactgtctacagtataatagtttcccgtggacgttcggccaagggaccaaggtggaaatcaaacgtacggtggctgcaccatctgtcttcatcttcccgccatctgatgagcagttgaaatctggaactgcctctgttgtgtgcctgctgaataacttctatcccagagaggccaaagtacagtggaaggtggataacgccctccaatcgggtaactcccaggagagtgtcacagagcaggacagcaaggacagcacctacagcctcagcagcaccctgacgctgagcaaagcagactacgagaaacacaaagtctacgcctgcgaagtcacccatcagggcctgagctcgcccgtcacaaagagcttcaacaggggagagtgt

SEQ ID NO: 8466 - DNA, 708 bp, Artificial Sequence
  source: /note="Description of Artificial Sequence: Synthetic polynucleotide"
atggacatgagggtgcccgctcagctcctggggctcctgctgctgtggctgagaggtgcgcgctgtgacatccagatgacccagtctccatcctccctgtctgcatctgtaggagacagagtcaccatcacttgccgggcaagtcagggcattagaaatgatttaggctggtttcagcagaaaccagggaaagcccctaagcgcctgatctatgctgcatccagtttgcaaagtggggtcccatcaaggttcagcggcagtggatctgggacagaattcactctcacaatcagcagcctgcagcctgaagatttagcaacttattactgtctacagtataatatttacccgtggacgttcggccaagggaccaaggtggaaatcaaacgtacggtggctgcaccatctgtcttcatcttcccgccatctgatgagcagttgaaatctggaactgcctctgttgtgtgcctgctgaataacttctatcccagagaggccaaagtacagtggaaggtggataacgccctccaatcgggtaactcccaggagagtgtcacagagcaggacagcaaggacagcacctacagcctcagcagcaccctgacgctgagcaaagcagactacgagaaacacaaagtctacgcctgcgaagtcacccatcagggcctgagctcgcccgtcacaaagagcttcaacaggggagagtgt

SEQ ID NO: 8467 - DNA, 723 bp, Artificial Sequence
  source: /note="Description of Artificial Sequence: Synthetic polynucleotide"
atggacatgagggtgcccgctcagctcctggggctcctgctgctgtggctgagaggtgcgcgctgtgatattacactgacccagactccactttctctgtccgtctcccctggacagccggcctccatctcctgcaagtctagtcagagcctcctgcacagtgatggaaggaactatctgtattggtacctgcagaagccaggccagcctccacagctcctgatctatgaagtgtccaaccggttctctggactgccagataggttcagtggcagcgggtcagggacagatttcacactgaaaatcagccgggtggaggctgaggatgttgggatttattactgcatgcaaagttttccgcttccgctcactttcggcggagggaccaaggtggagatcaaacgtacggtggctgcaccatctgtcttcatcttcccgccatctgatgagcagttgaaatctggaactgcctctgttgtgtgcctgctgaataacttctatcccagagaggccaaagtacagtggaaggtggataacgccctccaatcgggtaactcccaggagagtgtcacagagcaggacagcaaggacagcacctacagcctcagcagcaccctgacgctgagcaaagcagactacgagaaacacaaagtctacgcctgcgaagtcacccatcagggcctgagctcgcccgtcacaaagagcttcaacaggggagagtgt

SEQ ID NO: 8468 - DNA, 723 bp, Artificial Sequence
  source: /note="Description of Artificial Sequence: Synthetic polynucleotide"
atggacatgagggtgcccgctcagctcctggggctcctgctgctgtggctgagaggtgcgcgctgtgatattattctgacccagactccactttctctgtccgtcacccctggacagccggcctccatctcctgcaagtctagtcagagcctcctgcacagtgatggaaagacctatttgtattggtacctgcagaagcccggccagcctccacagctcctgatctatgaagtttccaaccggttctctggagagccagataggttcagtggcagcgggtcagggacagatttcacactgaaaatcagccgggtggaggctgaggatgttgggacttattattgcatgcaaagttttccgcttccgctcactttcggcggagggaccaaggtggagatcaaacgtacggtggctgcaccatctgtcttcatcttcccgccatctgatgagcagttgaaatctggaactgcctctgttgtgtgcctgctgaataacttctatcccagagaggccaaagtacagtggaaggtggataacgccctccaatcgggtaactcccaggagagtgtcacagagcaggacagcaaggacagcacctacagcctcagcagcaccctgacgctgagcaaagcagactacgagaaacacaaagtctacgcctgcgaagtcacccatcagggcctgagctcgcccgtcacaaagagcttcaacaggggagagtgt

SEQ ID NO: 8469 - DNA, 723 bp, Artificial Sequence
  source: /note="Description of Artificial Sequence: Synthetic polynucleotide"
atggacatgagggtgcccgctcagctcctggggctcctgctgctgtggctgagaggtgcgcgctgtgatattgtgatgactcagtctccactctccctgcccgtcacccctggagagccggcctccatctcctgcaggtctagtcagagcctcctgcatagttttgggtacaactatttggattggtacctgcagaagccagggcagtctccacagctcctgatctatttgggttctaatcgggcctccggggtccctgacaggttcagtggcagtggatcaggcacagattttacactgaaaatcagcagagtggaggctgaggatgttggggtttattactgcatgcaagctctacaaactccattcactttcggccctgggaccaaagtggatatcaaacgtacggtggctgcaccatctgtcttcatcttcccgccatctgatgagcagttgaaatctggaactgcctctgttgtgtgcctgctgaataacttctatcccagagaggccaaagtacagtggaaggtggataacgccctccaatcgggtaactcccaggagagtgtcacagagcaggacagcaaggacagcacctacagcctcagcagcaccctgacgctgagcaaagcagactacgagaaacacaaagtctacgcctgcgaagtcacccatcagggcctgagctcgcccgtcacaaagagcttcaacaggggagagtgt

SEQ ID NO: 8470 - DNA, 708 bp, Artificial Sequence
  source: /note="Description of Artificial Sequence: Synthetic polynucleotide"
atggacatgagggtgcccgctcagctcctggggctcctgctgctgtggctgagaggtgcgcgctgttcttctgagctgactcaggaccctactgtgtctgtggccttgggacagacagtcaaaatcacatgccaaggagacagcctcagaagtttttatgcaagctggtaccagcagaagccaggacaggcccctgtacttgtcttctatggtaaaaacaaccggccctcagggatcccagaccgattctctggctccagctcaggaaacacagcttccttgaccatcactggggctcaggcggaagatgaggctgactattattgtaattcccgggacagcagtgtttaccatctggtactcggcggagggaccaagctgaccgtcctaggtcagcccaaggccaaccccactgtcactctgttcccgccctcctctgaggagctccaagccaacaaggccacactagtgtgtctgatcagtgacttctacccgggagctgtgacagtggcctggaaggcagatggcagccccgtcaaggcgggagtggagaccaccaaaccctccaaacagagcaacaacaagtacgcggccagcagctacctgagcctgacgcccgagcagtggaagtcccacagaagctacagctgccaggtcacgcatgaagggagcaccgtggagaagacagtggcccctacagaatgttca

SEQ ID NO: 8471 - DNA, 324 bp, Homo sapiens
cgtacggtggctgcaccatctgtcttcatcttcccgccatctgatgagcagttgaaatctggaactgcctctgttgtgtgcctgctgaataacttctatcccagagaggccaaagtacagtggaaggtggataacgccctccaatcgggtaactcccaggagagtgtcacagagcaggacagcaaggacagcacctacagcctcagcagcaccctgacgctgagcaaagcagactacgagaaacacaaagtctacgcctgcgaagtcacccatcagggcctgagctcgcccgtcacaaagagcttcaacaggggagagtgttag

SEQ ID NO: 8472 - DNA, 321 bp, Homo sapiens
ggtcagcccaaggccaaccccactgtcactctgttcccgccctcctctgaggagctccaagccaacaaggccacactagtgtgtctgatcagtgacttctacccgggagctgtgacagtggcctggaaggcagatggcagccccgtcaaggcgggagtggagaccaccaaaccctccaaacagagcaacaacaagtacgcggccagcagctacctgagcctgacgcccgagcagtggaagtcccacagaagctacagctgccaggtcacgcatgaagggagcaccgtggagaagacagtggcccctacagaatgttcatag

SEQ ID NO: 8473 - DNA, 660 bp, Artificial Sequence
  source: /note="Description of Artificial Sequence: Synthetic polynucleotide"
caagtgctgacccagactccatcccccgtgtctgcagctgtgggaagcacagtcaccatcaattgccaggccagtcagaatgtttataataacaactacctagcctggtatcagcagaaaccagggcagcctcccaagcaactgatctattctacgtccactctggcatctggggtctcatcgcgattcagaggcagtggatctgggacacagttcactctcaccatcagcgacgtgcagtgtgacgatgctgccacttactactgtctaggcagttatgattgtagtcgtggtgattgttttgttttcggcggagggaccgaggtggtggtcaaacgtacggtggctgcaccatctgtcttcatcttcccgccatctgatgagcagttgaaatctggaactgcctctgttgtgtgcctgctgaataacttctatcccagagaggccaaagtacagtggaaggtggataacgccctccaatcgggtaactcccaggagagtgtcacagagcaggacagcaaggacagcacctacagcctcagcagcaccctgacgctgagcaaagcagactacgagaaacacaaagtctacgcctgcgaagtcacccatcagggcctgagctcgcccgtcacaaagagcttcaacaggggagagtgttag

SEQ ID NO: 8474 - DNA, 339 bp, Artificial Sequence
  source: /note="Description of Artificial Sequence: Synthetic polynucleotide"
caagtgctgacccagactccatcccccgtgtctgcagctgtgggaagcacagtcaccatcaattgccaggccagtcagagtgtttatcataacacctacctggcctggtatcagcagaaaccagggcagcctcccaaacaactgatctatgatgcatccactctggcgtctggggtcccatcgcggttcagcggcagtggatctgggacacagttcactctcaccatcagcggcgtgcagtgtaacgatgctgccgcttactactgtctgggcagttatgattgtactaatggtgattgttttgttttcggcggagggaccgaggtggtggtcaaacgt

SEQ ID NO: 8475 - DNA, 660 bp, Artificial Sequence
  source: /note="Description of Artificial Sequence: Synthetic polynucleotide"
caagtgctgacccagactccatcccccgtgtctgcagctgtgggaagcacagtcaccatcaattgccaggccagtcagagtgtttatcataacacctacctggcctggtatcagcagaaaccagggcagcctcccaaacaactgatctatgatgcatccactctggcgtctggggtcccatcgcggttcagcggcagtggatctgggacacagttcactctcaccatcagcggcgtgcagtgtaacgatgctgccgcttactactgtctgggcagttatgattgtactaatggtgattgttttgttttcggcggagggaccgaggtggtggtcaaacgtacggtggctgcaccatctgtcttcatcttcccgccatctgatgagcagttgaaatctggaactgcctctgttgtgtgcctgctgaataacttctatcccagagaggccaaagtacagtggaaggtggataacgccctccaatcgggtaactcccaggagagtgtcacagagcaggacagcaaggacagcacctacagcctcagcagcaccctgacgctgagcaaagcagactacgagaaacacaaagtctacgcctgcgaagtcacccatcagggcctgagctcgcccgtcacaaagagcttcaacaggggagagtgttag

SEQ ID NO: 8476 - DNA, 339 bp, Artificial Sequence
  source: /note="Description of Artificial Sequence: Synthetic polynucleotide"
caagtgctgacccagactgcatcccccgtgtctgcagctgtgggaagcacagtcaccatcaattgccaggccagtcagagtgtttataattacaactaccttgcctggtatcagcagaaaccagggcagcctcccaagcaactgatctattctacatccactctggcatctggggtctcatcgcgattcaaaggcagtggatctgggacacagttcactctcaccatcagcgacgtgcagtgtgacgatgctgccacttactactgtctaggcagttatgactgtagtactggtgattgttttgttttcggcggagggaccgaggtggtggtcaaacgt

SEQ ID NO: 8477 - DNA, 660 bp, Artificial Sequence
  source: /note="Description of Artificial Sequence: Synthetic polynucleotide"
caagtgctgacccagactgcatcccccgtgtctgcagctgtgggaagcacagtcaccatcaattgccaggccagtcagagtgtttataattacaactaccttgcctggtatcagcagaaaccagggcagcctcccaagcaactgatctattctacatccactctggcatctggggtctcatcgcgattcaaaggcagtggatctgggacacagttcactctcaccatcagcgacgtgcagtgtgacgatgctgccacttactactgtctaggcagttatgactgtagtactggtgattgttttgttttcggcggagggaccgaggtggtggtcaaacgtacggtggctgcaccatctgtcttcatcttcccgccatctgatgagcagttgaaatctggaactgcctctgttgtgtgcctgctgaataacttctatcccagagaggccaaagtacagtggaaggtggataacgccctccaatcgggtaactcccaggagagtgtcacagagcaggacagcaaggacagcacctacagcctcagcagcaccctgacgctgagcaaagcagactacgagaaacacaaagtctacgcctgcgaagtcacccatcagggcctgagctcgcccgtcacaaagagcttcaacaggggagagtgttag

SEQ ID NO: 8478 - DNA, 339 bp, Artificial Sequence
  source: /note="Description of Artificial Sequence: Synthetic polynucleotide"
caagtgctgacccagactgcatcccccgtgtctgcagctgtgggaagcacagtcaccatcaattgccaggccagtcagagtgtttatgataacaactacctagcctggtatcagcagaaaccagggcagcctcccaagcaactgatctattctacatccactctggcatctggggtctcatcgcggttcaaaggcagtggatctgggacacagttcactctcaccatcagcgacctggagtgtgccgatgctgccacttactactgtctaggcagttatgattgtagtagtggtgattgttttgttttcggcggagggaccgaggtggtggtcaaacgt

SEQ ID NO: 8479 - DNA, 660 bp, Artificial Sequence
  source: /note="Description of Artificial Sequence: Synthetic polynucleotide"
caagtgctgacccagactgcatcccccgtgtctgcagctgtgggaagcacagtcaccatcaattgccaggccagtcagagtgtttatgataacaactacctagcctggtatcagcagaaaccagggcagcctcccaagcaactgatctattctacatccactctggcatctggggtctcatcgcggttcaaaggcagtggatctgggacacagttcactctcaccatcagcgacctggagtgtgccgatgctgccacttactactgtctaggcagttatgattgtagtagtggtgattgttttgttttcggcggagggaccgaggtggtggtcaaacgtacggtggctgcaccatctgtcttcatcttcccgccatctgatgagcagttgaaatctggaactgcctctgttgtgtgcctgctgaataacttctatcccagagaggccaaagtacagtggaaggtggataacgccctccaatcgggtaactcccaggagagtgtcacagagcaggacagcaaggacagcacctacagcctcagcagcaccctgacgctgagcaaagcagactacgagaaacacaaagtctacgcctgcgaagtcacccatcagggcctgagctcgcccgtcacaaagagcttcaacaggggagagtgttag

SEQ ID NO: 8480 - DNA, 660 bp, Artificial Sequence
  source: /note="Description of Artificial Sequence: Synthetic polynucleotide"
caagtgctgacccagtctccatcctccctgtctgcatctgtaggagacagagtcaccatcaattgccaggccagtcagaatgtttacaataacaactacctagcctggtatcagcagaaaccagggaaagttcctaagcaactgatctattctacatccactctggcatctggggtcccatctcgtttcagtggcagtggatctgggacagatttcactctcaccatcagcagcctgcagcctgaagatgttgcaacttattactgtctgggcagttatgattgtagtcgtggtgattgttttgttttcggcggaggaaccaaggtggaaatcaaacgtacggtggctgcaccatctgtcttcatcttcccgccatctgatgagcagttgaaatctggaactgcctctgttgtgtgcctgctgaataacttctatcccagagaggccaaagtacagtggaaggtggataacgccctccaatcgggtaactcccaggagagtgtcacagagcaggacagcaaggacagcacctacagcctcagcagcaccctgacgctgagcaaagcagactacgagaaacacaaagtctacgcctgcgaagtcacccatcagggcctgagctcgcccgtcacaaagagcttcaacaggggagagtgttag

SEQ ID NO: 8481 - DNA, 339 bp, Artificial Sequence
  source: /note="Description of Artificial Sequence: Synthetic polynucleotide"
caagtgctgacccagtctccatcctccctgtctgcatctgtaggagacagagtcaccatcaattgccaggccagtcagagtgtttacaattacaactaccttgcctggtatcagcagaaaccagggaaagttcctaagcaactgatctattctacatccactctggcatctggggtcccatctcgtttcagtggcagtggatctgggacagatttcactctcaccatcagcagcctgcagcctgaagatgttgcaacttattactgtctgggcagttatgattgtagtactggtgattgttttgttttcggcggaggaaccaaggtggaaatcaaacgt

SEQ ID NO: 8482 - DNA, 660 bp, Artificial Sequence
  source: /note="Description of Artificial Sequence: Synthetic polynucleotide"
caagtgctgacccagtctccatcctccctgtctgcatctgtaggagacagagtcaccatcaattgccaggccagtcagagtgtttacaattacaactaccttgcctggtatcagcagaaaccagggaaagttcctaagcaactgatctattctacatccactctggcatctggggtcccatctcgtttcagtggcagtggatctgggacagatttcactctcaccatcagcagcctgcagcctgaagatgttgcaacttattactgtctgggcagttatgattgtagtactggtgattgttttgttttcggcggaggaaccaaggtggaaatcaaacgtacggtggctgcaccatctgtcttcatcttcccgccatctgatgagcagttgaaatctggaactgcctctgttgtgtgcctgctgaataacttctatcccagagaggccaaagtacagtggaaggtggataacgccctccaatcgggtaactcccaggagagtgtcacagagcaggacagcaaggacagcacctacagcctcagcagcaccctgacgctgagcaaagcagactacgagaaacacaaagtctacgcctgcgaagtcacccatcagggcctgagctcgcccgtcacaaagagcttcaacaggggagagtgttag

SEQ ID NO: 8483 - DNA, 339 bp, Artificial Sequence
  source: /note="Description of Artificial Sequence: Synthetic polynucleotide"
caagtgctgacccagtctccatcctccctgtctgcatctgtaggagacagagtcaccatcaattgccaggccagtcagagtgtttatcataacacctacctggcctggtatcagcagaaaccagggaaagttcctaagcaactgatctatgatgcatccactctggcatctggggtcccatctcgtttcagtggcagtggatctgggacagatttcactctcaccatcagcagcctgcagcctgaagatgttgcaacttattactgtctgggcagttatgattgtactaatggtgattgttttgttttcggcggaggaaccaaggtggaaatcaaacgt

SEQ ID NO: 8484 - DNA, 660 bp, Artificial Sequence
  source: /note="Description of Artificial Sequence: Synthetic polynucleotide"
caagtgctgacccagtctccatcctccctgtctgcatctgtaggagacagagtcaccatcaattgccaggccagtcagagtgtttatcataacacctacctggcctggtatcagcagaaaccagggaaagttcctaagcaactgatctatgatgcatccactctggcatctggggtcccatctcgtttcagtggcagtggatctgggacagatttcactctcaccatcagcagcctgcagcctgaagatgttgcaacttattactgtctgggcagttatgattgtactaatggtgattgttttgttttcggcggaggaaccaaggtggaaatcaaacgtacggtggctgcaccatctgtcttcatcttcccgccatctgatgagcagttgaaatctggaactgcctctgttgtgtgcctgctgaataacttctatcccagagaggccaaagtacagtggaaggtggataacgccctccaatcgggtaactcccaggagagtgtcacagagcaggacagcaaggacagcacctacagcctcagcagcaccctgacgctgagcaaagcagactacgagaaacacaaagtctacgcctgcgaagtcacccatcagggcctgagctcgcccgtcacaaagagcttcaacaggggagagtgttag

SEQ ID NO: 8485 - DNA, 339 bp, Artificial Sequence
  source: /note="Description of Artificial Sequence: Synthetic polynucleotide"
caagtgctgacccagtctccatcctccctgtctgcatctgtaggagacagagtcaccatcaattgccaggccagtcagagtgtttatgataacaactacctagcctggtatcagcagaaaccagggaaagttcctaagcaactgatctattctacatccactctggcatctggggtcccatctcgtttcagtggcagtggatctgggacagatttcactctcaccatcagcagcctgcagcctgaagatgttgcaacttattactgtctaggcagttatgattgtagtagtggtgattgttttgttttcggcggaggaaccaaggtggaaatcaaacgt

SEQ ID NO: 8486 - DNA, 660 bp, Artificial Sequence
  source: /note="Description of Artificial Sequence: Synthetic polynucleotide"
caagtgctgacccagtctccatcctccctgtctgcatctgtaggagacagagtcaccatcaattgccaggccagtcagagtgtttatgataacaactacctagcctggtatcagcagaaaccagggaaagttcctaagcaactgatctattctacatccactctggcatctggggtcccatctcgtttcagtggcagtggatctgggacagatttcactctcaccatcagcagcctgcagcctgaagatgttgcaacttattactgtctaggcagttatgattgtagtagtggtgattgttttgttttcggcggaggaaccaaggtggaaatcaaacgtacggtggctgcaccatctgtcttcatcttcccgccatctgatgagcagttgaaatctggaactgcctctgttgtgtgcctgctgaataacttctatcccagagaggccaaagtacagtggaaggtggataacgccctccaatcgggtaactcccaggagagtgtcacagagcaggacagcaaggacagcacctacagcctcagcagcaccctgacgctgagcaaagcagactacgagaaacacaaagtctacgcctgcgaagtcacccatcagggcctgagctcgcccgtcacaaagagcttcaacaggggagagtgttag

SEQ ID NO: 8487 - DNA, 660 bp, Artificial Sequence
  source: /note="Description of Artificial Sequence: Synthetic polynucleotide"
caggtgctgacccagactgcatcccccgtgtctccagctgtgggaagcacagtcaccatcaattgccgggccagtcagagtgtttattataacaactacctagcctggtatcagcagaaaccagggcagcctcccaagcaactgatctattctacatccactctggcatctggggtctcatcgcggttcaaaggcagtggatctgggacacagttcactctcaccatcagcgacgtgcagtgtgacgatgctgccacttactactgtctaggcagttatgattgtagtaatggtgattgttttgttttcggcggagggaccgaggtggtggtcaaacgtacggtggctgcaccatctgtcttcatcttcccgccatctgatgagcagttgaaatctggaactgcctctgttgtgtgcctgctgaataacttctatcccagagaggccaaagtacagtggaaggtggataacgccctccaatcgggtaactcccaggagagtgtcacagagcaggacagcaaggacagcacctacagcctcagcagcaccctgacgctgagcaaagcagactacgagaaacacaaagtctacgcctgcgaagtcacccatcagggcctgagctcgcccgtcacaaagagcttcaacaggggagagtgttag

SEQ ID NO: 8488 - DNA, 816 bp, Homo sapiens
ccgccgctgccaccgcctctgatccaagccacctcccgccaggtgagccccgagattctggctcagagaggtgtcatgggcttccaaaagttctcccccttcctggctctcagcatcttggtcctgttgcaggcaggcagcctccatgcagcaccattcaggtctgccctggagagcagcccagcagacccggccacgctcagtgaggacgaagcgcgcctcctgctggctgcactggtgcaggactatgtgcagatgaaggccagtgagctggagcaggagcaagagagagagggctccagcctggacagccccagatctaagcggtgcggtaatctgagtacttgcatgctgggcacatacacgcaggacttcaacaagtttcacacgttcccccaaactgcaattggggttggagcacctggaaagaaaagggatatgtccagcgacttggagagagaccatcgccctcatgttagcatgccccagaatgccaactaaactcctccctttccttcctaatttcccttcttgcatccttcctataacttgatgcatgtggtttggttcctctctggtggctctttgggctggtattggtggctttccttgtggcagaggatgtctcaaacttcagatgggaggaaagagagcaggactcacaggttggaagagaatcacctgggaaaataccagaaaatgagggccgctttgagtcccccagagatgtcatcagagctcctctgtcctgcttctgaatgtgctgatcatttgaggaataaaattatttttccccaaaaaaaaaaaaaaaaaaaa

SEQ ID NO: 8489 - DNA, 10 bp, Artificial Sequence
  source: /note="Description of Artificial Sequence: Synthetic oligonucleotide"
cttcggtcag

SEQ ID NO: 8490 - DNA, 660 bp, Artificial Sequence
  source: /note="Description of Artificial Sequence: Synthetic polynucleotide"
gccatcgtgatgacccagactccatcttccaagtctgtccctgtgggagacacagtcaccatcaattgccaggccagtgagagtctttataataacaacgccttggcctggtttcagcagaaaccagggcagcctcccaagcgcctgatctatgatgcatccaaactggcatctggggtcccatcgcggttcagtggcggtgggtctgggacacagttcactctcaccatcagtggcgtgcagtgtgacgatgctgccacttactactgtggaggctacagaagtgatagtgttgatggtgttgctttcgccggagggaccgaggtggtggtcaaacgtacggtggctgcaccatctgtcttcatcttcccgccatctgatgagcagttgaaatctggaactgcctctgttgtgtgcctgctgaataacttctatcccagagaggccaaagtacagtggaaggtggataacgccctccaatcgggtaactcccaggagagtgtcacagagcaggacagcaaggacagcacctacagcctcagcagcaccctgacgctgagcaaagcagactacgagaaacacaaagtctacgcctgcgaagtcacccatcagggcctgagctcgcccgtcacaaagagcttcaacaggggagagtgttag

SEQ ID NO: 8491 - protein, 214 aa, Artificial Sequence
  source: /note="Description of Artificial Sequence: Synthetic polypeptide"
DIQMTQSPSSLSASVGDRVTITCRASKDISKYLNWYQQKPGKAPKLLIYYTSGYHSGVPSRFSGSGSGTDFTLTISSLQPEDFATYYCQQGDALPPTFGGGTKVEIKRTVAAPSVFIFPPSDEQLKSGTASVVCLLNNFYPREAKVQWKVDNALQSGNSQESVTEQDSKDSTYSLSSTLTLSKADYEKHKVYACEVTHQGLSSPVTKSFNRGEC

SEQ ID NO: 8492 - protein, 214 aa, Artificial Sequence
  source: /note="Description of Artificial Sequence: Synthetic polypeptide"
DIQMTQSPSSLSASVGDRVTITCRASQDIDKYLNWYQQKPGKAPKLLIYYTSGYHSGVPSRFSGSGSGTDFTLTISSLQPEDFATYYCQQGDALPPTFGGGTKVEIKRTVAAPSVFIFPPSDEQLKSGTASVVCLLNNFYPREAKVQWKVDNALQSGNSQESVTEQDSKDSTYSLSSTLTLSKADYEKHKVYACEVTHQGLSSPVTKSFNRGEC

SEQ ID NO: 8493 - protein, 214 aa, Artificial Sequence
  source: /note="Description of Artificial Sequence: Synthetic polypeptide"
DIQMTQSPSSLSASVGDRVTITCRASQDIDNYLNWYQQKPGKAPKLLIYYTSEYHSGVPSRFSGSGSGTDFTFTISSLQPEDIATYYCQQGDALPPTFGQGTKLEIKRTVAAPSVFIFPPSDEQLKSGTASVVCLLNNFYPREAKVQWKVDNALQSGNSQESVTEQDSKDSTYSLSSTLTLSKADYEKHKVYACEVTHQGLSSPVTKSFNRGEC

SEQ ID NO: 8494 - protein, 214 aa, Artificial Sequence
  source: /note="Description of Artificial Sequence: Synthetic polypeptide"
DIQMTQSPSSLSASVGDRVTITCRASRPIDKYLNWYQQKPGKAPKLLIYYTSEYHSGVPSRFSGSGSGTDFTFTISSLQPEDIATYYCQQGDALPPTFGQGTKLEIKRTVAAPSVFIFPPSDEQLKSGTASVVCLLNNFYPREAKVQWKVDNALQSGNSQESVTEQDSKDSTYSLSSTLTLSKADYEKHKVYACEVTHQGLSSPVTKSFNRGEC

SEQ ID NO: 8495 - protein, 218 aa, Artificial Sequence
  source: /note="Description of Artificial Sequence: Synthetic polypeptide"
  MOD_RES (215)..(218): Any amino acid
EIVLTQSPATLSLSPGERATLSCKASKRVTTYVSWYQQKPGQAPRLLIYGASNRYLGIPARFSGSGSGTDFTLTISSLEPEDFAVYYCSQSYNYPYTFGQGTKLEIKRTVAAPSVFIFPPSDEQLKSGTASVVCLLNNFYPREAKVQWKVDNALQSGNSQESVTEQDSKDSTYSLSSTLTLSKADYEKHKVYACEVTHQGLSSPVTKSFNRGECXXXX

SEQ ID NO: 8496 - protein, 109 aa, Artificial Sequence
  source: /note="Description of Artificial Sequence: Synthetic polypeptide"
  MOD_RES (108)..(109): Any amino acid
EIVLTQSPATLSLSPGERATLSCKASKRVTTYVSWYQQKPGQAPRLLIYGASNRYLGIPARFSGSGSGTDFTLTISSLEPEDFAVYYCSQSYNYPYTFGQGTKLEIKXX

SEQ ID NO: 8497 - protein, 219 aa, Artificial Sequence
  source: /note="Description of Artificial Sequence: Synthetic polypeptide"
QVLTQSPSSLSASVGDRVTINCQASQSVYHNTYLAWYQQKPGKVPKQLIYDASTLASGVPSRFSGSGSGTDFTLTISSLQPEDVATYYCLGSYDCTNGDCFVFGGGTKVEIKRTVAAPSVFIFPPSDEQLKSGTASVVCLLNNFYPREAKVQWKVDNALQSGNSQESVTEQDSKDSTYSLSSTLTLSKADYEKHKVYACEVTHQGLSSPVTKSFNRGEC

SEQ ID NO: 8498 - protein, 219 aa, Artificial Sequence
  source: /note="Description of Artificial Sequence: Synthetic polypeptide"
QVLTQTPSPVSAAVGSTVTINCQASQSVYHNTYLAWYQQKPGQPPKQLIYDASTLASGVPSRFSGSGSGTQFTLTISGVQCNDAAAYYCLGSYDCTNGDCFVFGGGTEVVVKRTVAAPSVFIFPPSDEQLKSGTASVVCLLNNFYPREAKVQWKVDNALQSGNSQESVTEQDSKDSTYSLSSTLTLSKADYEKHKVYACEVTHQGLSSPVTKSFNRGEC

SEQ ID NO: 8499 - protein, 219 aa, Artificial Sequence
  source: /note="Description of Artificial Sequence: Synthetic polypeptide"
QVLTQSPSSLSASVGDRVTINCQASQSVYDNNYLAWYQQKPGKVPKQLIYSTSTLASGVPSRFSGSGSGTDFTLTISSLQPEDVATYYCLGSYDCSSGDCFVFGGGTKVEIKRTVAAPSVFIFPPSDEQLKSGTASVVCLLNNFYPREAKVQWKVDNALQSGNSQESVTEQDSKDSTYSLSSTLTLSKADYEKHKVYACEVTHQGLSSPVTKSFNRGEC

SEQ ID NO: 8500 - protein, 113 aa, Artificial Sequence
  source: /note="Description of Artificial Sequence: Synthetic polypeptide"
QVLTQTASPVSAAVGSTVTINCQASQSVYDNNYLAWYQQKPGQPPKQLIYSTSTLASGVSSRFKGSGSGTQFTLTISDLECADAATYYCLGSYDCSSGDCFVFGGGTEVVVKR

SEQ ID NO: 8501 - protein, 219 aa, Artificial Sequence
  source: /note="Description of Artificial Sequence: Synthetic polypeptide"
QVLTQTASPVSAAVGSTVTINCQASQSVYDNNYLAWYQQKPGQPPKQLIYSTSTLASGVSSRFKGSGSGTQFTLTISDLECADAATYYCLGSYDCSSGDCFVFGGGTEVVVKRTVAAPSVFIFPPSDEQLKSGTASVVCLLNNFYPREAKVQWKVDNALQSGNSQESVTEQDSKDSTYSLSSTLTLSKADYEKHKVYACEVTHQGLSSPVTKSFNRGEC

SEQ ID NO: 8502 - protein, 244 aa, Artificial Sequence
  source: /note="Description of Artificial Sequence: Synthetic polypeptide"
  MOD_RES (242)..(244): Any amino acid
MDMRVPAQLLGLLLLWLRGARCDIILAQTPLSLSVTPGQPASISCKSSQSLLHSAGKTYLYWYLQKPGQPPQLLIYEVSNRFSGVPDRFSGSGSGTDFTLKISRVEAEDVGIYYCMQSFPLPLTFGGGTKVEIKRTVAAPSVFIFPPSDEQLKSGTASVVCLLNNFYPREAKVQWKVDNALQSGNSQESVTEQDSKDSTYSLSSTLTLSKADYEKHKVYACEVTHQGLSSPVTKSFNRGECXXX

SEQ ID NO: 8503 - protein, 244 aa, Artificial Sequence
  source: /note="Description of Artificial Sequence: Synthetic polypeptide"
  MOD_RES (242)..(244): Any amino acid
MDMRVPAQLLGLLLLWLRGARCDIILTQTPLSLSVTPGQPASISCKSSQSLLHSDGKTYLYWYLQKPGQPPQLLIYEVSNRFSGEPDRFSGSGSGTDFTLKISRVEAEDVGTYYCMQSFPLPLTFGGGTKVEIKRTVAAPSVFIFPPSDEQLKSGTASVVCLLNNFYPREAKVQWKVDNALQSGNSQESVTEQDSKDSTYSLSSTLTLSKADYEKHKVYACEVTHQGLSSPVTKSFNRGECXXX

SEQ ID NO: 8504 - protein, 239 aa, Artificial Sequence
  source: /note="Description of Artificial Sequence: Synthetic polypeptide"
  MOD_RES (237)..(239): Any amino acid
MDMRVPAQLLGLLLLWLRGARCDIQMTQSPSSLSASVGDRVTITCRASQGIRKDLGWYQQKPGKAPKRLIYGASSLQSGVPSRFSGSGSGTEFTLTISSLQPEDFATYYCLQYNSFPWTFGQGTKVEIKRTVAAPSVFIFPPSDEQLKSGTASVVCLLNNFYPREAKVQWKVDNALQSGNSQESVTEQDSKDSTYSLSSTLTLSKADYEKHKVYACEVTHQGLSSPVTKSFNRGECXXX

SEQ ID NO: 8505 - protein, 239 aa, Artificial Sequence
  source: /note="Description of Artificial Sequence: Synthetic polypeptide"
  MOD_RES (237)..(239): Any amino acid
MDMRVPAQLLGLLLLWLRGARCDIQMTQSPSSLSASVGDRVTITCRASQGIRNDLGWFQQKPGKAPKRLIYAASSLQSGVPSRFSGSGSGTEFTLTISSLQPEDLATYYCLQYNIYPWTFGQGTKVEIKRTVAAPSVFIFPPSDEQLKSGTASVVCLLNNFYPREAKVQWKVDNALQSGNSQESVTEQDSKDSTYSLSSTLTLSKADYEKHKVYACEVTHQGLSSPVTKSFNRGECXXX

SEQ ID NO: 8506 - protein, 244 aa, Artificial Sequence
  source: /note="Description of Artificial Sequence: Synthetic polypeptide"
  MOD_RES (242)..(244): Any amino acid
MDMRVPAQLLGLLLLWLRGARCDITLTQTPLSLSVSPGQPASISCKSSQSLLHSDGRNYLYWYLQKPGQPPQLLIYEVSNRFSGLPDRFSGSGSGTDFTLKISRVEAEDVGIYYCMQSFPLPLTFGGGTKVEIKRTVAAPSVFIFPPSDEQLKSGTASVVCLLNNFYPREAKVQWKVDNALQSGNSQESVTEQDSKDSTYSLSSTLTLSKADYEKHKVYACEVTHQGLSSPVTKSFNRGECXXX

SEQ ID NO: 8507 - protein, 244 aa, Artificial Sequence
  source: /note="Description of Artificial Sequence: Synthetic polypeptide"
  MOD_RES (242)..(244): Any amino acid
MDMRVPAQLLGLLLLWLRGARCDIVMTQSPLSLPVTPGEPASISCRSSQSLLHSFGYNYLDWYLQKPGQSPQLLIYLGSNRASGVPDRFSGSGSGTDFTLKISRVEAEDVGVYYCMQALQTPFTFGPGTKVDIKRTVAAPSVFIFPPSDEQLKSGTASVVCLLNNFYPREAKVQWKVDNALQSGNSQESVTEQDSKDSTYSLSSTLTLSKADYEKHKVYACEVTHQGLSSPVTKSFNRGECXXX

SEQ ID NO: 8508 - protein, 241 aa, Artificial Sequence
  source: /note="Description of Artificial Sequence: Synthetic polypeptide"
  MOD_RES (239)..(241): Any amino acid
MDMRVPAQLLGLLLLWLRGARCQSVLTQPPSASGTPGQRVTISCSGSSSNIGSNTVNWYQQLPGTAPKLLIYTNNQRPSGVPDRFSGSKSGTSASLAISGLQSEDEADFYCAARDESLNGVVFGGGTKLTVLGQPKANPTVTLFPPSSEELQANKATLVCLISDFYPGAVTVAWKADGSPVKAGVETTKPSKQSNNKYAASSYLSLTPEQWKSHRSYSCQVTHEGSTVEKTVAPTECSXXX

SEQ ID NO: 8509 - protein, 241 aa, Artificial Sequence
  source: /note="Description of Artificial Sequence: Synthetic polypeptide"
  MOD_RES (239)..(241): Any amino acid
MDMRVPAQLLGLLLLWLRGARCQSVLTQPPSASGTPGQRVTISCSGSSSNIGSNYVYWYQQLPGAAPKLLIFRNNQRPSGVPDRFSGSKSGTSASLAISGLRSEDEADYYCAAWDDSLSGWVFGGGTKLTVLGQPKANPTVTLFPPSSEELQANKATLVCLISDFYPGAVTVAWKADGSPVKAGVETTKPSKQSNNKYAASSYLSLTPEQWKSHRSYSCQVTHEGSTVEKTVAPTECSXXX

SEQ ID NO: 8510 - protein, 241 aa, Artificial Sequence
  source: /note="Description of Artificial Sequence: Synthetic polypeptide"
  MOD_RES (239)..(241): Any amino acid
MDMRVPAQLLGLLLLWLRGARCQSVLTQPPSASGTPGQRVTISCSGSSSNIGSNYVYWYQQLPGAAPKLLIFRSNQRPSGVPDRFSGSKSGTSASLAISGLRSEDEADYYCAAWDDSLSGWVFGGGTKLTVLGQPKANPTVTLFPPSSEELQANKATLVCLISDFYPGAVTVAWKADGSPVKAGVETTKPSKQSNNKYAASSYLSLTPEQWKSHRSYSCQVTHEGSTVEKTVAPTECSXXX

SEQ ID NO: 8511 - protein, 241 aa, Artificial Sequence
  source: /note="Description of Artificial Sequence: Synthetic polypeptide"
  MOD_RES (239)..(241): Any amino acid
MDMRVPAQLLGLLLLWLRGARCQSVLTQPPSVSAAPGQKVTISCSGSSSNIGNNYVSWYQQFPGTAPKLLIYDNNKRPSGIPDRFSGSKSGTSATLGITGLQTGDEADYYCGTWDSRLSAVVFGGGTKLTVLGQPKANPTVTLFPPSSEELQANKATLVCLISDFYPGAVTVAWKADGSPVKAGVETTKPSKQSNNKYAASSYLSLTPEQWKSHRSYSCQVTHEGSTVEKTVAPTECSXXX

SEQ ID NO: 8512 - protein, 241 aa, Artificial Sequence
  source: /note="Description of Artificial Sequence: Synthetic polypeptide"
  MOD_RES (239)..(241): Any amino acid
MDMRVPAQLLGLLLLWLRGARCQSVLTQPPSVSAAPGQKVTISCSGSSSNIGNNYVSWYQQLPGTAPKLLIYDNNKRPSGIPDRFSGSKSGTSATLGITGLQTGDEADYYCGTWDSRLSAVVFGGGTKLTVLGQPKANPTVTLFPPSSEELQANKATLVCLISDFYPGAVTVAWKADGSPVKAGVETTKPSKQSNNKYAASSYLSLTPEQWKSHRSYSCQVTHEGSTVEKTVAPTECSXXX

SEQ ID NO: 8513 - protein, 241 aa, Artificial Sequence
  source: /note="Description of Artificial Sequence: Synthetic polypeptide"
  MOD_RES (239)..(241): Any amino acid
MDMRVPAQLLGLLLLWLRGARCQSVLTQPPSVSAAPGQKVTISCSGSSSNIGNNYVSWYQQLPGTAPKLLIYDNNKRPSGIPDRFSGSKSGTSTTLGITGLQTGDEADYYCGTWDSRLSAVVFGGGTKLTVLGQPKANPTVTLFPPSSEELQANKATLVCLISDFYPGAVTVAWKADGSPVKAGVETTKPSKQSNNKYAASSYLSLTPEQWKSHRSYSCQVTHEGSTVEKTVAPTECSXXX

SEQ ID NO: 8514 - protein, 241 aa, Artificial Sequence
  source: /note="Description of Artificial Sequence: Synthetic polypeptide"
  MOD_RES (239)..(241): Any amino acid
MDMRVPAQLLGLLLLWLRGARCQSVLTQPPSVSEAPGQKVTISCSGSSSNIGNNYVSWYQQLPGTAPKLLIYDNNKRPSGIPDRFSGSKSGTSATLGITGLQTGDEADYYCGTWDSRLSAVVFGGGTKLTVLGQPKANPTVTLFPPSSEELQANKATLVCLISDFYPGAVTVAWKADGSPVKAGVETTKPSKQSNNKYAASSYLSLTPEQWKSHRSYSCQVTHEGSTVEKTVAPTECSXXX

SEQ ID NO: 8515 - protein, 241 aa, Artificial Sequence
  source: /note="Description of Artificial Sequence: Synthetic polypeptide"
  MOD_RES (239)..(241): Any amino acid
MDMRVPAQLLGLLLLWLRGARCQSVLTQSPSASGTPGQRVTISCSGSSSNIGSNYVYWYQQLPGAAPKLLILRNNQRPSGVPDRFSGSKSGTSASLTISGLRSEDEADYYCAAWDDSLSGWVFGGGTKLTVLGQPKANPTVTLFPPSSEELQANKATLVCLISDFYPGAVTVAWKADGSPVKAGVETTKPSKQSNNKYAASSYLSLTPEQWKSHRSYSCQVTHEGSTVEKTVAPTECSXXX

SEQ ID NO: 8516 - protein, 239 aa, Artificial Sequence
  source: /note="Description of Artificial Sequence: Synthetic polypeptide"
  MOD_RES (237)..(239): Any amino acid
MDMRVPAQLLGLLLLWLRGARCSSELTQDPTVSVALGQTVKITCQGDSLRSFYASWYQQKPGQAPVLVFYGKNNRPSGIPDRFSGSSSGNTASLTITGAQAEDEADYYCNSRDSSVYHLVLGGGTKLTVLGQPKANPTVTLFPPSSEELQANKATLVCLISDFYPGAVTVAWKADGSPVKAGVETTKPSKQSNNKYAASSYLSLTPEQWKSHRSYSCQVTHEGSTVEKTVAPTECSXXX

SEQ ID NO: 8517 - protein, 238 aa, Artificial Sequence
  source: /note="Description of Artificial Sequence: Synthetic polypeptide"
  MOD_RES (236)..(238): Any amino acid
METPAQLLFLLLLWLPDTTGEIVLTQSPGTLSLSPGERATLSCRASQSVSSGYLTWYQQKPGQAPRLLIYGASSRATGIPDRFSGSGSGTDFTLTISRLEPEDFAVYYCQQYGNSLCRFGQGTKLEIKRTVAAPSVFIFPPSDEQLKSGTASVVCLLNNFYPREAKVQWKVDNALQSGNSQESVTEQDSKDSTYSLSSTLTLSKADYEKHKVYACEVTHQGLSSPVTKSFNRGECXXX

SEQ ID NO: 8518 - protein, 238 aa, Artificial Sequence
  source: /note="Description of Artificial Sequence: Synthetic polypeptide"
  MOD_RES (236)..(238): Any amino acid
METPAQLLFLLLLWLPDTTGEIVLTQSPGTLSLSPGERATLSCRASQSVSSGYLTWYQQKPGQAPRLLIYGASSRATGIPDRFSGSGSGTDFTLTISRLEPEDFAVYYCQQYGNSLSRFGQGTKLEIKRTVAAPSVFIFPPSDEQLKSGTASVVCLLNNFYPREAKVQWKVDNALQSGNSQESVTEQDSKDSTYSLSSTLTLSKADYEKHKVYACEVTHQGLSSPVTKSFNRGECXXX

SEQ ID NO: 8519 - protein, 214 aa, Artificial Sequence
  source: /note="Description of Artificial Sequence: Synthetic polypeptide"
EIVLTQSPATLSLSPGERATLSCKASKRVTTYVSWYQQKPGQAPRLLIYGASNRYLGIPARFSGSGSGTDFTLTISSLEPEDFAVYYCSQSYNYPYTFGQGTKLEIKRTVAAPSVFIFPPSDEQLKSGTASVVCLLNNFYPREAKVQWKVDNALQSGNSQESVTEQDSKDSTYSLSSTLTLSKADYEKHKVYACEVTHQGLSSPVTKSFNRGEC

SEQ ID NO: 8520 - protein, 222 aa, Artificial Sequence
  source: /note="Description of Artificial Sequence: Synthetic polypeptide"
  MOD_RES (220)..(222): Any amino acid
AIVMTQTPSSKSVPVGDTVTINCQASESLYNNNALAWFQQKPGQPPKRLIYDASKLASGVPSRFSGGGSGTQFTLTISGVQCDDAATYYCGGYRSDSVDGVAFAGGTEVVVKRTVAAPSVFIFPPSDEQLKSGTASVVCLLNNFYPREAKVQWKVDNALQSGNSQESVTEQDSKDSTYSLSSTLTLSKADYEKHKVYACEVTHQGLSSPVTKSFNRGECXXX

SEQ ID NO: 8521 - protein, 198 aa, Artificial Sequence
  source: /note="Description of Artificial Sequence: Synthetic polypeptide"
ERATLSCKASKRVTTYVSWYQQKPGQAPRLLIYGASNRYLGIPARFSGSGSGTDFTLTISSLEPEDFAVYYCSQSYNYPYTFGQGTKLEIKRTVAAPSVFIFPPSDEQLKSGTASVVCLLNNFYPREAKVQWKVDNALQSGNSQESVTEQDSKDSTYSLSSTLTLSKADYEKHKVYACEVTHQGLSSPVTKSFNRGEC

SEQ ID NO: 8522 - protein, 222 aa, Artificial Sequence
  source: /note="Description of Artificial Sequence: Synthetic polypeptide"
  MOD_RES (220)..(222): Any amino acid
QVLTQSPSSLSASVGDRVTINCQASQNVYNNNYLAWYQQKPGKVPKQLIYSTSTLASGVPSRFSGSGSGTDFTLTISSLQPEDVATYYCLGSYDCSRGDCFVFGGGTKVEIKRTVAAPSVFIFPPSDEQLKSGTASVVCLLNNFYPREAKVQWKVDNALQSGNSQESVTEQDSKDSTYSLSSTLTLSKADYEKHKVYACEVTHQGLSSPVTKSFNRGECXXX

SEQ ID NO: 8523 - protein, 116 aa, Artificial Sequence
  source: /note="Description of Artificial Sequence: Synthetic polypeptide"
  MOD_RES (114)..(116): Any amino acid
QVLTQSPSSLSASVGDRVTINCQASQNVYNNNYLAWYQQKPGKVPKQLIYSTSTLASGVPSRFSGSGSGTDFTLTISSLQPEDVATYYCLGSYDCSRGDCFVFGGGTKVEIKRXXX

SEQ ID NO: 8524 - protein, 222 aa, Artificial Sequence
  source: /note="Description of Artificial Sequence: Synthetic polypeptide"
  MOD_RES (220)..(222): Any amino acid
QVLTQSPSSLSASVGDRVTINCQASQSVYDNNYLAWYQQKPGKVPKQLIYSTSTLASGVPSRFSGSGSGTDFTLTISSLQPEDVATYYCLGSYDCSSGDCFVFGGGTKVEIKRTVAAPSVFIFPPSDEQLKSGTASVVCLLNNFYPREAKVQWKVDNALQSGNSQESVTEQDSKDSTYSLSSTLTLSKADYEKHKVYACEVTHQGLSSPVTKSFNRGECXXX

SEQ ID NO: 8525 - protein, 116 aa, Artificial Sequence
  source: /note="Description of Artificial Sequence: Synthetic polypeptide"
  MOD_RES (114)..(116): Any amino acid
QVLTQSPSSLSASVGDRVTINCQASQSVYDNNYLAWYQQKPGKVPKQLIYSTSTLASGVPSRFSGSGSGTDFTLTISSLQPEDVATYYCLGSYDCSSGDCFVFGGGTKVEIKRXXX

SEQ ID NO: 8526 - protein, 222 aa, Artificial Sequence
  source: /note="Description of Artificial Sequence: Synthetic polypeptide"
  MOD_RES (220)..(222): Any amino acid
QVLTQSPSSLSASVGDRVTINCQASQSVYHNTYLAWYQQKPGKVPKQLIYDASTLASGVPSRFSGSGSGTDFTLTISSLQPEDVATYYCLGSYDCTNGDCFVFGGGTKVEIKRTVAAPSVFIFPPSDEQLKSGTASVVCLLNNFYPREAKVQWKVDNALQSGNSQESVTEQDSKDSTYSLSSTLTLSKADYEKHKVYACEVTHQGLSSPVTKSFNRGECXXX

SEQ ID NO: 8527 - protein, 116 aa, Artificial Sequence
  source: /note="Description of Artificial Sequence: Synthetic polypeptide"
  MOD_RES (114)..(116): Any amino acid
QVLTQSPSSLSASVGDRVTINCQASQSVYHNTYLAWYQQKPGKVPKQLIYDASTLASGVPSRFSGSGSGTDFTLTISSLQPEDVATYYCLGSYDCTNGDCFVFGGGTKVEIKRXXX

SEQ ID NO: 8528 - protein, 222 aa, Artificial Sequence
  source: /note="Description of Artificial Sequence: Synthetic polypeptide"
  MOD_RES (220)..(222): Any amino acid
QVLTQSPSSLSASVGDRVTINCQASQSVYNYNYLAWYQQKPGKVPKQLIYSTSTLASGVPSRFSGSGSGTDFTLTISSLQPEDVATYYCLGSYDCSTGDCFVFGGGTKVEIKRTVAAPSVFIFPPSDEQLKSGTASVVCLLNNFYPREAKVQWKVDNALQSGNSQESVTEQDSKDSTYSLSSTLTLSKADYEKHKVYACEVTHQGLSSPVTKSFNRGECXXX

SEQ ID NO: 8529 - protein, 116 aa, Artificial Sequence
  source: /note="Description of Artificial Sequence: Synthetic polypeptide"
  MOD_RES (114)..(116): Any amino acid
QVLTQSPSSLSASVGDRVTINCQASQSVYNYNYLAWYQQKPGKVPKQLIYSTSTLASGVPSRFSGSGSGTDFTLTISSLQPEDVATYYCLGSYDCSTGDCFVFGGGTKVEIKRXXX

SEQ ID NO: 8530 - protein, 222 aa, Artificial Sequence
  source: /note="Description of Artificial Sequence: Synthetic polypeptide"
  MOD_RES (220)..(222): Any amino acid
QVLTQSPSSLSASVGDRVTINCRASQSVYYNNYLAWYQQKPGKVPKQLIYSTSTLASGVPSRFSGSGSGTDFTLTISSLQPEDVATYYCLGSYDCSNGDCFVFGGGTKVEIKRTVAAPSVFIFPPSDEQLKSGTASVVCLLNNFYPREAKVQWKVDNALQSGNSQESVTEQDSKDSTYSLSSTLTLSKADYEKHKVYACEVTHQGLSSPVTKSFNRGECXXX

SEQ ID NO: 8531 - protein, 222 aa, Artificial Sequence
  source: /note="Description of Artificial Sequence: Synthetic polypeptide"
  MOD_RES (220)..(222): Any amino acid
QVLTQTASPVSAAVGSTVTINCQASQSVYDNNYLAWYQQKPGQPPKQLIYSTSTLASGVSSRFKGSGSGTQFTLTISDLECADAATYYCLGSYDCSSGDCFVFGGGTEVVVKRTVAAPSVFIFPPSDEQLKSGTASVVCLLNNFYPREAKVQWKVDNALQSGNSQESVTEQDSKDSTYSLSSTLTLSKADYEKHKVYACEVTHQGLSSPVTKSFNRGECXXX

SEQ ID NO: 8532 - protein, 116 aa, Artificial Sequence
  source: /note="Description of Artificial Sequence: Synthetic polypeptide"
  MOD_RES (114)..(116): Any amino acid
QVLTQTASPVSAAVGSTVTINCQASQSVYDNNYLAWYQQKPGQPPKQLIYSTSTLASGVSSRFKGSGSGTQFTLTISDLECADAATYYCLGSYDCSSGDCFVFGGGTEVVVKRXXX

SEQ ID NO: 8533 - protein, 222 aa, Artificial Sequence
  source: /note="Description of Artificial Sequence: Synthetic polypeptide"
  MOD_RES (220)..(222): Any amino acid
QVLTQTASPVSAAVGSTVTINCQASQSVYNYNYLAWYQQKPGQPPKQLIYSTSTLASGVSSRFKGSGSGTQFTLTISDVQCDDAATYYCLGSYDCSTGDCFVFGGGTEVVVKRTVAAPSVFIFPPSDEQLKSGTASVVCLLNNFYPREAKVQWKVDNALQSGNSQESVTEQDSKDSTYSLSSTLTLSKADYEKHKVYACEVTHQGLSSPVTKSFNRGECXXX

SEQ ID NO: 8534 - protein, 116 aa, Artificial Sequence
  source: /note="Description of Artificial Sequence: Synthetic polypeptide"
  MOD_RES (114)..(116): Any amino acid
QVLTQTASPVSAAVGSTVTINCQASQSVYNYNYLAWYQQKPGQPPKQLIYSTSTLASGVSSRFKGSGSGTQFTLTISDVQCDDAATYYCLGSYDCSTGDCFVFGGGTEVVVKRXXX

SEQ ID NO: 8535 - protein, 222 aa, Artificial Sequence
  source: /note="Description of Artificial Sequence: Synthetic polypeptide"
  MOD_RES (220)..(222): Any amino acid
QVLTQTASPVSPAVGSTVTINCRASQSVYYNNYLAWYQQKPGQPPKQLIYSTSTLASGVSSRFKGSGSGTQFTLTISDVQCDDAATYYCLGSYDCSNGDCFVFGGGTEVVVKRTVAAPSVFIFPPSDEQLKSGTASVVCLLNNFYPREAKVQWKVDNALQSGNSQESVTEQDSKDSTYSLSSTLTLSKADYEKHKVYACEVTHQGLSSPVTKSFNRGECXXX

SEQ ID NO: 8536 - protein, 222 aa, Artificial Sequence
  source: /note="Description of Artificial Sequence: Synthetic polypeptide"
  MOD_RES (220)..(222): Any amino acid
QVLTQTPSPVSAAVGSTVTINCQASQNVYNNNYLAWYQQKPGQPPKQLIYSTSTLASGVSSRFRGSGSGTQFTLTISDVQCDDAATYYCLGSYDCSRGDCFVFGGGTEVVVKRTVAAPSVFIFPPSDEQLKSGTASVVCLLNNFYPREAKVQWKVDNALQSGNSQESVTEQDSKDSTYSLSSTLTLSKADYEKHKVYACEVTHQGLSSPVTKSFNRGECXXX

SEQ ID NO: 8537 - protein, 222 aa, Artificial Sequence
  source: /note="Description of Artificial Sequence: Synthetic polypeptide"
  MOD_RES (220)..(222): Any amino acid
QVLTQTPSPVSAAVGSTVTINCQASQSVYHNTYLAWYQQKPGQPPKQLIYDASTLASGVPSRFSGSGSGTQFTLTISGVQCNDAAAYYCLGSYDCTNGDCFVFGGGTEVVVKRTVAAPSVFIFPPSDEQLKSGTASVVCLLNNFYPREAKVQWKVDNALQSGNSQESVTEQDSKDSTYSLSSTLTLSKADYEKHKVYACEVTHQGLSSPVTKSFNRGECXXX

SEQ ID NO: 8538 - protein, 116 aa, Artificial Sequence
  source: /note="Description of Artificial Sequence: Synthetic polypeptide"
  MOD_RES (114)..(116): Any amino acid
QVLTQTPSPVSAAVGSTVTINCQASQSVYHNTYLAWYQQKPGQPPKQLIYDASTLASGVPSRFSGSGSGTQFTLTISGVQCNDAAAYYCLGSYDCTNGDCFVFGGGTEVVVKRXXX

SEQ ID NO: 8539 - protein, 105 aa, Homo sapiens [sequence omitted]

SEQ ID NO: 8540 - protein, 238 aa, Artificial Sequence
  source: /note="Description of Artificial Sequence: Synthetic polypeptide"
MDMRVPAQLLGLLLLWLRGARCQSVLTQPPSASGTPGQRVTISCSGSSSNIGSNTVNWYQQLPGTAPKLLIYTNNQRPSGVPDRFSGSKSGTSASLAISGLQSEDEADFYCAARDESLNGVVFGGGTKLTVLGQPKANPTVTLFPPSSEELQANKATLVCLISDFYPGAVTVAWKADGSPVKAGVETTKPSKQSNNKYAASSYLSLTPEQWKSHRSYSCQVTHEGSTVEKTVAPTECS

SEQ ID NO: 8541 - protein, 238 aa, Artificial Sequence
  source: /note="Description of Artificial Sequence: Synthetic polypeptide"
MDMRVPAQLLGLLLLWLRGARCQSVLTQPPSVSAAPGQKVTISCSGSSSNIGNNYVSWYQQLPGTAPKLLIYDNNKRPSGIPDRFSGSKSGTSATLGITGLQTGDEADYYCGTWDSRLSAVVFGGGTKLTVLGQPKANPTVTLFPPSSEELQANKATLVCLISDFYPGAVTVAWKADGSPVKAGVETTKPSKQSNNKYAASSYLSLTPEQWKSHRSYSCQVTHEGSTVEKTVAPTECS

SEQ ID NO: 8542 - protein, 238 aa, Artificial Sequence
  source: /note="Description of Artificial Sequence: Synthetic polypeptide"
MDMRVPAQLLGLLLLWLRGARCQSVLTQPPSVSAAPGQKVTISCSGSSSNIGNNYVSWYQQLPGTAPKLLIYDNNKRPSGIPDRFSGSKSGTSTTLGITGLQTGDEADYYCGTWDSRLSAVVFGGGTKLTVLGQPKANPTVTLFPPSSEELQANKATLVCLISDFYPGAVTVAWKADGSPVKAGVETTKPSKQSNNKYAASSYLSLTPEQWKSHRSYSCQVTHEGSTVEKTVAPTECS

SEQ ID NO: 8543 - protein, 238 aa, Artificial Sequence
  source: /note="Description of Artificial Sequence: Synthetic polypeptide"
MDMRVPAQLLGLLLLWLRGARCQSVLTQSPSASGTPGQRVTISCSGSSSNIGSNYVYWYQQLPGAAPKLLILRNNQRPSGVPDRFSGSKSGTSASLTISGLRSEDEADYYCAAWDDSLSGWVFGGGTKLTVLGQPKANPTVTLFPPSSEELQANKATLVCLISDFYPGAVTVAWKADGSPVKAGVETTKPSKQSNNKYAASSYLSLTPEQWKSHRSYSCQVTHEGSTVEKTVAPTECS

SEQ ID NO: 8544 - protein, 236 aa, Artificial Sequence
  source: /note="Description of Artificial Sequence: Synthetic polypeptide"
MDMRVPAQLLGLLLLWLRGARCSSELTQDPTVSVALGQTVKITCQGDSLRSFYASWYQQKPGQAPVLVFYGKNNRPSGIPDRFSGSSSGNTASLTITGAQAEDEADYYCNSRDSSVYHLVLGGGTKLTVLGQPKANPTVTLFPPSSEELQANKATLVCLISDFYPGAVTVAWKADGSPVKAGVETTKPSKQSNNKYAASSYLSLTPEQWKSHRSYSCQVTHEGSTVEKTVAPTECS

SEQ ID NO: 8545 - DNA, 723 bp, Artificial Sequence
  source: /note="Description of Artificial Sequence: Synthetic polynucleotide"
atggacatgagggtgcccgctcagctcctggggctcctgctgctgtggctgagaggtgcgcgctgtgatattatactggcccagactccactttctctgtccgtcacccctggacagccggcctccatctcctgcaagtctagtcagagcctcctgcacagtgctggaaagacctatttgtattggtacctgcagaagccaggccagcctccacagctcctgatctatgaagtttccaaccggttctctggagtgccagataggttcagtggcagcgggtcagggacagatttcacactgaaaatcagccgggtggaggctgaggatgttgggatttattactgcatgcaaagttttccgcttccgctcactttcggcggagggaccaaggtggagatcaaacgtacggtggctgcaccatctgtcttcatcttcccgccatctgatgagcagttgaaatctggaactgcctctgttgtgtgcctgctgaataacttctatcccagagaggccaaagtacagtggaaggtggataacgccctccaatcgggtaactcccaggagagtgtcacagagcaggacagcaaggacagcacctacagcctcagcagcaccctgacgctgagcaaagcagactacgagaaacacaaagtctacgcctgcgaagtcacccatcagggcctgagctcgcccgtcacaaagagcttcaacaggggagagtgt

SEQ ID NO: 8546 - DNA, 354 bp, Artificial Sequence
  source: /note="Description of Artificial Sequence: Synthetic polynucleotide"
cagatcaccttaaaggagtctggtcctacgctggtgaaacccacacagaccctcacgctgacctgcaccttctctgggttctcactcagcactagtggtgtgggtgtggcctggatccgtcagccccccggaaaggccctggagtggcttgcactcatttattggactgatgataagcgctacagtccatctctgaagagcaggctcaccatcaccaaggacacctccaagaaccaggtggtccttagaatgaccaacatggaccctttggacacagccacttatttctgtgcacacagaccagggggctggttcgacccctggggccagggaaccctggtcaccgtctctagt

SEQ ID NO: 8547 - DNA, 381 bp, Artificial Sequence
  source: /note="Description of Artificial Sequence: Synthetic polynucleotide"
caggtgcagctggtgcagtctggggctgaggtgaagaagcctggggcctcagtgaaggtctcctgcaaggcttctggatacaccttcaccgactactatatgtactgggtgcgacaggcccctggacaagggcttgagtggatgggatggatcagccctaatagtggtggcacaaactatgcccagaagtttcagggcagggtcaccatgaccagggacacgtctatcagcacagcctacatggagctgagtaggctgagatctgacgacacggccgtgtattactgtgtgagaggaggatatagtggctacgctgggctctactcccactactacggtatggacgtctggggccaagggaccacggtcaccgtctctagt

SEQ ID NO: 8548 - DNA, 354 bp, Artificial Sequence
  source: /note="Description of Artificial Sequence: Synthetic polynucleotide"
caggtgcagctggtgcagtctggggctgaggtgaagaagcctggggcctcagtgaaggtctcctgcaaggcttctggatacaccttcaccgcctactatttacactgggtgcgacaggcccctggacaagggcttgagtggatgggatggatcaaccctcacagtggtggcacaaactatgcacagaagtttcagggcagggtcaccatgaccagggacacgtccatcagcacagcctacatggagctgagcaggctgagatctgacgacacggccgtgttctactgtgcgagaggaaggcagtggctgggctttgactactggggccagggaaccctggtcaccgtctctagt

SEQ ID NO: 8549 - DNA, 390 bp, Artificial Sequence
  source: /note="Description of Artificial Sequence: Synthetic polynucleotide"
caggtgcagctggtggaatctgggggaggcgtggtccagcctgggaggtccctgagactctcctgtgcagcctctggattcaccttcagtagctttggcatgcactgggtccgccaggctccaggcaaggggctggagtgggtggcagttatatcatttgatggaagtattaagtattctgtagactccgtgaagggccgattcaccatctccagagacaattcaaagaacacgctgtttctgcaaatgaacagcctgcgagccgaggacacggctgtgtattactgtgcgagagatcggctcaattactatgatagtagtggttattatcactacaaatactacggtatggccgtctggggccaagggaccacggtcaccgtctctagt

SEQ ID NO: 8550 - DNA, 390 bp, Artificial Sequence
  source: /note="Description of Artificial Sequence: Synthetic polynucleotide"
caggtgcagctggtggaatctgggggaggcgtggtccagcctgggaggtccctgagactctcctgtgcagcctctggattcaccttcagtagctttggcatgcattgggtccgccaggctccaggcaaggggctggagtgggtggcagttatatcatttgatggaagtattaagtactctgtagactccgtgaagggccgattcaccatctccagagacaattcaaagaacacgctgtttctgcaaatgaacagcctgcgagccgaggacacggctgtgtattactgtgcgagagatcggctcaattactatgatagtagtggttattatcactacaaatactacggtctggccgtctggggccaagggaccacggtcaccgtctctagt

SEQ ID NO: 8551 - DNA, 387 bp, Artificial Sequence
  source: /note="Description of Artificial Sequence: Synthetic polynucleotide"
caggtgcagctggtggagtctgggggaggcgtggtccagcctgggaggtccctgagactctcctgtgcagcctctggattcaccttcagtagctatggcatgcactgggtccgccaggctccaggcaaggggctggagtgggtggcagttatttcatatgatggaagtcatgaatcctatgcagactccgtgaagggccgattcaccatctccagagacatttccaagaacacgctgtatctgcaaatgaacagcctgagagctgaggacacggctgtgtatttctgtgcgagagagaggaaacgggttacgatgtctaccttatattactacttctactacggtatggacgtctggggccaagggaccacggtcaccgtctctagt

SEQ ID NO: 8552 - DNA, 378 bp, Artificial Sequence
  source: /note="Description of Artificial Sequence: Synthetic polynucleotide"
caggtgcagctggtggagtctgggggaggcgtggtccagcctgggaggtccctgagactctcctgtgcagcgtctggattcaccttcagtagctatggcatgcactgggtccgccaggctccaggcaaggggctggagtgggtggcagttatatggtatgatggaagtaataaatactatgcagactccgtgaagggccgattcatcatctccagagataaatccaagaacacgctgtatctgcaaatgaacagcctgagagccgaggacacggctgtgtattactgtgcgagagcggggggtatagcagcagctggcctctactactactacggtatggacgtctggggccaagggaccacggtcaccgtctctagt

SEQ ID NO: 8553 - DNA, 351 bp, Artificial Sequence
  source: /note="Description of Artificial Sequence: Synthetic polynucleotide"
caggtgcagttacagcagtggggcgcaggactgttgaagccttcggagaccctgtccctcagctgcgctgtctatggtgggtccttcggtggttactactggagctggatccgccagcccccagggaaggggctggagtggattggggaaatcaatcatagtggaggcaccaagtacaacccgtccctcaagagtcgagtcaccatatcagtagacacgtccaagaaccagttctccctgaagctgagctctgtgaccgccgcggacacggctgtgtatttctgtgcgagaggcgatgtagtaggtttctttgactattggggccagggaaccctggtcaccgtctctagt

SEQ ID NO: 8554 - DNA, 390 bp, Artificial Sequence
  source: /note="Description of Artificial Sequence: Synthetic polynucleotide"
caggtgcagttggtgcagtctggggctgaggtgaagaagcctggggcctcagtgaaggtctcctgcaaggcttctggatacaccttcaccggctactatatgcactgggtgcgacaggcccctggacaagggcttgagtggatgggatggatcaaccctaacagtggtggcacaaactatgcacagaagtttcagggcagggtcaccatgaccagggacacgtccatcagcacagcctacatggagctgagcaggctgagatctgacgacacggccgtgtatttctgtgcgagagatcaaatgagtattattatgcttcggggagtttttcccccttactattacggtatggacgtctggggccaagggaccacggtcaccgtctctagt

SEQ ID NO: 8555 - DNA, 321 bp, Artificial Sequence
  source: /note="Description of Artificial Sequence: Synthetic polynucleotide"
gacatccagatgacccagtctccatcctccctgtctgcatctgtaggagacagagttaccattacttgccgggcaagtcagggcattagaaatgatttaggctggtatcagcagaaaccagggaaagcccctaagcgcctgatctatgttgcatccagtttgcaaagtggggtcccatcaaggttcagcggcagtggatctgggacagaattcactctcacaatcagcagcctgcagcctgaagattttgcaacttattactgtctacagtataacacttacccgctcactttcggcggagggaccaaggtggagatcaag

SEQ ID NO: 8556 - DNA, 393 bp, Artificial Sequence
  source: /note="Description of Artificial Sequence: Synthetic polynucleotide"
gaggtacagctggtggagtctgggggaggcttggtaaagcctggggggtccctcagactctcctgtgcagcctctggattcactttcggtaacgcctggatgagctgggtccgccaggctccagggaaggggctggagtgggttggccgtattaaaagcaaaactgatggtgggacaacagactacgctgcacccgtgaaaggcagattcaccatctcaagagatgattcaaaaaacacgctgtatctgcaaatgaacagcctgaaaaccgaggacacagccgtgtatttctgtaccacagatcggaccgggtatagcatcagctggtctagttactactactactacggtatggacgtctggggccaagggaccacggtcaccgtctctagt

SEQ ID NO: 8557 - DNA, 393 bp, Artificial Sequence
  source: /note="Description of Artificial Sequence: Synthetic polynucleotide"
gaggtacagctggtggagtctgggggaggcttggtaaagcctggggggtcccttagactctcctgtgcagcctctggattcactttcggtaacgcctggatgagctgggtccgccaggctccagggaaggggctggagtgggttggccgtattaaaagcaaaactgatggtgggacaacagactacgctgcacccgtgaaaggcagattcaccatctcaagagatgattcaaaaaacacgctgtatctgcaaatgaacagcctgaaaaccgaggacacagccgtgtattactgtaccacagatcggaccgggtatagcatcagctggtctagttactactactactacggtatggacgtctggggccaagggaccacggtcaccgtctctagt

SEQ ID NO: 8558 - DNA, 390 bp, Artificial Sequence
  source: /note="Description of Artificial Sequence: Synthetic polynucleotide"
gaggtgcagctattggagtctgggggaggcttggtacagcctggggagtccctgagactctcctgtgcagcctctgggttcacctttagcagctatgccatgagctgggtccgccaggctccagggaaggggctggagtgggtctcagctattagtggtagtggtggtcgcacatactacgcagactccgtgaagggccggttcaccatctccagagacaattccaagaacacgctgtatctgcaaatgaatagcctgagagccgaggacacggccgtatattactgtgcgaaagatcaaagggaggtagggccgtatagcagtggctggtacgactactactacggtatggacgtctggggccaagggaccacggtcaccgtctctagt

SEQ ID NO: 8559 - DNA, 393 bp, Artificial Sequence
  source: /note="Description of Artificial Sequence: Synthetic polynucleotide"
gaggtgcagctggtggagtctgggggaggcctggtcaagcctggggggtccctgagactctcctgtgcagcctctggatacaccttcagtacctatagcatgaactgggtccgccaggctccagggaaggggctggagtgggtctcatccattagtagtagtagtagttacagatattacgcagactcagtgaagggccgattcaccatctccagagacaacgccaagaactcactgtatctgcaaatgagtagcctgagagccgaggacacggctgtgtattactgtgcgagagaaggggtgtctggcagttcgccgtatagcatcagctggtacgactactattacggtatggacgtctggggccaagggaccacggtcaccgtctctagt

SEQ ID NO: 8560 - DNA, 363 bp, Artificial Sequence
  source: /note="Description of Artificial Sequence: Synthetic polynucleotide"
gaggtgcagctggtggagtctgggggaggcttggtaaagccagggcggtccctgagactctcctgtacagcttctggattcacctttggtgattatgctatgagctggttccgccaggctccagggaaggggctggagtggataggtttcattagaagcagagcttatggtgggacaccagaatacgccgcgtctgtgaaaggcagattcaccatctcaagagatgattccaaaaccatcgcctatctgcaaatgaacagcctgaaaaccgaggacacagccgtgtatttctgtgctagaggacggggtattgcagctcgttgggactactggggccagggaaccctggtcaccgtctctagt

SEQ ID NO: 8561 - DNA, 393 bp, Artificial Sequence
  source: /note="Description of Artificial Sequence: Synthetic polynucleotide"
gaggtgcagctggtggagtctgggggaggcttggtaaagcctggggggtcccttagactctcctgtgcagcctctggattcactttcagtaacgcctggatgagctgggtccgccaggctccagggaaggggctggagtgggttggccgtattaaaagcaaaactgatggtgggacaacagactacactgcacccgtgaaaggcagattcaccatctcaagagatgattcaaaaaacacgctgtatctgcaaatgaatagcctgaaagccgaggacacagccgtgtattactgtaccacagatcggaccgggtatagcatcagctggtctagttactactactactacggtatggacgtctggggccaagggaccacggtcaccgtctctagt

SEQ ID NO: 8562 - DNA, 393 bp, Artificial Sequence
  source: /note="Description of Artificial Sequence: Synthetic polynucleotide"
gaggtgcagctggtggagtctgggggaggcttggtaaagcctggggggtcccttagactctcctgtgcagcctctggattcactttcagtaacgcctggatgagctgggtccgccaggctccagggaaggggctggagtgggttggccgtattaaaagcacaactgatggtgggacaacagactacgctgcacccgtgaaaggcagattcaccatctcaagagatgattcaaaaaacacgctgtatctgcaaatgaacagcctgaaaaccgaggacacagccgtgtattactgtaccacagatcggaccggatatagcatcagctggtctagttactactactactacggtatggacgtctggggccaagggaccacggtcaccgtctctagt

SEQ ID NO: 8563 - DNA, 330 bp, Artificial Sequence
  source: /note="Description of Artificial Sequence: Synthetic polynucleotide"
caggagcagctgaaggagtccgggggtcgcctggtcacgcctgggacatccctgacactcacctgcaccgtctctggaatcgacctcagtaaccactacatgcaatgggtccgccaggctccagggaaggggctggagtggatcggagtcgttggtattaatggtcgcacatactacgcgagctgggcgaaaggccgattcaccatctccagaacctcgtcgaccacggtggatctgaaaatgaccaggctgacaaccgaggacacggccacctatttctgtgccagaggggacatctggggcccaggcaccctggtcaccgtctcgagc

SEQ ID NO: 8564 - DNA, 327 bp, Artificial Sequence
  source: /note="Description of Artificial Sequence: Synthetic polynucleotide"
cagtcgctggaggagtccgggggtcgcctggtcacgcctggaggatccctgacactcacctgcacagtctctggaatcgacgtcactaactactatatgcaatgggtccgccaggctccagggaaggggctggaatggatcggagtcattggtgtgaatggtaagagatactacgcgagctgggcgaaaggccgattcaccatctccaaaacctcgtcgaccacggtggatctgaaaatgaccagtctgacaaccgaggacacggccacctatttctgtgccagaggcgacatctggggcccggggaccctcgtcaccgtctcgagc

SEQ ID NO: 8565 - DNA, 327 bp, Artificial Sequence
  source: /note="Description of Artificial Sequence: Synthetic polynucleotide"
cagtcgctggaggagtccgggggtcgcctggtcacgcctgggacacccctgacactcacctgcacagtctctggaatcggcctcagtagctactacatgcagtgggtccgccagtctccagggagggggctggaatggatcggagtcattggtagtgatggtaagacatactacgcgacctgggcgaaaggccgattcaccatctccaagacctcgtcgaccacggtggatctgagaatggccagtctgacaaccgaggacacggccacctatttctgtaccagaggggacatctggggcccggggaccctcgtcaccgtctcgagc

SEQ ID NO: 8566 - DNA, 333 bp, Artificial Sequence
  source: /note="Description of Artificial Sequence: Synthetic polynucleotide"
cagtcggtggaggagtccgggggaggcctggtccagcctgagggatccctgacactcacctgcacagcctctggattcgacttcagtagcaatgcaatgtggtgggtccgccaggctccagggaaggggctggagtggatcggatgcatttacaatggtgatggcagcacatactacgcgagctgggtgaatggccgattctccatctccaaaacctcgtcgaccacggtgactctgcaactgaatagtctgacagtcgcggacacggccacgtattattgtgcgagagatcttgacttgtggggcccgggcaccctcgtcaccgtctcgagc

SEQ ID NO: 8567 - DNA, 333 bp, Artificial Sequence
  source: /note="Description of Artificial Sequence: Synthetic polynucleotide"
gaggtgcagcttgtggagtctgggggaggcttggtccagcctggggggtccctgagactctcctgtgcagtctctggaatcgacctcagtggctactacatgaactgggtccgtcaggctccagggaaggggctggagtgggtcggagtcattggtattaatggtgccacatactacgcgagctgggcgaaaggccgattcaccatctccagagacaattccaagaccacggtgtatcttcaaatgaacagcctgagagctgaggacactgctgtgtatttctgtgctagaggggacatctggggccaagggaccctcgtcaccgtctcgagc

SEQ ID NO: 8568 - DNA, 333 bp, Artificial Sequence
  source: /note="Description of Artificial Sequence: Synthetic polynucleotide"
gaggtgcagcttgtggagtctgggggaggcttggtccagcctggggggtccctgagactctcctgtgcagtctctggaatcgacgtcactaactactacatgcaatgggtccgtcaggctccagggaaggggctggagtgggtcggagtcattggtgtgaatggtaagagatactacgcgagctgggcgaaaggccgattcaccatctccagagacaattccaagaccacggtgtatcttcaaatgaacagcctgagagctgaggacactgctgtgtatttctgtgccagaggggacatctggggccaagggaccctcgtcaccgtctcgagc

SEQ ID NO: 8569 - DNA, 333 bp, Artificial Sequence
  source: /note="Description of Artificial Sequence: Synthetic polynucleotide"
gaggtgcagcttgtggagtctgggggaggcttggtccagcctggggggtccctgagactctcctgtgcagtctctggactcgacctcagtagctactacatgcaatgggtccgtcaggctccagggaaggggctggagtgggtcggagtcattggtatcaatgataacacatactacgcgagctgggcgaaaggccgattcaccatctccagagacaattccaagaccacggtgtatcttcaaatgaacagcctgagagctgaggacactgctgtgtatttctgtgctagaggggacatctggggccaagggaccctcgtcaccgtctcgagc

SEQ ID NO: 8570 - protein, 115 aa, Mus musculus
EVQLQQSGPELVKPGASVKMSCKASGYTFTSSVMHWVKQKPGQGLEWIGYINPYNDGTKYNEKFKGKATLTSDKSSSTAYMELSSLTSEDSAVYYCAKGGNDGYWGQGTTLTVSS

SEQ ID NO: 8571 - protein, 130 aa, Artificial Sequence [sequence omitted]

SEQ ID NO: 8572 - protein, 122 aa, Artificial Sequence
  source: /note="Description of Artificial Sequence: Synthetic polypeptide"
  MOD_RES (120)..(122): Any amino acid
QVQLVQSGAEVKKPGASVKVSCKASGYTFGNYWMQWVRQAPGQGLEWMGAIYEGTGDTRYIQKFAGRVTMTRDTSTSTVYMELSSLRSEDTAVYYCARLSDYVSGFSYWGQGTLVTVSSXXX

SEQ ID NO: 8573 - protein, 122 aa, Artificial Sequence
  source: /note="Description of Artificial Sequence: Synthetic polypeptide"
  MOD_RES (120)..(122): Any amino acid
QVQLVQSGAEVKKPGASVKVSCKASGYTFGNYWMQWVRQAPGQGLEWMGAIYEGTGKTVYIQKFAGRVTMTRDTSTSTVYMELSSLRSEDTAVYYCARLSDYVSGFGYWGQGTLVTVSSXXX

SEQ ID NO: 8574 - protein, 122 aa, Artificial Sequence
  source: /note="Description of Artificial Sequence: Synthetic polypeptide"
  MOD_RES (120)..(122): Any amino acid
QVQLVQSGAEVKKPGASVKVSCKASGYTFGNYWMQWVRQAPGQGLEWMGAIYEGTGKTVYIQKFAGRVTMTRDTSTSTVYMELSSLRSEDTAVYYCARLSDYVSGFSYWGQGTLVTVSSXXX

SEQ ID NO: 8575 - protein, 122 aa, Artificial Sequence
  source: /note="Description of Artificial Sequence: Synthetic polypeptide"
  MOD_RES (120)..(122): Any amino acid
QVQLVQSGAEVKKPGSSVKVSCKASGYTFGNYWMQWVRQAPGQGLEWMGAIYEGTGKTVYIQKFADRVTITADKSTSTAYMELSSLRSEDTAVYYCARLSDYVSGFGYWGQGTTVTVSSXXX

SEQ ID NO: 8576 - protein, 122 aa, Artificial Sequence
  source: /note="Description of Artificial Sequence: Synthetic polypeptide"
  MOD_RES (120)..(122): Any amino acid
QVQLVQSGAEVKKPGSSVKVSCKASGYTFGNYWMQWVRQAPGQGLEWMGAIYEGTGKTVYIQKFAGRVTITADKSTSTAYMELSSLRSEDTAVYYCARLSDYVSGFGYWGQGTTVTVSSXXX

SEQ ID NO: 8577 - protein, 117 aa, Mus musculus
QVQVQQPGAELVKPGASVKLSCKASGYTSPTYWIHWVKQRPGQGLEWIGNINPDSGSTDYNEKFKSKATLTVDTSSSTAYMQLSSLTSEDSAVYYCWYDGYYAMNYWGQGTSVTVSS

SEQ ID NO: 8578 - protein, 117 aa, Mus musculus
QVQVQQPGAELVKPGASVKLSCKASGYTSTTYWIHWVKQRPGQGLEWIGNINPDSGSTDYNEEFKSKATLTVDTSSSTAYMQLSSLTSEDSAVYYCWYDGYYAMNYWGQGTSVTVSS

SEQ ID NO: 8579 - protein, 117 aa, Mus musculus
QVQVQQPGAELVKPGASVKLSCKASGYTSTTYWIHWVKQRPGQGLEWIGNINPDSGSTDYNEKFKGKATLTVDTSSSTAYMQLSSLTSEDSAVYYCWYDGYYAMNYWGQGTSVTVSS

SEQ ID NO: 8580 - protein, 117 aa, Mus musculus
QVQVQQPGAELVKPGASVKLSCKASGYTSTTYWIHWVKQRPGQGLEWIGNINPDSGSTDYNEKFKSKATLTVDTSSSTAYMQLSSLTSEDSAVYYCWYDGHYAMNYWGQGTSVTVSS

SEQ ID NO: 8581 - protein, 117 aa, Mus musculus
QVQVQQPGAELVKPGASVKLSCKASGYTSTTYWIHWVKQRPGQGLEWIGNINPDSGSTDYNEKFKSKATLTVDTSSSTAYMQLSSLTSEDSAVYYCWYDGYYAMNYWGQGTSVTVSS

SEQ ID NO: 8582 - protein, 111 aa, Artificial Sequence
  source: /note="Description of Artificial Sequence: Synthetic polypeptide"
EVQLVESGGGLVQPGGSLRLSCAVSGIDLSGYYMNWVRQAPGKGLEWVGVIGINGATYYASWAKGRFTISRDNSKTTVYLQMNSLRAEDTAVYFCARGDIWGQGTLVTVSS

SEQ ID NO: 8583 - protein, 109 aa, Artificial Sequence
  source: /note="Description of Artificial Sequence: Synthetic polypeptide"
QSLEESGGRLVTPGTPLTLTCSVSGIDLSGYYMNWVRQAPGKGLEWIGVIGINGATYYASWAKGRFTISKTSSTTVDLKMTSLTTEDTATYFCARGDIWGPGTLVTVSS

SEQ ID NO: 8584 - protein, 96 aa, Artificial Sequence
  source: /note="Description of Artificial Sequence: Synthetic polypeptide"
EVQLVESGGGLVQPGGSLRLSCAVSGLDLSSYYMQWVRQAPGKGLEWVGVIGINDNTYYASWAKGRFTISRDNSKTTVYLQMNSLRAEDTAVYFCA

SEQ ID NO: 8585 - protein, 133 aa, Artificial Sequence
  source: /note="Description of Artificial Sequence: Synthetic polypeptide"
  MOD_RES (131)..(133): Any amino acid
EVQLLESGGGLVQPGESLRLSCAASGFTFSSYAMSWVRQAPGKGLEWVSAISGSGGRTYYADSVKGRFTISRDNSKNTLYLQMNSLRAEDTAVYYCAKDQREVGPYSSGWYDYYYGMDVWGQGTTVTVSSXXX

SEQ ID NO: 8586 - protein, 134 aa, Artificial Sequence
  source: /note="Description of Artificial Sequence: Synthetic polypeptide"
  MOD_RES (132)..(134): Any amino acid
EVQLVESGGGLVKPGGSLRLSCAASGFTFGNAWMSWVRQAPGKGLEWVGRIKSKTDGGTTDYAAPVKGRFTISRDDSKNTLYLQMNSLKTEDTAVYFCTTDRTGYSISWSSYYYYYGMDVWGQGTTVTVSSXXX

SEQ ID NO: 8587 - protein, 134 aa, Artificial Sequence
  source: /note="Description of Artificial Sequence: Synthetic polypeptide"
  MOD_RES (132)..(134): Any amino acid
EVQLVESGGGLVKPGGSLRLSCAASGFTFGNAWMSWVRQAPGKGLEWVGRIKSKTDGGTTDYAAPVKGRFTISRDDSKNTLYLQMNSLKTEDTAVYYCTTDRTGYSISWSSYYYYYGMDVWGQGTTVTVSSXXX

SEQ ID NO: 8588 - protein, 134 aa, Artificial Sequence
  source: /note="Description of Artificial Sequence: Synthetic polypeptide"
  MOD_RES (132)..(134): Any amino acid
EVQLVESGGGLVKPGGSLRLSCAASGFTFSNAWMSWVRQAPGKGLEWVGRIKSKTDGGTTDYTAPVKGRFTISRDDSKNTLYLQMNSLKAEDTAVYYCTTDRTGYSISWSSYYYYYGMDVWGQGTTVTVSSXXX

SEQ ID NO: 8589 - protein, 134 aa, Artificial Sequence
  source: /note="Description of Artificial Sequence: Synthetic polypeptide"
  MOD_RES (132)..(134): Any amino acid
EVQLVESGGGLVKPGGSLRLSCAASGFTFSNAWMSWVRQAPGKGLEWVGRIKSTTDGGTTDYAAPVKGRFTISRDDSKNTLYLQMNSLKTEDTAVYYCTTDRTGYSISWSSYYYYYGMDVWGQGTTVTVSSXXX

SEQ ID NO: 8590 - protein, 134 aa, Artificial Sequence
  source: /note="Description of Artificial Sequence: Synthetic polypeptide"
  MOD_RES (132)..(134): Any amino acid
EVQLVESGGGLVKPGGSLRLSCAASGYTFSTYSMNWVRQAPGKGLEWVSSISSSSSYRYYADSVKGRFTISRDNAKNSLYLQMSSLRAEDTAVYYCAREGVSGSSPYSISWYDYYYGMDVWGQGTTVTVSSXXX

SEQ ID NO: 8591 - protein, 124 aa, Artificial Sequence
  source: /note="Description of Artificial Sequence: Synthetic polypeptide"
  MOD_RES (122)..(124): Any amino acid
EVQLVESGGGLVKPGRSLRLSCTASGFTFGDYAMSWFRQAPGKGLEWIGFIRSRAYGGTPEYAASVKGRFTISRDDSKTIAYLQMNSLKTEDTAVYFCARGRGIAARWDYWGQGTLVTVSSXXX

SEQ ID NO: 8592 - protein, 122 aa, Artificial Sequence
  source: /note="Description of Artificial Sequence: Synthetic polypeptide"
  MOD_RES (119)..(122): Any amino acid
QITLKESGPTLVKPTQTLTLTCTFSGFSLSTSGVGVAWIRQPPGKALEWLALIYWTDDKRYSPSLKSRLTITKDTSKNQVVLRMTNMDPLDTATYFCAHRPGGWFDPWGQGTLVTVSSXXXX

SEQ ID NO: 8593 - protein, 120 aa, Artificial Sequence
  source: /note="Description of Artificial Sequence: Synthetic polypeptide"
  MOD_RES (118)..(120): Any amino acid
QVQLQQWGAGLLKPSETLSLSCAVYGGSFGGYYWSWIRQPPGKGLEWIGEINHSGGTKYNPSLKSRVTISVDTSKNQFSLKLSSVTAADTAVYFCARGDVVGFFDYWGQGTLVTVSSXXX

SEQ ID NO: 8594 - protein, 133 aa, Artificial Sequence
  source: /note="Description of Artificial Sequence: Synthetic polypeptide"
  MOD_RES (131)..(133): Any amino acid
QVQLVESGGGVVQPGRSLRLSCAASGFTFSSFGMHWVRQAPGKGLEWVAVISFDGSIKYSVDSVKGRFTISRDNSKNTLFLQMNSLRAEDTAVYYCARDRLNYYDSSGYYHYKYYGLAVWGQGTTVTVSSXXX

SEQ ID NO: 8595 - protein, 133 aa, Artificial Sequence
  source: /note="Description of Artificial Sequence: Synthetic polypeptide"
  MOD_RES (131)..(133): Any amino acid
QVQLVESGGGVVQPGRSLRLSCAASGFTFSSFGMHWVRQAPGKGLEWVAVISFDGSIKYSVDSVKGRFTISRDNSKNTLFLQMNSLRAEDTAVYYCARDRLNYYDSSGYYHYKYYGMAVWGQGTTVTVSSXXX

SEQ ID NO: 8596 - protein, 132 aa, Artificial Sequence
  source: /note="Description of Artificial Sequence: Synthetic polypeptide"
  MOD_RES (130)..(132): Any amino acid
QVQLVESGGGVVQPGRSLRLSCAASGFTFSSYGMHWVRQAPGKGLEWVAVISYDGSHESYADSVKGRFTISRDISKNTLYLQMNSLRAEDTAVYFCARERKRVTMSTLYYYFYYGMDVWGQGTTVTVSSXXX

SEQ ID NO: 8597 - protein, 129 aa, Artificial Sequence
  source: /note="Description of Artificial Sequence: Synthetic polypeptide"
  MOD_RES (127)..(129): Any amino acid
QVQLVESGGGVVQPGRSLRLSCAASGFTFSSYGMHWVRQAPGKGLEWVAVIWYDGSNKYYADSVKGRFIISRDKSKNTLYLQMNSLRAEDTAVYYCARAGGIAAAGLYYYYGMDVWGQGTTVTVSSXXX

SEQ ID NO: 8598 - protein, 121 aa, Artificial Sequence
  source: /note="Description of Artificial Sequence: Synthetic polypeptide"
  MOD_RES (119)..(121): Any amino acid
QVQLVQSGAEVKKPGASVKVSCKASGYTFTAYYLHWVRQAPGQGLEWMGWINPHSGGTNYAQKFQGRVTMTRDTSISTAYMELSRLRSDDTAVFYCARGRQWLGFDYWGQGTLVTVSSXXX

SEQ ID NO: 8599 - protein, 130 aa, Artificial Sequence
  source: /note="Description of Artificial Sequence: Synthetic polypeptide"
  MOD_RES (128)..(130): Any amino acid
QVQLVQSGAEVKKPGASVKVSCKASGYTFTDYYMYWVRQAPGQGLEWMGWISPNSGGTNYAQKFQGRVTMTRDTSISTAYMELSRLRSDDTAVYYCVRGGYSGYAGLYSHYYGMDVWGQGTTVTVSSXXX

SEQ ID NO: 8600 - protein, 133 aa, Artificial Sequence
  source: /note="Description of Artificial Sequence: Synthetic polypeptide"
  MOD_RES (131)..(133): Any amino acid
QVQLVQSGAEVKKPGASVKVSCKASGYTFTGYYMHWVRQAPGQGLEWMGWINPNSGGTNYAQKFQGRVTMTRDTSISTAYMELSRLRSDDTAVYFCARDQMSIIMLRGVFPPYYYGMDVWGQGTTVTVSSXXX

SEQ ID NO: 8601 - protein, 123 aa, Artificial Sequence
  source: /note="Description of Artificial Sequence: Synthetic polypeptide"
  MOD_RES (121)..(123): Any amino acid
QVQLVQSGAEVKKSGASVKVSCKASGYTFTGYYMHWVRQAPGQGLEWMGWINPNSGGTNYVQKFQGRVTMTRDTSISTAYMELSRLRSDDTAVYYCARNEYSSAWPLGYWGQGTLVTVSSXXX

SEQ ID NO: 8602 - protein, 122 aa, Artificial Sequence
  source: /note="Description of Artificial Sequence: Synthetic polypeptide"
EVQLVESGGGLVQPGGSLRLSCAASGFTFSNYWISWVRQAPGKGLEWVAEIRSESDASATHYAEAVKGRFTISRDNAKNSLYLQMNSLRAEDTAVYYCLAYFDYGLAIQNYWGQGTLVTVSS

SEQ ID NO: 8603 - protein, 111 aa, Artificial Sequence
  source: /note="Description of Artificial Sequence: Synthetic polypeptide"
EVQLVESGGGLVQPGGSLRLSCAVSGLDLSSYYMQWVRQAPGKGLEWVGVIGINDNTYYASWAKGRFTISRDNSKTTVYLQMNSLRAEDTAVYFCARGDIWGQGTLVTVSS

SEQ ID NO: 8604 - protein, 119 aa, Artificial Sequence
  source: /note="Description of Artificial Sequence: Synthetic polypeptide"
QVQLVQSGAEVKKPGASVKVSCKASGYTFGNYWMQWVRQAPGQGLEWMGAIYEGTGDTRYIQKFAGRVTMTRDTSTSTVYMELSSLRSEDTAVYYCARLSDYVSGFSYWGQGTLVTVSS

SEQ ID NO: 8605 - protein, 120 aa, Artificial Sequence
  source: /note="Description of Artificial Sequence: Synthetic polypeptide"
QVQLVQSGAEVKKPGASVKVSCKASGYTFGNYWMQWVRQAPGQGLEWMGAIYEGTGKTVYIQKFAGRVTMTRDTSTSTVYMELSSLRSEDTAVYYCARLSDYVSGFGYWGQGTLVTVSSE

SEQ ID NO: 8606 - protein, 119 aa, Artificial Sequence
  source: /note="Description of Artificial Sequence: Synthetic polypeptide"
QVQLVQSGAEVKKPGASVKVSCKASGYTFGNYWMQWVRQAPGQGLEWMGAIYEGTGKTVYIQKFAGRVTMTRDTSTSTVYMELSSLRSEDTAVYYCARLSDYVSGFSYWGQGTLVTVSS

SEQ ID NO: 8607 - protein, 119 aa, Artificial Sequence
  source: /note="Description of Artificial Sequence: Synthetic polypeptide"
QVQLVQSGAEVKKPGSSVKVSCKASGYTFGNYWMQWVRQAPGQGLEWMGAIYEGTGKTVYIQKFADRVTITADKSTSTAYMELSSLRSEDTAVYYCARLSDYVSGFGYWGQGTTVTVSS

SEQ ID NO: 8608 - protein, 119 aa, Artificial Sequence
  source: /note="Description of Artificial Sequence: Synthetic polypeptide"
QVQLVQSGAEVKKPGSSVKVSCKASGYTFGNYWMQWVRQAPGQGLEWMGAIYEGTGKTVYIQKFAGRVTITADKSTSTAYMELSSLRSEDTAVYYCARLSDYVSGFGYWGQGTTVTVSS

SEQ ID NO: 8609 - protein, 114 aa, Artificial Sequence
  source: /note="Description of Artificial Sequence: Synthetic polypeptide"
  MOD_RES (112)..(114): Any amino acid
EVQLVESGGGLVQPGGSLRLSCAVSGIDLSNHYMQWVRQAPGKGLEWVGVVGINGRTYYASWAKGRFTISRDNSKTTVYLQMNSLRAEDTAVYFCARGDIWGQGTLVTVSSXXX

SEQ ID NO: 8610 - protein, 114 aa, Artificial Sequence
  source: /note="Description of Artificial Sequence: Synthetic polypeptide"
  MOD_RES (112)..(114): Any amino acid
EVQLVESGGGLVQPGGSLRLSCAVSGIDVTNYYMQWVRQAPGKGLEWVGVIGVNGKRYYASWAKGRFTISRDNSKTTVYLQMNSLRAEDTAVYFCARGDIWGQGTLVTVSSXXX

SEQ ID NO: 8611 - protein, 114 aa, Artificial Sequence
  source: /note="Description of Artificial Sequence: Synthetic polypeptide"
  MOD_RES (112)..(114): Any amino acid
EVQLVESGGGLVQPGGSLRLSCAVSGIGLSSYYMQWVRQAPGKGLEWVGVIGSDGKTYYATWAKGRFTISRDNSKTTVYLQMNSLRAEDTAVYFCTRGDIWGQGTLVTVSSXXX

SEQ ID NO: 8612 - protein, 113 aa, Artificial Sequence
  source: /note="Description of Artificial Sequence: Synthetic polypeptide"
  MOD_RES (111)..(113): Any amino acid
QEQLKESGGRLVTPGTSLTLTCTVSGIDLSNHYMQWVRQAPGKGLEWIGVVGINGRTYYASWAKGRFTISRTSSTTVDLKMTRLTTEDTATYFCARGDIWGPGTLVTVSSXXX

SEQ ID NO: 8613 - protein, 112 aa, Artificial Sequence
  source: /note="Description of Artificial Sequence: Synthetic polypeptide"
  MOD_RES (110)..(112): Any amino acid
QSLEESGGRLVTPGGSLTLTCTVSGIDVTNYYMQWVRQAPGKGLEWIGVIGVNGKRYYASWAKGRFTISKTSSTTVDLKMTSLTTEDTATYFCARGDIWGPGTLVTVSSXXX

SEQ ID NO: 8614 - protein, 112 aa, Artificial Sequence
  source: /note="Description of Artificial Sequence: Synthetic polypeptide"
  MOD_RES (110)..(112): Any amino acid
QSLEESGGRLVTPGTPLTLTCTVSGIGLSSYYMQWVRQSPGRGLEWIGVIGSDGKTYYATWAKGRFTISKTSSTTVDLRMASLTTEDTATYFCTRGDIWGPGTLVTVSSXXX

SEQ ID NO: 8615 - protein, 114 aa, Artificial Sequence
  source: /note="Description of Artificial Sequence: Synthetic polypeptide"
  MOD_RES (112)..(114): Any amino acid
QSVEESGGGLVQPEGSLTLTCTASGFDFSSNAMWWVRQAPGKGLEWIGCIYNGDGSTYYASWVNGRFSISKTSSTTVTLQLNSLTVADTATYYCARDLDLWGPGTLVTVSSXXX

SEQ ID NO: 8616 - protein, 131 aa, Artificial Sequence
  source: /note="Description of Artificial Sequence: Synthetic polypeptide"
EVQLVESGGGLVKPGGSLRLSCAASGFTFSNAWMSWVRQAPGKGLEWVGRIKSKTDGGTTDYTAPVKGRFTISRDDSKNTLYLQMNSLKAEDTAVYYCTTDRTGYSISWSSYYYYYGMDVWGQGTTVTVSS

SEQ ID NO: 8617 - protein, 130 aa, Artificial Sequence
  source: /note="Description of Artificial Sequence: Synthetic polypeptide"
QVQLVESGGGVVQPGRSLRLSCAASGFTFSSFGMHWVRQAPGKGLEWVAVISFDGSIKYSVDSVKGRFTISRDNSKNTLFLQMNSLRAEDTAVYYCARDRLNYYDSSGYYHYKYYGLAVWGQGTTVTVSS

SEQ ID NO: 8618 - protein, 127 aa, Artificial Sequence
  source: /note="Description of Artificial Sequence: Synthetic polypeptide"
QVQLVQSGAEVKKPGASVKVSCKASGYTFTDYYMYWVRQAPGQGLEWMGWISPNSGGTNYAQKFQGRVTMTRDTSISTAYMELSRLRSDDTAVYYCVRGGYSGYAGLYSHYYGMDVWGQGTTVTVSS

SEQ ID NO: 8619 - protein, 130 aa, Artificial Sequence
  source: /note="Description of Artificial Sequence: Synthetic polypeptide"
QVQLVQSGAEVKKPGASVKVSCKASGYTFTGYYMHWVRQAPGQGLEWMGWINPNSGGTNYAQKFQGRVTMTRDTSISTAYMELSRLRSDDTAVYFCARDQMSIIMLRGVFPPYYYGMDVWGQGTTVTVSS

SEQ ID NO: 8620 - DNA, 321 bp, Artificial Sequence
  source: /note="Description of Artificial Sequence: Synthetic polynucleotide"
gaaatcgttctgacccagtccccggctaccctgtccctgtccccaggtgaacgtgctaccctgtcctgcaaagcttccaaacgggttaccacctacgtttcctggtaccagcagaaacccggtcaggctcctcgtctgctgatctacggtgcttccaaccgttacctcggtatcccagctcgtttctccggttccggttccggtaccgacttcaccctgaccatctcctccctggaacccgaagacttcgctgtttactactgcagtcagtcctacaactacccctacaccttcggtcagggtaccaaactggaaatcaaa

SEQ ID NO: 8621 - DNA, 359 bp, Artificial Sequence
  source: /note="Description of Artificial Sequence: Synthetic polynucleotide"
aggtgcagctggtgcagtctggggctgaggtgaagaagtctggggcctcagtgaaggtctcctgcaaggcttctggatacaccttcaccggctactatatgcactgggtgcgacaggcccctggacaagggcttgagtggatgggatggatcaaccctaacagtggtggcacaaactatgtacagaagtttcagggcagggtcaccatgaccagggacacgtccatcagcacagcctacatggagctgagcaggctgagatctgacgacacggccgtgtattactgtgcgagaaatgagtatagcagtgcctggcccttggggtattggggccagggaaccctggtcaccgtctctagt

SEQ ID NO: 8622 - DNA, 330 bp, Artificial Sequence
  source: /note="Description of Artificial Sequence: Synthetic polynucleotide"
cagtctgtgctgactcagccaccctcagcgtctgggacccccgggcagagagtcaccatctcttgttctggaagcagctccaacatcggcagtaattatgtatactggtaccagcagctcccaggagcggcccccaaactcctcatctttaggaataatcagcggccctcaggggtccctgaccgcttctctggctccaagtctggcacctcagcctccctggccatcagtgggctccggtccgaggatgaggctgattattactgtgcagcatgggatgacagcctgagtggttgggtgttcggcggagggaccaagctgaccgtccta

SEQ ID NO: 8623 - DNA, 330 bp, Artificial Sequence
  source: /note="Description of Artificial Sequence: Synthetic polynucleotide"
cagtctgtgctgactcagccaccctcagcgtctgggacccccgggcagagagtcaccatctcttgttctggaagcagctccaacatcggcagtaattatgtatactggtaccagcagctcccaggagcggcccccaaactcctcatctttaggagtaatcagcggccctcaggggtccctgaccgattctctggctccaagtctggcacctcagcctccctggccatcagtgggctccggtccgaggatgaggctgattattactgtgcagcatgggatgacagcctgagtggttgggtgttcggcggagggaccaagctgaccgtccta

SEQ ID NO: 8624 - DNA, 330 bp, Artificial Sequence
  source: /note="Description of Artificial Sequence: Synthetic polynucleotide"
cagtctgtgctgactcagccaccctcagcgtctgggacccccgggcagagggtcaccatctcttgttctggaagcagttccaatatcggaagtaatactgtgaactggtaccagcagctcccaggaacggcccccaaactcctcatctatactaataatcagcggccctcaggggtccctgaccgattctctggctccaagtctggcacctcagcctccctggccatcagtggactccagtctgaggatgaggctgatttttactgtgcagcgcgggatgagagcctgaatggtgtggtattcggcggagggaccaagctgaccgtccta

SEQ ID NO: 8625 - DNA, 330 bp, Artificial Sequence
  source: /note="Description of Artificial Sequence: Synthetic polynucleotide"
cagtctgtgctgactcagtcaccctcagcgtctgggacccccgggcagagagtcaccatctcttgttctggaagcagctccaacatcggcagtaattatgtatactggtaccagcagctcccaggagcggcccccaaactcctcatccttaggaataatcagcggccctcaggggtccctgaccgattctctggctccaagtctggcacctcagcctccctgaccatcagtgggctccggtccgaggatgaggctgactattattgtgcagcatgggatgacagcctgagtggttgggtgttcggcggagggaccaagctgaccgtccta

SEQ ID NO: 8626 - DNA, 330 bp, Artificial Sequence
  source: /note="Description of Artificial Sequence: Synthetic polynucleotide"
cagtctgtgttgacgcagccgccctcaatgtctgcggccccaggacagaaggtcaccatctcctgctctggaagcagctccaacattgggaataattatgtatcctggtaccagcagctcccaggaacagcccccaaactcctcatttatgacaataataagcgaccctcagggattcctgaccgattctctggctccaagtctggcacgtcagccaccctgggcatcaccggactccagactggggacgaggccaattactgctgcggaacatgggatatcggcctgagtgtttgggtgttcggcggagggaccaaactgaccgtccta

SEQ ID NO: 8627 - DNA, 330 bp, Artificial Sequence
  source: /note="Description of Artificial Sequence: Synthetic polynucleotide"
cagtctgtgttgacgcagccgccctcagtgtctgaggccccaggacagaaggtcaccatctcctgctctggaagcagctccaacattgggaataattatgtatcctggtaccagcagctcccaggaacagcccccaaactcctcatttatgacaataataagcgaccctcagggattcctgaccgattctctggctccaagtctggcacgtcagccaccctgggcatcaccggactccagactggggacgaggccgattattactgcggaacatgggatagccgcctgagtgctgtggttttcggcggagggaccaagctgaccgtccta

SEQ ID NO: 8628 - DNA, 330 bp, Artificial Sequence
  source: /note="Description of Artificial Sequence: Synthetic polynucleotide"
cagtctgtgttgacgcagccgccctcagtgtctgcggccccaggacagaaggtcaccatctcctgctctggaagcagctccaacattgggaataattatgtatcctggtaccagcagctcccaggaacagcccccaaactcctcatttatgacaataataagcgaccctcagggattcctgaccgattctctggctccaagtctggcacgtcaaccaccctgggcatcaccggactccagactggggacgaggccgattattactgcggaacatgggatagccgcctgagtgctgtggttttcggcggagggaccaagctgaccgtccta

SEQ ID NO: 8629 - DNA, 330 bp, Artificial Sequence
  source: /note="Description of Artificial Sequence: Synthetic polynucleotide"
cagtctgtgttgacgcagccgccctcagtgtctgcggccccaggacagaaggtcaccatctcctgctctggaagcagctccaacattgggaataattatgtatcctggtaccagcagctcccaggaacagcccccaaactcctcatttatgacaataataagcgaccctcagggattcctgaccgattctctggctccaagtctggcacgtcagccaccctgggcatcaccggactccagactggggacgaggccgattattactgcggaacatgggatagccgcctgagtgctgtggttttcggcggagggaccaagctgaccgtccta

SEQ ID NO: 8630 - DNA, 330 bp, Artificial Sequence
  source: /note="Description of Artificial Sequence: Synthetic polynucleotide"
cagtctgtgttgacgcagccgccctcagtgtctgcggccccaggacagaaggtcaccatctcctgctctggaagcagctccaacattgggaataattatgtatcctggtaccagcagttcccaggaacagcccccaaactcctcatttatgacaataataagcgaccctcagggattcctgaccgattctctggctccaagtctggcacgtcagccaccctgggcatcaccggactccagactggggacgaggccgattattactgcggaacatgggatagccgcctgagtgctgtggttttcggcggagggaccaagctgaccgtccta

SEQ ID NO: 8631 - DNA, 324 bp, Artificial Sequence
  source: /note="Description of Artificial Sequence: Synthetic polynucleotide"
gaaatagtgatgacgcagtctccagccaccctgtctgtgtctccaggggaaagagccaccctctcctgtagggccagtcagagtgttcgcagcaatttagcctggtaccagcagaaacctggccaggctcccaggctcctcattcatgatgcatcccccaggaccgctggtatcccagccaggttcagtggcagtggatctgggacagaattcactctcaccatcaacagcctgcagtctgaagattttgcagtttattactgtcagcagtataattactggactccgatcaccttcggccaagggacacgactggagattaaa

SEQ ID NO: 8632 - DNA, 324 bp, Artificial Sequence
  source: /note="Description of Artificial Sequence: Synthetic polynucleotide"
gaaattgtgttgacgcagtctccaggcaccctgtctttgtctccaggggaaagagccaccctctcctgcagggccagtcagagtgttagcagcggctacttaacctggtaccagcagaaacctggccaggctcccagactcctcatctatggtgcatccagcagggccactggcatcccagacaggttcagtggcagtgggtctgggacggacttcactctcaccatcagcagactggagcctgaagattttgcagtgtattactgtcagcagtatggtaactcactgagcaggtttggccaggggaccaagctggagatcaaa

SEQ ID NO: 8633 - DNA, 324 bp, Artificial Sequence
  source: /note="Description of Artificial Sequence: Synthetic polynucleotide"
gaaattgtgttgacgcagtctccaggcaccctgtctttgtctccaggggaaagagccaccctctcctgcagggccagtcagagtgttagcagcggctacttaacctggtaccagcagaaacctggccaggctcccaggctcctcatctatggtgcatccagcagggccactggcatcccagacaggttcagtggcagtgggtctgggacagacttcactctcaccatcagcagactggagcctgaagattttgcagtgtattactgtcagcagtatggtaactcactgtgcaggtttggccaggggaccaagctggagatcaaa

SEQ ID NO: 8634 - DNA, 321 bp, Artificial Sequence
  source: /note="Description of Artificial Sequence: Synthetic polynucleotide"
gacatccagatgacccagtctccatcctccctgtctgcatctgtaggagacagagtcaccatcacttgccgggcaagtcagggcattagaaaggatttaggctggtatcagcagaaaccagggaaagcccctaagcgcctgatctatggagcatccagtttgcaaagtggggtcccatcaaggttcagcggcagtggatctgggacagaattcactctcacaatcagcagcctgcagcctgaagattttgcaacttattactgtctacagtataatagtttcccgtggacgttcggccaagggaccaaggtggaaatcaaa

SEQ ID NO: 8635 - DNA, 321 bp, Artificial Sequence
  source: /note="Description of Artificial Sequence: Synthetic polynucleotide"
gacatccagatgacccagtctccatcctccctgtctgcatctgtaggagacagagtcaccatcacttgccgggcaagtcagggcattagaaatgatttaggctggtttcagcagaaaccagggaaagcccctaagcgcctgatctatgctgcatccagtttgcaaagtggggtcccatcaaggttcagcggcagtggatctgggacagaattcactctcacaatcagcagcctgcagcctgaagatttagcaacttattactgtctacagtataatatttacccgtggacgttcggccaagggaccaaggtggaaatcaaa

SEQ ID NO: 8636 - DNA, 339 bp, Artificial Sequence
  source: /note="Description of Artificial Sequence: Synthetic polynucleotide"
gacatcgtgatgacccagtctccagactccctggctgtgtctctgggcgagagggccaccatcaactgcaagtccagccagagtattttagacagctccaacaatgataactacttagcttggtaccagcagaaaccaggacagcctcctaaactgctcatttactgggcatctacccgggaatccggggtccctgaccgattcagtggcagcgggtctgggacagatttcactctcaccatcagcagcctgcaggctgaagatgtggcagtttattactgtcagcaatattataatactccattcactttcggccctgggaccaaagtggatatcaaa

SEQ ID NO: 8637 - DNA, 336 bp, Artificial Sequence
  source: /note="Description of Artificial Sequence: Synthetic polynucleotide"
gatattacactgacccagactccactttctctgtccgtctcccctggacagccggcctccatctcctgcaagtctagtcagagcctcctgcacagtgatggaaggaactatctgtattggtacctgcagaagccaggccagcctccacagctcctgatctatgaagtgtccaaccggttctctggactgccagataggttcagtggcagcgggtcagggacagatttcacactgaaaatcagccgggtggaggctgaggatgttgggatttattactgcatgcaaagttttccgcttccgctcactttcggcggagggaccaaggtggagatcaaa

SEQ ID NO: 8638 - DNA, 336 bp, Artificial Sequence
  source: /note="Description of Artificial Sequence: Synthetic polynucleotide"
gatattatactggcccagactccactttctctgtccgtcacccctggacagccggcctccatctcctgcaagtctagtcagagcctcctgcacagtgctggaaagacctatttgtattggtacctgcagaagccaggccagcctccacagctcctgatctatgaagtttccaaccggttctctggagtgccagataggttcagtggcagcgggtcagggacagatttcacactgaaaatcagccgggtggaggctgaggatgttgggatttattactgcatgcaaagttttccgcttccgctcactttcggcggagggaccaaggtggagatcaaa

SEQ ID NO: 8639 - DNA, 336 bp, Artificial Sequence
  source: /note="Description of Artificial Sequence: Synthetic polynucleotide"
gatattattctgacccagactccactttctctgtccgtcacccctggacagccggcctccatctcctgcaagtctagtcagagcctcctgcacagtgatggaaagacctatttgtattggtacctgcagaagcccggccagcctccacagctcctgatctatgaagtttccaaccggttctctggagagccagataggttcagtggcagcgggtcagggacagatttcacactgaaaatcagccgggtggaggctgaggatgttgggacttattattgcatgcaaagttttccgcttccgctcactttcggcggagggaccaaggtggagatcaaa

SEQ ID NO: 8640 - DNA, 336 bp, Artificial Sequence
  source: /note="Description of Artificial Sequence: Synthetic polynucleotide"
gatattgtgatgactcagtctccactctccctgcccgtcacccctggagagccggcctccatctcctgcaggtctagtcagagcctcctgcatagttttgggtacaactatttggattggtacctgcagaagccagggcagtctccacagctcctgatctatttgggttctaatcgggcctccggggtccctgacaggttcagtggcagtggatcaggcacagattttacactgaaaatcagcagagtggaggctgaggatgttggggtttattactgcatgcaagctctacaaactccattcactttcggccctgggaccaaagtggatatcaaa

SEQ ID NO: 8641 - DNA, 324 bp, Artificial Sequence
  source: /note="Description of Artificial Sequence: Synthetic polynucleotide"
tcttctgagctgactcaggaccctactgtgtctgtggccttgggacagacagtcaaaatcacatgccaaggagacagcctcagaagtttttatgcaagctggtaccagcagaagccaggacaggcccctgtacttgtcttctatggtaaaaacaaccggccctcagggatcccagaccgattctctggctccagctcaggaaacacagcttccttgaccatcactggggctcaggcggaagatgaggctgactattattgtaattcccgggacagcagtgtttaccatctggtactcggcggagggaccaagctgaccgtccta

SEQ ID NO: 8642 - DNA, 339 bp, Artificial Sequence
  source: /note="Description of Artificial Sequence: Synthetic polynucleotide"
caagtgctgacccagactccatcccccgtgtctgcagctgtgggaagcacagtcaccatcaattgccaggccagtcagaatgtttataataacaactacctagcctggtatcagcagaaaccagggcagcctcccaagcaactgatctattctacgtccactctggcatctggggtctcatcgcgattcagaggcagtggatctgggacacagttcactctcaccatcagcgacgtgcagtgtgacgatgctgccacttactactgtctaggcagttatgattgtagtcgtggtgattgttttgttttcggcggagggaccgaggtggtggtcaaacgt

SEQ ID NO: 8643 - DNA, 339 bp, Artificial Sequence
  source: /note="Description of Artificial Sequence: Synthetic polynucleotide"
caagtgctgacccagtctccatcctccctgtctgcatctgtaggagacagagtcaccatcaattgccaggccagtcagaatgtttacaataacaactacctagcctggtatcagcagaaaccagggaaagttcctaagcaactgatctattctacatccactctggcatctggggtcccatctcgtttcagtggcagtggatctgggacagatttcactctcaccatcagcagcctgcagcctgaagatgttgcaacttattactgtctgggcagttatgattgtagtcgtggtgattgttttgttttcggcggaggaaccaaggtggaaatcaaacgt

SEQ ID NO: 8644 - DNA, 339 bp, Artificial Sequence
  source: /note="Description of Artificial Sequence: Synthetic polynucleotide"
caggtgctgacccagactgcatcccccgtgtctccagctgtgggaagcacagtcaccatcaattgccgggccagtcagagtgtttattataacaactacctagcctggtatcagcagaaaccagggcagcctcccaagcaactgatctattctacatccactctggcatctggggtctcatcgcggttcaaaggcagtggatctgggacacagttcactctcaccatcagcgacgtgcagtgtgacgatgctgccacttactactgtctaggcagttatgattgtagtaatggtgattgttttgttttcggcggagggaccgaggtggtggtcaaacgt

SEQ ID NO: 8645 - DNA, 339 bp, Artificial Sequence
  source: /note="Description of Artificial Sequence: Synthetic polynucleotide"
gccatcgtgatgacccagactccatcttccaagtctgtccctgtgggagacacagtcaccatcaattgccaggccagtgagagtctttataataacaacgccttggcctggtttcagcagaaaccagggcagcctcccaagcgcctgatctatgatgcatccaaactggcatctggggtcccatcgcggttcagtggcggtgggtctgggacacagttcactctcaccatcagtggcgtgcagtgtgacgatgctgccacttactactgtggaggctacagaagtgatagtgttgatggtgttgctttcgccggagggaccgaggtggtggtcaaacgt

SEQ ID NO: 8646 - protein, 110 aa, Artificial Sequence
  source: /note="Description of Artificial Sequence: Synthetic polypeptide"
  MOD_RES (108)..(110): Any amino acid
DIQMTQSPSSLSASVGDRVTITCRASKDISKYLNWYQQKPGKAPKLLIYYTSGYHSGVPSRFSGSGSGTDFTLTISSLQPEDFATYYCQQGDALPPTFGGGTKVEIKXXX

SEQ ID NO: 8647 - protein, 110 aa, Artificial Sequence
  source: /note="Description of Artificial Sequence: Synthetic polypeptide"
  MOD_RES (108)..(110): Any amino acid
DIQMTQSPSSLSASVGDRVTITCRASQDIDKYLNWYQQKPGKAPKLLIYYTSGYHSGVPSRFSGSGSGTDFTLTISSLQPEDFATYYCQQGDALPPTFGGGTKVEIKXXX

SEQ ID NO: 8648 - protein, 110 aa, Artificial Sequence
  source: /note="Description of Artificial Sequence: Synthetic polypeptide"
  MOD_RES (108)..(110): Any amino acid
DIQMTQSPSSLSASVGDRVTITCRASQDIDNYLNWYQQKPGKAPKLLIYYTSEYHSGVPSRFSGSGSGTDFTFTISSLQPEDIATYYCQQGDALPPTFGQGTKLEIKXXX

SEQ ID NO: 8649 - protein, 110 aa, Artificial Sequence
  source: /note="Description of Artificial Sequence: Synthetic polypeptide"
  MOD_RES (108)..(110): Any amino acid
DIQMTQSPSSLSASVGDRVTITCRASRPIDKYLNWYQQKPGKAPKLLIYYTSEYHSGVPSRFSGSGSGTDFTFTISSLQPEDIATYYCQQGDALPPTFGQGTKLEIKXXX

SEQ ID NO: 8650 - protein, 107 aa, Mus musculus
DIVMTQSQKFMSTSVGDRVSVTCKASQNVGTNVAWYQQKPGQSPKALIYSASYRYSGVPDRFTGSGSGADFTLTISNMQSEDLADYFCQQYSSYPFTFGGGTRLEIK

SEQ ID NO: 8651 - protein, 107 aa, Mus musculus
DIVMTQSQKFMSTSVGDRVSVTCKASQNVGTNVAWYQQKPGQSPKALIYSASYRYSGVPDRFTGSGSGTDFTLTISNMQSEDLADYFCQQYSSYPFTFGGGTRLEIK

SEQ ID NO: 8652 - protein, 108 aa, Mus musculus
EIVLTQSPTTMAASPGEKITITCSASSSISSIYLHWYQQKPGFSPKVLIYRASNLASGVPARFSGSGSGTSYSLTIGTMEAEDVATYYCQQGSTIPFTFGSGTKLEIK

SEQ ID NO: 8653 - protein, 113 aa, Artificial Sequence
  source: /note="Description of Artificial Sequence: Synthetic polypeptide"
  MOD_RES (111)..(113): Any amino acid
QSVLTQPPSVSAAPGQKVTISCSGSSSNIGNNYVSWYQQLPGTAPKLLIYDNNKRPSGIPDRFSGSKSGTSTTLGITGLQTGDEADYYCGTWDSRLSAVVFGGGTKLTVLXXX

SEQ ID NO: 8654 - protein, 113 aa, Artificial Sequence
  source: /note="Description of Artificial Sequence: Synthetic polypeptide"
QVLTQSPSSLSASVGDRVTINCQASQSVYHNTYLAWYQQKPGKVPKQLIYDASTLASGVPSRFSGSGSGTDFTLTISSLQPEDVATYYCLGSYDCTNGDCFVFGGGTKVEIKR

SEQ ID NO: 8655 - protein, 113 aa, Artificial Sequence
  source: /note="Description of Artificial Sequence: Synthetic polypeptide"
QVLTQTPSPVSAAVGSTVTINCQASQSVYHNTYLAWYQQKPGQPPKQLIYDASTLASGVPSRFSGSGSGTQFTLTISGVQCNDAAAYYCLGSYDCTNGDCFVFGGGTEVVVKR

SEQ ID NO: 8656 - protein, 113 aa, Artificial Sequence
  source: /note="Description of Artificial Sequence: Synthetic polypeptide"
QVLTQSPSSLSASVGDRVTINCQASQSVYDNNYLAWYQQKPGKVPKQLIYSTSTLASGVPSRFSGSGSGTDFTLTISSLQPEDVATYYCLGSYDCSSGDCFVFGGGTKVEIKR

SEQ ID NO: 8657 - protein, 115 aa, Artificial Sequence
  source: /note="Description of Artificial Sequence: Synthetic polypeptide"
  MOD_RES (113)..(115): Any amino acid
DIILAQTPLSLSVTPGQPASISCKSSQSLLHSAGKTYLYWYLQKPGQPPQLLIYEVSNRFSGVPDRFSGSGSGTDFTLKISRVEAEDVGIYYCMQSFPLPLTFGGGTKVEIKXXX

SEQ ID NO: 8658 - protein, 115 aa, Artificial Sequence
  source: /note="Description of Artificial Sequence: Synthetic polypeptide"
  MOD_RES (113)..(115): Any amino acid
DIILTQTPLSLSVTPGQPASISCKSSQSLLHSDGKTYLYWYLQKPGQPPQLLIYEVSNRFSGEPDRFSGSGSGTDFTLKISRVEAEDVGTYYCMQSFPLPLTFGGGTKVEIKXXX

SEQ ID NO: 8659 - protein, 110 aa, Artificial Sequence
  source: /note="Description of Artificial Sequence: Synthetic polypeptide"
  MOD_RES (108)..(110): Any amino acid
DIQMTQSPSSLSASVGDRVTITCRASQGIRKDLGWYQQKPGKAPKRLIYGASSLQSGVPSRFSGSGSGTEFTLTISSLQPEDFATYYCLQYNSFPWTFGQGTKVEIKXXX

SEQ ID NO: 8660 - protein, 110 aa, Artificial Sequence
  source: /note="Description of Artificial Sequence: Synthetic polypeptide"
  MOD_RES (108)..(110): Any amino acid
DIQMTQSPSSLSASVGDRVTITCRASQGIRNDLGWFQQKPGKAPKRLIYAASSLQSGVPSRFSGSGSGTEFTLTISSLQPEDLATYYCLQYNIYPWTFGQGTKVEIKXXX

SEQ ID NO: 8661 - protein, 110 aa, Artificial Sequence
  source: /note="Description of Artificial Sequence: Synthetic polypeptide"
  MOD_RES (108)..(110): Any amino acid
DIQMTQSPSSLSASVGDRVTITCRASQGIRNDLGWYQQKPGKAPKRLIYVASSLQSGVPSRFSGSGSGTEFTLTISSLQPEDFATYYCLQYNTYPLTFGGGTKVEIKXXX

SEQ ID NO: 8662 - protein, 115 aa, Artificial Sequence
  source: /note="Description of Artificial Sequence: Synthetic polypeptide"
  MOD_RES (113)..(115): Any amino acid
DITLTQTPLSLSVSPGQPASISCKSSQSLLHSDGRNYLYWYLQKPGQPPQLLIYEVSNRFSGLPDRFSGSGSGTDFTLKISRVEAEDVGIYYCMQSFPLPLTFGGGTKVEIKXXX

SEQ ID NO: 8663 - protein, 116 aa, Artificial Sequence
  source: /note="Description of Artificial Sequence: Synthetic polypeptide"
  MOD_RES (114)..(116): Any amino acid
DIVMTQSPDSLAVSLGERATINCKSSQSILDSSNNDNYLAWYQQKPGQPPKLLIYWASTRESGVPDRFSGSGSGTDFTLTISSLQAEDVAVYYCQQYYNTPFTFGPGTKVDIKXXX

SEQ ID NO: 8664 - protein, 115 aa, Artificial Sequence
  source: /note="Description of Artificial Sequence: Synthetic polypeptide"
  MOD_RES (113)..(115): Any amino acid
DIVMTQSPLSLPVTPGEPASISCRSSQSLLHSFGYNYLDWYLQKPGQSPQLLIYLGSNRASGVPDRFSGSGSGTDFTLKISRVEAEDVGVYYCMQALQTPFTFGPGTKVDIKXXX

SEQ ID NO: 8665 - protein, 111 aa, Artificial Sequence
  source: /note="Description of Artificial Sequence: Synthetic polypeptide"
  MOD_RES (109)..(111): Any amino acid
EIVLTQSPGTLSLSPGERATLSCRASQSVSSGYLTWYQQKPGQAPRLLIYGASSRATGIPDRFSGSGSGTDFTLTISRLEPEDFAVYYCQQYGNSLCRFGQGTKLEIKXXX

SEQ ID NO: 8666 - protein, 111 aa, Artificial Sequence
  source: /note="Description of Artificial Sequence: Synthetic polypeptide"
  MOD_RES (109)..(111): Any amino acid
EIVLTQSPGTLSLSPGERATLSCRASQSVSSGYLTWYQQKPGQAPRLLIYGASSRATGIPDRFSGSGSGTDFTLTISRLEPEDFAVYYCQQYGNSLSRFGQGTKLEIKXXX

SEQ ID NO: 8667 - protein, 111 aa, Artificial Sequence
  source: /note="Description of Artificial Sequence: Synthetic polypeptide"
  MOD_RES (109)..(111): Any amino acid
EIVMTQSPATLSVSPGERATLSCRASQSVRSNLAWYQQKPGQAPRLLIHDASPRTAGIPARFSGSGSGTEFTLTINSLQSEDFAVYYCQQYNYWTPITFGQGTRLEIKXXX

SEQ ID NO: 8668 - protein, 113 aa, Artificial Sequence
  source: /note="Description of Artificial Sequence: Synthetic polypeptide"
  MOD_RES (111)..(113): Any amino acid
QSVLTQPPSASGTPGQRVTISCSGSSSNIGSNTVNWYQQLPGTAPKLLIYTNNQRPSGVPDRFSGSKSGTSASLAISGLQSEDEADFYCAARDESLNGVVFGGGTKLTVLXXX

SEQ ID NO: 8669 - protein, 113 aa, Artificial Sequence
  source: /note="Description of Artificial Sequence: Synthetic polypeptide"
  MOD_RES (111)..(113): Any amino acid
QSVLTQPPSASGTPGQRVTISCSGSSSNIGSNYVYWYQQLPGAAPKLLIFRNNQRPSGVPDRFSGSKSGTSASLAISGLRSEDEADYYCAAWDDSLSGWVFGGGTKLTVLXXX

SEQ ID NO: 8670 - protein, 113 aa, Artificial Sequence
  source: /note="Description of Artificial Sequence: Synthetic polypeptide"
  MOD_RES (111)..(113): Any amino acid
QSVLTQPPSASGTPGQRVTISCSGSSSNIGSNYVYWYQQLPGAAPKLLIFRSNQRPSGVPDRFSGSKSGTSASLAISGLRSEDEADYYCAAWDDSLSGWVFGGGTKLTVLXXX

SEQ ID NO: 8671 - protein, 113 aa, Artificial Sequence
  source: /note="Description of Artificial Sequence: Synthetic polypeptide"
  MOD_RES (111)..(113): Any amino acid
QSVLTQPPSMSAAPGQKVTISCSGSSSNIGNNYVSWYQQLPGTAPKLLIYDNNKRPSGIPDRFSGSKSGTSATLGITGLQTGDEANYCCGTWDIGLSVWVFGGGTKLTVLXXX

SEQ ID NO: 8672 - protein, 113 aa, Artificial Sequence
  source: /note="Description of Artificial Sequence: Synthetic polypeptide"
  MOD_RES (111)..(113): Any amino acid
QSVLTQPPSVSAAPGQKVTISCSGSSSNIGNNYVSWYQQFPGTAPKLLIYDNNKRPSGIPDRFSGSKSGTSATLGITGLQTGDEADYYCGTWDSRLSAVVFGGGTKLTVLXXX

SEQ ID NO: 8673 - protein, 113 aa, Artificial Sequence
  source: /note="Description of Artificial Sequence: Synthetic polypeptide"
  MOD_RES (111)..(113): Any amino acid
QSVLTQPPSVSAAPGQKVTISCSGSSSNIGNNYVSWYQQLPGTAPKLLIYDNNKRPSGIPDRFSGSKSGTSATLGITGLQTGDEADYYCGTWDSRLSAVVFGGGTKLTVLXXX

SEQ ID NO: 8674 - protein, 113 aa, Artificial Sequence
  source: /note="Description of Artificial Sequence: Synthetic polypeptide"
  MOD_RES (111)..(113): Any amino acid
QSVLTQPPSVSEAPGQKVTISCSGSSSNIGNNYVSWYQQLPGTAPKLLIYDNNKRPSGIPDRFSGSKSGTSATLGITGLQTGDEADYYCGTWDSRLSAVVFGGGTKLTVLXXX

SEQ ID NO: 8675 - protein, 113 aa, Artificial Sequence
  source: /note="Description of Artificial Sequence: Synthetic polypeptide"
  MOD_RES (111)..(113): Any amino acid
QSVLTQSPSASGTPGQRVTISCSGSSSNIGSNYVYWYQQLPGAAPKLLILRNNQRPSGVPDRFSGSKSGTSASLTISGLRSEDEADYYCAAWDDSLSGWVFGGGTKLTVLXXX

SEQ ID NO: 8676 - protein, 111 aa, Artificial Sequence
  source: /note="Description of Artificial Sequence: Synthetic polypeptide"
  MOD_RES (109)..(111): Any amino acid
SSELTQDPTVSVALGQTVKITCQGDSLRSFYASWYQQKPGQAPVLVFYGKNNRPSGIPDRFSGSSSGNTASLTITGAQAEDEADYYCNSRDSSVYHLVLGGGTKLTVLXXX

SEQ ID NO: 8677 - protein, 107 aa, Artificial Sequence
  source: /note="Description of Artificial Sequence: Synthetic polypeptide"
EIVLTQSPATLSLSPGERATLSCKASKRVTTYVSWYQQKPGQAPRLLIYGASNRYLGIPARFSGSGSGTDFTLTISSLEPEDFAVYYCSQSYNYPYTFGQGTKLEIK

SEQ ID NO: 8678 - protein, 116 aa, Artificial Sequence
  source: /note="Description of Artificial Sequence: Synthetic polypeptide"
  MOD_RES (114)..(116): Any amino acid
AIVMTQTPSSKSVPVGDTVTINCQASESLYNNNALAWFQQKPGQPPKRLIYDASKLASGVPSRFSGGGSGTQFTLTISGVQCDDAATYYCGGYRSDSVDGVAFAGGTEVVVKRXXX

SEQ ID NO: 8679 - protein, 116 aa, Artificial Sequence
  source: /note="Description of Artificial Sequence: Synthetic polypeptide"
  MOD_RES (114)..(116): Any amino acid
QVLTQSPSSLSASVGDRVTINCRASQSVYYNNYLAWYQQKPGKVPKQLIYSTSTLASGVPSRFSGSGSGTDFTLTISSLQPEDVATYYCLGSYDCSNGDCFVFGGGTKVEIKRXXX

SEQ ID NO: 8680 - protein, 116 aa, Artificial Sequence
  source: /note="Description of Artificial Sequence: Synthetic polypeptide"
  MOD_RES (114)..(116): Any amino acid
QVLTQTASPVSPAVGSTVTINCRASQSVYYNNYLAWYQQKPGQPPKQLIYSTSTLASGVSSRFKGSGSGTQFTLTISDVQCDDAATYYCLGSYDCSNGDCFVFGGGTEVVVKRXXX

SEQ ID NO: 8681 - protein, 116 aa, Artificial Sequence
  source: /note="Description of Artificial Sequence: Synthetic polypeptide"
  MOD_RES (114)..(116): Any amino acid
QVLTQTPSPVSAAVGSTVTINCQASQNVYNNNYLAWYQQKPGQPPKQLIYSTSTLASGVSSRFRGSGSGTQFTLTISDVQCDDAATYYCLGSYDCSRGDCFVFGGGTEVVVKRXXX

SEQ ID NO: 8682 - protein, 110 aa, Artificial Sequence
  source: /note="Description of Artificial Sequence: Synthetic polypeptide"
QSVLTQPPSASGTPGQRVTISCSGSSSNIGSNTVNWYQQLPGTAPKLLIYTNNQRPSGVPDRFSGSKSGTSASLAISGLQSEDEADFYCAARDESLNGVVFGGGTKLTVL

SEQ ID NO: 8683 - protein, 110 aa, Artificial Sequence
  source: /note="Description of Artificial Sequence: Synthetic polypeptide"
QSVLTQPPSVSAAPGQKVTISCSGSSSNIGNNYVSWYQQLPGTAPKLLIYDNNKRPSGIPDRFSGSKSGTSATLGITGLQTGDEADYYCGTWDSRLSAVVFGGGTKLTVL

SEQ ID NO: 8684 - protein, 110 aa, Artificial Sequence
  source: /note="Description of Artificial Sequence: Synthetic polypeptide"
QSVLTQPPSVSAAPGQKVTISCSGSSSNIGNNYVSWYQQLPGTAPKLLIYDNNKRPSGIPDRFSGSKSGTSTTLGITGLQTGDEADYYCGTWDSRLSAVVFGGGTKLTVL

SEQ ID NO: 8685 - protein, 110 aa, Artificial Sequence
  source: /note="Description of Artificial Sequence: Synthetic polypeptide"
QSVLTQSPSASGTPGQRVTISCSGSSSNIGSNYVYWYQQLPGAAPKLLILRNNQRPSGVPDRFSGSKSGTSASLTISGLRSEDEADYYCAAWDDSLSGWVFGGGTKLTVL

SEQ ID NO: 8686 - protein, 108 aa, Artificial Sequence
  source: /note="Description of Artificial Sequence: Synthetic polypeptide"
SSELTQDPTVSVALGQTVKITCQGDSLRSFYASWYQQKPGQAPVLVFYGKNNRPSGIPDRFSGSSSGNTASLTITGAQAEDEADYYCNSRDSSVYHLVLGGGTKLTVL

SEQ ID NO: 8687 - protein, 107 aa, Artificial Sequence
  source: /note="Description of Artificial Sequence: Synthetic polypeptide"
DIQMTQSPSSLSASVGDRVTITCRASKDISKYLNWYQQKPGKAPKLLIYYTSGYHSGVPSRFSGSGSGTDFTLTISSLQPEDFATYYCQQGDALPPTFGGGTKVEIK

SEQ ID NO: 8688 - protein, 107 aa, Artificial Sequence
  source: /note="Description of Artificial Sequence: Synthetic polypeptide"
DIQMTQSPSSLSASVGDRVTITCRASQDIDKYLNWYQQKPGKAPKLLIYYTSGYHSGVPSRFSGSGSGTDFTLTISSLQPEDFATYYCQQGDALPPTFGGGTKVEIK

SEQ ID NO: 8689 - protein, 107 aa, Artificial Sequence
  source: /note="Description of Artificial Sequence: Synthetic polypeptide"
DIQMTQSPSSLSASVGDRVTITCRASQDIDNYLNWYQQKPGKAPKLLIYYTSEYHSGVPSRFSGSGSGTDFTFTISSLQPEDIATYYCQQGDALPPTFGQGTKLEIK

SEQ ID NO: 8690 - protein, 107 aa, Artificial Sequence
  source: /note="Description of Artificial Sequence: Synthetic polypeptide"
DIQMTQSPSSLSASVGDRVTITCRASRPIDKYLNWYQQKPGKAPKLLIYYTSEYHSGVPSRFSGSGSGTDFTFTISSLQPEDIATYYCQQGDALPPTFGQGTKLEIK

SEQ ID NO: 8691 - protein, 478 aa, Artificial Sequence; identical to SEQ ID NO: 8453
  source: /note="Description of Artificial Sequence: Synthetic polypeptide"

SEQ ID NO: 8692 - protein, 469 aa, Artificial Sequence
  source: /note="Description of Artificial Sequence: Synthetic polypeptide"
MDMRVPAQLLGLLLLWLRGARCEVQLVESGGGLVKPGRSLRLSCTASGFTFGDYAMSWFRQAPGKGLEWIGFIRSRAYGGTPEYAASVKGRFTISRDDSKTIAYLQMNSLKTEDTAVYFCARGRGIAARWDYWGQGTLVTVSSASTKGPSVFPLAPCSRSTSESTAALGCLVKDYFPEPVTVSWNSGALTSGVHTFPAVLQSSGLYSLSSVVTVPSSNFGTQTYTCNVDHKPSNTKVDKTVERKCCVECPPCPAPPVAGPSVFLFPPKPKDTLMISRTPEVTCVVVDVSHEDPEVQFNWYVDGVEVHNAKTKPREEQFNSTFRVVSVLTVVHQDWLNGKEYKCKVSNKGLPAPIEKTISKTKGQPREPQVYTLPPSREEMTKNQVSLTCLVKGFYPSDIAVEWESNGQPENNYKTTPPMLDSDGSFFLYSKLTVDKSRWQQGNVFSCSVMHEALHNHYTQKSLSLSPGK

SEQ ID NO: 8693 - protein, 479 aa, Artificial Sequence
  source: /note="Description of Artificial Sequence: Synthetic polypeptide"
MDMRVPAQLLGLLLLWLRGARCEVQLVESGGGLVKPGGSLRLSCAASGFTFGNAWMSWVRQAPGKGLEWVGRIKSKTDGGTTDYAAPVKGRFTISRDDSKNTLYLQMNSLKTEDTAVYFCTTDRTGYSISWSSYYYYYGMDVWGQGTTVTVSSASTKGPSVFPLAPCSRSTSESTAALGCLVKDYFPEPVTVSWNSGALTSGVHTFPAVLQSSGLYSLSSVVTVPSSNFGTQTYTCNVDHKPSNTKVDKTVERKCCVECPPCPAPPVAGPSVFLFPPKPKDTLMISRTPEVTCVVVDVSHEDPEVQFNWYVDGVEVHNAKTKPREEQFNSTFRVVSVLTVVHQDWLNGKEYKCKVSNKGLPAPIEKTISKTKGQPREPQVYTLPPSREEMTKNQVSLTCLVKGFYPSDIAVEWESNGQPENNYKTTPPMLDSDGSFFLYSKLTVDKSRWQQGNVFSCSVMHEALHNHYTQKSLSLSPGK

SEQ ID NO: 8694 - protein, 119 aa, Artificial Sequence
  source: /note="Description of Artificial Sequence: Synthetic polypeptide"
QVQLVQSGAEVKKPGASVKVSCKASGYTFGNYWMQWVRQAPGQGLEWMGAIYEGTGKTVYIQKFAGRVTMTRDTSTSTVYMELSSLRSEDTAVYYCARLSDYVSGFGYWGQGTLVTVSS

SEQ ID NO: 8695 - protein, 241 aa, Artificial Sequence
  source: /note="Description of Artificial Sequence: Synthetic polypeptide"
MDMRVPAQLLGLLLLWLRGARCDIVMTQSPLSLPVTPGEPASISCRSSQSLLHSFGYNYLDWYLQKPGQSPQLLIYLGSNRASGVPDRFSGSGSGTDFTLKISRVEAEDVGVYYCMQALQTPFTFGPGTKVDIKRTVAAPSVFIFPPSDEQLKSGTASVVCLLNNFYPREAKVQWKVDNALQSGNSQESVTEQDSKDSTYSLSSTLTLSKADYEKHKVYACEVTHQGLSSPVTKSFNRGEC

SEQ ID NO: 8696 - protein, 238 aa, Artificial Sequence
  source: /note="Description of Artificial Sequence: Synthetic polypeptide"
MDMRVPAQLLGLLLLWLRGARCQSVLTQPPSASGTPGQRVTISCSGSSSNIGSNYVYWYQQLPGAAPKLLIFRNNQRPSGVPDRFSGSKSGTSASLAISGLRSEDEADYYCAAWDDSLSGWVFGGGTKLTVLGQPKANPTVTLFPPSSEELQANKATLVCLISDFYPGAVTVAWKADGSPVKAGVETTKPSKQSNNKYAASSYLSLTPEQWKSHRSYSCQVTHEGSTVEKTVAPTECS

SEQ ID NO: 8697 - protein, 131 aa, Artificial Sequence
  source: /note="Description of Artificial Sequence: Synthetic polypeptide"
EVQLVESGGGLVKPGGSLRLSCAASGFTFSNAWMSWVRQAPGKGLEWVGRIKSTTDGGTTDYAAPVKGRFTISRDDSKNTLYLQMNSLKTEDTAVYYCTTDRTGYSISWSSYYYYYGMDVWGQGTTVTVSS

SEQ ID NO: 8698 - protein, 130 aa, Artificial Sequence
  source: /note="Description of Artificial Sequence: Synthetic polypeptide"
EVQLLESGGGLVQPGESLRLSCAASGFTFSSYAMSWVRQAPGKGLEWVSAISGSGGRTYYADSVKGRFTISRDNSKNTLYLQMNSLRAEDTAVYYCAKDQREVGPYSSGWYDYYYGMDVWGQGTTVTVSS

SEQ ID NO: 8699 - protein, 129 aa, Artificial Sequence
  source: /note="Description of Artificial Sequence: Synthetic polypeptide"
QVQLVESGGGVVQPGRSLRLSCAASGFTFSSYGMHWVRQAPGKGLEWVAVISYDGSHESYADSVKGRFTISRDISKNTLYLQMNSLRAEDTAVYFCARERKRVTMSTLYYYFYYGMDVWGQGTTVTVSS

SEQ ID NO: 8700 - protein, 121 aa, Artificial Sequence
  source: /note="Description of Artificial Sequence: Synthetic polypeptide"
EVQLVESGGGLVKPGRSLRLSCTASGFTFGDYAMSWFRQAPGKGLEWIGFIRSRAYGGTPEYAASVKGRFTISRDDSKTIAYLQMNSLKTEDTAVYFCARGRGIAARWDYWGQGTLVTVSS

SEQ ID NO: 8701 - protein, 131 aa, Artificial Sequence
  source: /note="Description of Artificial Sequence: Synthetic polypeptide"
EVQLVESGGGLVKPGGSLRLSCAASGFTFGNAWMSWVRQAPGKGLEWVGRIKSKTDGGTTDYAAPVKGRFTISRDDSKNTLYLQMNSLKTEDTAVYFCTTDRTGYSISWSSYYYYYGMDVWGQGTTVTVSS

SEQ ID NO: 8702 - protein, 131 aa, Artificial Sequence
  source: /note="Description of Artificial Sequence: Synthetic polypeptide"
EVQLVESGGGLVKPGGSLRLSCAASGFTFGNAWMSWVRQAPGKGLEWVGRIKSKTDGGTTDYAAPVKGRFTISRDDSKNTLYLQMNSLKTEDTAVYYCTTDRTGYSISWSSYYYYYGMDVWGQGTTVTVSS

SEQ ID NO: 8703 - protein, 131 aa, Artificial Sequence
  source: /note="Description of Artificial Sequence: Synthetic polypeptide"
EVQLVESGGGLVKPGGSLRLSCAASGYTFSTYSMNWVRQAPGKGLEWVSSISSSSSYRYYADSVKGRFTISRDNAKNSLYLQMSSLRAEDTAVYYCAREGVSGSSPYSISWYDYYYGMDVWGQGTTVTVSS

SEQ ID NO: 8704 - protein, 126 aa, Artificial Sequence
  source: /note="Description of Artificial Sequence: Synthetic polypeptide"
QVQLVESGGGVVQPGRSLRLSCAASGFTFSSYGMHWVRQAPGKGLEWVAVIWYDGSNKYYADSVKGRFIISRDKSKNTLYLQMNSLRAEDTAVYYCARAGGIAAAGLYYYYGMDVWGQGTTVTVSS

SEQ ID NO: 8705 - protein, 110 aa, Artificial Sequence
  source: /note="Description of Artificial Sequence: Synthetic polypeptide"
QSVLTQPPSVSEAPGQKVTISCSGSSSNIGNNYVSWYQQLPGTAPKLLIYDNNKRPSGIPDRFSGSKSGTSATLGITGLQTGDEADYYCGTWDSRLSAVVFGGGTKLTVL

SEQ ID NO: 8706 - protein, 110 aa, Artificial Sequence
  source: /note="Description of Artificial Sequence: Synthetic polypeptide"
QSVLTQPPSASGTPGQRVTISCSGSSSNIGSNYVYWYQQLPGAAPKLLIFRSNQRPSGVPDRFSGSKSGTSASLAISGLRSEDEADYYCAAWDDSLSGWVFGGGTKLTVL

SEQ ID NO: 8707 - protein, 107 aa, Artificial Sequence
  source: /note="Description of Artificial Sequence: Synthetic polypeptide"
DIQMTQSPSSLSASVGDRVTITCRASQGIRNDLGWFQQKPGKAPKRLIYAASSLQSGVPSRFSGSGSGTEFTLTISSLQPEDLATYYCLQYNIYPWTFGQGTKVEIK

SEQ ID NO: 8708 - protein, 112 aa, Artificial Sequence
  source: /note="Description of Artificial Sequence: Synthetic polypeptide"
DIILAQTPLSLSVTPGQPASISCKSSQSLLHSAGKTYLYWYLQKPGQPPQLLIYEVSNRFSGVPDRFSGSGSGTDFTLKISRVEAEDVGIYYCMQSFPLPLTFGGGTKVEIK

SEQ ID NO: 8709 - protein, 112 aa, Artificial Sequence
  source: /note="Description of Artificial Sequence: Synthetic polypeptide"
DIVMTQSPLSLPVTPGEPASISCRSSQSLLHSFGYNYLDWYLQKPGQSPQLLIYLGSNRASGVPDRFSGSGSGTDFTLKISRVEAEDVGVYYCMQALQTPFTFGPGTKVDIK

SEQ ID NO: 8710 - protein, 112 aa, Artificial Sequence
  source: /note="Description of Artificial Sequence: Synthetic polypeptide"
DIILTQTPLSLSVTPGQPASISCKSSQSLLHSDGKTYLYWYLQKPGQPPQLLIYEVSNRFSGEPDRFSGSGSGTDFTLKISRVEAEDVGTYYCMQSFPLPLTFGGGTKVEIK

SEQ ID NO: 8711 - protein, 110 aa, Artificial Sequence
  source: /note="Description of Artificial Sequence: Synthetic polypeptide"
QSVLTQPPSVSAAPGQKVTISCSGSSSNIGNNYVSWYQQFPGTAPKLLIYDNNKRPSGIPDRFSGSKSGTSATLGITGLQTGDEADYYCGTWDSRLSAVVFGGGTKLTVL

SEQ ID NO: 8712 - protein, 110 aa, Artificial Sequence
  source: /note="Description of Artificial Sequence: Synthetic polypeptide"
QSVLTQPPSASGTPGQRVTISCSGSSSNIGSNYVYWYQQLPGAAPKLLIFRNNQRPSGVPDRFSGSKSGTSASLAISGLRSEDEADYYCAAWDDSLSGWVFGGGTKLTVL

SEQ ID NO: 8713 - protein, 112 aa, Artificial Sequence
  source: /note="Description of Artificial Sequence: Synthetic polypeptide"
DITLTQTPLSLSVSPGQPASISCKSSQSLLHSDGRNYLYWYLQKPGQPPQLLIYEVSNRFSGLPDRFSGSGSGTDFTLKISRVEAEDVGIYYCMQSFPLPLTFGGGTKVEIK

SEQ ID NO: 8714 - protein, 107 aa, Artificial Sequence
  source: /note="Description of Artificial Sequence: Synthetic polypeptide"
DIQMTQSPSSLSASVGDRVTITCRASQGIRKDLGWYQQKPGKAPKRLIYGASSLQSGVPSRFSGSGSGTEFTLTISSLQPEDFATYYCLQYNSFPWTFGQGTKVEIK

SEQ ID NO: 8715 - protein, 108 aa, Artificial Sequence
  source: /note="Description of Artificial Sequence: Synthetic polypeptide"
EIVLTQSPGTLSLSPGERATLSCRASQSVSSGYLTWYQQKPGQAPRLLIYGASSRATGIPDRFSGSGSGTDFTLTISRLEPEDFAVYYCQQYGNSLCRFGQGTKLEIK

SEQ ID NO: 8716 - protein, 108 aa, Artificial Sequence
  source: /note="Description of Artificial Sequence: Synthetic polypeptide"
EIVLTQSPGTLSLSPGERATLSCRASQSVSSGYLTWYQQKPGQAPRLLIYGASSRATGIPDRFSGSGSGTDFTLTISRLEPEDFAVYYCQQYGNSLSRFGQGTKLEIK

SEQ ID NO: 8717 - DNA, 18 bp, Oryctolagus cuniculus
aacaccaattacatgtgc

SEQ ID NO: 8718 - DNA, 36 bp, Oryctolagus cuniculus
acagcatataagagtagtaatactgatggtattgct

SEQ ID NO: 8719 - DNA, 18 bp, Oryctolagus cuniculus
agcggctacgacatgtgc

SEQ ID NO: 8720 - DNA, 18 bp, Oryctolagus cuniculus
agcggctacgacatgtgt

SEQ ID NO: 8721 - DNA, 33 bp, Artificial Sequence
  source: /note="Description of Artificial Sequence: Synthetic oligonucleotide"
ataaccagcactgatattgatgatgatatgaac

SEQ ID NO: 8722 - DNA, 36 bp, Artificial Sequence
  source: /note="Description of Artificial Sequence: Synthetic oligonucleotide"
caagatggtaactacaggtactggtacttcgatgtc

SEQ ID NO: 8723 - DNA, 36 bp, Oryctolagus cuniculus
caaggcagttttcgtgttagtggttggtactgggct

SEQ ID NO: 8724 - DNA, 27 bp, Oryctolagus cuniculus
caaggcgcttatagtggtattaatgct

SEQ ID NO: 8725 - DNA, 27 bp, Oryctolagus cuniculus
caaggcgctttttatggtgtgaatact

SEQ ID NO: 8726 - DNA, 46 bp, Artificial Sequence
  source: /note="Description of Artificial Sequence: Synthetic oligonucleotide"
caattactatttacaattacaatgcaggtacagctgcagcagtcag

SEQ ID NO: 8727 - DNA, 46 bp, Artificial Sequence
  source: /note="Description of Artificial Sequence: Synthetic oligonucleotide"
caattactatttacaattacaatgcaggtccagcttgtgcagtctg

SEQ ID NO: 8728 - DNA, 45 bp, Artificial Sequence
  source: /note="Description of Artificial Sequence: Synthetic oligonucleotide"
caattactatttacaattacaatgcaggtgcagctacagcagtgg

SEQ ID NO: 8729 - DNA, 46 bp, Artificial Sequence
  source: /note="Description of Artificial Sequence: Synthetic oligonucleotide"
caattactatttacaattacaatgcaggtgcagctggtgcaatctg

SEQ ID NO: 8730 - DNA, 46 bp, Artificial Sequence
  source: /note="Description of Artificial Sequence: Synthetic oligonucleotide"
caattactatttacaattacaatgcaggtgcagctggtggagtctg

SEQ ID NO: 8731 - DNA, 46 bp, Artificial Sequence
  source: /note="Description of Artificial Sequence: Synthetic oligonucleotide"
caattactatttacaattacaatgcaggtkcagctggtgcagtctg

SEQ ID NO: 8732 - DNA, 46 bp, Artificial Sequence
  source: /note="Description of Artificial Sequence: Synthetic oligonucleotide"
caattactatttacaattacaatgcagrtcaccttgaaggagtctg

SEQ ID NO: 8733 - DNA, 42 bp, Artificial Sequence
  source: /note="Description of Artificial Sequence: Synthetic oligonucleotide"
caattactatttacaattacaatgcagstgcagctgcaggag

SEQ ID NO: 8734 - DNA, 46 bp, Artificial Sequence
  source: /note="Description of Artificial Sequence: Synthetic oligonucleotide"
caattactatttacaattacaatgcaratgcagctggtgcagtctg

SEQ ID NO: 8735 - DNA, 46 bp, Artificial Sequence
  source: /note="Description of Artificial Sequence: Synthetic oligonucleotide"
caattactatttacaattacaatggaggtgcagctgttggagtctg

SEQ ID NO: 8736 - DNA, 46 bp, Artificial Sequence
  source: /note="Description of Artificial Sequence: Synthetic oligonucleotide"
caattactatttacaattacaatggargtgcagctggtgcagtctg

SEQ ID NO: 8737 - DNA, 46 bp, Artificial Sequence
  source: /note="Description of Artificial Sequence: Synthetic oligonucleotide"
caattactatttacaattacaatggargtgcagctggtggagtctg

SEQ ID NO: 8738 - DNA, 46 bp, Artificial Sequence
  source: /note="Description of Artificial Sequence: Synthetic oligonucleotide"
caattactatttacaattacaatgsaggtccagctggtacagtctg

SEQ ID NO: 8739 - DNA, 23 bp, Homo sapiens
cagcagcgtagcaactggcctcc

SEQ ID NO: 8740 - DNA, 39 bp, Oryctolagus cuniculus
caggccagtgaaattgttaatagaaacaaccgcttagcc

SEQ ID NO: 8741 - DNA, 39 bp, Oryctolagus cuniculus
caggccagtgagagtgttgagagtggcaactggttagcc

SEQ ID NO: 8742 - DNA, 27 bp, Oryctolagus cuniculus
cagggcgcttatagtggtattaatgtt

SEQ ID NO: 8743 - DNA, 36 bp, Oryctolagus cuniculus
cagtccagtcagagtgttaatcagaacgacttatcc

SEQ ID NO: 8744 - DNA, 39 bp, Oryctolagus cuniculus
cagtccagtcagagtgttgagaatggcaactggttagcc

SEQ ID NO: 8745 - DNA, 39 bp, Oryctolagus cuniculus
cagtccagtcagagtgttgagaatggcaactggttaggc

SEQ ID NO: 8746 - DNA, 18 bp, Artificial Sequence
  source: /note="Description of Artificial Sequence: Synthetic oligonucleotide"
cgcacagtaatacacggc

SEQ ID NO: 8747 - DNA, 21 bp, Oryctolagus cuniculus
ctggcatccactctggaatct

SEQ ID NO: 8748 - DNA, 21 bp, Oryctolagus cuniculus
ctggcatccactctggcatct

SEQ ID NO: 8749 - DNA, 21 bp, Oryctolagus cuniculus
ctggcttccactccggcatct

SEQ ID NO: 8750 - DNA, 30 bp, Oryctolagus cuniculus
gaaagcggtagtggctgggcacttaacttg

SEQ ID NO: 8751 - DNA, 30 bp, Oryctolagus cuniculus
gaaagcggtagtggctgggcgcttaacttg

SEQ ID NO: 8752 - DNA, 21 bp, Artificial Sequence
  source: /note="Description of Artificial Sequence: Synthetic oligonucleotide"
gaaggcaatactcttcgtcct

SEQ ID NO: 8753 - DNA, 296 bp, Homo sapiens
gaggtgcagctggtggagtctgggggaggcttggtacagcctggggggtccctgagactctcctgtgcagcctctggattcacctttagcagctatgccatgagctgggtccgccaggctccagggaaggggctggagtgggtctcagctattagtggtagtggtggtagcacatactacgcagactccgtgaagggccggttcaccatctccagagacaattccaagaacacgctgtatctgcaaatgaacagcctgagagccgaggacacggccgtatattactgtgcgaaaga

SEQ ID NO: 8754 - DNA, 17 bp, Artificial Sequence
  source: /note="Description of Artificial Sequence: Synthetic oligonucleotide"
gccgtgtattactgtgc

SEQ ID NO: 8755 - DNA, 39 bp, Artificial Sequence
  source: /note="Description of Artificial Sequence: Synthetic oligonucleotide"
ggagacgagggggaaaagggttgaggagacggtgaccag

SEQ ID NO: 8756 - DNA, 18 bp, Oryctolagus cuniculus
ggcgcccactacatgtgc

SEQ ID NO: 8757 - DNA, 30 bp, Artificial Sequence
  source: /note="Description of Artificial Sequence: Synthetic oligonucleotide"
ggcttcaccttcagcagtagctatataagt

SEQ ID NO: 8758 - DNA, 39 bp, Oryctolagus cuniculus
ggtcatgctatttatgataattatgatagtgtccacttg

SEQ ID NO: 8759 - DNA, 42 bp, Artificial Sequence
  source: /note="Description of Artificial Sequence: Synthetic oligonucleotide"
taatacgactcactatagggacaattactatttacaattaca

SEQ ID NO: 8760 - DNA, 21 bp, Oryctolagus cuniculus
tatacatccactctggcatct

SEQ ID NO: 8761 - DNA, 21 bp, Oryctolagus cuniculus
tatgcatccactctggcatct

SEQ ID NO: 8762 - DNA, 30 bp, Oryctolagus cuniculus
tctgatagtaatggtcatacctttaacttg

SEQ ID NO: 8763 - DNA, 54 bp, Oryctolagus cuniculus
tgcacttatggtggtagtgttgatatcactttctacgcgagctgggcgaaaggc

SEQ ID NO: 8764 - DNA, 54 bp, Oryctolagus cuniculus
tgcatgcccgttggttttattgccagcactttctacgcgacctgggcgaaaggc

SEQ ID NO: 8765 - DNA, 57 bp, Oryctolagus cuniculus
tgcatttatagtggtgatgataatgatattacttattacgcgagctgggcgagaggc

SEQ ID NO: 8766 - DNA, 51 bp, Artificial Sequence
  source: /note="Description of Artificial Sequence: Synthetic oligonucleotide"
tggatttatgctggaactggtggtactagctataatcagaagttcacaggc

SEQ ID NO: 8767 - DNA, 51 bp, Oryctolagus cuniculus
tgtatttaccctaataatcctgtcacttactacgcgagctgggcgaaaggc

SEQ ID NO: 8768 - DNA, 54 bp, Oryctolagus cuniculus
tgtatttatggtggtagtgttgatataactttctacgcgagctgggcgaaaggc

SEQ ID NO: 8769 - DNA, 27 bp, Artificial Sequence
  source: /note="Description of Artificial Sequence: Synthetic oligonucleotide"
ttgcaaagtgataacttgcctctcacg

SEQ ID NO: 8770 - DNA, 87 bp, Artificial Sequence
  source: /note="Description of Artificial Sequence: Synthetic oligonucleotide"
ttttttttttttttttttttaaatagcggatgctaaggacgacttgtcgtcgtcgtccttgtagtcggagacgagggggaaaagggt

SEQ ID NO: 8771 - protein, 13 aa, Artificial Sequence
  source: /note="Description of Artificial Sequence: Synthetic peptide"
AGGYITSSDIFYD

SEQ ID NO: 8772 - protein, 10 aa, Artificial Sequence
  source: /note="Description of Artificial Sequence: Synthetic peptide"
AGGYSGNIHV

SEQ ID NO: 8773 - protein, 10 aa, Artificial Sequence
  source: /note="Description of Artificial Sequence: Synthetic peptide"
AGGYSGNIYA

SEQ ID NO: 8774 - protein, 9 aa, Artificial Sequence
  source: /note="Description of Artificial Sequence: Synthetic peptide"
AILGSSKGL

SEQ ID NO: 8775 - protein, 9 aa, Artificial Sequence
  source: /note="Description of Artificial Sequence: Synthetic peptide"
AVPGSGKGL

SEQ ID NO: 8776 - protein, 9 aa, Artificial Sequence
  source: /note="Description of Artificial Sequence: Synthetic peptide"
AVPGSSKGL

SEQ ID NO: 8777 - protein, 14 aa, Artificial Sequence
  source: /note="Description of Artificial Sequence: Synthetic peptide"
CDNSAGDWSYGMDL

SEQ ID NO: 8778 - protein, 7 aa, Artificial Sequence
  source: /note="Description of Artificial Sequence: Synthetic peptide"
DASDLAS

SEQ ID NO: 8779 - protein, 5 aa, Artificial Sequence
  source: /note="Description of Artificial Sequence: Synthetic peptide"
DYDMS

SEQ ID NO: 8780 - protein, 5 aa, Artificial Sequence
  source: /note="Description of Artificial Sequence: Synthetic peptide"
DYIIN

SEQ ID NO: 8781 - protein, 16 aa, Artificial Sequence
  source: /note="Description of Artificial Sequence: Synthetic peptide"
FITRGGTTYYASWAKG

SEQ ID NO: 8782 - protein, 4 aa, Artificial Sequence
  source: /note="Description of Artificial Sequence: Synthetic peptide"
FVLL

SEQ ID NO: 8783 - protein, 7 aa, Artificial Sequence
  source: /note="Description of Artificial Sequence: Synthetic peptide"
GGSYYDL

SEQ ID NO: 8784 - protein, 8 aa, Artificial Sequence
  source: /note="Description of Artificial Sequence: Synthetic peptide"
GGVATSNF

SEQ ID NO: 8785 - protein, 10 aa, Artificial Sequence
  source: /note="Description of Artificial Sequence: Synthetic peptide"
GGWVSGPESL

SEQ ID NO: 8786 - protein, 9 aa, Artificial Sequence
  source: /note="Description of Artificial Sequence: Synthetic peptide"
GSGASGFYL

SEQ ID NO: 8787 - protein, 16 aa, Artificial Sequence
  source: /note="Description of Artificial Sequence: Synthetic peptide"
IIGKSGSTAYASWAKG

SEQ ID NO: 8788 - protein, 16 aa, Artificial Sequence
  source: /note="Description of Artificial Sequence: Synthetic peptide"
IIGRSGSTNYASWAKG

SEQ ID NO: 8789 - protein, 16 aa, Artificial Sequence
  source: /note="Description of Artificial Sequence: Synthetic peptide"
IMGTSGTAYYASWAKG

SEQ ID NO: 8790 - protein, 16 aa, Artificial Sequence
  source: /note="Description of Artificial Sequence: Synthetic peptide"
IVGKSGIIKYASWAKG

SEQ ID NO: 8791 - protein, 5 aa, Artificial Sequence
  source: /note="Description of Artificial Sequence: Synthetic peptide"
IYDMS

SEQ ID NO: 8792 - protein, 5 aa, Artificial Sequence
  source: /note="Description of Artificial Sequence: Synthetic peptide"
KWPMT

SEQ ID NO: 8793 - protein, 13 aa, Artificial Sequence
  source: /note="Description of Artificial Sequence: Synthetic peptide"
LGAYDCSGVDCSA

SEQ ID NO: 8794 - protein, 13 aa, Artificial Sequence
  source: /note="Description of Artificial Sequence: Synthetic peptide"
LGSYDCSSADCNA

SEQ ID NO: 8795 - protein, 4 aa, Artificial Sequence
  source: /note="Description of Artificial Sequence: Synthetic peptide"
LWSL

SEQ ID NO: 8796 - protein, 16 aa, Artificial Sequence
  source: /note="Description of Artificial Sequence: Synthetic peptide"
MVRRSGTTYYASWAKG

SEQ ID NO: 8797 - protein, 5 aa, Artificial Sequence
  source: /note="Description of Artificial Sequence: Synthetic peptide"
NYDMT

SEQ ID NO: 8798 - protein, 5 aa, Artificial Sequence
  source: /note="Description of Artificial Sequence: Synthetic peptide"
NYHMG

SEQ ID NO: 8799 - protein, 11 aa, Artificial Sequence
  source: /note="Description of Artificial Sequence: Synthetic peptide"
QASQSISNWLA

SEQ ID NO: 8800 - protein, 11 aa, Artificial Sequence
  source: /note="Description of Artificial Sequence: Synthetic peptide"
QASQSIYSYLA

SEQ ID NO: 8801 - protein, 13 aa, Artificial Sequence
  source: /note="Description of Artificial Sequence: Synthetic peptide"
QASQSVYQNNYLA

SEQ ID NO: 8802 - protein, 10 aa, Artificial Sequence
  source: /note="Description of Artificial Sequence: Synthetic peptide"
QAYFTGEIFP

SEQ ID NO: 8803 - protein, 12 aa, Artificial Sequence
  source: /note="Description of Artificial Sequence: Synthetic peptide"
QHGYISGNVDNA

SEQ ID NO: 8804 - protein, 12 aa, Artificial Sequence
  source: /note="Description of Artificial Sequence: Synthetic peptide"
QSDYGIDTYGSA

SEQ ID NO: 8805 - protein, 13 aa, Artificial Sequence
  source: /note="Description of Artificial Sequence: Synthetic peptide"
QSSPSVYGNNWLG

SEQ ID NO: 8806 - protein, 12 aa, Artificial Sequence
  source: /note="Description of Artificial Sequence: Synthetic peptide"
QSSQSIYTNYLS

SEQ ID NO: 8807 - protein, 13 aa, Artificial Sequence
  source: /note="Description of Artificial Sequence: Synthetic peptide"
QSSQSVDNNNYLS

SEQ ID NO: 8808 - protein, 13 aa, Artificial Sequence
  source: /note="Description of Artificial Sequence: Synthetic peptide"
QSSQSVNNNNFLS

SEQ ID NO: 8809 - protein, 13 aa, Artificial Sequence
  source: /note="Description of Artificial Sequence: Synthetic peptide"
QSSQSVWKNNDLS

SEQ ID NO: 8810 - protein, 13 aa, Artificial Sequence
  source: /note="Description of Artificial Sequence: Synthetic peptide"
QSSQSVYGNNWLG

SEQ ID NO: 8811 - protein, 13 aa, Artificial Sequence
  source: /note="Description of Artificial Sequence: Synthetic peptide"
QSSQSVYKNNDLA

SEQ ID NO: 8812 - protein, 7 aa, Artificial Sequence
  source: /note="Description of Artificial Sequence: Synthetic peptide"
RASTLAS

SEQ ID NO: 8813 - protein, 7 aa, Artificial Sequence
  source: /note="Description of Artificial Sequence: Synthetic peptide"
SASTLAS

SEQ ID NO: 8814 - protein, 7 aa, Artificial Sequence
  source: /note="Description of Artificial Sequence: Synthetic peptide"
SASYLAS

SEQ ID NO: 8815 - protein, 16 aa, Artificial Sequence
  source: /note="Description of Artificial Sequence: Synthetic peptide"
SIFVSGNIYYASWAKG

SEQ ID NO: 8816 - protein, 16 aa, Artificial Sequence
  source: /note="Description of Artificial Sequence: Synthetic peptide"
SIYVSGNIYYASWAKG

SEQ ID NO: 8817 - protein, 5 aa, Artificial Sequence
  source: /note="Description of Artificial Sequence: Synthetic peptide"
SYAMT

SEQ ID NO: 8818 - protein, 16 aa, Artificial Sequence
  source: /note="Description of Artificial Sequence: Synthetic peptide"
TIYVSGNTYYATWAKG

SEQ ID NO: 8819 - protein, 5 aa, Artificial Sequence
  source: /note="Description of Artificial Sequence: Synthetic peptide"
TNAMI

SEQ ID NO: 8820 - protein, 5 aa, Artificial Sequence
  source: /note="Description of Artificial Sequence: Synthetic peptide"
TYAMS

SEQ ID NO: 8821 - protein, 10 aa, Artificial Sequence
  source: /note="Description of Artificial Sequence: Synthetic peptide"
VGGYSGNIHV

SEQ ID NO: 8822 - protein, 13 aa, Artificial Sequence
  source: /note="Description of Artificial Sequence: Synthetic peptide"
VGSYDCSSADCNA

SEQ ID NO: 8823 - protein, 16 aa, Artificial Sequence
  source: /note="Description of Artificial Sequence: Synthetic peptide"
VIAGSGSTSYASWAKG

SEQ ID NO: 8824 - protein, 7 aa, Artificial Sequence
  source: /note="Description of Artificial Sequence: Synthetic peptide"
YASTLAS

SEQ ID NO: 8825 - protein, 7 aa, Artificial Sequence
  source: /note="Description of Artificial Sequence: Synthetic peptide"
AASDLAS

SEQ ID NO: 8826 - protein, 7 aa, Homo sapiens
AASSLQR

SEQ ID NO: 8827 - protein, 7 aa, Llama glama
ADNRRPS

SEQ ID NO: 8828 - protein, 7 aa, Llama glama
ADSRRPS

SEQ ID NO: 8829 - protein, 5 aa, Llama glama
AGGEY

SEQ ID NO: 8830 - protein, 5 aa, Llama glama
AGMST

SEQ ID NO: 8831 - protein, 14 aa, Llama glama
AGTSSDVGYGDYVS

SEQ ID NO: 8832 - protein, 14 aa, Llama glama
AGTSSDVGYGNYVS

SEQ ID NO: 8833 - protein, 12 aa, Artificial Sequence
  source: /note="Description of Artificial Sequence: Synthetic peptide"
AGYKSSTTDAVA

SEQ ID NO: 8834 - protein, 16 aa, Llama glama
AIAYSGSTYYSPSLQS

SEQ ID NO: 8835 - protein, 16 aa, Llama glama
AIAYTGSTYISPSLKS

SEQ ID NO: 8836 - protein, 17 aa, Llama glama
AINKSGGSTYYADSVKG

SEQ ID NO: 8837 - protein, 17 aa, Llama glama
AINSGGGSTYYGDAVKG

SEQ ID NO: 8838 - protein, 17 aa, Llama glama
AINTGGGSTYYADSVKG

SEQ ID NO: 8839 - protein, 17 aa, Llama glama
AISWNGGSTYYAESMKG

SEQ ID NO: 8840 - protein, 12 aa, Homo sapiens
AKGGLAVPGPNY

SEQ ID NO: 8841 - protein, 12 aa, Llama glama
ALSRVSGTYGTV

SEQ ID NO: 8842 - protein, 17 aa, Llama glama
AMNPGGGSTYYADSVKG

SEQ ID NO: 8843 - protein, 15 aa, Llama glama
AMVTTSSPWVKTFGA

SEQ ID NO: 8844 - protein, 9 aa, Llama glama
AQAIYYPPS

SEQ ID NO: 8845 - protein, 9 aa, Llama glama
AQATFKKIT

SEQ ID NO: 8846 - protein, 9 aa, Llama glama
AQATYSLYS

SEQ ID NO: 8847 - protein, 9 aa, Llama glama
AQATYVPLG

SEQ ID NO: 8848 - protein, 8 aa, Llama glama
AQATYYPT

SEQ ID NO: 8849 - protein, 9 aa, Llama glama
AQATYYPYT

SEQ ID NO: 8850 - protein, 9 aa, Llama glama
AQDTYYPYS

SEQ ID NO: 8851 - protein, 9 aa, Llama glama
AQHTYYPPS

SEQ ID NO: 8852 - protein, 9 aa, Llama glama
AQTTYDPVT

SEQ ID NO: 8853 - protein, 9 aa, Llama glama
AQTTYFPIA

SEQ ID NO: 8854 - protein, 9 aa, Llama glama
AQTTYYPPT

SEQ ID NO: 8855 - protein, 9 aa, Llama glama
AQVTRYPVT

SEQ ID NO: 8856 - protein, 8 aa, Llama glama
AQVTYAAS

SEQ ID NO: 8857 - protein, 9 aa, Homo sapiens
ARDGAPQDH

SEQ ID NO: 8858 - protein, 10 aa, Homo sapiens
ARGAAAGTDY

SEQ ID NO: 8859 - protein, 18 aa, Homo sapiens
ARGFTMVRGAPYYDGLDV

SEQ ID NO: 8860 - protein, 18 aa, Homo sapiens
ARGFTMVRGAPYYDGMDV

SEQ ID NO: 8861 - protein, 10 aa, Llama glama
ASYKYSNNVV

SEQ ID NO: 8862 - protein, 10 aa, Llama glama
ASYRSANNAV

SEQ ID NO: 8863 - protein, 10 aa, Llama glama
ASYRSSVNVV

SEQ ID NO: 8864 - protein, 18 aa, Artificial Sequence
  source: /note="Description of Artificial Sequence: Synthetic peptide"
CIYGGSINIINYASWAKG

SEQ ID NO: 8865 - protein, 18 aa, Oryctolagus cuniculus
CIYGGSVDITFYASWAKG

SEQ ID NO: 8866 - protein, 17 aa, Oryctolagus cuniculus
CIYPNNPVTYYASWAKG

SEQ ID NO: 8867 - protein, 19 aa, Oryctolagus cuniculus
CIYSGDDNDITYYASWARG

SEQ ID NO: 8868 - protein, 18 aa, Oryctolagus cuniculus
CMPVGFIASTFYATWAKG

SEQ ID NO: 8869 - protein, 18 aa, Oryctolagus cuniculus
CTYGGSVDITFYASWAKG

SEQ ID NO: 8870 - protein, 41 aa, Artificial Sequence
  source: /note="Description of Artificial Sequence: Synthetic polypeptide"
  MOD_RES (2)..(5): Any amino acid
  MOD_RES (7)..(12): Any amino acid
  MOD_RES (14)..(22): Any amino acid
  MOD_RES (24)..(25): Any amino acid
  MOD_RES (27)..(37): Any amino acid
  MOD_RES (39)..(41): Any amino acid
CXXXXCXXXXXXCXXXXXXXXXCXXCXXXXXXXXXXXCXXX

SEQ ID NO: 8871 - protein, 29 aa, Artificial Sequence
  source: /note="Description of Artificial Sequence: Synthetic peptide"
  MOD_RES (2)..(7): Any amino acid
  MOD_RES (9)..(12): Any amino acid
  MOD_RES (14)..(14): Any amino acid
  MOD_RES (16)..(19): Any amino acid
  MOD_RES (21)..(25): Any amino acid
  MOD_RES (27)..(29): Any amino acid
CXXXXXXCXXXXCXCXXXXCXXXXXCXXX

SEQ ID NO: 8872 - protein, 41 aa, Artificial Sequence
  source: /note="Description of Artificial Sequence: Synthetic polypeptide"
  MOD_RES (2)..(7): Any amino acid
  MOD_RES (9)..(12): Any amino acid
  MOD_RES (14)..(18): Any amino acid
  MOD_RES (20)..(24): Any amino acid
  MOD_RES (26)..(37): Any amino acid
  MOD_RES (39)..(41): Any amino acid
CXXXXXXCXXXXCXXXXXCXXXXXCXXXXXXXXXXXXCXXX

SEQ ID NO: 8873 - protein, 40 aa, Artificial Sequence
  source: /note="Description of Artificial Sequence: Synthetic polypeptide"
  MOD_RES (2)..(8): Any amino acid
  MOD_RES (10)..(12): Any amino acid
  MOD_RES (14)..(14): Any amino acid
  MOD_RES (16)..(16): Any amino acid
  MOD_RES (18)..(21): Any amino acid
  MOD_RES (23)..(27): Any amino acid
  MOD_RES (29)..(37): Any amino acid
  MOD_RES (39)..(40): Any amino acid
CXXXXXXXCXXXCXCXCXXXXCXXXXXCXXXXXXXXXCXX

SEQ ID NO: 8874 - protein, 37 aa, Artificial Sequence
  source: /note="Description of Artificial Sequence: Synthetic polypeptide"
  MOD_RES (2)..(8): Any amino acid
  MOD_RES (10)..(12): Any amino acid
  MOD_RES (14)..(18): Any amino acid
  MOD_RES (20)..(24): Any amino acid
  MOD_RES (26)..(34): Any amino acid
  MOD_RES (36)..(37): Any amino acid
CXXXXXXXCXXXCXXXXXCXXXXXCXXXXXXXXXCXX

SEQ ID NO: 8875 - protein, 48 aa, Artificial Sequence
  source: /note="Description of Artificial Sequence: Synthetic polypeptide"
  MOD_RES (2)..(8): Any amino acid
  MOD_RES (10)..(12): Any amino acid
  MOD_RES (14)..(19): Any amino acid
  MOD_RES (21)..(25): Any amino acid
  MOD_RES (27)..(27): Any amino acid
  MOD_RES (29)..(33): Any amino acid
  MOD_RES (35)..(44): Any amino acid
  MOD_RES (46)..(48): Any amino acid
CXXXXXXXCXXXCXXXXXXCXXXXXCXCXXXXXCXXXXXXXXXXCXXX

SEQ ID NO: 8876 - protein, 22 aa, Artificial Sequence
  source: /note="Description of Artificial Sequence: Synthetic peptide"
  MOD_RES (2)..(8): Any amino acid
  MOD_RES (10)..(14): Any amino acid
  MOD_RES (16)..(16): Any amino acid
  MOD_RES (18)..(19): Any amino acid
  MOD_RES (21)..(22): Any amino acid
CXXXXXXXCXXXXXCXCXXCXX

SEQ ID NO: 8877 - protein, 37 aa, Artificial Sequence
  source: /note="Description of Artificial Sequence: Synthetic polypeptide"
  MOD_RES (2)..(8): Any amino acid
  MOD_RES (10)..(15): Any amino acid
  MOD_RES (17)..(19): Any amino acid
  MOD_RES (21)..(23): Any amino acid
  MOD_RES (25)..(33): Any amino acid
  MOD_RES (35)..(37): Any amino acid
CXXXXXXXCXXXXXXCXXXCXXXCXXXXXXXXXCXXX

SEQ ID NO: 8878 - protein, 29 aa, Artificial Sequence
  source: /note="Description of Artificial Sequence: Synthetic peptide"
  MOD_RES (2)..(9): Any amino acid
  MOD_RES (11)..(12): Any amino acid
  MOD_RES (14)..(19): Any amino acid
  MOD_RES (21)..(25): Any amino acid
  MOD_RES (27)..(29): Any amino acid
CXXXXXXXXCXXCXXXXXXCXXXXXCXXX

SEQ ID NO: 8879 - protein, 38 aa, Artificial Sequence
  source: /note="Description of Artificial Sequence: Synthetic polypeptide"
  MOD_RES (2)..(10): Any amino acid
  MOD_RES (12)..(18): Any amino acid
  MOD_RES (20)..(24): Any amino acid
  MOD_RES (26)..(26): Any amino acid
  MOD_RES (28)..(34): Any amino acid
  MOD_RES (36)..(38): Any amino acid
CXXXXXXXXXCXXXXXXXCXXXXXCXCXXXXXXXCXXX

SEQ ID NO: 8880 - protein, 42 aa, Artificial Sequence
  source: /note="Description of Artificial Sequence: Synthetic polypeptide"
  MOD_RES (2)..(10): Any amino acid
  MOD_RES (12)..(19): Any amino acid
  MOD_RES (21)..(25): Any amino acid
  MOD_RES (27)..(32): Any amino acid
  MOD_RES (34)..(38): Any amino acid
  MOD_RES (40)..(42): Any amino acid
CXXXXXXXXXCXXXXXXXXCXXXXXCXXXXXXCXXXXXCXXX

SEQ ID NO: 8881 - protein, 36 aa, Artificial Sequence
  source: /note="Description of Artificial Sequence: Synthetic polypeptide"
  MOD_RES (2)..(11): Any amino acid
  MOD_RES (13)..(13): Any amino acid
  MOD_RES (15)..(18): Any amino acid
  MOD_RES (20)..(24): Any amino acid
  MOD_RES (26)..(26): Any amino acid
  MOD_RES (28)..(29): Any amino acid
  MOD_RES (31)..(33): Any amino acid
  MOD_RES (35)..(36): Any amino acid
CXXXXXXXXXXCXCXXXXCXXXXXCXCXXCXXXCXX

SEQ ID NO: 8882 - protein, 40 aa, Artificial Sequence
  source: /note="Description of Artificial Sequence: Synthetic polypeptide"
  MOD_RES (2)..(11): Any amino acid
  MOD_RES (13)..(13): Any amino acid
  MOD_RES (15)..(18): Any amino acid
  MOD_RES (20)..(24): Any amino acid
  MOD_RES (26)..(36): Any amino acid
  MOD_RES (38)..(40): Any amino acid
CXXXXXXXXXXCXCXXXXCXXXXXCXXXXXXXXXXXCXXX

SEQ ID NO: 8883 - protein, 24 aa, Artificial Sequence
  source: /note="Description of Artificial Sequence: Synthetic peptide"
  MOD_RES (2)..(11): Any amino acid
  MOD_RES (13)..(13): Any amino acid
  MOD_RES (15)..(20): Any amino acid
  MOD_RES (22)..(24): Any amino acid
CXXXXXXXXXXCXCXXXXXXCXXX

SEQ ID NO: 8884 - protein, 30 aa, Artificial Sequence
  source: /note="Description of Artificial Sequence: Synthetic polypeptide"
  MOD_RES (2)..(11): Any amino acid
  MOD_RES (13)..(13): Any amino acid
  MOD_RES (15)..(20): Any amino acid
  MOD_RES (22)..(25): Any amino acid
  MOD_RES (27)..(27): Any amino acid
  MOD_RES (29)..(30): Any amino acid
CXXXXXXXXXXCXCXXXXXXCXXXXCXCXX

SEQ ID NO: 8885 - protein, 49 aa, Artificial Sequence
  source: /note="Description of Artificial Sequence: Synthetic polypeptide"
  MOD_RES (2)..(11): Any amino acid
  MOD_RES (13)..(14): Any amino acid
  MOD_RES (16)..(17): Any amino acid
  MOD_RES (19)..(25): Any amino acid
  MOD_RES (27)..(27): Any amino acid
  MOD_RES (29)..(39): Any amino acid
  MOD_RES (41)..(45): Any amino acid
  MOD_RES (47)..(49): Any amino acid
CXXXXXXXXXXCXXCXXCXXXXXXXCXCXXXXXXXXXXXCXXXXXCXXX

SEQ ID NO: 8886 - protein, 46 aa, Artificial Sequence
  source: /note="Description of Artificial Sequence: Synthetic polypeptide"
  MOD_RES (2)..(11): Any amino acid
  MOD_RES (13)..(15): Any amino acid
  MOD_RES (17)..(19): Any amino acid
  MOD_RES (21)..(25): Any amino acid
  MOD_RES (27)..(33): Any amino acid
  MOD_RES (35)..(35): Any amino acid
  MOD_RES (37)..(42): Any amino acid
  MOD_RES (44)..(46): Any amino acid
CXXXXXXXXXXCXXXCXXXCXXXXXCXXXXXXXCXCXXXXXXCXXX

SEQ ID NO: 8887 - protein, 42 aa, Artificial Sequence
  source: /note="Description of Artificial Sequence: Synthetic polypeptide"
  MOD_RES (2)..(11): Any amino acid
  MOD_RES (13)..(16): Any amino acid
  MOD_RES (18)..(22): Any amino acid
  MOD_RES (24)..(35): Any amino acid
  MOD_RES (37)..(38): Any amino acid
  MOD_RES (40)..(42): Any amino acid
CXXXXXXXXXXCXXXXCXXXXXCXXXXXXXXXXXXCXXCXXX

SEQ ID NO: 8888 - protein, 38 aa, Artificial Sequence
  source: /note="Description of Artificial Sequence: Synthetic polypeptide"
  MOD_RES (2)..(11): Any amino acid
  MOD_RES (13)..(16): Any amino acid
  MOD_RES (18)..(24): Any amino acid
  MOD_RES (26)..(26): Any amino acid
  MOD_RES (28)..(34): Any amino acid
  MOD_RES (36)..(38): Any amino acid
CXXXXXXXXXXCXXXXCXXXXXXXCXCXXXXXXXCXXX

SEQ ID NO: 8889 - protein, 39 aa, Artificial Sequence
  source: /note="Description of Artificial Sequence: Synthetic polypeptide"
  MOD_RES (2)..(11): Any amino acid
  MOD_RES (13)..(16): Any amino acid
  MOD_RES (18)..(24): Any amino acid
  MOD_RES (26)..(26): Any amino acid
  MOD_RES (28)..(35): Any amino acid
  MOD_RES (37)..(39): Any amino acid
CXXXXXXXXXXCXXXXCXXXXXXXCXCXXXXXXXXCXXX

SEQ ID NO: 8890 - protein, 37 aa, Artificial Sequence
  source: /note="Description of Artificial Sequence: Synthetic polypeptide"
  MOD_RES (2)..(11): Any amino acid
  MOD_RES (13)..(17): Any amino acid
  MOD_RES (19)..(19): Any amino acid
  MOD_RES (21)..(24): Any amino acid
  MOD_RES (26)..(33): Any amino acid
  MOD_RES (35)..(37): Any amino acid
CXXXXXXXXXXCXXXXXCXCXXXXCXXXXXXXXCXXX

SEQ ID NO: 8891 - protein, 39 aa, Artificial Sequence
  source: /note="Description of Artificial Sequence: Synthetic polypeptide"
  MOD_RES (2)..(11): Any amino acid
  MOD_RES (13)..(17): Any amino acid
  MOD_RES (19)..(19): Any amino acid
  MOD_RES (21)..(28): Any amino acid
  MOD_RES (30)..(35): Any amino acid
  MOD_RES (37)..(39): Any amino acid
CXXXXXXXXXXCXXXXXCXCXXXXXXXXCXXXXXXCXXX

SEQ ID NO: 8892 - protein, 31 aa, Artificial Sequence
  source: /note="Description of Artificial Sequence: Synthetic polypeptide"
  MOD_RES (2)..(11): Any amino acid
  MOD_RES (13)..(17): Any amino acid
  MOD_RES (19)..(23): Any amino acid
  MOD_RES (25)..(25): Any amino acid
  MOD_RES (27)..(28): Any amino acid
  MOD_RES (30)..(31): Any amino acid
CXXXXXXXXXXCXXXXXCXXXXXCXCXXCXX

SEQ ID NO: 8893 - protein, 37 aa, Artificial Sequence
  source: /note="Description of Artificial Sequence: Synthetic polypeptide"
  MOD_RES (2)..(11): Any amino acid
  MOD_RES (13)..(17): Any amino acid
  MOD_RES (19)..(23): Any amino acid
  MOD_RES (25)..(25): Any amino acid
  MOD_RES (27)..(33): Any amino acid
  MOD_RES (35)..(37): Any amino acid
CXXXXXXXXXXCXXXXXCXXXXXCXCXXXXXXXCXXX

SEQ ID NO: 8894 - protein, 39 aa, Artificial Sequence
  source: /note="Description of Artificial Sequence: Synthetic polypeptide"
  MOD_RES (2)..(11): Any amino acid
  MOD_RES (13)..(17): Any amino acid
  MOD_RES (19)..(23): Any amino acid
  MOD_RES (25)..(25): Any amino acid
  MOD_RES (27)..(36): Any amino acid
  MOD_RES (38)..(39): Any amino acid
CXXXXXXXXXXCXXXXXCXXXXXCXCXXXXXXXXXXCXX

SEQ ID NO: 8895 - protein, 27 aa, Artificial Sequence
  source: /note="Description of Artificial Sequence: Synthetic peptide"
  MOD_RES (2)..(11): Any amino acid
  MOD_RES (13)..(17): Any amino acid
  MOD_RES (19)..(23): Any amino acid
  MOD_RES (25)..(27): Any amino acid
CXXXXXXXXXXCXXXXXCXXXXXCXXX

SEQ ID NO: 8896 - protein, 38 aa, Artificial Sequence
  source: /note="Description of Artificial Sequence: Synthetic polypeptide"
  MOD_RES (2)..(11): Any amino acid
  MOD_RES (13)..(17): Any amino acid
  MOD_RES (19)..(24): Any amino acid
  MOD_RES (26)..(26): Any amino acid
  MOD_RES (28)..(34): Any amino acid
  MOD_RES (36)..(38): Any amino acid
CXXXXXXXXXXCXXXXXCXXXXXXCXCXXXXXXXCXXX

SEQ ID NO: 8897 - protein, 46 aa, Artificial Sequence
  source: /note="Description of Artificial Sequence: Synthetic polypeptide"
  MOD_RES (2)..(11): Any amino acid
  MOD_RES (13)..(18): Any amino acid
  MOD_RES (20)..(24): Any amino acid
  MOD_RES (26)..(26): Any amino acid
  MOD_RES (28)..(29): Any amino acid
  MOD_RES (31)..(36): Any amino acid
  MOD_RES (38)..(42): Any amino acid
  MOD_RES (44)..(46): Any amino acid
CXXXXXXXXXXCXXXXXXCXXXXXCXCXXCXXXXXXCXXXXXCXXX

SEQ ID NO: 8898 - protein, 61 aa, Artificial Sequence
  source: /note="Description of Artificial Sequence: Synthetic polypeptide"
  MOD_RES (2)..(11): Any amino acid
  MOD_RES (13)..(18): Any amino acid
  MOD_RES (20)..(24): Any amino acid
  MOD_RES (26)..(26): Any amino acid
  MOD_RES (28)..(29): Any amino acid
  MOD_RES (31)..(38): Any amino acid
  MOD_RES (40)..(43): Any amino acid
  MOD_RES (45)..(61): Any amino acid
CXXXXXXXXXXCXXXXXXCXXXXXCXCXXCXXXXXXXXCXXXXCXXXXXXXXXXXXXXXXX

SEQ ID NO: 8899 - protein, 46 aa, Artificial Sequence
  source: /note="Description of Artificial Sequence: Synthetic polypeptide"
  MOD_RES (2)..(11): Any amino acid
  MOD_RES (13)..(18): Any amino acid
  MOD_RES (20)..(24): Any amino acid
  MOD_RES (26)..(26): Any amino acid
  MOD_RES (28)..(30): Any amino acid
  MOD_RES (32)..(39): Any amino acid
  MOD_RES (41)..(42): Any amino acid
  MOD_RES (44)..(46): Any amino acid
CXXXXXXXXXXCXXXXXXCXXXXXCXCXXXCXXXXXXXXCXXCXXX

SEQ ID NO: 8900 - protein, 47 aa, Artificial Sequence
  source: /note="Description of Artificial Sequence: Synthetic polypeptide"
  MOD_RES (2)..(11): Any amino acid
  MOD_RES (13)..(18): Any amino acid
  MOD_RES (20)..(24): Any amino acid
  MOD_RES (26)..(26): Any amino acid
  MOD_RES (28)..(31): Any amino acid
  MOD_RES (33)..(33): Any amino acid
  MOD_RES (35)..(43): Any amino acid
  MOD_RES (45)..(47): Any amino acid
CXXXXXXXXXXCXXXXXXCXXXXXCXCXXXXCXCXXXXXXXXXCXXX

SEQ ID NO: 8901 - protein, 37 aa, Artificial Sequence
  source: /note="Description of Artificial Sequence: Synthetic polypeptide"
  MOD_RES (2)..(11): Any amino acid
  MOD_RES (13)..(18): Any amino acid
  MOD_RES (20)..(24): Any amino acid
  MOD_RES (26)..(26): Any amino acid
  MOD_RES (28)..(34): Any amino acid
  MOD_RES (36)..(37): Any amino acid
CXXXXXXXXXXCXXXXXXCXXXXXCXCXXXXXXXCXX

SEQ ID NO: 8902 - protein, 39 aa, Artificial Sequence
  source: /note="Description of Artificial Sequence: Synthetic polypeptide"
  MOD_RES (2)..(11): Any amino acid
  MOD_RES (13)..(18): Any amino acid
  MOD_RES (20)..(24): Any amino acid
  MOD_RES (26)..(26): Any amino acid
  MOD_RES (28)..(35): Any amino acid
  MOD_RES (37)..(39): Any amino acid
CXXXXXXXXXXCXXXXXXCXXXXXCXCXXXXXXXXCXXX

SEQ ID NO: 8903 - protein, 40 aa, Artificial Sequence
  source: /note="Description of Artificial Sequence: Synthetic polypeptide"
  MOD_RES (2)..(11): Any amino acid
  MOD_RES (13)..(18): Any amino acid
  MOD_RES (20)..(24): Any amino acid
  MOD_RES (26)..(26): Any amino acid
  MOD_RES (28)..(36): Any amino acid
  MOD_RES (38)..(40): Any amino acid
CXXXXXXXXXXCXXXXXXCXXXXXCXCXXXXXXXXXCXXX

SEQ ID NO: 8904 - protein, 42 aa, Artificial Sequence
  source: /note="Description of Artificial Sequence: Synthetic polypeptide"
  MOD_RES (2)..(11): Any amino acid
  MOD_RES (13)..(18): Any amino acid
  MOD_RES (20)..(24): Any amino acid
  MOD_RES (26)..(26): Any amino acid
  MOD_RES (28)..(38): Any amino acid
  MOD_RES (40)..(42): Any amino acid
CXXXXXXXXXXCXXXXXXCXXXXXCXCXXXXXXXXXXXCXXX

SEQ ID NO: 8905 - protein, 44 aa, Artificial Sequence
  source: /note="Description of Artificial Sequence: Synthetic polypeptide"
  MOD_RES (2)..(11): Any amino acid
  MOD_RES (13)..(18): Any amino acid
  MOD_RES (20)..(24): Any amino acid
  MOD_RES (26)..(26): Any amino acid
  MOD_RES (28)..(40): Any amino acid
  MOD_RES (42)..(44): Any amino acid
CXXXXXXXXXXCXXXXXXCXXXXXCXCXXXXXXXXXXXXXCXXX

SEQ ID NO: 8906 - protein, 45 aa, Artificial Sequence
  source: /note="Description of Artificial Sequence: Synthetic polypeptide"
  MOD_RES (2)..(11): Any amino acid
  MOD_RES (13)..(18): Any amino acid
  MOD_RES (20)..(24): Any amino acid
  MOD_RES (26)..(26): Any amino acid
  MOD_RES (28)..(42): Any amino acid
  MOD_RES (44)..(45): Any amino acid
CXXXXXXXXXXCXXXXXXCXXXXXCXCXXXXXXXXXXXXXXXCXX

SEQ ID NO: 8907 - protein, 28 aa, Artificial Sequence
  source: /note="Description of Artificial Sequence: Synthetic peptide"
  MOD_RES (2)..(11): Any amino acid
  MOD_RES (13)..(18): Any amino acid
  MOD_RES (20)..(24): Any amino acid
  MOD_RES (26)..(28): Any amino acid
CXXXXXXXXXXCXXXXXXCXXXXXCXXX

SEQ ID NO: 8908 - protein, 41 aa, Artificial Sequence
  source: /note="Description of Artificial Sequence: Synthetic polypeptide"
  MOD_RES (2)..(11): Any amino acid
  MOD_RES (13)..(18): Any amino acid
  MOD_RES (20)..(24): Any amino acid
  MOD_RES (26)..(28): Any amino acid
  MOD_RES (30)..(37): Any amino acid
  MOD_RES (39)..(41): Any amino acid
CXXXXXXXXXXCXXXXXXCXXXXXCXXXCXXXXXXXXCXXX

SEQ ID NO: 8909 - protein, 46 aa, Artificial Sequence
  source: /note="Description of Artificial Sequence: Synthetic polypeptide"
  MOD_RES (2)..(11): Any amino acid
  MOD_RES (13)..(18): Any amino acid
  MOD_RES (20)..(24): Any amino acid
  MOD_RES (26)..(32): Any amino acid
  MOD_RES (34)..(42): Any amino acid
  MOD_RES (44)..(46): Any amino acid
CXXXXXXXXXXCXXXXXXCXXXXXCXXXXXXXCXXXXXXXXXCXXX

SEQ ID NO: 8910 - protein, 40 aa, Artificial Sequence
  source: /note="Description of Artificial Sequence: Synthetic polypeptide"
  MOD_RES (2)..(11): Any amino acid
  MOD_RES (13)..(18): Any amino acid
  MOD_RES (20)..(24): Any amino acid
  MOD_RES (26)..(33): Any amino acid
  MOD_RES (35)..(36): Any amino acid
  MOD_RES (38)..(40): Any amino acid
CXXXXXXXXXXCXXXXXXCXXXXXCXXXXXXXXCXXCXXX

SEQ ID NO: 8911 - protein, 39 aa, Artificial Sequence
  source: /note="Description of Artificial Sequence: Synthetic polypeptide"
  MOD_RES (2)..(11): Any amino acid
  MOD_RES (13)..(18): Any amino acid
  MOD_RES (20)..(25): Any amino acid
  MOD_RES (27)..(27): Any amino acid
  MOD_RES (29)..(35): Any amino acid
  MOD_RES (37)..(39): Any amino acid
CXXXXXXXXXXCXXXXXXCXXXXXXCXCXXXXXXXCXXX

SEQ ID NO: 8912 - protein, 24 aa, Artificial Sequence
  source: /note="Description of Artificial Sequence: Synthetic peptide"
  MOD_RES (2)..(12): Any amino acid
  MOD_RES (14)..(14): Any amino acid
  MOD_RES (16)..(20): Any amino acid
  MOD_RES (22)..(24): Any amino acid
CXXXXXXXXXXXCXCXXXXXCXXX

SEQ ID NO: 8913 - protein, 37 aa, Artificial Sequence
  source: /note="Description of Artificial Sequence: Synthetic polypeptide"
  MOD_RES (2)..(12): Any amino acid
  MOD_RES (14)..(17): Any amino acid
  MOD_RES (19)..(23): Any amino acid
  MOD_RES (25)..(30): Any amino acid
  MOD_RES (32)..(34): Any amino acid
  MOD_RES (36)..(37): Any amino acid
CXXXXXXXXXXXCXXXXCXXXXXCXXXXXXCXXXCXX

SEQ ID NO: 8914 - protein, 39 aa, Artificial Sequence
  source: /note="Description of Artificial Sequence: Synthetic polypeptide"
  MOD_RES (2)..(12): Any amino acid
  MOD_RES (14)..(17): Any amino acid
  MOD_RES (19)..(23): Any amino acid
  MOD_RES (25)..(32): Any amino acid
  MOD_RES (34)..(35): Any amino acid
  MOD_RES (37)..(39): Any amino acid
CXXXXXXXXXXXCXXXXCXXXXXCXXXXXXXXCXXCXXX

SEQ ID NO: 8915 - protein, 38 aa, Artificial Sequence
  source: /note="Description of Artificial Sequence: Synthetic polypeptide"
  MOD_RES (2)..(12): Any amino acid
  MOD_RES (14)..(18): Any amino acid
  MOD_RES (20)..(24): Any amino acid
  MOD_RES (26)..(26): Any amino acid
  MOD_RES (28)..(34): Any amino acid
  MOD_RES (36)..(38): Any amino acid
CXXXXXXXXXXXCXXXXXCXXXXXCXCXXXXXXXCXXX

SEQ ID NO: 8916 - protein, 46 aa, Artificial Sequence
  source: /note="Description of Artificial Sequence: Synthetic polypeptide"
  MOD_RES (2)..(13): Any amino acid
  MOD_RES (15)..(18): Any amino acid
  MOD_RES (20)..(24): Any amino acid
  MOD_RES (26)..(26): Any amino acid
  MOD_RES (28)..(28): Any amino acid
  MOD_RES (30)..(38): Any amino acid
  MOD_RES (40)..(42): Any amino acid
  MOD_RES (44)..(46): Any amino acid
CXXXXXXXXXXXXCXXXXCXXXXXCXCXCXXXXXXXXXCXXXCXXX

SEQ ID NO: 8917 - protein, 40 aa, Artificial Sequence
  source: /note="Description of Artificial Sequence: Synthetic polypeptide"
  MOD_RES (2)..(13): Any amino acid
  MOD_RES (15)..(18): Any amino acid
  MOD_RES (20)..(24): Any amino acid
  MOD_RES (26)..(33): Any amino acid
  MOD_RES (35)..(36): Any amino acid
  MOD_RES (38)..(40): Any amino acid
CXXXXXXXXXXXXCXXXXCXXXXXCXXXXXXXXCXXCXXX

SEQ ID NO: 8918 - protein, 44 aa, Artificial Sequence
  source: /note="Description of Artificial Sequence: Synthetic polypeptide"
  MOD_RES (2)..(13): Any amino acid
  MOD_RES (15)..(18): Any amino acid
  MOD_RES (20)..(24): Any amino acid
  MOD_RES (26)..(37): Any amino acid
  MOD_RES (39)..(40): Any amino acid
  MOD_RES (42)..(44): Any amino acid
CXXXXXXXXXXXXCXXXXCXXXXXCXXXXXXXXXXXXCXXCXXX

SEQ ID NO: 8919 - protein, 40 aa, Artificial Sequence
  source: /note="Description of Artificial Sequence: Synthetic polypeptide"
  MOD_RES (2)..(13): Any amino acid
  MOD_RES (15)..(19): Any amino acid
  MOD_RES (21)..(25): Any amino acid
  MOD_RES (27)..(27): Any amino acid
  MOD_RES (29)..(36): Any amino acid
  MOD_RES (38)..(40): Any amino acid
CXXXXXXXXXXXXCXXXXXCXXXXXCXCXXXXXXXXCXXX

SEQ ID NO: 8920 - protein, 36 aa, Artificial Sequence
  source: /note="Description of Artificial Sequence: Synthetic polypeptide"
  MOD_RES (2)..(14): Any amino acid
  MOD_RES (16)..(23): Any amino acid
  MOD_RES (25)..(32): Any amino acid
  MOD_RES (34)..(36): Any amino acid
CXXXXXXXXXXXXXCXXXXXXXXCXXXXXXXXCXXX

SEQ ID NO: 8921 - protein, 29 aa, Artificial Sequence
  source: /note="Description of Artificial Sequence: Synthetic peptide"
  MOD_RES (2)..(15): Any amino acid
  MOD_RES (17)..(18): Any amino acid
  MOD_RES (20)..(22): Any amino acid
  MOD_RES (24)..(24): Any amino acid
  MOD_RES (26)..(26): Any amino acid
  MOD_RES (28)..(29): Any amino acid
CXXXXXXXXXXXXXXCXXCXXXCXCXCXX

SEQ ID NO: 8922 - protein, 28 aa, Artificial Sequence
  source: /note="Description of Artificial Sequence: Synthetic peptide"
  MOD_RES (2)..(16): Any amino acid
  MOD_RES (18)..(22): Any amino acid
  MOD_RES (24)..(24): Any amino acid
  MOD_RES (26)..(28): Any amino acid
CXXXXXXXXXXXXXXXCXXXXXCXCXXX

SEQ ID NO: 8923 - protein, 46 aa, Artificial Sequence
  source: /note="Description of Artificial Sequence: Synthetic polypeptide"
  MOD_RES (2)..(17): Any amino acid
  MOD_RES (19)..(23): Any amino acid
  MOD_RES (25)..(25): Any amino acid
  MOD_RES (27)..(27): Any amino acid
  MOD_RES (29)..(42): Any amino acid
  MOD_RES (44)..(46): Any amino acid
CXXXXXXXXXXXXXXXXCXXXXXCXCXCXXXXXXXXXXXXXXCXXX

SEQ ID NO: 8924 - protein, 28 aa, Artificial Sequence
  source: /note="Description of Artificial Sequence: Synthetic peptide"
  MOD_RES (2)..(17): Any amino acid
  MOD_RES (19)..(23): Any amino acid
  MOD_RES (25)..(25): Any amino acid
  MOD_RES (27)..(28): Any amino acid
CXXXXXXXXXXXXXXXXCXXXXXCXCXX

SEQ ID NO: 8925 - protein, 9 aa, Llama glama
DDGLGALNY

SEQ ID NO: 8926 - protein, 7 aa, Homo sapiens
DGAPQDH

SEQ ID NO: 8927 - protein, 17 aa, Llama glama
DGAYDDPAIRGKIPLAS

SEQ ID NO: 8928 - protein, 17 aa, Llama glama
DINSGGEITAYADSVKG

SEQ ID NO: 8929 - protein, 7 aa, Llama glama
DKSSAWS

SEQ ID NO: 8930 - protein, 4 aa, Llama glama
DMDY

SEQ ID NO: 8931 - protein, 8 aa, Llama glama
DRNGEYDY

SEQ ID NO: 8932 - protein, 5 aa, Homo sapiens
DYAIH

SEQ ID NO: 8933 - protein, 5 aa, Homo sapiens
DYALH

SEQ ID NO: 8934 - protein, 5 aa, Llama glama
DYAMS

SEQ ID NO: 8935 - protein, 5 aa, Llama glama
DYYIH

SEQ ID NO: 8936 - protein, 7 aa, Llama glama
EDSERPS

SEQ ID NO: 8937 - protein, 7 aa, Artificial Sequence
  source: /note="Description of Artificial Sequence: Synthetic peptide"
EGNTLRP

SEQ ID NO: 8938 - protein, 4 aa, Llama glama
EITL

SEQ ID NO: 8939 - protein, 16 aa, Homo sapiens
EIYHSGNTNYNPSLKS

SEQ ID NO: 8940 - protein, 10 aa, Oryctolagus cuniculus
ESGSGWALNL

SEQ ID NO: 8941 - protein, 7 aa, Llama glama
ETSNRDP

SEQ ID NO: 8942 - protein, 7 aa, Llama glama
EVNKRAS

SEQ ID NO: 8943 - protein, 7 aa, Artificial Sequence
  source: /note="Description of Artificial Sequence: Synthetic peptide"
FASTLAS

SEQ ID NO: 8944 - protein, 140 aa, Bacillus anthracis
FHYDRNNIAVGADESVVKEAHREVINSSTEGLLLNIDKDIRKILSGYIVEIEDTEGLKEVINDRYDMLNISSLRQDGKTFIDFKKYNDKLPLYISNPNYKVNVYAVTKENTIINPSENGDTSTNGIKKILIFSKKGYEIG

SEQ ID NO: 8945 - protein, 15 aa, Llama glama
FINKYGDGYADSVKG

SEQ ID NO: 8946 - protein, 17 aa, Artificial Sequence
  source: /note="Description of Artificial Sequence: Synthetic peptide"
FINTITGGTNYASWAKS

SEQ ID NO: 8947 - protein, 12 aa, Artificial Sequence
  source: /note="Description of Artificial Sequence: Synthetic peptide"
FLVVSGVGTFDP

SEQ ID NO: 8948 - protein, 4 aa, Llama glama
FPRY

SEQ ID NO: 8949 - protein, 7 aa, Llama glama
FSEYVMS

SEQ ID NO: 8950 - protein, 7 aa, Artificial Sequence
  source: /note="Description of Artificial Sequence: Synthetic peptide"
FTSTLAS

SEQ ID NO: 8951 - protein, 7 aa, Artificial Sequence
  source: /note="Description of Artificial Sequence: Synthetic peptide"
FVSKLAS

SEQ ID NO: 8952 - protein, 8 aa, Homo sapiens
GAAAGTDY

SEQ ID NO: 8953 - protein, 6 aa, Oryctolagus cuniculus
GAHYMC

SEQ ID NO: 8954 - protein, 8 aa, Llama glama
GAPDEYAY

SEQ ID NO: 8955 - protein, 7 aa, Artificial Sequence
  source: /note="Description of Artificial Sequence: Synthetic peptide"
GASTLTS

SEQ ID NO: 8956 - protein, 11 aa, Llama glama
GCYDSSLSTPV

SEQ ID NO: 8957 - protein, 11 aa, Artificial Sequence
  source: /note="Description of Artificial Sequence: Synthetic peptide"
GDATSGFHLTL

SEQ ID NO: 8958 - protein, 7 aa, Llama glama
GDDIRPS

SEQ ID NO: 8959 - protein, 7 aa, Llama glama
GDNSRPS

SEQ ID NO: 8960 - protein, 5 aa, Llama glama
GDSGY

SEQ ID NO: 8961 - protein, 11 aa, Artificial Sequence
  source: /note="Description of Artificial Sequence: Synthetic peptide"
GDSTSGFHLTL

SEQ ID NO: 8962 - protein, 10 aa, Artificial Sequence
  source: /note="Description of Artificial Sequence: Synthetic peptide"
GFTFSSSYIS

SEQ ID NO: 8963 - protein, 8 aa, Homo sapiens
GFTFSTYS

SEQ ID NO: 8964 - protein, 16 aa, Homo sapiens
GFTMVRGAPYYDGLDV

SEQ ID NO: 8965 - protein, 16 aa, Homo sapiens
GFTMVRGAPYYDGMDV

SEQ ID NO: 8966 - protein, 11 aa, Llama glama
GGDNIASKHAH

SEQ ID NO: 8967 - protein, 11 aa, Llama glama
GGEDIRTKNVH

SEQ ID NO: 8968 - protein, 10 aa, Artificial Sequence
  source: /note="Description of Artificial Sequence: Synthetic peptide"
GGGYSDNIYA

SEQ ID NO: 8969 - protein, 10 aa, Homo sapiens
GGLAVPGPNY

SEQ ID NO: 8970 - protein, 11 aa, Llama glama
GGNDIGSKSTQ

SEQ ID NO: 8971 - protein, 9 aa, Artificial Sequence
  source: /note="Description of Artificial Sequence: Synthetic peptide"
GGPTSSPSL

SEQ ID NO: 8972 - protein, 9 aa, Homo sapiens
GGSISSSNW

SEQ ID NO: 8973 - protein, 11 aa, Llama glama
GGSRIGSKSVQ

SEQ ID NO: 8974 - protein, 10 aa, Llama glama
GGVVAWSYDY

SEQ ID NO: 8975 - protein, 13 aa, Oryctolagus cuniculus
GHAIYDNYDSVHL

SEQ ID NO: 8976 - protein, 4 aa, Llama glama
GLDY

SEQ ID NO: 8977 - protein, 4 aa, Llama glama
GLGP

SEQ ID NO: 8978 - protein, 85 aa, Bacillus anthracis
GLKEVINDRYDMLNISSLRQDGKTFIDFKKYNDKLPLYISNPNYKVNVYAVTKENTIINPSENGDTSTNGIKKILIFSKKGYEIG

SEQ ID NO: 8979 - protein, 88 aa, Bacillus anthracis
  MOD_RES (86)..(88): Any amino acid
GLKEVINDRYDMLNISSLRQDGKTFIDFKKYNDKLPLYISNPNYKVNVYAVTKENTIINPSENGDTSTNGIKKILIFSKKGYEIGXXX

SEQ ID NO: 8980 - protein, 14 aa, Llama glama
GLRVAGSYFTDFGT

SEQ ID NO: 8981 - protein, 14 aa, Llama glama
GLSSGSVTFGNYPS

SEQ ID NO: 8982 - protein, 7 aa, Llama glama
GNSNRAS

SEQ ID NO: 8983 - protein, 14 aa, Llama glama
GPGYSGKYIEGWAY

SEQ ID NO: 8984 - protein, 14 aa, Llama glama
GPGYSGSYIEGWAY

SEQ ID NO: 8985 - protein, 5 aa, Llama glama
GSFGA

SEQ ID NO: 8986 - protein, 17 aa, Llama glama
GTTRNGGRTYYAESMKG

SEQ ID NO: 8987 - protein, 4 aa, Llama glama
GVDY

SEQ ID NO: 8988 - protein, 7 aa, Llama glama
GVNKRAS

SEQ ID NO: 8989 - protein, 8 aa, Homo sapiens
GYIFTTFG

SEQ ID NO: 8990 - protein, 7 aa, Artificial Sequence
  source: /note="Description of Artificial Sequence: Synthetic peptide"
GYNPCKL

SEQ ID NO: 8991 - protein, 8 aa, Homo sapiens
GYTFTDYA

SEQ ID NO: 8992 - protein, 8 aa, Homo sapiens
GYTFTTYG

SEQ ID NO: 8993 - protein, 5 aa, Llama glama
GYYID

SEQ ID NO: 8994 - protein, 18 aa, Homo sapiens
GYYYDSGTSWGYYYGMDV

SEQ ID NO: 8995 - protein, 7 aa, Llama glama
HASTQES

SEQ ID NO: 8996 - protein, 14 aa, Llama glama
HHYDSNWYYYGMDY

SEQ ID NO: 8997 - protein, 16 aa, Artificial Sequence
  source: /note="Description of Artificial Sequence: Synthetic peptide"
HIASRGNIWFRNWAKG

SEQ ID NO: 8998 - protein, 16 aa, Artificial Sequence
  source: /note="Description of Artificial Sequence: Synthetic peptide"
IIGSSGRTYYASWAKG

SEQ ID NO: 8999 - protein, 16 aa, Llama glama
IIGYDGGTYYNPSLKS

SEQ ID NO: 9000 - protein, 8 aa, Homo sapiens
IIVGNGKT

SEQ ID NO: 9001 - protein, 15 aa, Artificial Sequence
  source: /note="Description of Artificial Sequence: Synthetic peptide"
IIYASDTYYTSWAKG

SEQ ID NO: 9002 - protein, 16 aa, Artificial Sequence
  source: /note="Description of Artificial Sequence: Synthetic peptide"
IIYGTELTYYATWAKG

SEQ ID NO: 9003 - protein, 16 aa, Artificial Sequence
  source: /note="Description of Artificial Sequence: Synthetic peptide"
IIYGTETIYYATRAKG

SEQ ID NO: 9004 - protein, 8 aa, Homo sapiens
ISASGTTT

SEQ ID NO: 9005 - protein, 8 aa, Homo sapiens
ISAYNGNT

SEQ ID NO: 9006 - protein, 8 aa, Homo sapiens
ISRSSSYI

SEQ ID NO: 9007 - protein, 11 aa, Artificial Sequence
  source: /note="Description of Artificial Sequence: Synthetic peptide"
ITSTDIDDDMN

SEQ ID NO: 9008 - protein, 8 aa, Homo sapiens
ITTNNGNT

SEQ ID NO: 9009 - protein, 7 aa, Homo sapiens
IYHSGNT

SEQ ID NO: 9010 - protein, 16 aa, Llama glama
KAGQSLTHPNGKTYLS

SEQ ID NO: 9011 - protein, 16 aa, Llama glama
KANESIVHPGGKTYLY

SEQ ID NO: 9012 - protein, 16 aa, Llama glama
KASQSLVHSDGKTYLY

SEQ ID NO: 9013 - protein, 16 aa, Llama glama
KASQSLVHSDGMTYLY

SEQ ID NO: 9014 - protein, 16 aa, Llama glama
KASQSLVHTDGKTYLS

SEQ ID NO: 9015 - protein, 16 aa, Llama glama
KASQSLVHTDGKTYLY

SEQ ID NO: 9016 - protein, 16 aa, Llama glama
KASQSLVHTDGNTYLS

SEQ ID NO: 9017 - protein, 16 aa, Llama glama
KASQSLVQTDGKTYLS

SEQ ID NO: 9018 - protein, 7 aa, Artificial Sequence
  source: /note="Description of Artificial Sequence: Synthetic peptide"
KASTLAS

SEQ ID NO: 9019 - protein, 7 aa, Artificial Sequence
  source: /note="Description of Artificial Sequence: Synthetic peptide"
KASTLES

SEQ ID NO: 9020 - protein, 7 aa, Llama glama
KDSNRPS

SEQ ID NO: 9021 - protein, 17 aa, Llama glama
KSSQSVLYSSNQKNYLA

SEQ ID NO: 9022 - protein, 17 aa, Llama glama
KSSQSVVSESNQRSYLN

SEQ ID NO: 9023 - protein, 17 aa, Llama glama
KSSQSVVSGSKQKSYLN

SEQ ID NO: 9024 - protein, 17 aa, Llama glama
KSSQSVVSGSNQKSYLN

SEQ ID NO: 9025 - protein, 17 aa, Llama glama
KSSQSVVWASNLKTYLN

SEQ ID NO: 9026 - protein, 16 aa, Llama glama
KTSQSLVHSDGKTYLY

SEQ ID NO: 9027 - protein, 16 aa, Llama glama
KTSRSLVHSDGKTYLS

SEQ ID NO: 9028 - protein, 7 aa, Homo sapiens
KVSDRDS

SEQ ID NO: 9029 - protein, 7 aa, Homo sapiens
KVSNRDS

SEQ ID NO: 9030 - protein, 5 aa, Llama glama
KYYID

SEQ ID NO: 9031 - protein, 7 aa, Oryctolagus cuniculus
LASTLAS

SEQ ID NO: 9032 - protein, 7 aa, Oryctolagus cuniculus
LASTLES

SEQ ID NO: 9033 - protein, 7 aa, Oryctolagus cuniculus
LASTPAS

SEQ ID NO: 9034 - protein, 14 aa, Artificial Sequence
  source: /note="Description of Artificial Sequence: Synthetic peptide"
LGGWFESSSSLDWA

SEQ ID NO: 9035 - protein, 12 aa, Artificial Sequence
  source: /note="Description of Artificial Sequence: Synthetic peptide"
LGGYNDDTNRWA

SEQ ID NO: 9036 - protein, 7 aa, Homo sapiens
LGSIRAS

SEQ ID NO: 9037 - protein, 7 aa, Homo sapiens
LGSYRAS

SEQ ID NO: 9038 - protein, 17 aa, Llama glama
LIDPEDGATKYAQKFQG

SEQ ID NO: 9039 - protein, 7 aa, Llama glama
LNGGYWS

SEQ ID NO: 9040 - protein, 9 aa, Homo sapiens
LQGTLWPIT

SEQ ID NO: 9041 - protein, 9 aa, Artificial Sequence
  source: /note="Description of Artificial Sequence: Synthetic peptide"
LQSDNLPLT

SEQ ID NO: 9042 - protein, 8 aa, Homo sapiens
MQALQAPT

SEQ ID NO: 9043 - protein, 8 aa, Homo sapiens
MQALQTPT

SEQ ID NO: 9044 - protein, 9 aa, Homo sapiens
MQGSHWPLT

SEQ ID NO: 9045 - protein, 9 aa, Homo sapiens
MQGTLWPIT

SEQ ID NO: 9046 - protein, 8 aa, Llama glama
MYGSSWSY

SEQ ID NO: 9047 - protein, 5 aa, Llama glama
NHYIH

SEQ ID NO: 9048 - protein, 17 aa, Artificial Sequence
  source: /note="Description of Artificial Sequence: Synthetic peptide"
NIGGGSGSTLYAPWAKG

SEQ ID NO: 9049 - protein, 7 aa, Llama glama
NNYYYWN

SEQ ID NO: 9050 - protein, 38 aa, Homo sapiens
  MOD_RES (37)..(38): Any amino acid
NRATGIPARFSGSGSGTDFTLTISSLEPEDFAVYYCXX

SEQ ID NO: 9051 - protein, 7 aa, Llama glama
NSYYASS

SEQ ID NO: 9052 - protein, 6 aa, Oryctolagus cuniculus
NTNYMC

SEQ ID NO: 9053 - protein, 5 aa, Llama glama
NYAMT

SEQ ID NO: 9054 - protein, 5 aa, Llama glama
NYFID

SEQ ID NO: 9055 - protein, 5 aa, Llama glama
NYGWS

SEQ ID NO: 9056 - protein, 5 aa, Llama glama
NYWMH

SEQ ID NO: 9057 - protein, 4 aa, Llama glama
PWNY

SEQ ID NO: 9058 - protein, 13 aa, Oryctolagus cuniculus
QASEIVNRNNRLA

SEQ ID NO: 9059 - protein, 11 aa, Artificial Sequence
  source: /note="Description of Artificial Sequence: Synthetic peptide"
QASESIGTALA

SEQ ID NO: 9060 - protein, 11 aa, Artificial Sequence
  source: /note="Description of Artificial Sequence: Synthetic peptide"
QASESINTALA

SEQ ID NO: 9061 - protein, 13 aa, Artificial Sequence
  source: /note="Description of Artificial Sequence: Synthetic peptide"
QASESVANNNWLA

SEQ ID NO: 9062 - protein, 13 aa, Oryctolagus cuniculus
QASESVESGNWLA

SEQ ID NO: 9063 - protein, 11 aa, Llama glama
QASQGISKYLA

SEQ ID NO: 9064 - protein, 13 aa, Artificial Sequence
  source: /note="Description of Artificial Sequence: Synthetic peptide"
QASQSLYNKKNLA

SEQ ID NO: 9065 - protein, 13 aa, Artificial Sequence
  source: /note="Description of Artificial Sequence: Synthetic peptide"
QASQSVYGTNRLS

SEQ ID NO: 9066 - protein, 11 aa, Artificial Sequence
  source: /note="Description of Artificial Sequence: Synthetic peptide"
QASQTIYSGLA

SEQ ID NO: 9067 - protein, 8 aa, Llama glama
QATYYPLS

SEQ ID NO: 9068 - protein, 12 aa, Artificial Sequence
  source: /note="Description of Artificial Sequence: Synthetic peptide"
QDGNYRYWYFDV

SEQ ID NO: 9069 - protein, 6 aa, Homo sapiens
QDIRNS

SEQ ID NO: 9070 - protein, 6 aa, Homo sapiens
QDISNS

SEQ ID NO: 9071 - protein, 9 aa, Oryctolagus cuniculus
QGAFYGVNT

SEQ ID NO: 9072 - protein, 9 aa, Oryctolagus cuniculus
QGAYSGINA

SEQ ID NO: 9073 - protein, 9 aa, Oryctolagus cuniculus
QGAYSGINV

SEQ ID NO: 9074 - protein, 13 aa, Artificial Sequence
  source: /note="Description of Artificial Sequence: Synthetic peptide"
QGEFICSSGDCVA

SEQ ID NO: 9075 - protein, 13 aa, Artificial Sequence
  source: /note="Description of Artificial Sequence: Synthetic peptide"
QGEFSCSSGDCLA

SEQ ID NO: 9076 - protein, 13 aa, Artificial Sequence
  source: /note="Description of Artificial Sequence: Synthetic peptide"
QGEFSCSSVDCVA

SEQ ID NO: 9077 - protein, 11 aa, Llama glama
QGGDFRNYYNN

SEQ ID NO: 9078 - protein, 11 aa, Llama glama
QGGSLGSYGAN

SEQ ID NO: 9079 - protein, 6 aa, Homo sapiens
QGISNY

SEQ ID NO: 9080 - protein, 12 aa, Oryctolagus cuniculus
QGSFRVSGWYWA

SEQ ID NO: 9081 - protein, 11 aa, Llama glama
QGSSFGSSYAH

SEQ ID NO: 9082 - protein, 11 aa, Llama glama
QGTNLRSSYVH

SEQ ID NO: 9083 - protein, 9 aa, Llama glama
QQAYKTPLT

SEQ ID NO: 9084 - protein, 9 aa, Llama glama
QQAYNNPYS

SEQ ID NO: 9085 - protein, 9 aa, Llama glama
QQAYSAPYS

SEQ ID NO: 9086 - protein, 12 aa, Artificial Sequence
  source: /note="Description of Artificial Sequence: Synthetic peptide"
QQGETANRIDNA

SEQ ID NO: 9087 - protein, 9 aa, Llama glama
QQGYSAPLT

SEQ ID NO: 9088 - protein, 12 aa, Artificial Sequence
  source: /note="Description of Artificial Sequence: Synthetic peptide"
QQGYTANNIDNA

SEQ ID NO: 9089 - protein, 7 aa, Homo sapiens
QQRSNWP

SEQ ID NO: 9090 - protein, 9 aa, Llama glama
QQVYRTPWT

SEQ ID NO: 9091 - protein, 9 aa, Homo sapiens
QQYNSYPIT

SEQ ID NO: 9092 - protein, 9 aa, Homo sapiens
QQYSSYPLT

SEQ ID NO: 9093 - protein, 9 aa, Llama glama
QQYYRAPAT

SEQ ID NO: 9094 - protein, 10 aa, Llama glama
QSAHRSESAV

SEQ ID NO: 9095 - protein, 10 aa, Llama glama
QSFDYSGNAV

SEQ ID NO: 9096 - protein, 12 aa, Llama glama
QSGSSSGNAHAV

SEQ ID NO: 9097 - protein, 11 aa, Homo sapiens
QSLIYSDGNTY

SEQ ID NO: 9098 - protein, 11 aa, Homo sapiens
QSLLFSTGYNY

SEQ ID NO: 9099 - protein, 11 aa, Homo sapiens
QSLLYSTGYNY

SEQ ID NO: 9100 - protein, 11 aa, Homo sapiens
QSLLYTTGYNY

SEQ ID NO: 9101 - protein, 11 aa, Homo sapiens
QSLVFSDGNTY

SEQ ID NO: 9102 - protein, 11 aa, Homo sapiens
QSLVHSDGNTY

SEQ ID NO: 9103 - protein, 11 aa, Llama glama
QSSDSSGYKND

SEQ ID NO: 9104 - protein, 10 aa, Llama glama
QSSDSTDNAV

SEQ ID NO: 9105 - protein, 13 aa, Artificial Sequence
  source: /note="Description of Artificial Sequence: Synthetic peptide"
QSSQNVVNNNWFS

SEQ ID NO: 9106 - protein, 13 aa, Oryctolagus cuniculus
QSSQSVENGNWLA

SEQ ID NO: 9107 - protein, 13 aa, Oryctolagus cuniculus
QSSQSVENGNWLG

SEQ ID NO: 9108 - protein, 12 aa, Oryctolagus cuniculus
QSSQSVNQNDLS

SEQ ID NO: 9109 - protein, 13 aa, Artificial Sequence
  source: /note="Description of Artificial Sequence: Synthetic peptide"
QSSQSVYNNNEFS

SEQ ID NO: 9110 - protein, 9 aa, Llama glama
QSVDSSNIV

SEQ ID NO: 9111 - protein, 12 aa, Artificial Sequence
  source: /note="Description of Artificial Sequence: Synthetic peptide"
QVGGYGVSYDHA

SEQ ID NO: 9112 - protein, 7 aa, Llama glama
QVSNRAS

SEQ ID NO: 9113 - protein, 7 aa, Llama glama
QVSNRDS

SEQ ID NO: 9114 - protein, 7 aa, Llama glama
QVSNRGS

SEQ ID NO: 9115 - protein, 7 aa, Llama glama
QVSNRNS

SEQ ID NO: 9116 - protein, 7 aa, Llama glama
QVSNRVS

SEQ ID NO: 9117 - protein, 7 aa, Llama glama
QVSRRDS

SEQ ID NO: 9118 - protein, 7 aa, Llama glama
QVSTRGS

SEQ ID NO: 9119 - protein, 11 aa, Llama glama
QVWDSRADAAV

SEQ ID NO: 9120 - protein, 9 aa, Llama glama
QVWDSSAAV

SEQ ID NO: 9121 - protein, 11 aa, Llama glama
QVWDSSANAAV

SEQ ID NO: 9122 - protein, 11 aa, Homo sapiens
RASQDIRNSLA

SEQ ID NO: 9123 - protein, 11 aa, Homo sapiens
RASQDISNSLA

SEQ ID NO: 9124 - protein, 11 aa, Homo sapiens
RASQGISNYLA

SEQ ID NO: 9125 - protein, 7 aa, Llama glama
RDSERPS

SEQ ID NO: 9126 - protein, 141 aa, Bacillus anthracis
RFHYDRNNIAVGADESVVKEAHREVINSSTEGLLLNIDKDIRKILSGYIVEIEDTEGLKEVINDRYDMLNISSLRQDGKTFIDFKKYNDKLPLYISNPNYKVNVYAVTKENTIINPSENGDTSTNGIKKILIFSKKGYEIG

SEQ ID NO: 9127 - protein, 8 aa, Homo sapiens
RFTFSTSA

SEQ ID NO: 9128 - protein, 11 aa, Llama glama
RGDSLERYGAN

SEQ ID NO: 9129 - protein, 5 aa, Llama glama
RGRGS

SEQ ID NO: 9130 - protein, 17 aa, Llama glama
RIDPEDGATKYAPKFQG

SEQ ID NO: 9131 - protein, 17 aa, Llama glama
RIDPEDGDTKYAQKFQG

SEQ ID NO: 9132 - protein, 17 aa, Llama glama
RIDPEDGETRYAHQFRD

SEQ ID NO: 9133 - protein, 17 aa, Llama glama
RIDPEDGGTKVARKFQG

SEQ ID NO: 9134 - protein, 17 aa, Llama glama
RIDPEDGGTKYAQKFQG

SEQ ID NO: 9135 - protein, 17 aa, Llama glama
RIDPEDGGTKYTQKFQG

SEQ ID NO: 9136 - protein, 17 aa, Llama glama
RIDPEDGGTSYAQKFQG

SEQ ID NO: 9137 - protein, 17 aa, Llama glama
RIDPEDGGVKYAQRFRG

SEQ ID NO: 9138 - protein, 17 aa, Llama glama
RIDPEDGRTKSRQNFQG

SEQ ID NO: 9139 - protein, 17 aa, Homo sapiens
RISAYNGNTNYAQKFQG

SEQ ID NO: 9140 - protein, 7 aa, Homo sapiens
RISNRFS

SEQ ID NO: 9141 - protein, 17 aa, Homo sapiens
RITTNNGNTIYERRFQG

SEQ ID NO: 9142 - protein, 17 aa, Llama glama
RMDPEDGTTKPAPKFQG

SEQ ID NO: 9143 - protein, 5 aa, Artificial Sequence
  source: /note="Description of Artificial Sequence: Synthetic peptide"
RNAMG

SEQ ID NO: 9144 - protein, 5 aa, Artificial Sequence
  source: /note="Description of Artificial Sequence: Synthetic peptide"
RNAMT

SEQ ID NO: 9145 - protein, 11 aa, Llama glama
RRYGLGSEYDY

SEQ ID NO: 9146 - protein, 16 aa, Homo sapiens
RSSQSLIYSDGNTYLN

SEQ ID NO: 9147 - protein, 16 aa, Homo sapiens
RSSQSLLFSTGYNYLD

SEQ ID NO: 9148 - protein, 16 aa, Homo sapiens
RSSQSLLYSTGYNYLD

SEQ ID NO: 9149 - protein, 16 aa, Homo sapiens
RSSQSLLYTTGYNYLD

SEQ ID NO: 9150 - protein, 16 aa, Homo sapiens
RSSQSLVFSDGNTYLT

SEQ ID NO: 9151 - protein, 16 aa, Homo sapiens
RSSQSLVHSDGNTYLS

SEQ ID NO: 9152 - protein, 16 aa, Homo sapiens
RSSQSLVYSDGNTYLN

SEQ ID NO: 9153 - protein, 5 aa, Llama glama
RSWMY

SEQ ID NO: 9154 - protein, 7 aa, Llama glama
RVSRRGS

SEQ ID NO: 9155 - protein, 5 aa, Llama glama
RYYID

SEQ ID NO: 9156 - protein, 7 aa, Llama glama
SASRLET

SEQ ID NO: 9157 - protein, 5 aa, Llama glama
SAYID

SEQ ID NO: 9158 - protein, 5 aa, Llama glama
SAYIV

SEQ ID NO: 9159 - protein, 10 aa, Oryctolagus cuniculus
SDSNGHTFNL

SEQ ID NO: 9160 - protein, 11 aa, Llama glama
SDYALGSTFSS

SEQ ID NO: 9161 - protein, 5 aa, Llama glama
SFWMY

SEQ ID NO: 9162 - protein, 7 aa, Artificial Sequence
  source: /note="Description of Artificial Sequence: Synthetic peptide"
SGAYFDL

SEQ ID NO: 9163 - protein, 6 aa, Oryctolagus cuniculus
SGYDMC

SEQ ID NO: 9164 - protein, 17 aa, Llama glama
SIDPEDGGTQTAQKFQG

SEQ ID NO: 9165 - protein, 17 aa, Homo sapiens
SISRSSSYIYYADSVKG

SEQ ID NO: 9166 - protein, 10 aa, Llama glama
SRGDHDDYDY

SEQ ID NO: 9167 - protein, 5 aa, Llama glama
SSDIQ

SEQ ID NO: 9168 - protein, 6 aa, Homo sapiens
SSNWWS

SEQ ID NO: 9169 - protein, 12 aa, Llama glama
SSWDDSLSGHPV

SEQ ID NO: 9170 - protein, 5 aa, Llama glama
SSYID

SEQ ID NO: 9171 - protein, 5 aa, Llama glama
SSYIN

SEQ ID NO: 9172 - protein, 6 aa, Artificial Sequence
  source: /note="Description of Artificial Sequence: Synthetic peptide"
SSYWIC

SEQ ID NO: 9173 - protein, 7 aa, Llama glama
SVNKRAS

SEQ ID NO: 9174 - protein, 5 aa, Artificial Sequence
  source: /note="Description of Artificial Sequence: Synthetic peptide"
SYAIS

SEQ ID NO: 9175 - protein, 5 aa, Llama glama
SYDMS

SEQ ID NO: 9176 - protein, 5 aa, Llama glama
SYWMY

SEQ ID NO: 9177 - protein, 12 aa, Oryctolagus cuniculus
TAYKSSNTDGIA

SEQ ID NO: 9178 - protein, 5 aa, Homo sapiens
TFGLS

SEQ ID NO: 9179 - protein, 14 aa, Llama glama
TGSSSNIGGGYSVQ

SEQ ID NO: 9180 - protein, 5 aa, Llama glama
TIEGF

SEQ ID NO: 9181 - protein, 5 aa, Homo sapiens
TSAMT

SEQ ID NO: 9182 - protein, 7 aa, Llama glama
TSFYAWS

SEQ ID NO: 9183 - protein, 7 aa, Llama glama
TSGTGWS

SEQ ID NO: 9184 - protein, 7 aa, Llama glama
TTNSRHS

SEQ ID NO: 9185 - protein, 17 aa, Llama glama
TVDAAGANTYYPDTVKG

SEQ ID NO: 9186 - protein, 5 aa, Llama glama
TYAMA

SEQ ID NO: 9187 - protein, 5 aa, Homo sapiens
TYGIN

SEQ ID NO: 9188 - protein, 5 aa, Homo sapiens
TYSMN

SEQ ID NO: 9189 - protein, 9 aa, Llama glama
VGGLGYVDY

SEQ ID NO: 9190 - protein, 16 aa, Llama glama
VIAYDGRTFYSPSLKS

SEQ ID NO: 9191 - protein, 16 aa, Llama glama
VIAYDGSTYYSPSLKS

SEQ ID NO: 9192 - protein, 17 aa, Llama glama
VIDRGGGGTRYADSVKG

SEQ ID NO: 9193 - protein, 16 aa, Llama glama
VIIYDGSTYYSPSLKS

SEQ ID NO: 9194 - protein, 16 aa, Llama glama
VIRYDGNTRYSPTLKS

SEQ ID NO: 9195 - protein, 17 aa, Homo sapiens
VISASGTTTYYGDSVKG

SEQ ID NO: 9196 - protein, 14 aa, Llama glama
VPSVFGLPYGGMNY

SEQ ID NO: 9197 - protein, 13 aa, Artificial Sequence
  source: /note="Description of Artificial Sequence: Synthetic peptide"
VQGGNSGGWYFDL

SEQ ID NO: 9198 - protein, 20 aa, Homo sapiens
VRGYYYDSGTSWGYYYGMDV

SEQ ID NO: 9199 - protein, 17 aa, Homo sapiens
WIIVGNGKTRYAQKFQG

SEQ ID NO: 9200 - protein, 17 aa, Homo sapiens
WIIVGNGKTRYAQKLQG

SEQ ID NO: 9201 - protein, 17 aa, Homo sapiens
WIIVGNGKTRYSQKFQG

SEQ ID NO: 9202 - protein, 17 aa, Artificial Sequence
  source: /note="Description of Artificial Sequence: Synthetic peptide"
WIYAGTGGTSYNQKFTG

SEQ ID NO: 9203 - protein, 7 aa, Llama glama
WSDDDDY

SEQ ID NO: 9204 - protein, 7 aa, Llama glama
YASTQES

SEQ ID NO: 9205 - protein, 7 aa, Llama glama
YASTQQS

SEQ ID NO: 9206 - protein, 16 aa, Artificial Sequence
  source: /note="Description of Artificial Sequence: Synthetic peptide"
YINTRGDTSYANWAKG

SEQ ID NO: 9207 - protein, 16 aa, Artificial Sequence
  source: /note="Description of Artificial Sequence: Synthetic peptide"
YINTRGGASYANWAKG

SEQ ID NO: 9208 - protein, 7 aa, Oryctolagus cuniculus
YTSTLAS

SEQ ID NO: 9209 - protein, 12 aa, Artificial Sequence
  source: /note="Description of Artificial Sequence: Synthetic peptide"
YVKNGGGYRLDL

SEQ ID NO: 9210 - protein, 5 aa, Artificial Sequence
  source: /note="Description of Artificial Sequence: Synthetic peptide"
YYAIS

SEQ ID NO: 9211 - protein, 872 aa, Clostridium botulinum
MPFVNKQFNYKDPVNGVDIAYIKIPNVGQMQPVKAFKIHNKIWVIPERDTFTNPEEGDLNPPPEAKQVPVSYYDSTYLSTDNEKDNYLKGVTKLFERIYSTDLGRMLLTSIVRGIPFWGGSTIDTELKVIDTNCINVIQPDGSYRSEELNLVIIGPSADIIQFECKSFGHEVLNLTRNGYGSTQYIRFSPDFTFGFEESLEVDTNPLLGAGKFATDPAVTLAHELIHAGHRLYGIAINPNRVFKVNTNAYYEMSGLEVSFEELRTFGGHDAKFIDSLQENEFRLYYYNKFKDIASTLNKAKSIVGTTASLQYMKNVFKEKYLLSEDTSGKFSVDKLKFDKLYKMLTEIYTEDNFVKFFKVLNRKTYLNFDKAVFKINIVPKVNYTIYDGFNLRNTNLAANFNGQNTEINNMNFTKLKNFTGLFEFYKLLCVRGIITSKTKSLDKGYNKALNDLCIKVNNWDLFFSPSEDNFTNDLNKGEEITSDTNIEAAEENISLDLIQQYYLTFNFDNEPENISIENLSSDIIGQLELMPNIERFPNGKKYELDKYTMFHYLRAQEFEHGKSRIALTNSVNEALLNPSRVYTFFSSDYVKKVNKATEAAMFLGWVEQLVYDFTDETSEVSTTDKIADITIIIPYIGPALNIGNMLYKDDFVGALIFSGAVILLEFIPEIAIPVLGTFALVSYIANKVLTVQTIDNALSKRNEKWDEVYKYIVTNWLAKVNTQIDLIRKKMKEALENQAEATKAIINYQYNQYTEEEKNNINFNIDDLSSKLNESINKAMININKFLNQCSVSYLMNSMIPYGVKRLEDFDASLKDALLKYIYDNRGTLIGQVDRLKDKVNNTLSTDIPFQLSKYVDNQRLLSTFTEYIKN

SEQ ID NO: 9212 - protein, 842 aa, Clostridium botulinum
MPFVNKQFNYKDPVNGVDIAYIKIPNVGQMQPVKAFKIHNKIWVIPERDTFTNPEEGDLNPPPEAKQVPVSYYDSTYLSTDNEKDNYLKGVTKLFERIYSTDLGRMLLTSIVRGIPFWGGSTIDTELKVIDTNCINVIQPDGSYRSEELNLVIIGPSADIIQFECKSFGHEVLNLTRNGYGSTQYIRFSPDFTFGFEESLEVDTNPLLGAGKFATDPAVTLAHELIHAGHRLYGIAINPNRVFKVNTNAYYEMSGLEVSFEELRTFGGHDAKFIDSLQENEFRLYYYNKFKDIASTLNKAKSIVGTTASLQYMKNVFKEKYLLSEDTSGKFSVDKLKFDKLYKMLTEIYTEDNFVKFFKVLNRKTYLNFDKAVFKINIVPKVNYTIYDGFNLRNTNLAANFNGQNTEINNMNFTKLKNFTGLFEFYKLLCVRGIITSKTKSLDKGYNKALNDLCIKVNNWDLFFSPSEDNFTNDLNKGEEITSDTNIEAAEENISLDLIQQYYLTFNFDNEPENISIENLSSDIIGQLELMPNIERFPNGKKYELDKYTMFHYLRAQEFEHGKSRIALTNSVNEALLNPSRVYTFFSSDYVKKVNKATEAAMFLGWVEQLVYDFTDETSEVSTTDKIADITIIIPYIGPALNIGNMLYKDDFVGALIFSGAVILLEFIPEIAIPVLGTFALVSYIANKVLTVQTIDNALSKRNEKWDEVYKYIVTNWLAKVNTQIDLIRKKMKEALENQAEATKAIINYQYNQYTEEEKNNINFNIDDLSSKLNESINKAMININKFLNQCSVSYLMNSMIPYGVKRLEDFDASLKDALLKYIYDNRGTLIGQVDRLKDKVN

SEQ ID NO: 9213 - protein, 865 aa, Clostridium botulinum
  MOD_RES (864)..(865): Any amino acid
MPVTINNFNYNDPIDNNNIIMMEPPFARGTGRYYKAFKITDRIWIIPERYTFGYKPEDFNKSSGIFNRDVCEYYDPDYLNTNDKKNIFLQTMIKLFNRIKSKPLGEKLLEMIINGIPYLGDRRVPLEEFNTNIASVTVNKLISNPGEVERKKGIFANLIIFGPGPVLNENETIDIGIQNHFASREGFGGIMQMKFCPEYVSVFNNVQENKGASIFNRRGYFSDPALILMHELIHVLHGLYGIKVDDLPIVPNEKKFFMQSTDAIQAEELYTFGGQDPSIITPSTDKSIYDKVLQNFRGIVDRLNKVLVCISDPNININIYKNKFKDKYKFVEDSEGKYSIDVESFDKLYKSLMFGFTETNIAENYKIKTRASYFSDSLPPVKIKNLLDNEIYTIEEGFNISDKDMEKEYRGQNKAINKQAYEEISKEHLAVYKIQMCKSVKAPGICIDVDNEDLFFIADKNSFSDDLSKNERIEYNTQSNYIENDFPINELILDTDLISKIELPSENTESLTDFNVDVPVYEKQPAIKKIFTDENTIFQYLYSQTFPLDIRDISLTSSFDDALLFSNKVYSFFSMDYIKTANKVVEAGLFAGWVKQIVNDFVIEANKSNTMDKIADISLIVPYIGLALNVGNETAKGNFENAFEIAGASILLEFIPELLIPVVGAFLLESYIDNKNKIIKTIDNALTKRNEKWSDMYGLIVAQWLSTVNTQFYTIKEGMYKALNYQAQALEEIIKYRYNIYSEKEKSNINIDFNDINSKLNEGINQAIDNINNFINGCSVSYLMKKMIPLAVEKLLDFDNTLKKNLLNYIDENKLYLIGSAEYEKSKVNKYLKTIMPFDLSIYTNDTILIEMFNKYNSEILNNXX

SEQ ID NO: 9214 - protein, 7 aa, Bos sp.
  MOD_RES (7)..(7): Any amino acid
CTSVHQX

SEQ ID NO: 9215 - protein, 7 aa, Bos sp.
  MOD_RES (7)..(7): Any amino acid
CTTVHQX

SEQ ID NO: 9216 - protein, 6 aa, Bos sp.
  MOD_RES (2)..(3): Any amino acid
CXXKKQ

SEQ ID NO: 9217 - protein, 6 aa, Bos sp.
  MOD_RES (2)..(3): Any amino acid
CXXVHQ

SEQ ID NO: 9218 - protein, 6 aa, Bos sp.
  MOD_RES (2)..(3): Any amino acid
  MOD_RES (5)..(5): Any amino acid
CXXVXQ

SEQ ID NO: 9219 - protein, 6 aa, Bos sp.
  MOD_RES (2)..(5): Any amino acid
CXXXXQ

SEQ ID NO: 9220 - protein, 5 aa, Bos sp.
TSVHQ

SEQ ID NO: 9221 - protein, 11 aa, Bos sp.
TSVHQETKKYQ

SEQ ID NO: 9222 - protein, 5 aa, Bos sp.
TTVHQ

SEQ ID NO: 9223 - protein, 9 aa, Bos sp.
VHQETKKYQ

SEQ ID NO: 9224 - protein, 5 aa, Bos sp.
  MOD_RES (1)..(2): Any amino acid
XXKKQ

SEQ ID NO: 9225 - protein, 5 aa, Bos sp.
  MOD_RES (1)..(2): Any amino acid
XXVHQ

SEQ ID NO: 9226 - protein, 5 aa, Bos sp.
  MOD_RES (1)..(2): Any amino acid
  MOD_RES (4)..(4): Any amino acid
XXVXQ

SEQ ID NO: 9227 - protein, 6 aa, Bos sp.
YLYTYE

SEQ ID NO: 9228 - protein, 7 aa, Bos sp.
YLYTYEH

SEQ ID NO: 9229 - protein, 6 aa, Bos sp.
YTYNYE

SEQ ID NO: 9230 - protein, 7 aa, Bos sp.
YTYNYEW

SEQ ID NO: 9231 - protein, 5 aa, Bos sp.
  MOD_RES (2)..(4): Any amino acid
YXXXW

SEQ ID NO: 9232 - protein, 11 aa, Bos sp.
  MOD_RES (2)..(7): Any amino acid
  MOD_RES (9)..(11): Any amino acid
YXXXXXXWXXX

SEQ ID NO: 9233 - protein, 4 aa, Bos sp.
  MOD_RES (2)..(2): Any amino acid
  MOD_RES (4)..(4): Any amino acid
YXYX

SEQ ID NO: 9234 - protein, 5 aa, Bos sp.
  MOD_RES (2)..(2): Any amino acid
  MOD_RES (4)..(4): Any amino acid
YXYXY

SEQ ID NO: 9235 - protein, 6 aa, Bos sp.
  MOD_RES (2)..(2): Any amino acid
  MOD_RES (4)..(4): Any amino acid
  MOD_RES (6)..(6): Any amino acid
YXYXYX

SEQ ID NO: 9236 - protein, 7 aa, Bos sp.
  MOD_RES (2)..(2): Any amino acid
  MOD_RES (4)..(4): Any amino acid
  MOD_RES (6)..(7): Any amino acid
YXYXYXX

SEQ ID NO: 9237 - DNA, 108 bp, Homo sapiens
aacagggccactggcatcccagccaggttcagtggcagtgggtctgggacagacttcactctcaccatcagcagcctagagcctgaagattttgcagtttattactgt

SEQ ID NO: 9238 - DNA, 66 bp, Oryctolagus cuniculus
atcgtgatgacccagactccatcttccaggtctgtccctgtgggaggcacagtcaccatcaattgc

SEQ ID NO: 9239 - DNA, 66 bp, Oryctolagus cuniculus
caagtgctgacccagactgcatcgcccgtgtctgccgctgtgggaggcacagtcaccatcagttgc

SEQ ID NO: 9240 - DNA, 90 bp, Oryctolagus cuniculus
cagcagcagttgctggagtccgggggaggcctggtccagcctgagggatccctggcactcacctgcacagcttctggattctccttcagt

SEQ ID NO: 9241 - DNA, 90 bp, Oryctolagus cuniculus
caggagcagttggtggagtccgggggaggcctggtccagcctggggcatccctgacactcacctgcacagcttctggattctccttcagt

SEQ ID NO: 9242 - DNA, 66 bp, Oryctolagus cuniculus
caggtgctgacccagactccatcccccgtgtctgcagctgtgggaggcgcagtcaccatcaattgc

SEQ ID NO: 9243 - DNA, 87 bp, Oryctolagus cuniculus
cagtcgttggaggagtccgggggagacctggtcaagcctggggcatccctgacactcacctgcacagcctctggattctccttcagt

SEQ ID NO: 9244 - DNA, 87 bp, Oryctolagus cuniculus
cagtcgttggaggagtccgggggaggcctggtcaagcctgagggatccctgacactcacctgcaaagcctctggattctccttcact

SEQ ID NO: 9245 - DNA, 87 bp, Oryctolagus cuniculus
cagtcgttggaggagtccgggggaggcctggtccagcctgagggatccctgacactcacctgtacagcctctggattcttcttcagt

SEQ ID NO: 9246 - DNA, 93 bp, Oryctolagus cuniculus
cgatccgccatctccaagtcctcgtcgaccgcggtgactctgcaaatgaccagtctgacagtcgcggacacggccacctatttctgtgcgaga

SEQ ID NO: 9247 - DNA, 93 bp, Oryctolagus cuniculus
cgattcaccatctccaaaacctcgtcgaccacggtgactctgcaaatgaccagtctgacagccgcggacacggccacctatttctgtgggaga

SEQ ID NO: 9248 - DNA, 93 bp, Oryctolagus cuniculus
cgattcaccatctccaacccctcgtcgaccactgtgactctgcaaatgaccagtctgacagtcgcggacacggccacctatttctgtgcgcga

SEQ ID NO: 9249 - DNA, 93 bp, Oryctolagus cuniculus
cgattcgccatctccaaaacctcgtcgaccacggtgactctgcaactgaccagtctgacagccgcggacacggccacctatgtctgtgcgaga

SEQ ID NO: 9250 - DNA, 93 bp, Oryctolagus cuniculus
cgattcgccatctccaagtcctcgtcgaccgcggtgactctgcaaatgaccagtctgacagccgcggacacggccacctatgtctgtgcgaga

SEQ ID NO: 9251 - DNA, 69 bp, Oryctolagus cuniculus
gaccctgtgatgacccagactccatcctccgtgtctgcagctgtgggaggcacagtcaccatcaattgc

SEQ ID NO: 9252 - DNA, 69 bp, Oryctolagus cuniculus
gaccctgtgctgacccagactccatcccccgtgtctgcagctgtgggaggcacagtcaccatcagttgc

SEQ ID NO: 9253 - DNA, 114 bp, Homo sapiens
ggctatgcggactctgtgaagggccgattcaccatctccagagacaacgccaagaactccctgtatctgcaaatgaacagtctgagagctgaggacacggccttgtattactgt

SEQ ID NO: 9254 - DNA, 96 bp, Oryctolagus cuniculus
ggggtcccatcgcggttcaaaggcagtggatctgggacacagttcactctcaccatcagcggcgtacagtgtgacgatgctgccacttactactgt

SEQ ID NO: 9255 - DNA, 96 bp, Oryctolagus cuniculus
ggggtcccatcgcggttcaaaggcagtggatctggggcacacttcactctcaccatcagcggcgtgcagtgtgacgatgctgccacttactactgt

SEQ ID NO: 9256 - DNA, 96 bp, Oryctolagus cuniculus
ggggtcccatcgcggtttagaggcagtggatctgggacacagttcactctcaccatcagcgatgtggtgtgtgacgatgctgccacttattattgt

SEQ ID NO: 9257 - DNA, 96 bp, Oryctolagus cuniculus
ggggtcccttcgcggttcaccggcagcggatctgggacacagttcactctcaccatcagcggcgtgcagtgtgacgatgctgccacttactattgt

SEQ ID NO: 9258 - DNA, 96 bp, Oryctolagus cuniculus
ggggtctcatcgcggttcaaaggcagtggatctgggacacagttcactctcaccatcagcgacatgcagtgtgacgatgctgccacttactactgt

SEQ ID NO: 9259 - DNA, 33 bp, Artificial Sequence
  source: /note="Description of Artificial Sequence: Synthetic oligonucleotide"
tggggccaaggcaccctcgtcaccgtctcgagc

SEQ ID NO: 9260 - DNA, 33 bp, Artificial Sequence
  source: /note="Description of Artificial Sequence: Synthetic oligonucleotide"
tggggccaagggaccctggtcaccgtctcgagc

SEQ ID NO: 9261 - DNA, 33 bp, Artificial Sequence
  source: /note="Description of Artificial Sequence: Synthetic oligonucleotide"
tggggccaggggaccctcgtcaccgtctcgagc

SEQ ID NO: 9262 - DNA, 33 bp, Artificial Sequence
  source: /note="Description of Artificial Sequence: Synthetic oligonucleotide"
tggggcccggggaccctagtcaccgtctcgagc

SEQ ID NO: 9263 - DNA, 42 bp, Oryctolagus cuniculus
tgggtccgccagcctccagggaaggggctggagtgggtcggc

SEQ ID NO: 9264 - DNA, 42 bp, Oryctolagus cuniculus
tgggtccgccaggctccagggaaggggctggagtggatcgca

SEQ ID NO: 9265 - DNA, 42 bp, Oryctolagus cuniculus
tgggtccgccaggctccagggaaggggctggagtggatcgcc

SEQ ID NO: 9266 - DNA, 42 bp, Oryctolagus cuniculus
tgggtccgccaggctccagggaggggcctggagtgggtcgga

SEQ ID NO: 9267 - DNA, 42 bp, Oryctolagus cuniculus
tgggtccgccaggctccagggcaggggctggagtggatcgga

SEQ ID NO: 9268 - DNA, 45 bp, Oryctolagus cuniculus
tggtatcagcagaaaccagggcagcctcccaagcgcctgatctat

SEQ ID NO: 9269 - DNA, 45 bp, Oryctolagus cuniculus
tggtatcagcagaaaccagggcagcctcccaagctcctgatctat

SEQ ID NO: 9270 - DNA, 45 bp, Oryctolagus cuniculus
tggtttcaacagaaaccagggcagcctcccaagctcctgatgtat

SEQ ID NO: 9271 - DNA, 30 bp, Artificial Sequence
  source: /note="Description of Artificial Sequence: Synthetic oligonucleotide"
ttcggcggagggaccgaggtggtggtcaaa

SEQ ID NO: 9272 - protein, 23 aa, Llama glama
ATMLTQSPASLSVVPGESASISC

SEQ ID NO: 9273 - protein, 23 aa, Llama glama
ATMLTQSPGSLSVGPGESASISC

SEQ ID NO: 9274 - protein, 23 aa, Llama glama
ATMLTQSPGSLSVVPGESASISC

SEQ ID NO: 9275 - protein, 23 aa, Llama glama
ATMLTQSPGSLSVVPGESATIAC

SEQ ID NO: 9276 - protein, 23 aa, Llama glama
DIQMTQSPSSLSASLGDRVTITC

SEQ ID NO: 9277 - protein, 23 aa, Llama glama
DIQMTQSPSSVTASAGEKVTINC

SEQ ID NO: 9278 - protein, 23 aa, Llama glama
DIVMTQSPRSVTASVGEKVFINC

SEQ ID NO: 9279 - protein, 23 aa, Llama glama
DIVMTQSPSSVTASVGEKVTINC

SEQ ID NO: 9280 - protein, 23 aa, Llama glama
DIVMTQSPSSVTASVGEKVTITC

SEQ ID NO: 9281 - protein, 23 aa, Llama glama
DIVMTQSPTSVTASVGEKVTINC

SEQ ID NO: 9282 - protein, 23 aa, Llama glama
DLVLTQIPGSLSVVPGESASISC

SEQ ID NO: 9283 - protein, 23 aa, Oryctolagus cuniculus
DPVLTQTPSPVSAAVGGTVTISC

SEQ ID NO: 9284 - protein, 23 aa, Oryctolagus cuniculus
DPVMTQTPSSVSAAVGGTVTINC

SEQ ID NO: 9285 - protein, 23 aa, Llama glama
DVVLTQTPGSLSVVPGESASISC

SEQ ID NO: 9286 - protein, 23 aa, Llama glama
EIVLTQSPSSVTASAGEKVTINC

SEQ ID NO: 9287 - protein, 23 aa, Llama glama
EIVLTQTPGSLSVVPGESASISC

SEQ ID NO: 9288 - protein, 527 aa, Artificial Sequence
  source: /note="Description of Artificial Sequence: Synthetic polypeptide"
  MOD_RES (24)..(73): Any amino acid
  MOD_RES (89)..(138): Any amino acid
  MOD_RES (171)..(220): Any amino acid
  MOD_RES (277)..(326): Any amino acid
  MOD_RES (341)..(390): Any amino acid
  MOD_RES (423)..(472): Any amino acid
  MOD_RES (484)..(527): Any amino acid
EIVMTQSPSTLSASVGDRVIITCXXXXXXXXXXXXXXXXXXXXXXXXXXXXXXXXXXXXXXXXXXXXXXXXXXWYQQKPGKAPKLLIYXXXXXXXXXXXXXXXXXXXXXXXXXXXXXXXXXXXXXXXXXXXXXXXXXXGVPSRFSGSGSGAEFTLTISSLQPDDFATYYCXXXXXXXXXXXXXXXXXXXXXXXXXXXXXXXXXXXXXXXXXXXXXXXXXXFGQGTKLTVLGGGGGSGGGGSGGGGSGGGGSEVQLVESGGGLVQPGGSLRLSCAASXXXXXXXXXXXXXXXXXXXXXXXXXXXXXXXXXXXXXXXXXXXXXXXXXXWVRQAPGKGLEWVSXXXXXXXXXXXXXXXXXXXXXXXXXXXXXXXXXXXXXXXXXXXXXXXXXXRFTISRDNSKNTLYLQMNSLRAEDTAVYYCAKXXXXXXXXXXXXXXXXXXXXXXXXXXXXXXXXXXXXXXXXXXXXXXXXXXWGQGTLVTVSSXXXXXXXXXXXXXXXXXXXXXXXXXXXXXXXXXXXXXXXXXXXX

SEQ ID NO: 9289 - protein, 319 aa, Artificial Sequence
  source: /note="Description of Artificial Sequence: Synthetic polypeptide"
  MOD_RES (24)..(73): Any amino acid
  MOD_RES (89)..(138): Any amino acid
  MOD_RES (171)..(220): Any amino acid
  MOD_RES (232)..(319): Any amino acid
EIVMTQSPSTLSASVGDRVIITCXXXXXXXXXXXXXXXXXXXXXXXXXXXXXXXXXXXXXXXXXXXXXXXXXXWYQQKPGKAPKLLIYXXXXXXXXXXXXXXXXXXXXXXXXXXXXXXXXXXXXXXXXXXXXXXXXXXGVPSRFSGSGSGAEFTLTISSLQPDDFATYYCXXXXXXXXXXXXXXXXXXXXXXXXXXXXXXXXXXXXXXXXXXXXXXXXXXFGQGTKLTVLGXXXXXXXXXXXXXXXXXXXXXXXXXXXXXXXXXXXXXXXXXXXXXXXXXXXXXXXXXXXXXXXXXXXXXXXXXXXXXXXXXXXXXXXX

SEQ ID NO: 9290 - protein, 231 aa, Artificial Sequence
  source: /note="Description of Artificial Sequence: Synthetic polypeptide"
  MOD_RES (24)..(73): Any amino acid
  MOD_RES (89)..(138): Any amino acid
  MOD_RES (171)..(220): Any amino acid
EIVMTQSPSTLSASVGDRVIITCXXXXXXXXXXXXXXXXXXXXXXXXXXXXXXXXXXXXXXXXXXXXXXXXXXWYQQKPGKAPKLLIYXXXXXXXXXXXXXXXXXXXXXXXXXXXXXXXXXXXXXXXXXXXXXXXXXXGVPSRFSGSGSGTEFTLTISSLQPDDFATYYCXXXXXXXXXXXXXXXXXXXXXXXXXXXXXXXXXXXXXXXXXXXXXXXXXXFGQGTKLTVLG

SEQ ID NO: 9291 - protein, 527 aa, Artificial Sequence
  source: /note="Description of Artificial Sequence: Synthetic polypeptide"
  MOD_RES (24)..(73): Any amino acid
  MOD_RES (89)..(138): Any amino acid
  MOD_RES (171)..(220): Any amino acid
  MOD_RES (277)..(326): Any amino acid
  MOD_RES (341)..(390): Any amino acid
  MOD_RES (423)..(472): Any amino acid
  MOD_RES (484)..(527): Any amino acid
EIVMTQSPSTLSASVGDRVIITCXXXXXXXXXXXXXXXXXXXXXXXXXXXXXXXXXXXXXXXXXXXXXXXXXXWYQQKPGKAPKLLIYXXXXXXXXXXXXXXXXXXXXXXXXXXXXXXXXXXXXXXXXXXXXXXXXXXGVPSRFSGSGSGTEFTLTISSLQPDDFATYYCXXXXXXXXXXXXXXXXXXXXXXXXXXXXXXXXXXXXXXXXXXXXXXXXXXFGQGTKLTVLGGGGGSGGGGSGGGGSGGGGSEVQLVESGGGLVQPGGSLRLSCTASXXXXXXXXXXXXXXXXXXXXXXXXXXXXXXXXXXXXXXXXXXXXXXXXXXWVRQAPGKGLEWVGXXXXXXXXXXXXXXXXXXXXXXXXXXXXXXXXXXXXXXXXXXXXXXXXXXRFTISRDTSKNTVYLQMNSLRAEDTAVYYCARXXXXXXXXXXXXXXXXXXXXXXXXXXXXXXXXXXXXXXXXXXXXXXXXXXWGQGTLVTVSSXXXXXXXXXXXXXXXXXXXXXXXXXXXXXXXXXXXXXXXXXXXX

SEQ ID NO: 9292 - protein, 483 aa, Artificial Sequence
  source: /note="Description of Artificial Sequence: Synthetic polypeptide"
  MOD_RES (24)..(73): Any amino acid
  MOD_RES (89)..(138): Any amino acid
  MOD_RES (171)..(220): Any amino acid
  MOD_RES (277)..(326): Any amino acid
  MOD_RES (341)..(390): Any amino acid
  MOD_RES (423)..(472): Any amino acid
EIVMTQSPSTLSASVGDRVIITCXXXXXXXXXXXXXXXXXXXXXXXXXXXXXXXXXXXXXXXXXXXXXXXXXXWYQQKPGKAPKLLIYXXXXXXXXXXXXXXXXXXXXXXXXXXXXXXXXXXXXXXXXXXXXXXXXXXGVPSRFSGSGSGTEFTLTISSLQPDDFATYYCXXXXXXXXXXXXXXXXXXXXXXXXXXXXXXXXXXXXXXXXXXXXXXXXXXFGQGTKLTVLGGGGGSGGGGSGGGGSGGGGSEVQLVESGGGLVQPGGSLRLSCTVSXXXXXXXXXXXXXXXXXXXXXXXXXXXXXXXXXXXXXXXXXXXXXXXXXXWVRQAPGKGLEWVGXXXXXXXXXXXXXXXXXXXXXXXXXXXXXXXXXXXXXXXXXXXXXXXXXXRFTISKDTSKNTVYLQMNSLRAEDTAVYYCARXXXXXXXXXXXXXXXXXXXXXXXXXXXXXXXXXXXXXXXXXXXXXXXXXXWGQGTLVTVSS

SEQ ID NO: 9293 - protein, 30 aa, Llama glama
ELQLVESGGGLVEPGGSLRLSCAASGFTFS

SEQ ID NO: 9294 - protein, 30 aa, Llama glama
ELQLVESGGGLVQPGGSLRLSCAASGFTFD

SEQ ID NO: 9295 - protein, 30 aa, Llama glama
EVQLQESGGALVQPGGSLRLSCAASGFTFS

SEQ ID NO: 9296 - protein, 30 aa, Llama glama
EVQLQESGGGLVQPGGSLRLSCAASGFTFD

SEQ ID NO: 9297 - protein, 30 aa, Llama glama
EVQLQESGPGLVKPSQTLSLTCTVSGGSIS

SEQ ID NO: 9298 - protein, 30 aa, Llama glama
EVQLQESGPGLVKPSQTLSLTCTVSGGSIT

SEQ ID NO: 9299 - protein, 30 aa, Llama glama
EVQLVESGGGLAQPGGSLRLSCRASGFAFG

SEQ ID NO: 9300 - protein, 270 aa, Artificial Sequence
  source: /note="Description of Artificial Sequence: Synthetic polypeptide"
  MOD_RES (26)..(75): Any amino acid
  MOD_RES (90)..(139): Any amino acid
  MOD_RES (172)..(221): Any amino acid
  MOD_RES (233)..(270): Any amino acid
EVQLVESGGGLVQPGGSLRLSCAASXXXXXXXXXXXXXXXXXXXXXXXXXXXXXXXXXXXXXXXXXXXXXXXXXXWVRQAPGKGLEWVSXXXXXXXXXXXXXXXXXXXXXXXXXXXXXXXXXXXXXXXXXXXXXXXXXXRFTISRDNSKNTLYLQMNSLRAEDTAVYYCAKXXXXXXXXXXXXXXXXXXXXXXXXXXXXXXXXXXXXXXXXXXXXXXXXXXWGQGTLVTVSSXXXXXXXXXXXXXXXXXXXXXXXXXXXXXXXXXXXXXX

SEQ ID NO: 9301 - protein, 320 aa, Artificial Sequence
  source: /note="Description of Artificial Sequence: Synthetic polypeptide"
  MOD_RES (26)..(75): Any amino acid
  MOD_RES (90)..(139): Any amino acid
  MOD_RES (172)..(221): Any amino acid
  MOD_RES (233)..(320): Any amino acid
EVQLVESGGGLVQPGGSLRLSCTASXXXXXXXXXXXXXXXXXXXXXXXXXXXXXXXXXXXXXXXXXXXXXXXXXXWVRQAPGKGLEWVGXXXXXXXXXXXXXXXXXXXXXXXXXXXXXXXXXXXXXXXXXXXXXXXXXXRFTISRDTSKNTVYLQMNSLRAEDTAVYYCARXXXXXXXXXXXXXXXXXXXXXXXXXXXXXXXXXXXXXXXXXXXXXXXXXXWGQGTLVTVSSXXXXXXXXXXXXXXXXXXXXXXXXXXXXXXXXXXXXXXXXXXXXXXXXXXXXXXXXXXXXXXXXXXXXXXXXXXXXXXXXXXXXXXXX

SEQ ID NO: 9302 - protein, 319 aa, Artificial Sequence
  source: /note="Description of Artificial Sequence: Synthetic polypeptide"
  MOD_RES (26)..(75): Any amino acid
  MOD_RES (90)..(138): Any amino acid
  MOD_RES (171)..(220): Any amino acid
  MOD_RES (232)..(319): Any amino acid
EVQLVESGGGLVQPGGSLRLSCTVSXXXXXXXXXXXXXXXXXXXXXXXXXXXXXXXXXXXXXXXXXXXXXXXXXXWVRQAPGKGLEWVGXXXXXXXXXXXXXXXXXXXXXXXXXXXXXXXXXXXXXXXXXXXXXXXXXRFTISKDTSKNTVYLQMNSLRAEDTAVYYCARXXXXXXXXXXXXXXXXXXXXXXXXXXXXXXXXXXXXXXXXXXXXXXXXXXWGQGTLVTVSSXXXXXXXXXXXXXXXXXXXXXXXXXXXXXXXXXXXXXXXXXXXXXXXXXXXXXXXXXXXXXXXXXXXXXXXXXXXXXXXXXXXXXXXX

SEQ ID NO: 9303 - protein, 30 aa, Llama glama
EVQLVESGGGLVQPGGTLRLSCAASGFTFS

SEQ ID NO: 9304 - protein, 30 aa, Llama glama
EVQLVQPGAELRNPGASVKVSCKASGDTFT

SEQ ID NO: 9305 - protein, 30 aa, Llama glama
EVQLVQPGAELRNPGASVKVSCKASGYIFT

SEQ ID NO: 9306 - protein, 30 aa, Llama glama
EVQLVQPGAELRNPGASVKVSCKASGYTFT

SEQ ID NO: 9307 - protein, 30 aa, Llama glama
EVQLVQPGAELRNPGASVKVSCKASGYTYT

SEQ ID NO: 9308 - protein, 30 aa, Llama glama
EVQLVQPGAELRNPGTSVKVSCKTSGYYFT

SEQ ID NO: 9309 - protein, 30 aa, Llama glama
EVQLVQPGAELTKPGASVKVSCNTSGYTFT

SEQ ID NO: 9310 - protein, 30 aa, Llama glama
EVQLVQPGAEVRRPGAAVKVSCKASGFALI

SEQ ID NO: 9311 - protein, 30 aa, Llama glama
EVQLVQPGHELKNPGASVKVSCKASGYIFT

SEQ ID NO: 9312 - protein, 30 aa, Llama glama
EVQLVQPGTELRNPGASVKVSCKTSGYTFT

SEQ ID NO: 9313 - protein, 30 aa, Llama glama
EVQLVQPGTELRNPGSSVKVSCKASGYIFS

SEQ ID NO: 9314 - protein, 30 aa, Llama glama
EVQVQESGGGLVQPGGSLRLSCAASGFTFS

SEQ ID NO: 9315 - protein, 123 aa, Llama glama
EVQVQESGGGLVQPGGSLRLSCAASGFTFSSYWMYWVRQAPGKGLEWVSAINTGGGSTYYADSVKGRFTISRDNAKNTLYLQMNSLKPEDTALYYCARGPGYSGKYIEGWAYWGQGTQVTVSS

SEQ ID NO: 9316 - protein, 30 aa, Llama glama
EVQVQESGPGLVKPSQTLSLTCTVSGASIA

SEQ ID NO: 9317 - protein, 30 aa, Llama glama
EVQVQESGPGLVTPSQTLSLTCTVSGGSIK

SEQ ID NO: 9318 - protein, 10 aa, Artificial Sequence
  source: /note="Description of Artificial Sequence: Synthetic peptide"
FGGGTEVVVK

SEQ ID NO: 9319 - protein, 11 aa, Llama glama
FGGGTHLTILG

SEQ ID NO: 9320 - protein, 11 aa, Llama glama
FGGGTHLTVLG

SEQ ID NO: 9321 - protein, 10 aa, Llama glama
FGQGTKVELK

SEQ ID NO: 9322 - protein, 10 aa, Llama glama
FGQGTKVELN

SEQ ID NO: 9323 - protein, 10 aa, Llama glama
FGQGTRLEIK

SEQ ID NO: 9324 - protein, 10 aa, Llama glama
FGSGTRLEIK

SEQ ID NO: 9325 - protein, 10 aa, Llama glama
FGSGTRLEMK

SEQ ID NO: 9326 - protein, 11 aa, Llama glama
FSSRTHLTVLG

SEQ ID NO: 9327 - protein, 32 aa, Llama glama
GIADRFSGSKSGNTASLTISGLQSEDEADYYC

SEQ ID NO: 9328 - protein, 32 aa, Llama glama
GIPDRFSGSGSTTDFTLTISSVQPEDAAVYYC

SEQ ID NO: 9329 - protein, 32 aa, Llama glama
GIPDRFSGSNSGGTATLTISGAQAEDEADYYC

SEQ ID NO: 9330 - protein, 32 aa, Llama glama
GIPERFSGSKSGGTATLTISGAQAEDEADYYC

SEQ ID NO: 9331 - protein, 32 aa, Llama glama
GIPERFSGSNSGNTATLTISGAQAEDEADYYC

SEQ ID NO: 9332 - protein, 32 aa, Llama glama
GIPERFSGSNSGNTATLTVSGAQAEDEADYYC

SEQ ID NO: 9333 - protein, 32 aa, Llama glama
GIPERFSGSRLGDTATLTISGAQAEDEADYYC

SEQ ID NO: 9334 - protein, 32 aa, Llama glama
GIPERFSGSSSGDTVILTVSRVQADDEADYYC

SEQ ID NO: 9335 - protein, 32 aa, Llama glama
GIPERFSGSSSGGTATLAISGAQAEDEADYYC

SEQ ID NO: 9336 - protein, 32 aa, Llama glama
GIPERFSGSSSGGTATLTISGVQAEDEADYYC

SEQ ID NO: 9337 - protein, 32 aa, Llama glama
GLPDRFSGSGSTTDFTLTISSVQPEDAAVYYC

SEQ ID NO: 9338 - protein, 32 aa, Llama glama
GVPDRFSGSGSTTDFTLTINNFQPEDAAVYYC

SEQ ID NO: 9339 - protein, 32 aa, Llama glama
GVPDRFSGSGSTTDFTLTISNFQPEDAAVYYC

SEQ ID NO: 9340 - protein, 32 aa, Llama glama
GVPDRFSGSRSGSSASLTITGLQAEDEADYYC

SEQ ID NO: 9341 - protein, 32 aa, Llama glama
GVPDRFTGSGSGTDFTLKISGLKAEDAGVYYC

SEQ ID NO: 9342 - protein, 32 aa, Llama glama
GVPDRFTGSGSGTDFTLKISGVKAEDAGLYYC

SEQ ID NO: 9343 - protein, 32 aa, Llama glama
GVPDRFTGSGSGTDFTLKISGVKAEDAGVYYC

SEQ ID NO: 9344 - protein, 33 aa, Llama glama
GVPDRFTGSGSGTDFTLKISGVKAEDAGVYYCA

SEQ ID NO: 9345 - protein, 32 aa, Llama glama
GVPDRFTGSGSGTDFTLKISGVNAEDAGVYYC

SEQ ID NO: 9346 - protein, 32 aa, Llama glama
GVPDRFTGSGSGTDFTLNISDMKAEDAGVYYC

SEQ ID NO: 9347 - protein, 32 aa, Llama glama
GVPDRFTGSGSGTDFTLRIVGVTVEDAGVYYC

SEQ ID NO: 9348 - protein, 32 aa, Llama glama
GVPDRVTGSGSGTDFTLKISGVKAEDAGVYYC

SEQ ID NO: 9349 - protein, 32 aa, Llama glama
GVPNRFTGSGSGTDFTLKISGVKPEDAAVYYC

SEQ ID NO: 9350 - protein, 32 aa, Oryctolagus cuniculus
GVPSRFKGSGSGAHFTLTISGVQCDDAATYYC

SEQ ID NO: 9351 - protein, 32 aa, Oryctolagus cuniculus
GVPSRFKGSGSGTQFTLTISGVQCDDAATYYC

SEQ ID NO: 9352 - protein, 32 aa, Oryctolagus cuniculus
GVPSRFRGSGSGTQFTLTISDVVCDDAATYYC

SEQ ID NO: 9353 - protein, 32 aa, Llama glama
GVPSRFSGSGSGTTFTLVISGLEAEDAGSYYC

SEQ ID NO: 9354 - protein, 32 aa, Llama glama
GVPSRFSGSISGNKATLTISGAQPEDEADFYC

SEQ ID NO: 9355 - protein, 32 aa, Oryctolagus cuniculus
GVPSRFTGSGSGTQFTLTISGVQCDDAATYYC

SEQ ID NO: 9356 - protein, 32 aa, Oryctolagus cuniculus
GVSSRFKGSGSGTQFTLTISDMQCDDAATYYC

SEQ ID NO: 9357 - protein, 32 aa, Llama glama
GVTITADTSTTTAYLELSSLRSEDTAVYYCAL

SEQ ID NO: 9358 - protein, 38 aa, Homo sapiens
GYADSVKGRFTISRDNAKNSLYLQMNSLRAEDTALYYC

SEQ ID NO: 9359 - protein, 22 aa, Llama glama
HSAVTQPPSVSGSPGKTVTISC

SEQ ID NO: 9360 - protein, 22 aa, Llama glama
HSAVTQPSAVSVSLGQTARITC

SEQ ID NO: 9361 - protein, 22 aa, Oryctolagus cuniculus
IVMTQTPSSRSVPVGGTVTINC

SEQ ID NO: 9362 - protein, 22 aa, Llama glama
NFMLTQLPSVSGSPGQKVTISC

SEQ ID NO: 9363 - protein, 22 aa, Llama glama
NFMLTQPPSVSVALRQTAKITC

SEQ ID NO: 9364 - protein, 22 aa, Llama glama
NFMLTQPSAVSVSLGQTARITC

SEQ ID NO: 9365 - protein, 22 aa, Llama glama
QAGLTQPPSVSGSPGKTVTISC

SEQ ID NO: 9366 - protein, 30 aa, Oryctolagus cuniculus
QEQLVESGGGLVQPGASLTLTCTASGFSFS

SEQ ID NO: 9367 - protein, 30 aa, Llama glama
QLQLVESGGGLVQPGGSLRLSCAASGFTFD

SEQ ID NO: 9368 - protein, 30 aa, Llama glama
QLQLVESGGGLVQPGGSLRLSCAASGFTFS

SEQ ID NO: 9369 - protein, 22 aa, Llama glama
QPVLNQPSALSVSLGQTARITC

SEQ ID NO: 9370 - protein, 30 aa, Oryctolagus cuniculus
QQQLLESGGGLVQPEGSLALTCTASGFSFS

SEQ ID NO: 9371 - protein, 29 aa, Oryctolagus cuniculus
QSLEESGGDLVKPGASLTLTCTASGFSFS

SEQ ID NO: 9372 - protein, 29 aa, Oryctolagus cuniculus
QSLEESGGGLVKPEGSLTLTCKASGFSFT

SEQ ID NO: 9373 - protein, 29 aa, Oryctolagus cuniculus
QSLEESGGGLVQPEGSLTLTCTASGFFFS

SEQ ID NO: 9374 - protein, 22 aa, Llama glama
QTVVTQEPSLSVSPGGTVTLTC

SEQ ID NO: 9375 - protein, 22 aa, Oryctolagus cuniculus
QVLTQTASPVSAAVGGTVTISC

SEQ ID NO: 9376 - protein, 22 aa, Oryctolagus cuniculus
QVLTQTPSPVSAAVGGAVTINC

SEQ ID NO: 9377 - protein, 30 aa, Llama glama
QVQLQESGPGLVKPSQTLSLACTVSGGSIT

SEQ ID NO: 9378 - protein, 30 aa, Llama glama
QVQLQESGPGLVKPSQTLSLTCTVSGGSIT

SEQ ID NO: 9379 - protein, 30 aa, Llama glama
QVQLVESGGGLVQPGGSLRLSCAASGFTFG

SEQ ID NO: 9380 - protein, 30 aa, Llama glama
QVQLVESGGGLVQPGGSLRLSCAASGFTFS

SEQ ID NO: 9381 - protein, 123 aa, Llama glama
QVQLVESGGGLVQPGGSLRLSCAASGFTFSSYWMYWVRQAPGKGLEWVSAINTGGGSTYYADSVKGRFTISRDNAKNTLYLQMNSLKPEDTALYYCARGPGYSGKYIEGWAYWGQGTQVTVSS

SEQ ID NO: 9382 - protein, 123 aa, Llama glama
QVQLVESGGGLVQPGGSLRLSCAASGFTFSSYWMYWVRQAPGKGLEWVSAINTGGGSTYYADSVKGRFTISRDNAKNTLYLQMNSLKPEDTALYYCARGPGYSGSYIEGWAYWGQGTQVTVSS

SEQ ID NO: 9383 - protein, 31 aa, Oryctolagus cuniculus
RFAISKSSSTAVTLQMTSLTAADTATYVCAR

SEQ ID NO: 9384 - protein, 31 aa, Oryctolagus cuniculus
RFAISKTSSTTVTLQLTSLTAADTATYVCAR

SEQ ID NO: 9385 - protein, 31 aa, Oryctolagus cuniculus
RFTISKTSSTTVTLQMTSLTAADTATYFCGR

SEQ ID NO: 9386 - protein, 31 aa, Oryctolagus cuniculus
RFTISNPSSTTVTLQMTSLTVADTATYFCAR

SEQ ID NO: 9387 - protein, 32 aa, Llama glama
RFTISRDNAKNTLTLQMNSLKPEDTAVYWCAK

SEQ ID NO: 9388 - protein, 32 aa, Llama glama
RFTISRDNAKNTLYLQINSLKPEDTAVYYCAK

SEQ ID NO: 9389 - protein, 32 aa, Llama glama
RFTISRDNAKNTLYLQMNSLKPEDTALYYCAR

SEQ ID NO: 9390 - protein, 32 aa, Llama glama
RFTISRDNAKNTLYLQMNSLKPEDTAVYYCAT

SEQ ID NO: 9391 - protein, 32 aa, Llama glama
RFTISRDNAKNTLYLQMNSLKSKDTAVYYCAR

SEQ ID NO: 9392 - protein, 32 aa, Llama glama
RFTISRDNAKNTLYLRMNSLKPEDTALYYCTR

SEQ ID NO: 9393 - protein, 32 aa, Llama glama
RFTISRDNAKNTLYLRMNSLKPEDTARYYCVT

SEQ ID NO: 9394 - protein, 32 aa, Llama glama
RFTISRDNDKNTLYLQMNSPKSEDTGVYYCAK

SEQ ID NO: 9395 - protein, 32 aa, Llama glama
RFTVSRDNTKNTVYLQMNSLKPEDTAVYYCAQ

SEQ ID NO: 9396 - protein, 32 aa, Llama glama
RIPERFSGSNSGNTATLIISGAQAEDEADYYC

SEQ ID NO: 9397 - protein, 31 aa, Oryctolagus cuniculus
RSAISKSSSTAVTLQMTSLTVADTATYFCAR

SEQ ID NO: 9398 - protein, 32 aa, Llama glama
RTHISRDTSKNQFSLQLSSVTPEDTAVYYCAR

SEQ ID NO: 9399 - protein, 32 aa, Llama glama
RTSISRDASENQFTLQLSAVTPEDSAVYYCAR

SEQ ID NO: 9400 - protein, 32 aa, Llama glama
RTSISRDTSKNQFSLQLSSVTPEDTAVYYCAR

SEQ ID NO: 9401 - protein, 32 aa, Llama glama
RTSISRDTSKNQFSLQLSSVTPEDTAVYYCAS

SEQ ID NO: 9402 - protein, 32 aa, Llama glama
RTSISRDTSKNQFSLQLTSVTPEDTAVYYCAR

SEQ ID NO: 9403 - protein, 32 aa, Llama glama
RTSISRDTSKNQFTLQLSSVTPEDTAVYYCAR

SEQ ID NO: 9404 - protein, 32 aa, Llama glama
RTTISRDTSKNQISLQLTSVTPDDTAVYYCSR

SEQ ID NO: 9405 - protein, 32 aa, Llama glama
RVIFTVDTSTSTAYVEVSSLRPEDTGVYYCVI

SEQ ID NO: 9406 - protein, 32 aa, Llama glama
RVTFTADTFTRTAYVELSNLRSDDTAVYYCMT

SEQ ID NO: 9407 - protein, 32 aa, Llama glama
RVTFTADTSAHTAYMELTTLRVDDTAVYFCAI

SEQ ID NO: 9408 - protein, 32 aa, Llama glama
RVTFTADTSASTVYLSLTNLRSDDTGVYYCAT

SEQ ID NO: 9409 - protein, 32 aa, Llama glama
RVTFTADTSTNTAYVELSSLRSDDTAVYYCTA

SEQ ID NO: 9410 - protein, 32 aa, Llama glama
RVTFTADTSTSTAYVELRNLRSEDTAVYYCVA

SEQ ID NO: 9411 - protein, 32 aa, Llama glama
RVTFTADTSTSTVYAELNSLRSEDTAVYYCAI

SEQ ID NO: 9412 - protein, 32 aa, Llama glama
RVTFTADTSTSTVYLELDSLRSEDTAVYYCVG

SEQ ID NO: 9413 - protein, 32 aa, Llama glama
RVTFTTDTSTSTAYVELSSLRSEDTAVYYCLI

SEQ ID NO: 9414 - protein, 32 aa, Llama glama
RVTFTVDTSTTTAYVELHSLRTDDTGVYYCAF

SEQ ID NO: 9415 - protein, 32 aa, Llama glama
RVTITADTSTTTAYMELSSLRSEDTAVYYCSL

SEQ ID NO: 9416 - protein, 32 aa, Llama glama
RVTVTVDTATSTAYVELSSLRSDDTGVYFCMV

SEQ ID NO: 9417 - protein, 32 aa, Llama glama
RVTVTVDTATSTVYVELSSLRSDDTGVYFCMV

SEQ ID NO: 9418 - protein, 22 aa, Llama glama
SSALTQPPSVSGSPGKTVTISC

SEQ ID NO: 9419 - protein, 22 aa, Llama glama
SSELTQPSAVSVSLGQTARITC

SEQ ID NO: 9420 - protein, 22 aa, Llama glama
SYELTQPPSVSESPGKTVTISC

SEQ ID NO: 9421 - protein, 22 aa, Llama glama
SYELTQSPSVSVALRQAAKITC

SEQ ID NO: 9422 - protein, 22 aa, Llama glama
SYELTQSPSVSVALRQTAKITC

SEQ ID NO: 9423 - protein, 22 aa, Llama glama
SYELTQSPSVTVALRQTAKITC

SEQ ID NO: 9424 - protein, 22 aa, Llama glama
SYELTQSSAVSVSLGQTARITC

SEQ ID NO: 9425 - protein, 15 aa, Oryctolagus cuniculus
WFQQKPGQPPKLLMY

SEQ ID NO: 9426 - protein, 15 aa, Llama glama
WFQQLPGTPPKLLIY

SEQ ID NO: 9427 - protein, 11 aa, Llama glama
WGHGTQVTVSS

SEQ ID NO: 9428 - protein, 11 aa, Llama glama
WGKGTLVTVSS

SEQ ID NO: 9429 - protein, 11 aa, Artificial Sequence
  source: /note="Description of Artificial Sequence: Synthetic peptide"
WGPGTLVTVSS

SEQ ID NO: 9430 - protein, 11 aa, Llama glama
WGQGIQVTVSS

SEQ ID NO: 9431 - protein, 11 aa, Llama glama
WGQGTQVTVSS

SEQ ID NO: 9432 - protein, 11 aa, Llama glama
WGQGTRVTVSS

SEQ ID NO: 9433 - protein, 11 aa, Llama glama
WGRGTQVTVSS

SEQ ID NO: 9434 - protein, 14 aa, Llama glama
WIRQPPGKGLEWMG

SEQ ID NO: 9435 - protein, 15 aa, Llama glama
WLLQKPGQRPQLLIT

SEQ ID NO: 9436 - protein, 15 aa, Llama glama
WLLQKPGQRPQLLIY

SEQ ID NO: 9437 - protein, 15 aa, Llama glama
WLLQKPGQSPQRLIY

SEQ ID NO: 9438 - protein, 15 aa, Llama glama
WLLQKPGQSPRRLIY

SEQ ID NO: 9439 - protein, 15 aa, Llama glama
WLQQKPGQSPQRLIY

SEQ ID NO: 9440 - protein, 14 aa, Llama glama
WLRQAPGQGPEWMG

SEQ ID NO: 9441 - protein, 15 aa, Llama glama
WLRQKPGQSPQRLIY

SEQ ID NO: 9442 - protein, 14 aa, Llama glama
WVRQAPAQGLEWMG

SEQ ID NO: 9443 - protein, 14 aa, Llama glama
WVRQAPGEGLEWMG

SEQ ID NO: 9444 - protein, 14 aa, Oryctolagus cuniculus
WVRQAPGKGLEWIA

SEQ ID NO: 9445 - protein, 14 aa, Llama glama
WVRQAPGKGPEWVS

SEQ ID NO: 9446 - protein, 14 aa, Llama glama
WVRQAPGQGLEWVG

SEQ ID NO: 9447 - protein, 14 aa, Oryctolagus cuniculus
WVRQAPGRGLEWVG

SEQ ID NO: 9448 - protein, 14 aa, Oryctolagus cuniculus
WVRQPPGKGLEWVG

SEQ ID NO: 9449 - protein, 14 aa, Llama glama
WVRQRPGEGLEWMG

SEQ ID NO: 9450 - protein, 14 aa, Llama glama
WVRQTPGKGLEWVS

SEQ ID NO: 9451 - protein, 14 aa, Llama glama
WVRQVPGEGLEWMG

SEQ ID NO: 9452 - protein, 14 aa, Llama glama
WVRQVPGQGFEWMG

SEQ ID NO: 9453 - protein, 15 aa, Llama glama
WYQQKAGQAPVLVIY

SEQ ID NO: 9454 - protein, 15 aa, Llama glama
WYQQKPGQAPKLLIY

SEQ ID NO: 9455 - protein, 15 aa, Llama glama
WYQQKPGQAPVLLIY

SEQ ID NO: 9456 - protein, 15 aa, Llama glama
WYQQKPGQAPVLVIY

SEQ ID NO: 9457 - protein, 15 aa, Llama glama
WYQQKPGQARVQVIY

SEQ ID NO: 9458 - protein, 15 aa, Oryctolagus cuniculus
WYQQKPGQPPKRLIY

SEQ ID NO: 9459 - protein, 15 aa, Llama glama
WYQQKPGQSPVLVIY

SEQ ID NO: 9460 - protein, 15 aa, Llama glama
WYQQKPGQVPVLVIY

SEQ ID NO: 9461 - protein, 15 aa, Llama glama
WYQQLPGMAPKLLIS

SEQ ID NO: 9462 - protein, 15 aa, Llama glama
WYQQLPGMAPKLLLY

SEQ ID NO: 9463 - protein, 15 aa, Llama glama
WYQQLPGMAPSLLIY

SEQ ID NO: 9464 - protein, 15 aa, Llama glama
WYQQMPGQAPILVIY

SEQ ID NO: 9465 - protein, 15 aa, Llama glama
WYQQMPGQAPVLVIY

SEQ ID NO: 9466 - protein, 15 aa, Llama glama
WYQQRLGQSPRLLIY

SEQ ID NO: 9467 - protein, 15 aa, Llama glama
WYQQRPGQPPRLLIY

SEQ ID NO: 9468 - protein, 15 aa, Llama glama
WYQQRPGQSPRLLIY

SEQ ID NO: 9469 - protein, 15 aa, Llama glama
WYQQTPGQAPRTLIY

SEQ ID NO: 9470 - DNA, 1506 bp, Artificial Sequence
  source: /note="Description of Artificial Sequence: Synthetic polynucleotide"
caggtccagctgagagagagcggcccttcactggtcaagccatcccagacactgagcctgacatgcacagcaagcgggttttcactgagcgacaaggcagtgggatgggtccgacaggcaccaggaaaagccctggaatggctgggcagcatcgataccggcgggaacacagggtacaatcccggactgaagagcagactgtccattaccaaggacaactctaaaagtcaggtgtcactgagcgtgagctccgtcaccacagaggatagtgcaacttactattgcacctctgtgcaccaggaaactaagaaataccagagcgggggtggcggaagcgaatgcatcggtatgttcaaatcttgcgacccggaaaacgacaaatgctgcaaaggtcgtacctgctctcgtaaacaccgttggtgcaaatacaaactgggcggaggtgggagttcttatacctacaattatgaatggcatgtggatgtctggggacagggcctgctggtgacagtctctagtgcttccacaactgcaccaaaggtgtaccccctgtcaagctgctgtggggacaaatcctctagtaccgtgacactgggatgcctggtctcaagctatatgcccgagcctgtgactgtcacctggaactcaggagccctgaaaagcggagtgcacaccttcccagctgtgctgcagtcctctggcctgtatagcctgagttcaatggtgacagtccccggcagtacttcagggcagaccttcacctgtaatgtggcccatcctgccagctccaccaaagtggacaaagcagtggaacccaaatcttgcgacaaaactcacacatgcccaccgtgcccagcacctgaactcctggggggaccgtcagtcttcctcttccccccaaaacccaaggacaccctcatgatctcccggacccctgaggtcacatgcgtggtggtggacgtgagccacgaagaccctgaggtcaagttcaactggtacgtggacggcgtggaggtgcataatgccaagacaaagccgcgggaggagcagtacaacagcacgtaccgtgtggtcagcgtcctcaccgtcctgcaccaggactggctgaatggcaaggagtacaagtgcaaggtctccaacaaagccctcccagcccccatcgagaaaaccatctccaaagccaaagggcagccccgagaaccacaggtgtacaccctgcccccatcccgggatgagctgaccaagaaccaggtcagcctgacctgcctggtcaaaggcttctatcccagcgacatcgccgtggagtgggagagcaatgggcagccggagaacaactacaagaccacgcctcccgtgctggactccgacggctccttcttcctctacagcaagctcaccgtggacaagagcaggtggcagcaggggaacgtcttctcatgctccgtgatgcatgaggctctgcacaaccactacacgcagaagagcctctccctgtctccgggtaaa

SEQ ID NO: 9471 - DNA, 1509 bp, Artificial Sequence
  source: /note="Description of Artificial Sequence: Synthetic polynucleotide"
caggtccagctgagagagagcggcccttcactggtcaagccatcccagacactgagcctgacatgcacagcaagcgggttttcactgagcgacaaggcagtgggatgggtccgacaggcaccaggaaaagccctggaatggctgggcagcatcgataccggcgggaacacagggtacaatcccggactgaagagcagactgtccattaccaaggacaactctaaaagtcaggtgtcactgagcgtgagctccgtcaccacagaggatagtgcaacttactattgcacctctgtgcaccaggaaactaagaaataccagagcgggggtggcggaagcgactgcctgggtttcatgcgtaaatgcatcccggacaacgacaaatgctgccgtccgaacctggtttgctctcgtacccacaaatggtgcaaatacgttttcggcggaggtgggagttcttatacctacaattatgaatggcatgtggatgtctggggacagggcctgctggtgacagtctctagtgcttccacaactgcaccaaaggtgtaccccctgtcaagctgctgtggggacaaatcctctagtaccgtgacactgggatgcctggtctcaagctatatgcccgagcctgtgactgtcacctggaactcaggagccctgaaaagcggagtgcacaccttcccagctgtgctgcagtcctctggcctgtatagcctgagttcaatggtgacagtccccggcagtacttcagggcagaccttcacctgtaatgtggcccatcctgccagctccaccaaagtggacaaagcagtggaacccaaatcttgcgacaaaactcacacatgcccaccgtgcccagcacctgaactcctggggggaccgtcagtcttcctcttccccccaaaacccaaggacaccctcatgatctcccggacccctgaggtcacatgcgtggtggtggacgtgagccacgaagaccctgaggtcaagttcaactggtacgtggacggcgtggaggtgcataatgccaagacaaagccgcgggaggagcagtacaacagcacgtaccgtgtggtcagcgtcctcaccgtcctgcaccaggactggctgaatggcaaggagtacaagtgcaaggtctccaacaaagccctcccagcccccatcgagaaaaccatctccaaagccaaagggcagccccgagaaccacaggtgtacaccctgcccccatcccgggatgagctgaccaagaaccaggtcagcctgacctgcctggtcaaaggcttctatcccagcgacatcgccgtggagtgggagagcaatgggcagccggagaacaactacaagaccacgcctcccgtgctggactccgacggctccttcttcctctacagcaagctcaccgtggacaagagcaggtggcagcaggggaacgtcttctcatgctccgtgatgcatgaggctctgcacaaccactacacgcagaagagcctctccctgtctccgggtaaa

SEQ ID NO: 9472 - DNA, 1578 bp, Artificial Sequence
  source: /note="Description of Artificial Sequence: Synthetic polynucleotide"
caggtccagctgagagagagcggcccttcactggtcaagccatcccagacactgagcctgacatgcacagcaagcgggttttcactgagcgacaaggcagtgggatgggtccgacaggcaccaggaaaagccctggaatggctgggcagcatcgataccggcgggaacacagggtacaatcccggactgaagagcagactgtccattaccaaggacaactctaaaagtcaggtgtcactgagcgtgagctccgtcaccacagaggatagtgcaacttactattgcacctctgtgcaccaggaaactaagaaataccagagcgggggtggcggaagcctgaaatgttaccaacatggtaaagttgtgacttgtcatcgagatatgaagttttgctatcataacactggcatgccttttcgaaatctcaagctcatcctacagggatgttcttcttcgtgcagtgaaacagaaaacaataagtgttgctcaacagacagatgcaacaaaggcggaggtgggagttcttatacctacaattatgaatggcatgtggatgtctggggacagggcctgctggtgacagtctctagtgcttccacaactgcaccaaaggtgtaccccctgtcaagctgctgtggggacaaatcctctagtaccgtgacactgggatgcctggtctcaagctatatgcccgagcctgtgactgtcacctggaactcaggagccctgaaaagcggagtgcacaccttcccagctgtgctgcagtcctctggcctgtatagcctgagttcaatggtgacagtccccggcagtacttcagggcagaccttcacctgtaatgtggcccatcctgccagctccaccaaagtggacaaagcagtggaacccaaatcttgcgacaaaactcacacatgcccaccgtgcccagcacctgaactcctggggggaccgtcagtcttcctcttccccccaaaacccaaggacaccctcatgatctcccggacccctgaggtcacatgcgtggtggtggacgtgagccacgaagaccctgaggtcaagttcaactggtacgtggacggcgtggaggtgcataatgccaagacaaagccgcgggaggagcagtacaacagcacgtaccgtgtggtcagcgtcctcaccgtcctgcaccaggactggctgaatggcaaggagtacaagtgcaaggtctccaacaaagccctcccagcccccatcgagaaaaccatctccaaagccaaagggcagccccgagaaccacaggtgtacaccctgcccccatcccgggatgagctgaccaagaaccaggtcagcctgacctgcctggtcaaaggcttctatcccagcgacatcgccgtggagtgggagagcaatgggcagccggagaacaactacaagaccacgcctcccgtgctggactccgacggctccttcttcctctacagcaagctcaccgtggacaagagcaggtggcagcaggggaacgtcttctcatgctccgtgatgcatgaggctctgcacaaccactacacgcagaagagcctctccctgtctccgggtaaa

SEQ ID NO: 9473 - DNA, 1518 bp, Artificial Sequence
  source: /note="Description of Artificial Sequence: Synthetic polynucleotide"
caggtccagctgagagagagcggcccttcactggtcaagccatcccagacactgagcctgacatgcacagcaagcgggttttcactgagcgacaaggcagtgggatgggtccgacaggcaccaggaaaagccctggaatggctgggcagcatcgataccggcgggaacacagggtacaatcccggactgaagagcagactgtccattaccaaggacaactctaaaagtcaggtgtcactgagcgtgagctccgtcaccacagaggatagtgcaacttactattgcacctctgtgcaccaggaaactaagaaataccagagcgggggtggcggaagccactctcagggtaccttcacctctgactactctaaatacctggactctcgtcgtgctcaggacttcgttcagtggctgatgaacaccaaacgtaaccgtaacaacatcgctggcggaggtgggagttcttatacctacaattatgaatggcatgtggatgtctggggacagggcctgctggtgacagtctctagtgcttccacaactgcaccaaaggtgtaccccctgtcaagctgctgtggggacaaatcctctagtaccgtgacactgggatgcctggtctcaagctatatgcccgagcctgtgactgtcacctggaactcaggagccctgaaaagcggagtgcacaccttcccagctgtgctgcagtcctctggcctgtatagcctgagttcaatggtgacagtccccggcagtacttcagggcagaccttcacctgtaatgtggcccatcctgccagctccaccaaagtggacaaagcagtggaacccaaatcttgcgacaaaactcacacatgcccaccgtgcccagcacctgaactcctggggggaccgtcagtcttcctcttccccccaaaacccaaggacaccctcatgatctcccggacccctgaggtcacatgcgtggtggtggacgtgagccacgaagaccctgaggtcaagttcaactggtacgtggacggcgtggaggtgcataatgccaagacaaagccgcgggaggagcagtacaacagcacgtaccgtgtggtcagcgtcctcaccgtcctgcaccaggactggctgaatggcaaggagtacaagtgcaaggtctccaacaaagccctcccagcccccatcgagaaaaccatctccaaagccaaagggcagccccgagaaccacaggtgtacaccctgcccccatcccgggatgagctgaccaagaaccaggtcagcctgacctgcctggtcaaaggcttctatcccagcgacatcgccgtggagtgggagagcaatgggcagccggagaacaactacaagaccacgcctcccgtgctggactccgacggctccttcttcctctacagcaagctcaccgtggacaagagcaggtggcagcaggggaacgtcttctcatgctccgtgatgcatgaggctctgcacaaccactacacgcagaagagcctctccctgtctccgggtaaa

SEQ ID NO: 9474 - DNA, 1659 bp, Artificial Sequence
  source: /note="Description of Artificial Sequence: Synthetic polynucleotide"
caggtccagctgagagagagcggcccttcactggtcaagccatcccagacactgagcctgacatgcacagcaagcgggttttcactgagcgacaaggcagtgggatgggtccgacaggcaccaggaaaagccctggaatggctgggcagcatcgataccggcgggaacacagggtacaatcccggactgaagagcagactgtccattaccaaggacaactctaaaagtcaggtgtcactgagcgtgagctccgtcaccacagaggatagtgcaacttactattgcacctctgtgcaccaggaaactaagaaataccagagcgggggtggcggaagctctgtgagtgaaatacagcttatgcataacctgggaaaacatctgaactcgatggagagagtagaatggctgcgtaagaagctgcaggatgtgcacaattttgttgcccttggagctcctctagctcccagagatgctggttcccagaggccccgaaaaaaggaagacaatgtcttggttgagagccatgaaaaaagtcttggagaggcagacaaagctgatgtgaatgtattaactaaagctaaatcccagggcggaggtgggagttcttatacctacaattatgaatggcatgtggatgtctggggacagggcctgctggtgacagtctctagtgcttccacaactgcaccaaaggtgtaccccctgtcaagctgctgtggggacaaatcctctagtaccgtgacactgggatgcctggtctcaagctatatgcccgagcctgtgactgtcacctggaactcaggagccctgaaaagcggagtgcacaccttcccagctgtgctgcagtcctctggcctgtatagcctgagttcaatggtgacagtccccggcagtacttcagggcagaccttcacctgtaatgtggcccatcctgccagctccaccaaagtggacaaagcagtggaacccaaatcttgcgacaaaactcacacatgcccaccgtgcccagcacctgaactcctggggggaccgtcagtcttcctcttccccccaaaacccaaggacaccctcatgatctcccggacccctgaggtcacatgcgtggtggtggacgtgagccacgaagaccctgaggtcaagttcaactggtacgtggacggcgtggaggtgcataatgccaagacaaagccgcgggaggagcagtacaacagcacgtaccgtgtggtcagcgtcctcaccgtcctgcaccaggactggctgaatggcaaggagtacaagtgcaaggtctccaacaaagccctcccagcccccatcgagaaaaccatctccaaagccaaagggcagccccgagaaccacaggtgtacaccctgcccccatcccgggatgagctgaccaagaaccaggtcagcctgacctgcctggtcaaaggcttctatcccagcgacatcgccgtggagtgggagagcaatgggcagccggagaacaactacaagaccacgcctcccgtgctggactccgacggctccttcttcctctacagcaagctcaccgtggacaagagcaggtggcagcaggggaacgtcttctcatgctccgtgatgcatgaggctctgcacaaccactacacgcagaagagcctctccctgtctccgggtaaa

SEQ ID NO: 9475 - protein, 506 aa, Artificial Sequence
  source: /note="Description of Artificial Sequence: Synthetic polypeptide"
  MOD_RES (504)..(506): Any amino acid
QVQLRESGPSLVKPSQTLSLTCTASGFSLSDKAVGWVRQAPGKALEWLGSIDTGGNTGYNPGLKSRLSITKDNSKSQVSLSVSSVTTEDSATYYCTSVHQETKKYQSGGGGSDCLGFMRKCIPDNDKCCRPNLVCSRTHKWCKYVFGGGGSSYTYNYEWHVDVWGQGLLVTVSSASTTAPKVYPLSSCCGDKSSSTVTLGCLVSSYMPEPVTVTWNSGALKSGVHTFPAVLQSSGLYSLSSMVTVPGSTSGQTFTCNVAHPASSTKVDKAVEPKSCDKTHTCPPCPAPELLGGPSVFLFPPKPKDTLMISRTPEVTCVVVDVSHEDPEVKFNWYVDGVEVHNAKTKPREEQYNSTYRVVSVLTVLHQDWLNGKEYKCKVSNKALPAPIEKTISKAKGQPREPQVYTLPPSRDELTKNQVSLTCLVKGFYPSDIAVEWESNGQPENNYKTTPPVLDSDGSFFLYSKLTVDKSRWQQGNVFSCSVMHEALHNHYTQKSLSLSPGKXXX

SEQ ID NO: 9476 - protein, 505 aa, Artificial Sequence
  source: /note="Description of Artificial Sequence: Synthetic polypeptide"
  MOD_RES (503)..(505): Any amino acid
QVQLRESGPSLVKPSQTLSLTCTASGFSLSDKAVGWVRQAPGKALEWLGSIDTGGNTGYNPGLKSRLSITKDNSKSQVSLSVSSVTTEDSATYYCTSVHQETKKYQSGGGGSECIGMFKSCDPENDKCCKGRTCSRKHRWCKYKLGGGGSSYTYNYEWHVDVWGQGLLVTVSSASTTAPKVYPLSSCCGDKSSSTVTLGCLVSSYMPEPVTVTWNSGALKSGVHTFPAVLQSSGLYSLSSMVTVPGSTSGQTFTCNVAHPASSTKVDKAVEPKSCDKTHTCPPCPAPELLGGPSVFLFPPKPKDTLMISRTPEVTCVVVDVSHEDPEVKFNWYVDGVEVHNAKTKPREEQYNSTYRVVSVLTVLHQDWLNGKEYKCKVSNKALPAPIEKTISKAKGQPREPQVYTLPPSRDELTKNQVSLTCLVKGFYPSDIAVEWESNGQPENNYKTTPPVLDSDGSFFLYSKLTVDKSRWQQGNVFSCSVMHEALHNHYTQKSLSLSPGKXXX

SEQ ID NO: 9477 - protein, 509 aa, Artificial Sequence
  source: /note="Description of Artificial Sequence: Synthetic polypeptide"
  MOD_RES (507)..(509): Any amino acid
QVQLRESGPSLVKPSQTLSLTCTASGFSLSDKAVGWVRQAPGKALEWLGSIDTGGNTGYNPGLKSRLSITKDNSKSQVSLSVSSVTTEDSATYYCTSVHQETKKYQSGGGGSHSQGTFTSDYSKYLDSRRAQDFVQWLMNTKRNRNNIAGGGGSSYTYNYEWHVDVWGQGLLVTVSSASTTAPKVYPLSSCCGDKSSSTVTLGCLVSSYMPEPVTVTWNSGALKSGVHTFPAVLQSSGLYSLSSMVTVPGSTSGQTFTCNVAHPASSTKVDKAVEPKSCDKTHTCPPCPAPELLGGPSVFLFPPKPKDTLMISRTPEVTCVVVDVSHEDPEVKFNWYVDGVEVHNAKTKPREEQYNSTYRVVSVLTVLHQDWLNGKEYKCKVSNKALPAPIEKTISKAKGQPREPQVYTLPPSRDELTKNQVSLTCLVKGFYPSDIAVEWESNGQPENNYKTTPPVLDSDGSFFLYSKLTVDKSRWQQGNVFSCSVMHEALHNHYTQKSLSLSPGKXXX

SEQ ID NO: 9478 - protein, 529 aa, Artificial Sequence
  source: /note="Description of Artificial Sequence: Synthetic polypeptide"
  MOD_RES (527)..(529): Any amino acid
QVQLRESGPSLVKPSQTLSLTCTASGFSLSDKAVGWVRQAPGKALEWLGSIDTGGNTGYNPGLKSRLSITKDNSKSQVSLSVSSVTTEDSATYYCTSVHQETKKYQSGGGGSLKCYQHGKVVTCHRDMKFCYHNTGMPFRNLKLILQGCSSSCSETENNKCCSTDRCNKGGGGSSYTYNYEWHVDVWGQGLLVTVSSASTTAPKVYPLSSCCGDKSSSTVTLGCLVSSYMPEPVTVTWNSGALKSGVHTFPAVLQSSGLYSLSSMVTVPGSTSGQTFTCNVAHPASSTKVDKAVEPKSCDKTHTCPPCPAPELLGGPSVFLFPPKPKDTLMISRTPEVTCVVVDVSHEDPEVKFNWYVDGVEVHNAKTKPREEQYNSTYRVVSVLTVLHQDWLNGKEYKCKVSNKALPAPIEKTISKAKGQPREPQVYTLPPSRDELTKNQVSLTCLVKGFYPSDIAVEWESNGQPENNYKTTPPVLDSDGSFFLYSKLTVDKSRWQQGNVFSCSVMHEALHNHYTQKSLSLSPGKXXX

SEQ ID NO: 9479 - protein, 555 aa, Artificial Sequence
  source: /note="Description of Artificial Sequence: Synthetic polypeptide"
  MOD_RES (554)..(555): Any amino acid
QVQLRESGPSLVKPSQTLSLTCTASGFSLSDKAVGWVRQAPGKALEWLGSIDTGGNTGYNPGLKSRLSITKDNSKSQVSLSVSSVTTEDSATYYCTSVHQETKKYQSGGGGSSVSEIQLMHNLGKHLNSMERVEWLRKKLQDVHNFVALGAPLAPRDAGSQRPRKKEDNVLVESHEKSLGEADKADVNVLTKAKSQGGGGSSYTYNYEWHVDVWGQGLLVTVSSASTTAPKVYPLSSCCGDKSSSTVTLGCLVSSYMPEPVTVTWNSGALKSGVHTFPAVLQSSGLYSLSSMVTVPGSTSGQTFTCNVAHPASSTKVDKAVEPKSCDKTHTCPPCPAPELLGGPSVFLFPPKPKDTLMISRTPEVTCVVVDVSHEDPEVKFNWYVDGVEVHNAKTKPREEQYNSTYRVVSVLTVLHQDWLNGKEYKCKVSNKALPAPIEKTISKAKGQPREPQVYTLPPSRDELTKNQVSLTCLVKGFYPSDIAVEWESNGQPENNYKTTPPVLDSDGSFFLYSKLTVDKSRWQQGNVFSCSVMHEALHNHYTQKSLSLSPGKXX

SEQ ID NO: 9480 - DNA, 342 bp, Artificial Sequence
  source: /note="Description of Artificial Sequence: Synthetic polynucleotide"
caggagcaactgaaggagtccgggggaggcctggtaacgcctggaggaaccctgacactcacctgcaccgtctctggattctccctcgataactaccacatgggctgggtccgccaggctccagggaaggggctcaattacatcggattcattactcgtggtggtaccacatactacgcgagctgggcgaagggccgattcaccatctccaaaacctcgaccacggtggatctgatgatcaccagtccgacaaccggggacacggccacctatttctgtgccagaggaagtggcgctagcggcttttacttgtggggcccaggcaccctggtcaccgtctcg

SEQ ID NO: 9481 - DNA, 354 bp, Artificial Sequence
  source: /note="Description of Artificial Sequence: Synthetic polynucleotide"
cagtcgctggaggagtcccggggtcgcctggtcacgcctgggacacccctgacactcacctgcacagtctctggaatcgacctcagtagttatgcaatgacctgggtccgccaggctccagggaaggggctggaatggatcggaatggttcgtcgtagtggtaccacatactacgcgagctgggcgaaaggccgattcaccatctccaaaacctcgaccacggtggatctgaaaatcatcagtccgacaaccgaggacacggccacctatttctgtgccagatgtgataatagtgctggtgactggagttacggcatggacctctggggcccggggaccctggtcaccgtctcg

SEQ ID NO: 9482 - DNA, 333 bp, Artificial Sequence
  source: /note="Description of Artificial Sequence: Synthetic polynucleotide"
cagtcgctggaggagtccgggggtcgcctggtcacgccggagacacccctgacactcacctgcacagcctctggaatcgacctcagtaagtggccaatgacctgggtccgccaggctccagggaagggactggagtggatcggaattattggtaggagtggtagcacgaattacgcgagctgggcgaaaggccgattcaccatctccaaaacctcgaccacggtggatctgaaaatgaccagtccgacaaccgaggacacggccacttatttctgtgccagaggtggtagttattatgatttgtggggccaggggaccctggtcaccgtctcg

SEQ ID NO: 9483 - DNA, 339 bp, Artificial Sequence
  source: /note="Description of Artificial Sequence: Synthetic polynucleotide"
cagtcggtggaggagtccgggggtcgcctggtcacgcctgggacacccctgacactcacctgcacagtctctgaattctccctcagtgactatataataaactgggtccgccaggctccagggaaggggctggaatggatcgggatcatgggtactagtggtaccgcatactacgcgagctgggcgaaaggccgattcaccatctccaaaacctcgtcgaccacggtggatctgagaatgaccagtctgacaaccgaggacacggccacctatttctgtgccagagggggtgttgctacttctaatttctggggccaaggcaccctggtcaccgtctcg

SEQ ID NO: 9484 - DNA, 339 bp, Artificial Sequence
  source: /note="Description of Artificial Sequence: Synthetic polynucleotide"
cagtcggtggaggagtccgggggtcgcctggtcacgcctgggacacccctgacactcacctgcacagtctctggattctccctcaacgactacgacatgagctgggtccgccaggctccagggaaggggctggaatggatcacaaccatttatgttagtggtaacacatactacgcgacctgggcgaaaggccgattcaccatctccaaaacctcgaccacggtggatctgaaaatgaccagtccgacagccgaggacacggccacctatttctgtgccagagcggttcctggtagtggtaaggggttgtggggcccgggcaccctcgtcaccgtctcg

SEQ ID NO: 9485 - DNA, 339 bp, Artificial Sequence
  source: /note="Description of Artificial Sequence: Synthetic polynucleotide"
cagtcggtggaggagtccgggggtcgcctggtcacgcctgggacacccctgacactcacctgcacagtctctggattctccctcaataactacgacatgacctgggtccgccaggctccagggaaggggctggaatggatcggaagtatttttgttagtggtaatatatactacgcgagctgggcgaaaggccgattcaccatctccaaaacctcgaccacggtggatctgaaaatgaccagtccgacaaccgaggacacggccacctatttctgtgccagagcaattcttggtagtagtaaggggttgtggggcccaggcaccctggtcaccgtctcg

SEQ ID NO: 9486 - DNA, 339 bp, Artificial Sequence
  source: /note="Description of Artificial Sequence: Synthetic polynucleotide"
cagtcggtggaggagtccgggggtcgcctggtcacgcctgggacacccctgacactcacctgcacagtctctggattctccctcagcatctacgacatgagctgggtccgccaggctccagggaaggggctggaatggatcggatccatttatgttagtggtaatatatactacgcgagctgggcgaaaggccgattcaccatctccaaaacctcgaccacggtggatctgaaaatgaccagtccgacaaccgaggacacggccacctatttctgtgccagagcggttcctggtagtagtaaggggttgtggggccaggggaccctcgtcaccgtctcg

SEQ ID NO: 9487 - DNA, 324 bp, Artificial Sequence
  source: /note="Description of Artificial Sequence: Synthetic polynucleotide"
cagtcggtggaggagtccgggggtcgcctggtcacgcctgggacacccctgacactcacctgcacagtctctggattctccctcagtaactatgcaatgagttgggtccgccaggctccagggaaggggctggaatggatcggaatcattggtaaaagtggtagtacggcctacgcgagctgggcgaaaggccgattcaccatctccagaacctcgaccacggtggatctggaaatcaccagtccgacaaccgaggacacggccacctatttctgtgtcagatttgtgctcttgtggggcccggggaccctcgtcaccgtctcg

SEQ ID NO: 9488 - DNA, 324 bp, Artificial Sequence
  source: /note="Description of Artificial Sequence: Synthetic polynucleotide"
cagtcggtggaggagtccgggggtcgcctggtcacgcctgggacacccctgacactcacctgcacagtctctggattctccctcagtacctatgcaatgagctgggtccgccaggctccagggaaggggctggaatggatcggaatcgttggaaagagtggtattataaagtacgcgagctgggcgaaaggccggttcaccatctccaaaacctcgaccacggtggatctgaaaatgaccagtctgacaaccgaggacacggccatttatttctgtgccagactatggagcttgtggggccaagggaccctcgtcaccgtctcg

SEQ ID NO: 9489 - DNA, 342 bp, Artificial Sequence
  source: /note="Description of Artificial Sequence: Synthetic polynucleotide"
cagtcggtggaggagtccgggggtcgcctggtcacgcctgggacacccctgacactcacctgcaccgtctctggattctccctcagtaccaatgcaatgatctgggtccgccaggctccagggaaggggctggaatatatcggtgtgattgctggtagtggtagcacatcttacgcgagctgggcgaaaggccgattcaccatctccaaaacctcgaccacggtggatctgaaaatcaccagtccgacaaccgaggacacggccacctatttctgtgccagagggggttgggttagtggtccggagagcttgtggggccaaggcaccctcgtcaccgtctcg

SEQ ID NO: 9490 - DNA, 63 bp, Homo sapiens
attactactactactacggtatggacgtctgggggcaagggaccacggtcaccgtctcctcag

SEQ ID NO: 9491 - DNA, 1341 bp, Artificial Sequence
  source: /note="Description of Artificial Sequence: Synthetic polynucleotide"
cagcagcagttgctggagtccgggggaggcctggtccagcctgagggatccctggcactcacctgcacagcttctggattctccttcagtagcggctacgacatgtgctgggtccgccagcctccagggaaggggctggagtgggtcggctgcatttatagtggtgatgataatgatattacttattacgcgagctgggcgagaggccgattcaccatctccaacccctcgtcgaccactgtgactctgcaaatgaccagtctgacagtcgcggacacggccacctatttctgtgcgcgaggtcatgctatttatgataattatgatagtgtccacttgtggggccaggggaccctcgtcaccgtctcgagcgggcaacctaaggctccatcagtcttcccactggccccctgctgcggggacacaccctctagcacggtgaccttgggctgcctggtcaaaggctacctcccggagccagtgaccgtgacctggaactcgggcaccctcaccaatggggtacgcaccttcccgtccgtccggcagtcctcaggcctctactcgctgagcagcgtggtgagcgtgacctcaagcagccagcccgtcacctgcaacgtggcccacccagccaccaacaccaaagtggacaagaccgttgcgccctcgacatgcagcaagcccacgtgcccaccccctgaactcctggggggaccgtctgtcttcatcttccccccaaaacccaaggacaccctcatgatctcacgcacccccgaggtcacatgcgtggtggtggacgtgagccaggatgaccccgaggtgcagttcacatggtacataaacaacgagcaggtgcgcaccgcccggccgccgctacgggagcagcagttcaacagcacgatccgcgtggtcagcaccctccccatcgcgcaccaggactggctgaggggcaaggagttcaagtgcaaagtccacaacaaggcactcccggcccccatcgagaaaaccatctccaaagccagagggcagcccctggagccgaaggtctacaccatgggccctccccgggaggagctgagcagcaggtcggtcagcctgacctgcatgatcaacggcttctacccttccgacatctcggtggagtgggagaagaacgggaaggcagaggacaactacaagaccacgccggccgtgctggacagcgacggctcctacttcctctacagcaagctctcagtgcccacgagtgagtggcagcggggcgacgtcttcacctgctccgtgatgcacgaggccttgcacaaccactacacgcagaagtccatctcccgctctccgggtaaa

SEQ ID NO: 9492 - DNA, 366 bp, Artificial Sequence
  source: /note="Description of Artificial Sequence: Synthetic polynucleotide"
caggaacagctggaggagtccgggggaggcctggtccagcctgagggatccctgacactcacctgcacagcttctggattctccttcagtagcagctactggatatgttgggtccgccaggctccagggaaggggctggaattgatcgcatgcatttatggtggtagtattaatattattaactacgcgagctgggcgaaaggccgattcaccatctccaaaacctcgtcgaccacggtgactctgcgaatgaccagtctgacagccgcggacacggccaccaatttctgtgcgagagtacagggtggtaatagtggtggttggtactttgacttgtggggcccaggcaccctcgtcaccgtctcg

SEQ ID NO: 9493 - DNA, 1329 bp, Artificial Sequence
  source: /note="Description of Artificial Sequence: Synthetic polynucleotide"
caggagcagttggtggagtccgggggaggcctggtccagcctggggcatccctgacactcacctgcacagcttctggattctccttcagtaacaccaattacatgtgctgggtccgccaggctccagggaggggcctggagtgggtcggatgcatgcccgttggttttattgccagcactttctacgcgacctgggcgaaaggccgatccgccatctccaagtcctcgtcgaccgcggtgactctgcaaatgaccagtctgacagtcgcggacacggccacctatttctgtgcgagagaaagcggtagtggctgggcgcttaacttgtggggccaagggaccctggtcaccgtctcgagcgggcaacctaaggctccatcagtcttcccactggccccctgctgcggggacacaccctctagcacggtgaccttgggctgcctggtcaaaggctacctcccggagccagtgaccgtgacctggaactcgggcaccctcaccaatggggtacgcaccttcccgtccgtccggcagtcctcaggcctctactcgctgagcagcgtggtgagcgtgacctcaagcagccagcccgtcacctgcaacgtggcccacccagccaccaacaccaaagtggacaagaccgttgcgccctcgacatgcagcaagcccacgtgcccaccccctgaactcctggggggaccgtctgtcttcatcttccccccaaaacccaaggacaccctcatgatctcacgcacccccgaggtcacatgcgtggtggtggacgtgagccaggatgaccccgaggtgcagttcacatggtacataaacaacgagcaggtgcgcaccgcccggccgccgctacgggagcagcagttcaacagcacgatccgcgtggtcagcaccctccccatcgcgcaccaggactggctgaggggcaaggagttcaagtgcaaagtccacaacaaggcactcccggcccccatcgagaaaaccatctccaaagccagagggcagcccctggagccgaaggtctacaccatgggccctccccgggaggagctgagcagcaggtcggtcagcctgacctgcatgatcaacggcttctacccttccgacatctcggtggagtgggagaagaacgggaaggcagaggacaactacaagaccacgccggccgtgctggacagcgacggctcctacttcctctacagcaagctctcagtgcccacgagtgagtggcagcggggcgacgtcttcacctgctccgtgatgcacgaggccttgcacaaccactacacgcagaagtccatctcccgctctccgggtaaa

SEQ ID NO: 9494 - DNA, 376 bp, Homo sapiens
caggtccaacttgtgcagtctggggctgaggtgaggaagcctggggcctcagtgaaggtttcctgcaaggcttctggatacaccttcactgactatgcaatacattgggtgcgccaggcccccggacaaaggcttgagtggatgggatggatcatcgttggcaatggtaagacaagatatgcacagaagttccagggcagagtcaccattacctgggaaacatccgcgagcacagcctacatggacctgagtagtctgagatcggaagacacggctgtttattactgtgcgagagggtttactatggttcggggagccccctattatgacggtttggacgtctggggccaggggaccacggtcaccgtctcctcag

SEQ ID NO: 9495 - DNA, 507 bp, Bos sp.
caggtccagctgagagagagcggcccttcactggtcaagccatcccagacactgagcctgacatgcacagcaagcgggttttcactgagcgacaaggcagtgggatgggtccgacaggcaccaggaaaagccctggaatggctgggcagcatcgataccggcgggaacacagggtacaatcccggactgaagagcagactgtccattaccaaggacaactctaaaagtcaggtgtcactgagcgtgagctccgtcaccacagaggatagtgcaacttactattgcacctctgtgcaccaggaaactaagaaataccagagctgtcctgacggctatcgggagagatctgattgcagtaataggccagcttgtggcacatccgactgctgtcgcgtgtctgtcttcgggaactgcctgactaccctgcctgtgtcctactcttatacctacaattatgaatggcatgtggatgtctggggacagggcctgctggtgacagtctctagt

SEQ ID NO: 9496 - DNA, 376 bp, Homo sapiens
caggtccagcttgtgcagtctgggcctgaggtgaggaaccctggggcctcagtgagggtttcctgcaaggcttctggatacaccttcactgactatgcactacattgggtgcgccaggcccccggacaaaggcttgagtggatgggatggatcatcgttggcaatggtaagacaagatatgcacagaagttccagggcagagtcaccattacctgggaaacatccgcgagcacagccttcatggacctgagtagtctgagatcggaagacacggctgtttattactgtgcgagagggtttactatggttcggggagccccctattatgacggtttggacgtctggggccaagggaccacggtcaccatctcctcag

SEQ ID NO: 9497 - DNA, 376 bp, Homo sapiens
caggtccagcttgtgcagtctggggcagaggtgaggaagcctggggcctcagtgaaggtttcctgcaaggcttctggatacaccttcactgactatgcaatacattgggtgcgccaggcccccggacaaaggcttgagtggatgggatggatcatcgttggcaatggtaagacaagatatgcacagaagttccagggcagagtcaccattacctgggaaacatccgcgaccacagtctacatggacctgagtagtctgagatcggaagacacggctgtttattactgtgcgagagggtttactatggttcggggagccccctattatgacggtttggacgtctggggccaagggaccacggtcaccgtctcctcag

SEQ ID NO: 9498 - DNA, 376 bp, Homo sapiens
caggtccagcttgtgcagtctggggctgaggtgaggaagcctggggcctcagtgaaagtttcctgcaaggcttctggatacaccttcactgactatgcaatacattgggtgcgccaggcccccggacaaaggcttgagtggatgggatggatcatcgttggcaatggtaagacaagatattcacagaagtttcagggcagagtcaccattacctgggaaacatccgcgaccacagcctacatggacctgagtagtctgagatcggaggacacggctgtttattactgtgcgagagggtttactatggttcggggagccccctattatgacggtatggacgtctggggccaagggaccacggtcaccgtctcctcag

SEQ ID NO: 9499 - DNA, 376 bp, Homo sapiens
caggtccagcttgtgcagtctggggctgaggtgaggaagcctggggcctcagtgaaggtttcctgcaaggcttctggatacaccttcactgactatgcaatacattgggtgcgccaggcccccggacaaaggcttgagtggatgggatggatcatcgttggcaatggtaagacaagatatgcacagaagttgcagggcagagtcaccattacctgggaaacatccgcgagcacagcctacatggacctgactagtctgagatcggaagacacggctgtttattactgtgcgagagggtttactatggttcggggagccccctattatgacggtttggacgtctggggccaagggaccacggtcaccgtctcctcag

SEQ ID NO: 9500 - DNA, 376 bp, Homo sapiens
caggtccagcttgtgcagtctggggctgaggtgaggaagcctggggcctcagtgaaggtttcctgcaaggcttctggatacaccttcactgactatgcaatacattgggtgcgccaggcccccggacaaaggcttgagtggatgggatggatcatcgttggcaatggtaagacaagatattcacagaagtttcagggcagagtcaccattacctgggaaacatccgcgagcacagcctacatggacctgagtagtctgagatcggaagacacggctgtttattactgtgcgagagggtttactatggttcggggagccccctattatgacggtatggacgtctggggccaagggaccacggtcaccgtctcctcag

SEQ ID NO: 9501 - DNA, 376 bp, Homo sapiens
caggtccagcttgtgcagtctggggctgaggtgaggaagcctggggcctcagtgaaggtttcctgcaaggcttctggatacaccttcactgactatgcactacattgggtgcgccaggcccccggacaaaggcttgagtggatgggatggatcatcgttggcaatggtaagacaagatatgcacagaagttccagggcagagtcaccattacctgggaaacatccgcgagcacagccttcatggacctgagtagtctgagatcggaagacacggctgtttattactgtgcgagagggtttactatggttcggggagccccctattatgacggtttggacgtctggggccaagggaccacggtcaccgtctcctcag

SEQ ID NO: 9502 - DNA, 376 bp, Homo sapiens
caggtccagcttgtgcagtctggggctgaggtgaggaagcctggggcctcagtgaaggtttcctgcaaggcttctggatacaccttcactgactatgcactacattgggtgcgccaggcccccggacaaaggcttgagtggatgggatggatcatcgttggcaatggtaagacaagatatgcacagaagttccagggcagagtcaccattacctgggaaacatccgcgagcacagccttcgtggacctgaatagtctgagatcggaagacacggctgtttattactgtgcgagagggtttactatggttcggggagccccctattatgacggtttggacgtctggggccaagggaccacggtcaccgtctcctcag

SEQ ID NO: 9503 - DNA, 376 bp, Homo sapiens
caggtccagtttgtgcagtctggggctgaggtgaggaagcctggggcctcagtgaaagtttcctgcaaggcttctggatacaccttcactgactatgcaatacattgggtgcgccaggcccccggacaaaggcttgagtggatgggatggatcatcgttggcaatggtaagacaagatattcacagaagtttcagggcagactcaccattacctgggaaacatccgcgaccacagcctacatggacctgagtagtctgagatcggaggacacggctgtttattactgtgcgagagggtttactatggttcggggagccccctattatgacggtatggacgtctggggccaagggaccacggtcaccgtctcctcag

SEQ ID NO: 9504 - DNA, 382 bp, Homo sapiens
caggtgcagctgcaggagtcgggcccaggactggtgaagccttcggggaccctgtccctcacttgcgctgtctctggtggctccatcagtagtagtaactggtggagttgggtccgccagcccccagggaaggggctggagtggattggggaaatctatcatagtgggaacaccaactacaacccgtccctcaagagtcgagtcaccatatcagtagacaagtccaagaaccagttctccctgaagctgagctctgtgaccgccgcggacacggccgtgtattactgtgtgagaggttattactatgattcggggacctcttgggggtactattatggtatggacgtctggggccaagggaccacggtcaccgtctcctcag

SEQ ID NO: 9505 - DNA, 296 bp, Homo sapiens
caggtgcagctggtgcagtctggggctgaggtgaagaagcctggggcctcagtgaaggtttcctgcaaggcatctggatacaccttcaccagctactatatgcactgggtgcgacaggcccctggacaagggcttgagtggatgggaataatcaaccctagtggtggtagcacaagctacgcacagaagttccagggcagagtcaccatgaccagggacacgtccacgagcacagtctacatggagctgagcagcctgagatctgaggacacggccgtgtattactgtgcgagaga

SEQ ID NO: 9506 - DNA, 349 bp, Homo sapiens
caggttcaattggtgcaatctgaagctgaggtgaagaagcccggggcctcagtgaaggtctcctgcaaggcttctggttatatctttaccacctttggtctcagctgggtgcgacaggcccctggacaaggacttgagtggatgggaaggatcaccacaaataatgggaacacaatctatgagaggagattccagggcagagtcaccatgaccatagacacatccacgacaactgcctacatggagatgagaagcctgacatctgacgatacggccgtttattattgtgcgagagatggggccccacaggaccactggggccagggaaccctggtcaccgtctcctcag

SEQ ID NO: 9507 - DNA, 296 bp, Homo sapiens
caggttcagctggtgcagtctggagctgaggtgaagaagcctggggcctcagtgaaggtctcctgcaaggcttctggttacacctttaccagctatggtatcagctgggtgcgacaggcccctggacaagggcttgagtggatgggatggatcagcgcttacaatggtaacacaaactatgcacagaagctccagggcagagtcaccatgaccacagacacatccacgagcacagcctacatggagctgaggagcctgagatctgacgacacggccgtgtattactgtgcgagaga

SEQ ID NO: 9508 - DNA, 349 bp, Homo sapiens
caggttcagttggtacagtctggacctgaagtgaagaagcctggggcctcagtgaaggtctcctgccaggcttctggttatacctttaccacctatggcatcaactgggtgcgacaggcccctggacaaggacttgagtggatgggaaggatcagcgcttacaatggtaacacaaattatgcacagaagttccagggcagagtcaccatgaccacagacacatctacgaggacagcctacatggagatgagtaacctgatatctgacgacacggccgtgtattattgtgcgcgagatggggctccccaagaccactggggccagggaaccctaatcaccgtctcttcag

SEQ ID NO: 9509 - DNA, 342 bp, Artificial Sequence
  source: /note="Description of Artificial Sequence: Synthetic polynucleotide"
cagtcagtgaaggagtccgagggaggtctcttcaagccaacggataccctgacactcacctgcacagtctctggattctccctcagtagctatgcaataagctgggtccgccaggctccagggaacgggctggaatggatcggattcattaacactattactggtggcacaaactacgcgagctgggcgaaaagccgatccaccatcaccagaaacaccaacgataacacggtgactctgaaaatgaccagtctgacagccgcggacacggccacgtatttctgtgcgagaagtggtgcctactttgacttgtggggcccaggcaccctggtcaccgtctcg

SEQ ID NO: 9510 - DNA, 345 bp, Artificial Sequence
  source: /note="Description of Artificial Sequence: Synthetic polynucleotide"
cagtcgctggaggagtccgggggtcgcctgataacgcctggaggatccctgacactcacctgtacagtctctggattcgacctcagtagctatgcaatgacctgggtccgccaggctccagggaaggggctggagtggatcggaatcatttatggtactgagaccatatactacgcgaccagggcgaaaggccgattcaccatctccaaagcctcgaccacggtggatctcaaaatcaccagtccgacaaccgaggacacggccatttatttctgtgccagaggagattctactagtggttttcatttgactttgtggggcccgggcaccctcgtcaccgtctcg

SEQ ID NO: 9511 - DNA, 342 bp, Artificial Sequence
  source: /note="Description of Artificial Sequence: Synthetic polynucleotide"
cagtcgctggaggagtccgggggtcgcctggtaacgcctggaggatccctgacactcacctgcacagtctctggaatcgacctcagtagctatgcaatgacctgggtccgccaggctccagggaaggggctggaatggatcggaatcatttatgctagtgatacatactacacgagctgggcgaaaggccgattcaccatctccaaaacctcgaccacggtggatctcaaaatcaccagtccgacaaccgaggacacggccatttatttctgtgccagaggagattctactagtggttttcatttgactttgtggggccaggggaccctggtcaccgtctcg

SEQ ID NO: 9512 - DNA, 351 bp, Artificial Sequence
  source: /note="Description of Artificial Sequence: Synthetic polynucleotide"
cagtcgctggaggagtccgggggtcgcctggtcacgcctgggacacccctgacactcacctgcacagtctctggattctccctcagtcgctactggatgagctgggtccgccaggctccagggaaggggctggagtggatcggaaacattggtggtggtagtggtagtacattatacgcgccctgggcaaaaggccgatccaccatctccaaaacctcgaccacggtggatctgaaaatcaccagtccgacaaccgaggacacggccacctatttctgtggcagatatgttaaaaatggtggtggttatcggttggatctttggggcccagggaccctggtcaccgtctcg

SEQ ID NO: 9513 - DNA, 345 bp, Artificial Sequence
  source: /note="Description of Artificial Sequence: Synthetic polynucleotide"
cagtcggtggaggagtccggcggtcgcctggtaactcctggaggatccctgacactcacctgcaccgtctctggattcgacctcagtagctatgcaatgacctgggtccgccaggctccagggaaggggctggagtggatcggaatcatttatggtactgaactcacatactacgcgacctgggcgaaaggccgattcaccatctccgaaacctcgaccacggtggatctcaaactcaccagtccgacaaccgaggacacggccatttatttctgtgccagaggagatgctactagtggttttcatttgacgttgtggggcccggggaccctcgtcaccgtctcg

SEQ ID NO: 9514 - DNA, 333 bp, Artificial Sequence
  source: /note="Description of Artificial Sequence: Synthetic polynucleotide"
cagtcggtggaggagtccgggggtcgcctggtcacgcctgggacacccctgacactcacctgcacagtctctggaatcgacctcagtcgcaatgcaatgacctgggtccgccaggctccagggaaggggctggaatacatcgcatacattaatactaggggtgacacatcctacgcgaactgggcgaaaggccgattcaccatctccaaaacctcgaccacggtggatctgaaaatgaccagtctgacaaccgaggacacggccacctatttctgtgttcatggttataatccctgtaagttgtggggccaaggcaccctggtcaccgtctcg

SEQ ID NO: 9515 - DNA, 339 bp, Artificial Sequence
  source: /note="Description of Artificial Sequence: Synthetic polynucleotide"
cagtcggtggaggagtccgggggtcgcctggtcacgcctgggacacccctggcactcacctgcacagtctctggaatcgacctcagttactatgcaataagctgggtccgccaggctccagggaaggggctggaatacatcggaatcattggtagtagtggtagaacatactacgcgagctgggcgaaaggccgattcaccatctccaaaacctcgaccacggtggatctgaaaatgaccagtctgacaaccgaagacacggccacctatttctgtgtcaggggtggtcctacttctagtcctagtttgtggggccaaggcaccctcgtcaccgtctcg

SEQ ID NO: 9516 - DNA, 333 bp, Artificial Sequence
  source: /note="Description of Artificial Sequence: Synthetic polynucleotide"
cagtcggtggaggagtccgggggtcgcctggtcgcgcctgggacacccctgacactcacctgcacagtctctggaatcgacctcagtaggaatgcaatgacctgggtccgccaggctccagggaaggggctggaatacatcgcatatattaatactaggggtggcgcatcctacgcgaactgggcgaaaggccgattcaccatctccaaaacctcgaccacggtggatctgaaaatgaccagtctgacagcttcagacacggccacctatttctgtgtcaatggttataacccctgtaagttgtggggcccggggaccctcgtcaccgtctcg

SEQ ID NO: 9517 - DNA, 348 bp, Artificial Sequence
  source: /note="Description of Artificial Sequence: Synthetic polynucleotide"
cagtcggtggaggagtccgggggtcgcctggtcgcgcctgggacacccctgacactcacctgtacagtctctggaatcgacctcagtagaaatgcaatgggctgggtccgccaggctccagagaaggggctggaatacatcggccatattgcgagtcgtggtaacatatggttcaggaactgggcgaaaggccgattcaccgtctccaaaacctcgaccacggtggatctaaaaatcaccagtccgacaaccgaggacacggccacctatttctgtggcagatttcttgtagtatctggggtggggacttttgatccctggggccaggggaccctcgtcaccgtctcg

SEQ ID NO: 9518 - DNA, 1323 bp, Artificial Sequence
  source: /note="Description of Artificial Sequence: Synthetic polynucleotide"
cagtcgttggaggagtccgggggagacctggtcaagcctggggcatccctgacactcacctgcacagcctctggattctccttcagtagcggctacgacatgtgttgggtccgccaggctccagggaaggggctggagtggatcgcctgtatttaccctaataatcctgtcacttactacgcgagctgggcgaaaggccgattcaccatctccaaaacctcgtcgaccacggtgactctgcaaatgaccagtctgacagccgcggacacggccacctatttctgtgggagatctgatagtaatggtcatacctttaacttgtggggccaaggcaccctcgtcaccgtctcgagcgggcaacctaaggctccatcagtcttcccactggccccctgctgcggggacacaccctctagcacggtgaccttgggctgcctggtcaaaggctacctcccggagccagtgaccgtgacctggaactcgggcaccctcaccaatggggtacgcaccttcccgtccgtccggcagtcctcaggcctctactcgctgagcagcgtggtgagcgtgacctcaagcagccagcccgtcacctgcaacgtggcccacccagccaccaacaccaaagtggacaagaccgttgcgccctcgacatgcagcaagcccacgtgcccaccccctgaactcctggggggaccgtctgtcttcatcttccccccaaaacccaaggacaccctcatgatctcacgcacccccgaggtcacatgcgtggtggtggacgtgagccaggatgaccccgaggtgcagttcacatggtacataaacaacgagcaggtgcgcaccgcccggccgccgctacgggagcagcagttcaacagcacgatccgcgtggtcagcaccctccccatcgcgcaccaggactggctgaggggcaaggagttcaagtgcaaagtccacaacaaggcactcccggcccccatcgagaaaaccatctccaaagccagagggcagcccctggagccgaaggtctacaccatgggccctccccgggaggagctgagcagcaggtcggtcagcctgacctgcatgatcaacggcttctacccttccgacatctcggtggagtgggagaagaacgggaaggcagaggacaactacaagaccacgccggccgtgctggacagcgacggctcctacttcctctacagcaagctctcagtgcccacgagtgagtggcagcggggcgacgtcttcacctgctccgtgatgcacgaggccttgcacaaccactacacgcagaagtccatctcccgctctccgggtaaa

SEQ ID NO: 9519 - DNA, 1326 bp, Artificial Sequence
  source: /note="Description of Artificial Sequence: Synthetic polynucleotide"
cagtcgttggaggagtccgggggaggcctggtcaagcctgagggatccctgacactcacctgcaaagcctctggattctccttcactggcgcccactacatgtgctgggtccgccaggctccagggaaggggctggagtggatcgcatgtatttatggtggtagtgttgatataactttctacgcgagctgggcgaaaggccgattcgccatctccaagtcctcgtcgaccgcggtgactctgcaaatgaccagtctgacagccgcggacacggccacctatgtctgtgcgagagaaagcggtagtggctgggcgcttaacttgtggggcccggggaccctagtcaccgtctcgagcgggcaacctaaggctccatcagtcttcccactggccccctgctgcggggacacaccctctagcacggtgaccttgggctgcctggtcaaaggctacctcccggagccagtgaccgtgacctggaactcgggcaccctcaccaatggggtacgcaccttcccgtccgtccggcagtcctcaggcctctactcgctgagcagcgtggtgagcgtgacctcaagcagccagcccgtcacctgcaacgtggcccacccagccaccaacaccaaagtggacaagaccgttgcgccctcgacatgcagcaagcccacgtgcccaccccctgaactcctggggggaccgtctgtcttcatcttccccccaaaacccaaggacaccctcatgatctcacgcacccccgaggtcacatgcgtggtggtggacgtgagccaggatgaccccgaggtgcagttcacatggtacataaacaacgagcaggtgcgcaccgcccggccgccgctacgggagcagcagttcaacagcacgatccgcgtggtcagcaccctccccatcgcgcaccaggactggctgaggggcaaggagttcaagtgcaaagtccacaacaaggcactcccggcccccatcgagaaaaccatctccaaagccagagggcagcccctggagccgaaggtctacaccatgggccctccccgggaggagctgagcagcaggtcggtcagcctgacctgcatgatcaacggcttctacccttccgacatctcggtggagtgggagaagaacgggaaggcagaggacaactacaagaccacgccggccgtgctggacagcgacggctcctacttcctctacagcaagctctcagtgcccacgagtgagtggcagcggggcgacgtcttcacctgctccgtgatgcacgaggccttgcacaaccactacacgcagaagtccatctcccgctctccgggtaaa

SEQ ID NO: 9520 - DNA, 1326 bp, Artificial Sequence
  source: /note="Description of Artificial Sequence: Synthetic polynucleotide"
cagtcgttggaggagtccgggggaggcctggtccagcctgagggatccctgacactcacctgtacagcctctggattcttcttcagtggcgcccactacatgtgctgggtccgccaggctccagggcaggggctggagtggatcggatgcacttatggtggtagtgttgatatcactttctacgcgagctgggcgaaaggccgattcgccatctccaaaacctcgtcgaccacggtgactctgcaactgaccagtctgacagccgcggacacggccacctatgtctgtgcgagagaaagcggtagtggctgggcacttaacttgtggggccaggggaccctcgtcaccgtctcgagcgggcaacctaaggctccatcagtcttcccactggccccctgctgcggggacacaccctctagcacggtgaccttgggctgcctggtcaaaggctacctcccggagccagtgaccgtgacctggaactcgggcaccctcaccaatggggtacgcaccttcccgtccgtccggcagtcctcaggcctctactcgctgagcagcgtggtgagcgtgacctcaagcagccagcccgtcacctgcaacgtggcccacccagccaccaacaccaaagtggacaagaccgttgcgccctcgacatgcagcaagcccacgtgcccaccccctgaactcctggggggaccgtctgtcttcatcttccccccaaaacccaaggacaccctcatgatctcacgcacccccgaggtcacatgcgtggtggtggacgtgagccaggatgaccccgaggtgcagttcacatggtacataaacaacgagcaggtgcgcaccgcccggccgccgctacgggagcagcagttcaacagcacgatccgcgtggtcagcaccctccccatcgcgcaccaggactggctgaggggcaaggagttcaagtgcaaagtccacaacaaggcactcccggcccccatcgagaaaaccatctccaaagccagagggcagcccctggagccgaaggtctacaccatgggccctccccgggaggagctgagcagcaggtcggtcagcctgacctgcatgatcaacggcttctacccttccgacatctcggtggagtgggagaagaacgggaaggcagaggacaactacaagaccacgccggccgtgctggacagcgacggctcctacttcctctacagcaagctctcagtgcccacgagtgagtggcagcggggcgacgtcttcacctgctccgtgatgcacgaggccttgcacaaccactacacgcagaagtccatctcccgctctccgggtaaa

SEQ ID NO: 9521 - DNA, 298 bp, Homo sapiens
gaagtgcagctggtggagtctgggggaggcttggtacagcctggcaggtccctgagactctcctgtgcagcctctggattcacctttgatgattatgccatgcactgggtccggcaagctccagggaagggcctggagtgggtctcaggtattagttggaatagtggtagcataggctatgcggactctgtgaagggccgattcaccatctccagagacaacgccaagaactccctgtatctgcaaatgaacagtctgagagctgaggacacggccttgtattactgtgcaaaagata

SEQ ID NO: 9522 - DNA, 358 bp, Homo sapiens
gaggtgcacttggtagaatctgggggaggcttggttcagccgggggggtccctgagactctcctgttcagcctctagattcacctttagcacctctgccatgacctgggtccgccaggctccagggaaggggctggagtgggtctcagttattagtgctagtggtactaccacatattacggagactccgtgaagggccggttcaccatctccagagacaattccaagaacacgctacatctgcaaatgaacagcctgagagccgaggacacggccgtatattattgtgcgaaagggggtttggcagtgcctggtccgaactactggggccagggaaccctggtcaccgtctcctcag

SEQ ID NO: 9523 - DNA, 352 bp, Homo sapiens
gaggtgcagctggtggagtctgggggaggcctggtcaagcctggggggtccctgagactctcctgtgcagcctctggattcaccttcagtacctatagcatgaactgggtccgccaggctccagggaaggggctggagtgggtctcatccattagtcgtagtagtagttacatatactacgcagactcagtgaagggccgattcaccatctccagagacaacgccaagaactcactgtctctgcaaatgaacagcctgagagccgaggacacagctgtgtattactgtgcgagaggagcagcagctggtacggactactggggccagggaaccctggtcaccgtctcctcag

SEQ ID NO: 9524 - DNA, 296 bp, Homo sapiens
gaggtgcagctggtggagtctgggggaggcttggtccagcctggggggtccctgagactctcctgtgcagcctctggattcacctttagtagctattggatgagctgggtccgccaggctccagggaaggggctggagtgggtggccaacataaagcaagatggaagtgagaaatactatgtggactctgtgaagggccgattcaccatctccagagacaacgccaagaactcactgtatctgcaaatgaacagcctgagagccgaggacacggctgtgtattactgtgcgagaga

SEQ ID NO: 9525 - DNA, 990 bp, Artificial Sequence
  source: /note="Description of Artificial Sequence: Synthetic polynucleotide"
gcctccaccaagggcccatcggtcttccccctggcaccctcctccaagagcacctctgggggcacagcggccctgggctgcctggtcaaggactacttccccgaaccggtgacggtgtcgtggaactcaggcgccctgaccagcggcgtgcacaccttcccggctgtcctacagtcctcaggactctactccctcagcagcgtggtgaccgtgccctccagcagcttgggcacccagacctacatctgcaacgtgaatcacaagcccagcaacaccaaggtggacgcgagagttgagcccaaatcttgtgacaaaactcacacatgcccaccgtgcccagcacctgaactcctggggggaccgtcagtcttcctcttccccccaaaacccaaggacaccctcatgatctcccggacccctgaggtcacatgcgtggtggtggacgtgagccacgaagaccctgaggtcaagttcaactggtacgtggacggcgtggaggtgcataatgccaagacaaagccgcgggaggagcagtacgccagcacgtaccgtgtggtcagcgtcctcaccgtcctgcaccaggactggctgaatggcaaggagtacaagtgcaaggtctccaacaaagccctcccagcccccatcgagaaaaccatctccaaagccaaagggcagccccgagaaccacaggtgtacaccctgcccccatcccgggaggagatgaccaagaaccaggtcagcctgacctgcctggtcaaaggcttctatcccagcgacatcgccgtggagtgggagagcaatgggcagccggagaacaactacaagaccacgcctcccgtgctggactccgacggctccttcttcctctacagcaagctcaccgtggacaagagcaggtggcagcaggggaacgtcttctcatgctccgtgatgcatgaggctctgcacaaccactacacgcagaagagcctctccctgtctccgggtaaa

SEQ ID NO: 9526 - DNA, 990 bp, Homo sapiens
gcctccaccaagggcccatcggtcttccccctggcaccctcctccaagagcacctctgggggcacagcggccctgggctgcctggtcaaggactacttccccgaaccggtgacggtgtcgtggaactcaggcgccctgaccagcggcgtgcacaccttcccggctgtcctacagtcctcaggactctactccctcagcagcgtggtgaccgtgccctccagcagcttgggcacccagacctacatctgcaacgtgaatcacaagcccagcaacaccaaggtggacaagaaagttgagcccaaatcttgtgacaaaactcacacatgcccaccgtgcccagcacctgaactcctggggggaccgtcagtcttcctcttccccccaaaacccaaggacaccctcatgatctcccggacccctgaggtcacatgcgtggtggtggacgtgagccacgaagaccctgaggtcaagttcaactggtacgtggacggcgtggaggtgcataatgccaagacaaagccgcgggaggagcagtacaacagcacgtaccgggtggtcagcgtcctcaccgtcctgcaccaggactggctgaatggcaaggagtacaagtgcaaggtctccaacaaagccctcccagcccccatcgagaaaaccatctccaaagccaaagggcagccccgagaaccacaggtgtacaccctgcccccatcccgggatgagctgaccaagaaccaggtcagcctgacctgcctggtcaaaggcttctatcccagcgacatcgccgtggagtgggagagcaatgggcagccggagaacaactacaagaccacgcctcccgtgctggactccgacggctccttcttcctctacagcaagctcaccgtggacaagagcaggtggcagcaggggaacgtcttctcatgctccgtgatgcatgaggctctgcacaaccactacacgcagaagagcctctccctgtctccgggtaaa

SEQ ID NO: 9527 - DNA, 978 bp, Homo sapiens
gcctccaccaagggcccatcggtcttccccctggcgccctgctccaggagcacctccgagagcacagccgccctgggctgcctggtcaaggactacttccccgaaccggtgacggtgtcgtggaactcaggcgctctgaccagcggcgtgcacaccttcccagctgtcctacagtcctcaggactctactccctcagcagcgtggtgaccgtgccctccagcaacttcggcacccagacctacacctgcaacgtagatcacaagcccagcaacaccaaggtggacaagacagttgagcgcaaatgttgtgtcgagtgcccaccgtgcccagcaccacctgtggcaggaccgtcagtcttcctcttccccccaaaacccaaggacaccctcatgatctcccggacccctgaggtcacgtgcgtggtggtggacgtgagccacgaagaccccgaggtccagttcaactggtacgtggacggcgtggaggtgcataatgccaagacaaagccacgggaggagcagttcaacagcacgttccgtgtggtcagcgtcctcaccgttgtgcaccaggactggctgaacggcaaggagtacaagtgcaaggtctccaacaaaggcctcccagcccccatcgagaaaaccatctccaaaaccaaagggcagccccgagaaccacaggtgtacaccctgcccccatcccgggaggagatgaccaagaaccaggtcagcctgacctgcctggtcaaaggcttctaccccagcgacatcgccgtggagtgggagagcaatgggcagccggagaacaactacaagaccacacctcccatgctggactccgacggctccttcttcctctacagcaagctcaccgtggacaagagcaggtggcagcaggggaacgtcttctcatgctccgtgatgcatgaggctctgcacaaccactacacgcagaagagcctctccctgtctccgggtaaa

SEQ ID NO: 9528 - DNA, 969 bp, Artificial Sequence
  source: /note="Description of Artificial Sequence: Synthetic polynucleotide"
gggcaacctaaggctccatcagtcttcccactggccccctgctgcggggacacaccctctagcacggtgaccttgggctgcctggtcaaaggctacctcccggagccagtgaccgtgacctggaactcgggcaccctcaccaatggggtacgcaccttcccgtccgtccggcagtcctcaggcctctactcgctgagcagcgtggtgagcgtgacctcaagcagccagcccgtcacctgcaacgtggcccacccagccaccaacaccaaagtggacaagaccgttgcgccctcgacatgcagcaagcccacgtgcccaccccctgaactcctggggggaccgtctgtcttcatcttccccccaaaacccaaggacaccctcatgatctcacgcacccccgaggtcacatgcgtggtggtggacgtgagccaggatgaccccgaggtgcagttcacatggtacataaacaacgagcaggtgcgcaccgcccggccgccgctacgggagcagcagttcaacagcacgatccgcgtggtcagcaccctccccatcgcgcaccaggactggctgaggggcaaggagttcaagtgcaaagtccacaacaaggcactcccggcccccatcgagaaaaccatctccaaagccagagggcagcccctggagccgaaggtctacaccatgggccctccccgggaggagctgagcagcaggtcggtcagcctgacctgcatgatcaacggcttctacccttccgacatctcggtggagtgggagaagaacgggaaggcagaggacaactacaagaccacgccggccgtgctggacagcgacggctcctacttcctctacagcaagctctcagtgcccacgagtgagtggcagcggggcgacgtcttcacctgctccgtgatgcacgaggccttgcacaaccactacacgcagaagtccatctcccgctctccgggtaaa

SEQ ID NO: 9529 - DNA, 50 bp, Homo sapiens
tgatgcttttgatatctggggccaagggacaatggtcaccgtctcttcag

SEQ ID NO: 9530 - protein, 114 aa, Artificial Sequence
  source: /note="Description of Artificial Sequence: Synthetic polypeptide"
QEQLKESGGGLVTPGGTLTLTCTVSGFSLDNYHMGWVRQAPGKGLNYIGFITRGGTTYYASWAKGRFTISKTSTTVDLMITSPTTGDTATYFCARGSGASGFYLWGPGTLVTVS

SEQ ID NO: 9531 - protein, 111 aa, Artificial Sequence
  source: /note="Description of Artificial Sequence: Synthetic polypeptide"
QSLEESGGRLVTPETPLTLTCTASGIDLSKWPMTWVRQAPGKGLEWIGIIGRSGSTNYASWAKGRFTISKTSTTVDLKMTSPTTEDTATYFCARGGSYYDLWGQGTLVTVS

SEQ ID NO: 9532 - protein, 118 aa, Artificial Sequence
  source: /note="Description of Artificial Sequence: Synthetic polypeptide"
QSLEESRGRLVTPGTPLTLTCTVSGIDLSSYAMTWVRQAPGKGLEWIGMVRRSGTTYYASWAKGRFTISKTSTTVDLKIISPTTEDTATYFCARCDNSAGDWSYGMDLWGPGTLVTVS

SEQ ID NO: 9533 - protein, 113 aa, Artificial Sequence
  source: /note="Description of Artificial Sequence: Synthetic polypeptide"
QSVEESGGRLVTPGTPLTLTCTVSEFSLSDYIINWVRQAPGKGLEWIGIMGTSGTAYYASWAKGRFTISKTSSTTVDLRMTSLTTEDTATYFCARGGVATSNFWGQGTLVTVS

SEQ ID NO: 9534 - protein, 113 aa, Artificial Sequence
  source: /note="Description of Artificial Sequence: Synthetic polypeptide"
QSVEESGGRLVTPGTPLTLTCTVSGFSLNDYDMSWVRQAPGKGLEWITTIYVSGNTYYATWAKGRFTISKTSTTVDLKMTSPTAEDTATYFCARAVPGSGKGLWGPGTLVTVS

SEQ ID NO: 9535 - protein, 113 aa, Artificial Sequence
  source: /note="Description of Artificial Sequence: Synthetic polypeptide"
QSVEESGGRLVTPGTPLTLTCTVSGFSLNNYDMTWVRQAPGKGLEWIGSIFVSGNIYYASWAKGRFTISKTSTTVDLKMTSPTTEDTATYFCARAILGSSKGLWGPGTLVTVS

SEQ ID NO: 9536 - protein, 113 aa, Artificial Sequence
  source: /note="Description of Artificial Sequence: Synthetic polypeptide"
QSVEESGGRLVTPGTPLTLTCTVSGFSLSIYDMSWVRQAPGKGLEWIGSIYVSGNIYYASWAKGRFTISKTSTTVDLKMTSPTTEDTATYFCARAVPGSSKGLWGQGTLVTVS

SEQ ID NO: 9537 - protein, 108 aa, Artificial Sequence
  source: /note="Description of Artificial Sequence: Synthetic polypeptide"
QSVEESGGRLVTPGTPLTLTCTVSGFSLSNYAMSWVRQAPGKGLEWIGIIGKSGSTAYASWAKGRFTISRTSTTVDLEITSPTTEDTATYFCVRFVLLWGPGTLVTVS

SEQ ID NO: 9538 - protein, 114 aa, Artificial Sequence
  source: /note="Description of Artificial Sequence: Synthetic polypeptide"
QSVEESGGRLVTPGTPLTLTCTVSGFSLSTNAMIWVRQAPGKGLEYIGVIAGSGSTSYASWAKGRFTISKTSTTVDLKITSPTTEDTATYFCARGGWVSGPESLWGQGTLVTVS

SEQ ID NO: 9539 - protein, 108 aa, Artificial Sequence
  source: /note="Description of Artificial Sequence: Synthetic polypeptide"
QSVEESGGRLVTPGTPLTLTCTVSGFSLSTYAMSWVRQAPGKGLEWIGIVGKSGIIKYASWAKGRFTISKTSTTVDLKMTSLTTEDTAIYFCARLWSLWGQGTLVTVS

SEQ ID NO: 9540 - DNA, 166 bp, Homo sapiens
acctgggaaacatccgcgagcacagcctacatggacctgagtagtctgagatcggaagacacggctgtttattactgtgcgagagggtttactatggttcggggagccccctattatgacggtatggacgtctggggccaagggaccacggtcaccgtctcctcag

SEQ ID NO: 9541 - protein, 326 aa, Homo sapiens
ASTKGPSVFPLAPCSRSTSESTAALGCLVKDYFPEPVTVSWNSGALTSGVHTFPAVLQSSGLYSLSSVVTVPSSNFGTQTYTCNVDHKPSNTKVDKTVERKCCVECPPCPAPPVAGPSVFLFPPKPKDTLMISRTPEVTCVVVDVSHEDPEVQFNWYVDGVEVHNAKTKPREEQFNSTFRVVSVLTVVHQDWLNGKEYKCKVSNKGLPSSIEKTISKTKGQPREPQVYTLPPSREEMTKNQVSLTCLVKGFYPSDIAVEWESNGQPENNYKTTPPMLDSDGSFFLYSKLTVDKSRWQQGNVFSCSVMHEALHNHYTQKSLSLSPGK

SEQ ID NO: 9542 - protein, 327 aa, Artificial Sequence
  source: /note="Description of Artificial Sequence: Synthetic polypeptide"
ASTKGPSVFPLAPCSRSTSESTAALGCLVKDYFPEPVTVSWNSGALTSGVHTFPAVLQSSGLYSLSSVVTVPSSSLGTKTYTCNVDHKPSNTKVDKRVESKYGPPCPPCPAPEFEGGPSVFLFPPKPKDTLMISRTPEVTCVVVDVSQEDPEVQFNWYVDGVEVHNAKTKPREEQFNSTYRVVSVLTVLHQDWLNGKEYKCKVSNKGLPSSIEKTISKAKGQPREPQVYTLPPSQEEMTKNQVSLTCLVKGFYPSDIAVEWESNGQPENNYKTTPPVLDSDGSFFLYSRLTVDKSRWQEGNVFSCSVMHEALHNHYTQKSLSLSLGK

SEQ ID NO: 9543 - protein, 327 aa, Homo sapiens
ASTKGPSVFPLAPCSRSTSESTAALGCLVKDYFPEPVTVSWNSGALTSGVHTFPAVLQSSGLYSLSSVVTVPSSSLGTKTYTCNVDHKPSNTKVDKRVESKYGPPCPSCPAPEFLGGPSVFLFPPKPKDTLMISRTPEVTCVVVDVSQEDPEVQFNWYVDGVEVHNAKTKPREEQFNSTYRVVSVLTVLHQDWLNGKEYKCKVSNKGLPSSIEKTISKAKGQPREPQVYTLPPSQEEMTKNQVSLTCLVKGFYPSDIAVEWESNGQPENNYKTTPPVLDSDGSFFLYSRLTVDKSRWQEGNVFSCSVMHEALHNHYTQKSLSLSLGK

SEQ ID NO: 9544 - protein, 330 aa, Artificial Sequence
  source: /note="Description of Artificial Sequence: Synthetic polypeptide"
ASTKGPSVFPLAPSSKSTSGGTAALGCLVKDYFPEPVTVSWNSGALTSGVHTFPAVLQSSGLYSLSSVVTVPSSSLGTQTYICNVNHKPSNTKVDARVEPKSCDKTHTCPPCPAPELLGGPSVFLFPPKPKDTLMISRTPEVTCVVVDVSHEDPEVKFNWYVDGVEVHNAKTKPREEQYASTYRVVSVLTVLHQDWLNGKEYKCKVSNKALPAPIEKTISKAKGQPREPQVYTLPPSREEMTKNQVSLTCLVKGFYPSDIAVEWESNGQPENNYKTTPPVLDSDGSFFLYSKLTVDKSRWQQGNVFSCSVMHEALHNHYTQKSLSLSPGK

SEQ ID NO: 9545 - protein, 329 aa, Homo sapiens
ASTKGPSVFPLAPSSKSTSGGTAALGCLVKDYFPEPVTVSWNSGALTSGVHTFPAVLQSSGLYSLSSVVTVPSSSLGTQTYICNVNHKPSNTKVDKKVEPKSCDKTHTCPPCPAPELLGGPSVFLFPPKPKDTLMISRTPEVTCVVVDVSHEDPEVKFNWYVDGVEVHNAKTKPREEQYNSTYRVVSVLTVLHQDWLNGKEYKCKVSNKALPAPIEKTISKAKGQPREPQVYTLPPSRDELTKNQVSLTCLVKGFYPSDIAVEWESNGQPENNYKTTPPVLDSDGSFFLYSKLTVDKSRWQQGNVFSCSVMHEALHNHYTQKSLSLSPG

SEQ ID NO: 9546 - protein, 16 aa, Homo sapiens
DAFDIWGQGTMVTVSS

SEQ ID NO: 9547 - protein, 119 aa, Homo sapiens
EVHLVESGGGLVQPGGSLRLSCSASRFTFSTSAMTWVRQAPGKGLEWVSVISASGTTTYYGDSVKGRFTISRDNSKNTLHLQMNSLRAEDTAVYYCAKGGLAVPGPNYWGQGTLVTVSS

SEQ ID NO: 9548 - protein, 451 aa, Homo sapiens
EVQLVESGGGLEQPGGSLRLSCAGSGFTFRDYAMTWVRQAPGKGLEWVSSISGSGGNTYYADSVKGRFTISRDNSKNTLYLQMNSLRAEDTAVYYCAKDRLSITIRPRYYGLDVWGQGTTVTVSSASTKGPSVFPLAPCSRSTSESTAALGCLVKDYFPEPVTVSWNSGALTSGVHTFPAVLQSSGLYSLSSVVTVPSSSLGTKTYTCNVDHKPSNTKVDKRVESKYGPPCPPCPAPEFLGGPSVFLFPPKPKDTLMISRTPEVTCVVVDVSQEDPEVQFNWYVDGVEVHNAKTKPREEQFNSTYRVVSVLTVLHQDWLNGKEYKCKVSNKGLPSSIEKTISKAKGQPREPQVYTLPPSQEEMTKNQVSLTCLVKGFYPSDIAVEWESNGQPENNYKTTPPVLDSDGSFFLYSRLTVDKSRWQEGNVFSCSVMHEALHNHYTQKSLSLSLG

SEQ ID NO: 9549 - protein, 117 aa, Homo sapiens
EVQLVESGGGLVKPGGSLRLSCAASGFTFSTYSMNWVRQAPGKGLEWVSSISRSSSYIYYADSVKGRFTISRDNAKNSLSLQMNSLRAEDTAVYYCARGAAAGTDYWGQGTLVTVSS

SEQ ID NO: 9550 - protein, 449 aa, Homo sapiens
EVQLVESGGGLVQPGGSLRLSCAASGFTFSPFAMSWVRQAPGKGLEWVAKISPGGSWTYYSDTVTGRFTISRDNAKNSLYLQMNSLRAEDTAVYYCARQLWGYYALDIWGQGTTVTVSSASTKGPSVFPLAPSSKSTSGGTAALGCLVKDYFPEPVTVSWNSGALTSGVHTFPAVLQSSGLYSLSSVVTVPSSSLGTQTYICNVNHKPSNTKVDKKVEPKSCDKTHTCPPCPAPELLGGPSVFLFPPKPKDTLMISRTPEVTCVVVDVSHEDPEVKFNWYVDGVEVHNAKTKPREEQYNSTYRVVSVLTVLHQDWLNGKEYKCKVSNKALPAPIEKTISKAKGQPREPQVYTLPPSRDELTKNQVSLTCLVKGFYPSDIAVEWESNGQPENNYKTTPPVLDSDGSFFLYSKLTVDKSRWQQGNVFSCSVMHEALHNHYTQKSLSLSPGK

SEQ ID NO: 9551 - protein, 99 aa, Homo sapiens
EVQLVESGGGLVQPGRSLRLSCAASGFTFDDYAMHWVRQAPGKGLEWVSGISWNSGSIGYADSVKGRFTISRDNAKNSLYLQMNSLRAEDTALYYCAKD

SEQ ID NO: 9552 - protein, 446 aa, Homo sapiens
EVQLVESGGGLVQPGRSLRLSCAASRFTFDDYAMHWVRQAPGKGLEWVSGISWNSGRIGYADSVKGRFTISRDNAENSLFLQMNGLRAEDTALYYCAKGRDSFDIWGQGTMVTVSSASTKGPSVFPLAPSSKSTSGGTAALGCLVKDYFPEPVTVSWNSGALTSGVHTFPAVLQSSGLYSLSSVVTVPSSSLGTQTYICNVNHKPSNTKVDKKVEPKSCDKTHTCPPCPAPELLGGPSVFLFPPKPKDTLMISRTPEVTCVVVDVSHEDPEVKFNWYVDGVEVHNAKTKPREEQYNSTYRVVSVLTVLHQDWLNGKEYKCKVSNKALPAPIEKTISKAKGQPREPQVTYLPPSRDELTKNQVSLTCLVKGFYPSDIAVEWESNGQPENNYKTTPPVLDSDGSFFLYSKLTVDKSRWQQGNVFSCSVMHEALHNHYTQKSLSLSPGK

SEQ ID NO: 9553 - protein, 323 aa, Artificial Sequence
  source: /note="Description of Artificial Sequence: Synthetic polypeptide"
GQPKAPSVFPLAPCCGDTPSSTVTLGCLVKGYLPEPVTVTWNSGTLTNGVRTFPSVRQSSGLYSLSSVVSVTSSSQPVTCNVAHPATNTKVDKTVAPSTCSKPTCPPPELLGGPSVFIFPPKPKDTLMISRTPEVTCVVVDVSQDDPEVQFTWYINNEQVRTARPPLREQQFNSTIRVVSTLPIAHQDWLRGKEFKCKVHNKALPAPIEKTISKARGQPLEPKVYTMGPPREELSSRSVSLTCMINGFYPSDISVEWEKNGKAEDNYKTTPAVLDSDGSYFLYSKLSVPTSEWQRGDVFTCSVMHEALHNHYTQKSISRSPGK

SEQ ID NO: 9554 - protein, 122 aa, Artificial Sequence
  source: /note="Description of Artificial Sequence: Synthetic polypeptide"
QEQLEESGGGLVQPEGSLTLTCTASGFSFSSSYWICWVRQAPGKGLELIACIYGGSINIINYASWAKGRFTISKTSSTTVTLRMTSLTAADTATNFCARVQGGNSGGWYFDLWGPGTLVTVS

SEQ ID NO: 9555 - protein, 443 aa, Artificial Sequence
  source: /note="Description of Artificial Sequence: Synthetic polypeptide"
QEQLVESGGGLVQPGASLTLTCTASGFSFSNTNYMCWVRQAPGRGLEWVGCMPVGFIASTFYATWAKGRSAISKSSSTAVTLQMTSLTVADTATYFCARESGSGWALNLWGQGTLVTVSSGQPKAPSVFPLAPCCGDTPSSTVTLGCLVKGYLPEPVTVTWNSGTLTNGVRTFPSVRQSSGLYSLSSVVSVTSSSQPVTCNVAHPATNTKVDKTVAPSTCSKPTCPPPELLGGPSVFIFPPKPKDTLMISRTPEVTCVVVDVSQDDPEVQFTWYINNEQVRTARPPLREQQFNSTIRVVSTLPIAHQDWLRGKEFKCKVHNKALPAPIEKTISKARGQPLEPKVYTMGPPREELSSRSVSLTCMINGFYPSDISVEWEKNGKAEDNYKTTPAVLDSDGSYFLYSKLSVPTSEWQRGDVFTCSVMHEALHNHYTQKSISRSPGK

SEQ ID NO: 9556 - protein, 447 aa, Artificial Sequence
  source: /note="Description of Artificial Sequence: Synthetic polypeptide"
QQQLLESGGGLVQPEGSLALTCTASGFSFSSGYDMCWVRQPPGKGLEWVGCIYSGDDNDITYYASWARGRFTISNPSSTTVTLQMTSLTVADTATYFCARGHAIYDNYDSVHLWGQGTLVTVSSGQPKAPSVFPLAPCCGDTPSSTVTLGCLVKGYLPEPVTVTWNSGTLTNGVRTFPSVRQSSGLYSLSSVVSVTSSSQPVTCNVAHPATNTKVDKTVAPSTCSKPTCPPPELLGGPSVFIFPPKPKDTLMISRTPEVTCVVVDVSQDDPEVQFTWYINNEQVRTARPPLREQQFNSTIRVVSTLPIAHQDWLRGKEFKCKVHNKALPAPIEKTISKARGQPLEPKVYTMGPPREELSSRSVSLTCMINGFYPSDISVEWEKNGKAEDNYKTTPAVLDSDGSYFLYSKLSVPTSEWQRGDVFTCSVMHEALHNHYTQKSISRSPGK

SEQ ID NO: 9557 - protein, 441 aa, Artificial Sequence
  source: /note="Description of Artificial Sequence: Synthetic polypeptide"
QSLEESGGDLVKPGASLTLTCTASGFSFSSGYDMCWVRQAPGKGLEWIACIYPNNPVTYYASWAKGRFTISKTSSTTVTLQMTSLTAADTATYFCGRSDSNGHTFNLWGQGTLVTVSSGQPKAPSVFPLAPCCGDTPSSTVTLGCLVKGYLPEPVTVTWNSGTLTNGVRTFPSVRQSSGLYSLSSVVSVTSSSQPVTCNVAHPATNTKVDKTVAPSTCSKPTCPPPELLGGPSVFIFPPKPKDTLMISRTPEVTCVVVDVSQDDPEVQFTWYINNEQVRTARPPLREQQFNSTIRVVSTLPIAHQDWLRGKEFKCKVHNKALPAPIEKTISKARGQPLEPKVYTMGPPREELSSRSVSLTCMINGFYPSDISVEWEKNGKAEDNYKTTPAVLDSDGSYFLYSKLSVPTSEWQRGDVFTCSVMHEALHNHYTQKSISRSPGK

SEQ ID NO: 9558 - protein, 442 aa, Artificial Sequence
  source: /note="Description of Artificial Sequence: Synthetic polypeptide"
QSLEESGGGLVKPEGSLTLTCKASGFSFTGAHYMCWVRQAPGKGLEWIACIYGGSVDITFYASWAKGRFAISKSSSTAVTLQMTSLTAADTATYVCARESGSGWALNLWGPGTLVTVSSGQPKAPSVFPLAPCCGDTPSSTVTLGCLVKGYLPEPVTVTWNSGTLTNGVRTFPSVRQSSGLYSLSSVVSVTSSSQPVTCNVAHPATNTKVDKTVAPSTCSKPTCPPPELLGGPSVFIFPPKPKDTLMISRTPEVTCVVVDVSQDDPEVQFTWYINNEQVRTARPPLREQQFNSTIRVVSTLPIAHQDWLRGKEFKCKVHNKALPAPIEKTISKARGQPLEPKVYTMGPPREELSSRSVSLTCMINGFYPSDISVEWEKNGKAEDNYKTTPAVLDSDGSYFLYSKLSVPTSEWQRGDVFTCSVMHEALHNHYTQKSISRSPGK

SEQ ID NO: 9559 - protein, 442 aa, Artificial Sequence
  source: /note="Description of Artificial Sequence: Synthetic polypeptide"
QSLEESGGGLVQPEGSLTLTCTASGFFFSGAHYMCWVRQAPGQGLEWIGCTYGGSVDITFYASWAKGRFAISKTSSTTVTLQLTSLTAADTATYVCARESGSGWALNLWGQGTLVTVSSGQPKAPSVFPLAPCCGDTPSSTVTLGCLVKGYLPEPVTVTWNSGTLTNGVRTFPSVRQSSGLYSLSSVVSVTSSSQPVTCNVAHPATNTKVDKTVAPSTCSKPTCPPPELLGGPSVFIFPPKPKDTLMISRTPEVTCVVVDVSQDDPEVQFTWYINNEQVRTARPPLREQQFNSTIRVVSTLPIAHQDWLRGKEFKCKVHNKALPAPIEKTISKARGQPLEPKVYTMGPPREELSSRSVSLTCMINGFYPSDISVEWEKNGKAEDNYKTTPAVLDSDGSYFLYSKLSVPTSEWQRGDVFTCSVMHEALHNHYTQKSISRSPGK

SEQ ID NO: 9560 - protein, 115 aa, Artificial Sequence
  source: /note="Description of Artificial Sequence: Synthetic polypeptide"
QSLEESGGRLITPGGSLTLTCTVSGFDLSSYAMTWVRQAPGKGLEWIGIIYGTETIYYATRAKGRFTISKASTTVDLKITSPTTEDTAIYFCARGDSTSGFHLTLWGPGTLVTVS

SEQ ID NO: 9561 - protein, 114 aa, Artificial Sequence
  source: /note="Description of Artificial Sequence: Synthetic polypeptide"
QSLEESGGRLVTPGGSLTLTCTVSGIDLSSYAMTWVRQAPGKGLEWIGIIYASDTYYTSWAKGRFTISKTSTTVDLKITSPTTEDTAIYFCARGDSTSGFHLTLWGQGTLVTVS

SEQ ID NO: 9562 - protein, 117 aa, Artificial Sequence
  source: /note="Description of Artificial Sequence: Synthetic polypeptide"
QSLEESGGRLVTPGTPLTLTCTVSGFSLSRYWMSWVRQAPGKGLEWIGNIGGGSGSTLYAPWAKGRSTISKTSTTVDLKITSPTTEDTATYFCGRYVKNGGGYRLDLWGPGTLVTVS

SEQ ID NO: 9563 - protein, 116 aa, Artificial Sequence
  source: /note="Description of Artificial Sequence: Synthetic polypeptide"
QSVEESGGRLVAPGTPLTLTCTVSGIDLSRNAMGWVRQAPEKGLEYIGHIASRGNIWFRNWAKGRFTVSKTSTTVDLKITSPTTEDTATYFCGRFLVVSGVGTFDPWGQGTLVTVS

SEQ ID NO: 9564 - protein, 111 aa, Artificial Sequence
  source: /note="Description of Artificial Sequence: Synthetic polypeptide"
QSVEESGGRLVAPGTPLTLTCTVSGIDLSRNAMTWVRQAPGKGLEYIAYINTRGGASYANWAKGRFTISKTSTTVDLKMTSLTASDTATYFCVNGYNPCKLWGPGTLVTVS

SEQ ID NO: 9565 - protein, 115 aa, Artificial Sequence
  source: /note="Description of Artificial Sequence: Synthetic polypeptide"
QSVEESGGRLVTPGGSLTLTCTVSGFDLSSYAMTWVRQAPGKGLEWIGIIYGTELTYYATWAKGRFTISETSTTVDLKLTSPTTEDTAIYFCARGDATSGFHLTLWGPGTLVTVS

SEQ ID NO: 9566 - protein, 113 aa, Artificial Sequence
  source: /note="Description of Artificial Sequence: Synthetic polypeptide"
QSVEESGGRLVTPGTPLALTCTVSGIDLSYYAISWVRQAPGKGLEYIGIIGSSGRTYYASWAKGRFTISKTSTTVDLKMTSLTTEDTATYFCVRGGPTSSPSLWGQGTLVTVS

SEQ ID NO: 9567 - protein, 111 aa, Artificial Sequence
  source: /note="Description of Artificial Sequence: Synthetic polypeptide"
QSVEESGGRLVTPGTPLTLTCTVSGIDLSRNAMTWVRQAPGKGLEYIAYINTRGDTSYANWAKGRFTISKTSTTVDLKMTSLTTEDTATYFCVHGYNPCKLWGQGTLVTVS

SEQ ID NO: 9568 - protein, 114 aa, Artificial Sequence
  source: /note="Description of Artificial Sequence: Synthetic polypeptide"
QSVKESEGGLFKPTDTLTLTCTVSGFSLSSYAISWVRQAPGNGLEWIGFINTITGGTNYASWAKSRSTITRNTNDNTVTLKMTSLTAADTATYFCARSGAYFDLWGPGTLVTVS

SEQ ID NO: 9569 - protein, 125 aa, Homo sapiens
QVQFVQSGAEVRKPGASVKVSCKASGYTFTDYAIHWVRQAPGQRLEWMGWIIVGNGKTRYSQKFQGRLTITWETSATTAYMDLSSLRSEDTAVYYCARGFTMVRGAPYYDGMDVWGQGTTVTVSS

SEQ ID NO: 9570 - protein, 127 aa, Homo sapiens
QVQLQESGPGLVKPSGTLSLTCAVSGGSISSSNWWSWVRQPPGKGLEWIGEIYHSGNTNYNPSLKSRVTISVDKSKNQFSLKLSSVTAADTAVYYCVRGYYYDSGTSWGYYYGMDVWGQGTTVTVSS

SEQ ID NO: 9571 - protein, 121 aa, Artificial Sequence
  source: /note="Description of Artificial Sequence: Synthetic polypeptide"
QVQLQQWGAGLLKPSETLSLTCAVYGGSFSGHYWTWIRQPPGKGLEWIGEINHRGNTNYNPSLKSRATISVDTSKNQFSLKLSSVTAADTAVYYCAREGSLAARLWFFDLWGRDTLVTVSS

SEQ ID NO: 9572 - protein, 172 aa, Bos sp.
  MOD_RES (170)..(172): Any amino acid
QVQLRESGPSLVKPSQTLSLTCTASGFSLSDKAVGWVRQAPGKALEWLGSIDTGGNTGYNPGLKSRLSITKDNSKSQVSLSVSSVTTEDSATYYCTSVHQETKKYQSCPDGYRERSDCSNRPACGTSDCCRVSVFGNCLTTLPVSYSYTYNYEWHVDVWGQGLLVTVSSXXX

SEQ ID NO: 9573 - protein, 116 aa, Homo sapiens
QVQLVQSEAEVKKPGASVKVSCKASGYIFTTFGLSWVRQAPGQGLEWMGRITTNNGNTIYERRFQGRVTMTIDTSTTTAYMEMRSLTSDDTAVYYCARDGAPQDHWGQGTLVTVSS

SEQ ID NO: 9574 - protein, 125 aa, Homo sapiens
QVQLVQSGAEVRKPGASVKVSCKASGYTFTDYAIHWVRQAPGQRLEWMGWIIVGNGKTRYAQKFQGRVTITWETSASTAYMDLSSLRSEDTAVYYCARGFTMVRGAPYYDGLDVWGQGTTVTVSS

SEQ ID NO: 9575 - protein, 125 aa, Homo sapiens
QVQLVQSGAEVRKPGASVKVSCKASGYTFTDYAIHWVRQAPGQRLEWMGWIIVGNGKTRYAQKFQGRVTITWETSATTVYMDLSSLRSEDTAVYYCARGFTMVRGAPYYDGLDVWGQGTTVTVSS

SEQ ID NO: 9576 - protein, 125 aa, Homo sapiens
QVQLVQSGAEVRKPGASVKVSCKASGYTFTDYAIHWVRQAPGQRLEWMGWIIVGNGKTRYAQKLQGRVTITWETSASTAYMDLTSLRSEDTAVYYCARGFTMVRGAPYYDGLDVWGQGTTVTVSS

SEQ ID NO: 9577 - protein, 125 aa, Homo sapiens
QVQLVQSGAEVRKPGASVKVSCKASGYTFTDYAIHWVRQAPGQRLEWMGWIIVGNGKTRYSQKFQGRVTITWETSASTAYMDLSSLRSEDTAVYYCARGFTMVRGAPYYDGMDVWGQGTTVTVSS

SEQ ID NO: 9578 - protein, 125 aa, Homo sapiens
QVQLVQSGAEVRKPGASVKVSCKASGYTFTDYAIHWVRQAPGQRLEWMGWIIVGNGKTRYSQKFQGRVTITWETSATTAYMDLSSLRSEDTAVYYCARGFTMVRGAPYYDGMDVWGQGTTVTVSS

SEQ ID NO: 9579 - protein, 125 aa, Homo sapiens
QVQLVQSGAEVRKPGASVKVSCKASGYTFTDYALHWVRQAPGQRLEWMGWIIVGNGKTRYAQKFQGRVTITWETSASTAFMDLSSLRSEDTAVYYCARGFTMVRGAPYYDGLDVWGQGTTVTVSS

SEQ ID NO: 9580 - protein, 125 aa, Homo sapiens
QVQLVQSGAEVRKPGASVKVSCKASGYTFTDYALHWVRQAPGQRLEWMGWIIVGNGKTRYAQKFQGRVTITWETSASTAFVDLNSLRSEDTAVYYCARGFTMVRGAPYYDGLDVWGQGTTVTVSS

SEQ ID NO: 9581 - protein, 116 aa, Homo sapiens
QVQLVQSGPEVKKPGASVKVSCQASGYTFTTYGINWVRQAPGQGLEWMGRISAYNGNTNYAQKFQGRVTMTTDTSTRTAYMEMSNLISDDTAVYYCARDGAPQDHWGQGTLITVSS

SEQ ID NO: 9582 - protein, 125 aa, Homo sapiens
QVQLVQSGPEVRNPGASVRVSCKASGYTFTDYALHWVRQAPGQRLEWMGWIIVGNGKTRYAQKFQGRVTITWETSASTAFMDLSSLRSEDTAVYYCARGFTMVRGAPYYDGLDVWGQGTTVTISS

SEQ ID NO: 9583 - protein, 12 aa, Homo sapiens
VVFGGGTKLTVL

SEQ ID NO: 9584 - protein, 20 aa, Homo sapiens
YYYYYGMDVWGQGTTVTVSS

SEQ ID NO: 9585 - DNA, 330 bp, Artificial Sequence
  source: /note="Description of Artificial Sequence: Synthetic polynucleotide"
gacattgtgatgacccagactccagcctccgtgtctgaacctgtgggaggcacagtcaccatcaagtgccaggccagtcagagcattagcaactggttagcctggtatcagcagaaaccagggcagcctcccaagctcctgatctacagggcatccactctggcatctggggtctcatcgcggttcaaaggcagtggatctgggacagagttcactctcaccatcagcgacctggagtgtgccgatgctgccacttactactgtcaaagcgattatggtatagatacttatggaagtgctttcggcggagggaccaaggtggtggtcaaa

SEQ ID NO: 9586 - DNA, 330 bp, Artificial Sequence
  source: /note="Description of Artificial Sequence: Synthetic polynucleotide"
gcccaagtgctgacccagactccatcttccacgtctgcagctgtgggaggcacagtcaccatcagttgccagtccagtccgagtgtttatggtaataactggttaggctggtatcagaagaaaccagggcagcctcccaagctcctgatctattctgcatccactctggcatctggggtctcatcgcggtttaaaggcagtggatctgggacacagttcactctcaccatcagcgacctggagtgtgacgatgctgccacttactactgtgcaggcggttatagtggtaatattcatgttttcggcggagggaccaaggtggtggtcaaa

SEQ ID NO: 9587 - DNA, 339 bp, Artificial Sequence
  source: /note="Description of Artificial Sequence: Synthetic polynucleotide"
gcccaagtgctgacccagactgcatcccccgtgtctgcggctgttggaggcacagtcaccatcaattgccagtccagtcagagtgtttataagaacaacgacttagcctggtatcagcagaaaccagggcagcctcccaagctcctgatctattatgcatccactctggcatctggggtctcatcgcggttcaaaggcagtggatctgggacagagttcactctcaccatcagcgacgcgcagtgtgacgatgctgccacttactactgtctaggtagttatgattgtagtagtgctgattgtaatgctttcggcggagggaccaaggtggtcgtcaaa

SEQ ID NO: 9588 - DNA, 330 bp, Artificial Sequence
  source: /note="Description of Artificial Sequence: Synthetic polynucleotide"
gcccaagtgctgacccagactgcatcccctgtgtctgcagctgtgggaggcacagtcaccatcaattgtcagtccagtcagagcgtttatggtaacaattggttaggctggtatcagcagaaaccagggcagcctcccaagctcctgatctattctgcatctactctggcatctggggtcccatcgcggttcagtggcagtggatctgggacacagttcactctcaccatcagcgacctggagtgtgacgatggtgccacttactattgtgtaggcgggtatagtggtaatattcatgttttcggcggagggaccaaggtggtggtcgaa

SEQ ID NO: 9589 - DNA, 339 bp, Artificial Sequence
  source: /note="Description of Artificial Sequence: Synthetic polynucleotide"
gcccaagtgctgacccagactgcatcgcccgtgtctgcagctgtgggaaacacagtcaccatcacttgccagtccagtcagagtgtttggaagaataacgacttatcctggtatcagcagaaactagggcagcctcccaagctcctgatctattatgcatccactctggcatctggggtctcatcgcggttcaaagccagtggatctgggacacagttcactctcaccatcagcgacgtgcaatgtgacgatgctggcacttactactgtgtaggcagttatgattgtagtagtgctgattgtaatgctttcggcggagggaccaaggtggtcgtcaaa

SEQ ID NO: 9590 - DNA, 339 bp, Artificial Sequence
  source: /note="Description of Artificial Sequence: Synthetic polynucleotide"
gcccaagtgctgacccagactgcatcgcccgtgtctgcagctgtgggaagcacagtcaccatcaattgccaggccagtcagagtgtttatcagaacaactacttagcctggtttcagcagaaaccagggcagcctcccaagcgcctgatctattctgcatccactctggcatctggggtctcatcgcggttcaaaggcagtggatctgggacacagttcactctcaccatcagcgacgtgcagtgtgacgatgctgccacttattactgtctgggcgcctatgattgtagtggtgttgattgtagtgctttcggcggagggaccaaggtggtcgtcaaa

SEQ ID NO: 9591 - DNA, 339 bp, Artificial Sequence
  source: /note="Description of Artificial Sequence: Synthetic polynucleotide"
gccgccgtgctgacccagactccatctcccgtgtctgcagctgtgggaggcacagtcagcatcagttgccagtccagtcagagtgttgataataacaactacttatcctggtatcagcagaaaccagggcagcctcccaagctcctgatctatgatgcatccgatctggcatctggggtcccatcgcggttcaaaggcagtggatctgggacacagttcactctcaccatcagcgacgtgcagtgtgacgatgctgccacttactactgtgcaggcggttatataactagtagtgatattttttatgatttcggcggagggaccaaggtggtggtcaaa

SEQ ID NO: 9592 - DNA, 330 bp, Artificial Sequence
  source: /note="Description of Artificial Sequence: Synthetic polynucleotide"
gcctatgatatgacccagactccagcctctgtggaggtagctgtgggaggcacagtcaccatcaagtgccaggccagtcagagcatttacagctatttagcctggtatcagcagaaaccagggcagcctcccaagctcctgatttattctgcatcctatctagcatctggggtcccatcgcggttcagcggcagtggatctgggacagagttcactctcaccatcagcgacctggagtgtgccgatgctgccacttattactgtcaacacgggtacattagtggtaatgttgataatgctttcggcggagggaccaaggtggtcgtcaaa

SEQ ID NO: 9593 - DNA, 327 bp, Artificial Sequence
  source: /note="Description of Artificial Sequence: Synthetic polynucleotide"
gcgcaagtgctgacccagactccatcccctgtgtctgcagctgtgggaggcaaagtcaccatcaattgccagtccagtcagagtatttatactaactacttatcctggtatcagcagaaaccaggacagcctcccaggctcctgatctattctgcatccactctggcatctggggtcccatcgcggttcaaaggcagtggatctgggacacagttcactctcacaatcagcgaagtacagtgtgacgatgctgccacttactactgtcaagcctattttactggtgagatttttcctttcggcggagggaccaaggtggtcgtcaaa

SEQ ID NO: 9594 - DNA, 330 bp, Artificial Sequence
  source: /note="Description of Artificial Sequence: Synthetic polynucleotide"
gcgcaagtgctgacccagactccatcctccgtgtctgcagctgtgggaggcacagtcaccatcaattgccagtccagtcagagtgttaataacaacaacttcttatcctggtatcagcagaaaccagggcagcctcccaagcaactgatctacagggcttccactctggcatctggggtcccatcgcggttcaaaggcagtggatctgggacacagttcactctcaccatcagcgacgtgcagtgtgacgatgctgccacttacttctgtgcaggcggttatagtggtaatatttatgctttcggcggagggaccgaggtggtggtcgaa

SEQ ID NO: 9595 - DNA, 645 bp, Artificial Sequence
  source: /note="Description of Artificial Sequence: Synthetic polynucleotide"
atcgtgatgacccagactccatcttccaggtctgtccctgtgggaggcacagtcaccatcaattgccaggccagtgaaattgttaatagaaacaaccgcttagcctggtttcaacagaaaccagggcagcctcccaagctcctgatgtatctggcttccactccggcatctggggtcccatcgcggtttagaggcagtggatctgggacacagttcactctcaccatcagcgatgtggtgtgtgacgatgctgccacttattattgtacagcatataagagtagtaatactgatggtattgctttcggcggagggaccgaggtggtggtcaaacgtacgccagttgcacctactgtcctcctcttcccaccatctagcgatgaggtggcaactggaacagtcaccatcgtgtgtgtggcgaataaatactttcccgatgtcaccgtcacctgggaggtggatggcaccacccaaacaactggcatcgagaacagtaaaacaccgcagaattctgcagattgtacctacaacctcagcagcactctgacactgaccagcacacagtacaacagccacaaagagtacacctgcaaggtgacccagggcacgacctcagtcgtccagagcttcagtaggaagaactgt

SEQ ID NO: 9596 - DNA, 654 bp, Homo sapiens
atggacatgagggtccccgctcagctcctggggcttctgctgctctggctcccagcaggtgccagatgtgccatccagttgacccagtctccatcctccctgtctgcatctgtaggagacagagtcaccatcacttgccgggcaagtcagggcattagcagtgctttagcctggtatcagcagaaaccagggaaagctcctaagctcctgatctatgatgcctccagtttggaaagtggggtcccatcaaggttcagcggcagtggatctgggacagatttcactctcaccatcagcagcctgcagcctgaagattttgcaacttattactgtcaacagtttaatagttaccctcagtgccagatgtgccatccagttgacccagtctccatcctccctgtctgcatctgtaggagacagagtcaccatcacttgccgggcaagtcagggcattagcagtgctttagcctggtatcagcagaaaccagggaaagctcctaagctcctgatctatgatgcctccagtttggaaagtggggtcccatcaaggttcagcggcagtggatctgggacagatttcactctcaccatcagcagcctgcagcctgaagattttgcaacttattactgtcaacagtttaatagttaccctca

SEQ ID NO: 9597 - DNA, 365 bp, Homo sapiens
atggtgttgcagacccaggtcttcatttctctgttgctctggatctctggtgcctacggggacatcgtgatgacccagtctccagactccctggctgtgtctctgggcgagagggccaccatcaactgcaagtccagccagagtgttttatacagctccaacaataagaactacttagcttggtaccagcagaaaccaggacagcctcctaagctgctcatttactgggcatctacccgggaatccggggtccctgaccgattcagtggcagcgggtctgggacagatttcactctcaccatcagcagcctgcaggctgaagatgtggcagtttattactgtcagcaatattatagtactcctcc

SEQ ID NO: 9598 - DNA, 636 bp, Artificial Sequence
  source: /note="Description of Artificial Sequence: Synthetic polynucleotide"
caagtgctgacccagactgcatcgcccgtgtctgccgctgtgggaggcacagtcaccatcagttgccagtccagtcagagtgttgagaatggcaactggttagcctggtatcagcagaaaccagggcagcctcccaagctcctgatctatctggcatccactctggaatctggggtcccatcgcggttcaaaggcagtggatctgggacacagttcactctcaccatcagcggcgtacagtgtgacgatgctgccacttactactgtcagggcgcttatagtggtattaatgttttcggcggagggaccgaggtggtggtcaaacgtacgccagttgcacctactgtcctcctcttcccaccatctagcgatgaggtggcaactggaacagtcaccatcgtgtgtgtggcgaataaatactttcccgatgtcaccgtcacctgggaggtggatggcaccacccaaacaactggcatcgagaacagtaaaacaccgcagaattctgcagattgtacctacaacctcagcagcactctgacactgaccagcacacagtacaacagccacaaagagtacacctgcaaggtgacccagggcacgacctcagtcgtccagagcttcagtaggaagaactgt

SEQ ID NO: 9599 - DNA, 648 bp, Bos sp.
caggccgtcctgaaccagccaagcagcgtctccgggtctctggggcagcgggtctcaatcacctgtagcgggtcttcctccaatgtcggcaacggctacgtgtcttggtatcagctgatccctggcagtgccccacgaaccctgatctacggcgacacatccagagcttctggggtccccgatcggttctcagggagcagatccggaaacacagctactctgaccatcagctccctgcaggctgaggacgaagcagattatttctgcgcatctgccgaggactctagttcaaatgccgtgtttggaagcggcaccacactgacagtcctggggcagcccaagagtcccccttcagtgactctgttcccaccctctaccgaggaactgaacggaaacaaggccacactggtgtgtctgatcagcgacttttaccctggatccgtcactgtggtctggaaggcagatggcagcacaattactaggaacgtggaaactacccgcgcctccaagcagtctaatagtaaatacgccgccagctcctatctgagcctgacctctagtgattggaagtccaaagggtcatatagctgcgaagtgacccatgaaggctcaaccgtgactaagactgtgaaaccatccgagtgctcc

SEQ ID NO: 9600 - DNA, 636 bp, Artificial Sequence
  source: /note="Description of Artificial Sequence: Synthetic polynucleotide"
caggtgctgacccagactccatcccccgtgtctgcagctgtgggaggcgcagtcaccatcaattgccagtccagtcagagtgttgagaatggcaactggttaggctggtatcagcagaaaccagggcagcctcccaagctcctgatctatctggcatccactctggcatctggggtcccttcgcggttcaccggcagcggatctgggacacagttcactctcaccatcagcggcgtgcagtgtgacgatgctgccacttactattgtcaaggcgcttatagtggtattaatgctttcggcggagggaccgaggtggtggtcaaacgtacgccagttgcacctactgtcctcctcttcccaccatctagcgatgaggtggcaactggaacagtcaccatcgtgtgtgtggcgaataaatactttcccgatgtcaccgtcacctgggaggtggatggcaccacccaaacaactggcatcgagaacagtaaaacaccgcagaattctgcagattgtacctacaacctcagcagcactctgacactgaccagcacacagtacaacagccacaaagagtacacctgcaaggtgacccagggcacgacctcagtcgtccagagcttcagtaggaagaactgt

SEQ ID NO: 9601 - DNA, 312 bp, Homo sapiens
cccaaggccaaccccacggtcactctgttcccgccctcctctgaggagctccaagccaacaaggccacactagtgtgtctgatcagtgacttctacccgggagctgtgacagtggcttggaaggcagatggcagccccgtcaaggcgggagtggagacgaccaaaccctccaaacagagcaacaacaagtacgcggccagcagctacctgagcctgacgcccgagcagtggaagtcccacagaagctacagctgccaggtcacgcatgaagggagcaccgtggagaagacagtggcccctacagaatgttca

SEQ ID NO: 9602 - DNA, 321 bp, Homo sapiens
cgaactgtggctgcaccatctgtcttcatcttcccgccatctgatgagcagttgaaatctggaactgcctctgttgtgtgcctgctgaataacttctatcccagagaggccaaagtacagtggaaggtggataacgccctccaatcgggtaactcccaggagagtgtcacagagcaggacagcaaggacagcacctacagcctcagcagcaccctgacgctgagcaaagcagactacgagaaacacaaagtctacgcctgcgaagtcacccatcagggcctgagctcgcccgtcacaaagagcttcaacaggggagagtgt

SEQ ID NO: 9603 - DNA, 312 bp, Artificial Sequence
  source: /note="Description of Artificial Sequence: Synthetic polynucleotide"
cgtacgccagttgcacctactgtcctcctcttcccaccatctagcgatgaggtggcaactggaacagtcaccatcgtgtgtgtggcgaataaatactttcccgatgtcaccgtcacctgggaggtggatggcaccacccaaacaactggcatcgagaacagtaaaacaccgcagaattctgcagattgtacctacaacctcagcagcactctgacactgaccagcacacagtacaacagccacaaagagtacacctgcaaggtgacccagggcacgacctcagtcgtccagagcttcagtaggaagaactgt

SEQ ID NO: 9604 - DNA, 321 bp, Artificial Sequence
  source: /note="Description of Artificial Sequence: Synthetic polynucleotide"
cgtacggtggctgcaccatctgtcttcatcttcccgccatctgatgagcagttgaaatctggaactgcctctgttgtgtgcctgctgaataacttctatcccagagaggccaaagtacagtggaaggtggataacgccctccaatcgggtaactcccaggagagtgtcacagagcaggacagcaaggacagcacctacagcctcagcagcaccctgacgctgagcaaagcagactacgagaaacacaaagtctacgcctgcgaagtcacccatcagggcctgagctcgcccgtcacaaagagcttcaacaggggagagtgt

SEQ ID NO: 9605 - DNA, 287 bp, Homo sapiens
gaaattgtgttgacacagtctccagccaccctgtctttgtctccaggggaaagagccaccctctcctgcagggccagtcagagtgttagcagctacttagcctggtaccaacagaaacctggccaggctcccaggctcctcatctatgatgcatccaacagggccactggcatcccagccaggttcagtggcagtgggtctgggacagacttcactctcaccatcagcagcctagagcctgaagattttgcagtttattactgtcagcagcgtagcaactggcctcc

SEQ ID NO: 9606 - DNA, 322 bp, Homo sapiens
gacatccagatgacccagtctccatcctcactgtctgcatctgtaggagacagagtcaccatcacttgtcgggcgagtcagggcattagcaattatttagcctggtttcagcagagaccagggagagcccctaagtcccttatctatgctgcatccagtttgcaaaggggggtcccatcaaagttcagcggcagtggatctgggacagatttcactctcaccatcagcagcctgcagcctgaagattttgcaacttattactgccaacagtataatagttacccgatcaccttcggccaagggacacgactggagatcaaac

SEQ ID NO: 9607 - DNA, 322 bp, Homo sapiens
gacatccagatgacccagtctccatcctcactgtctgtatctgtaggagacagaatcaccatcacctgtcgggcgagtcaggacattagtaattctttagcctggtttcagcagaaaccagggaaagcccctaagtccctgatctttgctgcatccagtttgcaaagtggggtcccatcaaagttcagcggcagtggatctgggacagatttcaattttaccatcagcagcctgcagcctgaagattttgcaacttattactgccaacagtataatagtttccctctcactttcggcggagggaccaaggtggagatcaaac

SEQ ID NO: 9608 - DNA, 322 bp, Homo sapiens
gacatccagatgacccagtctccatcctcactgtctgtctctgtgggagacagagtcatcatcacctgtcgggcgagtcaagacattagaaattctttagcctggtttcagcaaaaacctgggaaagcccctaagtccctgatctttgctgcatccagtttgcaaagtggggtcccatcaaagttccgcggcagtggatttgggacagatttcactctcaccatcaccagcctgcagcctgaggattttgcaacttattactgccaacagtatagtagttatcctctcacttttggcggagggaccaaggtagagatcaaac

SEQ ID NO: 9609 - DNA, 287 bp, Homo sapiens
gacatccagatgacccagtctccatcttccgtgtctgcatctgtaggagacagagtcaccatcacttgtcgggcgagtcagggtattagcagctggttagcctggtatcagcagaaaccagggaaagcccctaagctcctgatctatgctgcatccagtttgcaaagtggggtcccatcaaggttcagcggcagtggatctgggacagatttcactctcaccatcagcagcctgcagcctgaagattttgcaacttactattgtcaacaggctaacagtttccctcc

SEQ ID NO: 9610 - DNA, 342 bp, Artificial Sequence
  source: /note="Description of Artificial Sequence: Synthetic polynucleotide"
gacatcgtgatgacccagactccatcctccgtgtctgcagctgtgggaggcacagtcaccatcaattgccaggccagtcagagtgtttatgggaccaaccgtttatcctggtatcagcagaaaccagggcagcgtcccaagctcctgatctatggtgcatccactctgacatctggggtcccatcgcggttcaaaggcagtggatctgggacacagttcactctcaccatcagtggcgtgcagtgtgatgatgctgccacttactactgtctaggcggttggtttgaaagtagtagtagtcttgattgggctttcggcggagggaccgaggtggtcgtcgaa

SEQ ID NO: 9611 - DNA, 645 bp, Artificial Sequence
  source: /note="Description of Artificial Sequence: Synthetic polynucleotide"
gaccctgtgatgacccagactccatcctccgtgtctgcagctgtgggaggcacagtcaccatcaattgccagtccagtcagagtgttaatcagaacgacttatcctggtatcagcagaaaccagggcagcctcccaagcgcctgatctattatgcatccactctggcatctggggtctcatcgcggttcaaaggcagtggatctgggacacagttcactctcaccatcagcgacatgcagtgtgacgatgctgccacttactactgtcaaggcagttttcgtgttagtggttggtactgggctttcggcggagggaccgaggtggtggtcaaacgtacgccagttgcacctactgtcctcctcttcccaccatctagcgatgaggtggcaactggaacagtcaccatcgtgtgtgtggcgaataaatactttcccgatgtcaccgtcacctgggaggtggatggcaccacccaaacaactggcatcgagaacagtaaaacaccgcagaattctgcagattgtacctacaacctcagcagcactctgacactgaccagcacacagtacaacagccacaaagagtacacctgcaaggtgacccagggcacgacctcagtcgtccagagcttcagtaggaagaactgt

SEQ ID NO: 9612 - DNA, 639 bp, Artificial Sequence
  source: /note="Description of Artificial Sequence: Synthetic polynucleotide"
gaccctgtgctgacccagactccatcccccgtgtctgcagctgtgggaggcacagtcaccatcagttgccaggccagtgagagtgttgagagtggcaactggttagcctggtatcagcagaaaccagggcagcctcccaagctcctgatctattatacatccactctggcatctggggtcccatcgcggttcaaaggcagtggatctggggcacacttcactctcaccatcagcggcgtgcagtgtgacgatgctgccacttactactgtcaaggcgctttttatggtgtgaatactttcggcggagggaccgaggtggtggtcaaacgtacgccagttgcacctactgtcctcctcttcccaccatctagcgatgaggtggcaactggaacagtcaccatcgtgtgtgtggcgaataaatactttcccgatgtcaccgtcacctgggaggtggatggcaccacccaaacaactggcatcgagaacagtaaaacaccgcagaattctgcagattgtacctacaacctcagcagcactctgacactgaccagcacacagtacaacagccacaaagagtacacctgcaaggtgacccagggcacgacctcagtcgtccagagcttcagtaggaagaactgt

SEQ ID NO: 9613 - DNA, 337 bp, Homo sapiens
gatattgtaatgactcagtctccactctccctgcccgtcacccttggacagccggcctccatctcctgcaggtctagtcaaagcctcatatacagtgatggaaacacctacttgaattggtttcagcagaggccaggccaatctccaaggcgcctaatttataaggtttctaaccgggactctggggtcccagacagattcagcggcagtgggtcaggcactgatttcacactgaaaatcagcagggtggaggctgaagatgttggagtttattactgcttgcaaggtactctctggccgatcaccttcggccaagggacacgactggagatcaaac

SEQ ID NO: 9614 - DNA, 337 bp, Homo sapiens
gatattgtgatgacccagactccactctcctcacctgtcacccttggacagccggcctccatctcctgcaggtctagtcaaagcctcgtacacagtgatggaaacacctacttgagttggcttcagcagaggccaggccagcctccaagactcctaatttataggatttctaaccggttctctggggtcccagacagattcagtggcagtggggcagggacagatttcacactgaaaatcagcagggtggaagctgaggatgtcggggtttattactgcatgcaaactacacaatttccgctcactttcggcggagggaccaaggtggagatcaaac

SEQ ID NO: 9615 - DNA, 334 bp, Homo sapiens
gatattgtgatgactcagtctccactctccctgcccgtcacccctggagagccggcctccatctcctgcaggtctagtcagagcctcctgtatactactggatacaactatttggattggtacctgcagaagccagggctgtctccacagctcctgatctatttgggttcttatcgggcctccggggtccctgacaggttcactggcagtggatcaggcacagattttacactgaagatcagcagagtggaggctgaggatgttggggtttattactgcatgcaagctctacaagctcctactttcggcggagggaccaagttggagatcaaac

SEQ ID NO: 9616 - DNA, 334 bp, Homo sapiens
gatattgtgatgactcagtctccactctccctgcccgtcacccctggagagccggcctccatctcctgcaggtctagtcagagcctcctgtatagtactggatacaactatttggattggtacctgcagaagccagggctgtctccacagctcctgatctatttgggttctaatcgggcctccggggtccctgacaggttcagtggcagtggatcaggcacagaatttacactgaaaatcagcagagtggaggctgaggatgttggggtttattactgcatgcaagctctacaaactcccactttcggcggagggaccaaggtggagatcaaac

SEQ ID NO: 9617 - DNA, 334 bp, Homo sapiens
gatattgtgatgactcagtctccactctccctgcccgtcacccctggagagccggcctccatctcctgcaggtctagtcagagcctcctgtatagtactggatacaactatttggattggtacctgcagaagccagggctgtctccacagctcctgatctatttgggttctaatcgggcctccggggtccctgacaggttcagtggcagtggatcaggcacagattttacactgaaaatcagcagagtggaggctgaggatgttggggtttattactgcatgcaagctctacaaactcccactttcggcggagggaccaaggtggagatcaaac

SEQ ID NO: 9618 - DNA, 334 bp, Homo sapiens
gatattgtgatgactcagtctccactctccctgcccgtcacccctggagagccggcctccatctcctgcaggtctagtcagagcctcctgtatagtactggatacaactatttggattggtacctgcagaagccagggctgtctccacatctcctgatctatttgggttctaatcgggcctccggggtccctgacaggttcagtggcagtggatcaggcacagattttacactgaaaatcagcagagtggaggctgaggatgttggggtttattactgcatgcaagctctacaaactcccactttcggcggagggaccaaggtggagatcaaac

SEQ ID NO: 9619 - DNA, 334 bp, Homo sapiens
gatattgtgatgactcagtctccactctccctgcccgtcacccctggagagccggcctccatctcctgcaggtctagtcagagcctcctgtttagtactggatacaactatttggattggtacctgcagaagccagggctgtctccacagctcctgatctatttgggttctaatcgggcctccggggtccctgacaggttcagtggcagtggatcaggcacagattttacactgaaaatcagcagagtggaggctgaggatgttggggtttattactgcatgcaagctctacaaactcccactttcggcggagggaccaaggtggagatcaaac

SEQ ID NO: 9620 - DNA, 334 bp, Homo sapiens
gatattgtgatgactcagtctccactctccctgcccgtcagccctggagagccggcctccatctcctgcaggtctagtcagagcctcctgtatagcactggatacaactatttggattggtacctgcagaagccagggctgtctcctcagctcctgatctatttgggttctattcgggcctccggggtccctgacaggttcagtggcagtggatcaggcacagattttacactgagcatcagcagagtggaggctgaggatgttggaatttattactgcatgcaagctctacaaactcccactttcggcggagggaccaaggtggagatcaaac

SEQ ID NO: 9621 - DNA, 334 bp, Homo sapiens
gatattgtgatgactcagtctccactctccctgtccgtcacccctggagagccggcctccatctcctgcaggtctagtcagagcctcctgtatagtactggatacaactatttggattggtacctgcagaagccagggctgtctccacagctcctgatctatttgggttctaatcgggcctccggggtccctgacaggttcagtggcagtggatcaggcacagattttacactgaagatcagcagagtggaggctgaagatgttgggttttattactgcatgcaagctctacaagctcccactttcggcggagggaccaaggtggagatcaaac

SEQ ID NO: 9622 - DNA, 337 bp, Homo sapiens
gatgttgtaatgactcagtctccactctccctgcccgtcacccttggacagccggcctccatctcctgcaggtctagtcaaagcctcgtatacagtgatggaaacacctacttgaattggtttcagcagaggccaggccaatctccacggcgcctaatttataaggtttctaaccgggactctggggtcccagacagattcagcggcagtgggtcaggcactgatttcacactgaaaatcagcagggtggaggctgaagatgttggagtttattactgcatgcaaggtactctctggccgatcaccctcggccaagggacacgactggagatcaaac

SEQ ID NO: 9623 - DNA, 337 bp, Homo sapiens
gatgttgtgatgactcagtctccactctccctgcccgtcacccttggacagccggcctccatctcctgcaggtccagtcaaagcctcgtcttcagtgatggaaacacctacttgacttggtttcaacagaggccaggccaatctccaaggcgcctaatttataaggtttctgaccgggactctggggtcccagacagattcagcggcagtgggtcaggcactgatttcacactgcaaatcagcagggtggaggctgaggatgttggcctttattactgcatgcaaggttcacactggccgctcactttcggcggagggaccaaggtggagatcaaac

SEQ ID NO: 9624 - DNA, 336 bp, Artificial Sequence
  source: /note="Description of Artificial Sequence: Synthetic polynucleotide"
gcagccgtgctgacccagactccatcgtccgtgtctgcagctgtgggaggcacagtcaccatcaagtgccagtccagtcagagtgtttataataacaacgaattttcctggtatcagcagaaaccagggcagcctcccaagctcctgatctatgatgcatccaaattggcatctggggtcccatcgcggttcagcggcagtggatctgggacacagttcactctcaccatcagcggcgtgcagtgtgacgatgttgccacttattactgtctaggcggttataatgatgatactaatagatgggctttcggcggagggaccgaggtggtggtcgaa

SEQ ID NO: 9625 - DNA, 336 bp, Artificial Sequence
  source: /note="Description of Artificial Sequence: Synthetic polynucleotide"
gccatcgtgatgacccagactccatcttccaagtctgtccctgtgggagacacagtcaccatcaattgccaggccagtgagagtgttgctaataacaactggttagcctggtttcaacagaaaccagggcagcctcccaagctcctgatctacaaggcatccactctggcatctggggtctcatcgcggtttaaaggcagtggatctgggacacagttcactctcaccatcggcgatgtggtgtgtgacgatgctgccacttactattgtgcaggatataaaagtagtactactgatgctgttgctttcggcggagggaccgaggtggtggtcaaa

SEQ ID NO: 9626 - DNA, 339 bp, Artificial Sequence
  source: /note="Description of Artificial Sequence: Synthetic polynucleotide"
gcccaagtgctgacccagactccatcctccgtgtctgcaactgtgggaggcacagtcaccatcaactgccaggccagtcagagtctttataataagaaaaatttagcctggtatcaacagaaaccagggcagcctcccaagctcctgatctattttgcatccactctggcatctggggtctcatcgcggttcaaaggcagtggatctgggacacagttcactctcaccatcagcgacgtgcagtgtgacgatgctgccacttactattgtcagggcgagtttatttgcagcagtggtgattgtgttgctttcggcggagggaccaaggtggtggtcaaa

SEQ ID NO: 9627 - DNA, 339 bp, Artificial Sequence
  source: /note="Description of Artificial Sequence: Synthetic polynucleotide"
gcccaagtgctgacccagactccatcctccgtgtctgcagctgtgggaggcacagtcaccatcaactgccaggccagtcagagtctttataataagaaaaatttagcctggtatcagcagaaaccagggcagcctcccaaactccttatctattatgcatccactctggcatctggggtctcatcgcggttcaaaggcagtggatctgggacacagtttactctcaccatcagcggcgtgcagtgtgacgatgctgccacttactattgtcaaggcgaatttagttgcagcagtgttgattgtgttgctttcggcggagggaccaaggtggtcgtcaaa

SEQ ID NO: 9628 - DNA, 339 bp, Artificial Sequence
  source: /note="Description of Artificial Sequence: Synthetic polynucleotide"
gcccaagtgctgacccagactccatcctccgtgtctgcagctgtgggaggcacagtcaccatcaattgccaggccagtcagagtctttataataagaaaaatttggcctggtatcagcagaaaccagggcagcctcccaagctcctgatgttctttacgtccactctggcatctgggatctcgtcgcggttcaaaggcagtggatctgggacacagttcactctcaccatcagcggcgtgcagtgtgacgatgctgccacttactattgtcaaggcgaatttagttgtagcagtggtgattgtcttgctttcggcggagggaccaaggtggtcgtcaaa

SEQ ID NO: 9629 - DNA, 330 bp, Artificial Sequence
  source: /note="Description of Artificial Sequence: Synthetic polynucleotide"
gcccaagtgctgacccagactccatcttccacgtctgcagctgtgggaggcacagtcaccatcaattgccagtccagtcagaatgttgttaataacaactggttctcctggtttcagcagaaaccagggcagcctcccaaggtcctgatctattttgtatccaaactggcatctggggtcccatcgcggtttaaaggcagtggatctgggacacagttcactctcaccatcagcgacctggagtgtgacgatgctgccacttattattgtggaggcggttatagtgataatatttatgcgttcggcggagggaccgaggtggtcgtcgaa

SEQ ID NO: 9630 - DNA, 330 bp, Artificial Sequence
  source: /note="Description of Artificial Sequence: Synthetic polynucleotide"
gcctatgatatgacccagactccagcctctgtggaggtagctgtgggaggcacagtcaccatcaattgccaggccagtgagagcattaacactgcattagcctggtatcagcagaaaccaggacagcctcccaaggtcctgatctatgctgcctccgatctggcatctggggtcccatcgcggttcaaaggcagtggatctgggaaacagttcactctcaccatcagcggcgtgcagtgtgccgatgctgccacttactactgtcaacagggttatactgcaaataatattgataatgctttcggcggagggaccgaggtggtcgtcaaa

SEQ ID NO: 9631 - DNA, 330 bp, Artificial Sequence
  source: /note="Description of Artificial Sequence: Synthetic polynucleotide"
gcctatgatatgacccagactccagcctctgtggaggtagctgtgggaggcacagtcaccatcaattgccaggccagtgagagcattggcactgcattagcctggtatcagcagaaaccagggcagcctcccaagctcctgatctacaaggcatccactctggaatctggggtcccatcgcggttcaaaggcggtggatctgggacacagttcactctcaccatcagcggcgtgcagtgtgacgatgctgccacttactactgtcaacagggtgaaactgcaaatagaattgataatgctttcggcggagggaccgaggtggtcgtcaaa

SEQ ID NO: 9632 - DNA, 330 bp, Artificial Sequence
  source: /note="Description of Artificial Sequence: Synthetic polynucleotide"
gctcaagtgctgacccagactccagcctccgtgtctgaacctgtgggaggcacagtcaccatcaagtgccaggccagtcagaccatttatagtggtttagcctggtatcagcagaaaccagggcagcctcccaagctcctgatctacagggcatccactctggcatctggggtctcatcgcggttcaaaggcagtggatctgggacagagttcattctcaccatcagcgacctggagtgtggcgatgctgccacttactactgtcaagttggtggttatggtgttagttatgaccatgctttcggcggagggaccaaggtggtcgtcaaa

SEQ ID NO: 9633 - DNA, 38 bp, Homo sapiens
gctcactttcggcggagggaccaaggtggagatcaaac

SEQ ID NO: 9634 - DNA, 318 bp, Homo sapiens
ggtcagcccaaggctgccccctcggtcactctgttcccgccctcctctgaggagcttcaagccaacaaggccacactggtgtgtctcataagtgacttctacccgggagccgtgacagtggcttggaaagcagatagcagccccgtcaaggcgggagtggagaccaccacaccctccaaacaaagcaacaacaagtacgcggccagcagctatctgagcctgacgcctgagcagtggaagtcccacagaagctacagctgccaggtcacgcatgaagggagcaccgtggagaagacagtggcccctacagaatgttca

SEQ ID NO: 9635 - DNA, 39 bp, Homo sapiens
tgtacacttttggccaggggaccaagctggagatcaaac

SEQ ID NO: 9636 - DNA, 38 bp, Homo sapiens
tgtggtattcggcggagggaccaagctgaccgtcctag

SEQ ID NO: 9637 - protein, 113 aa, Artificial Sequence
  source: /note="Description of Artificial Sequence: Synthetic polypeptide"
AAVLTQTPSPVSAAVGGTVSISCQSSQSVDNNNYLSWYQQKPGQPPKLLIYDASDLASGVPSRFKGSGSGTQFTLTISDVQCDDAATYYCAGGYITSSDIFYDFGGGTKVVVK

SEQ ID NO: 9638 - protein, 110 aa, Artificial Sequence
  source: /note="Description of Artificial Sequence: Synthetic polypeptide"
AQVLTQTASPVSAAVGGTVTINCQSSQSVYGNNWLGWYQQKPGQPPKLLIYSASTLASGVPSRFSGSGSGTQFTLTISDLECDDGATYYCVGGYSGNIHVFGGGTKVVVE

SEQ ID NO: 9639 - protein, 113 aa, Artificial Sequence
  source: /note="Description of Artificial Sequence: Synthetic polypeptide"
AQVLTQTASPVSAAVGGTVTINCQSSQSVYKNNDLAWYQQKPGQPPKLLIYYASTLASGVSSRFKGSGSGTEFTLTISDAQCDDAATYYCLGSYDCSSADCNAFGGGTKVVVK

SEQ ID NO: 9640 - protein, 113 aa, Artificial Sequence
  source: /note="Description of Artificial Sequence: Synthetic polypeptide"
AQVLTQTASPVSAAVGNTVTITCQSSQSVWKNNDLSWYQQKLGQPPKLLIYYASTLASGVSSRFKASGSGTQFTLTISDVQCDDAGTYYCVGSYDCSSADCNAFGGGTKVVVK

SEQ ID NO: 9641 - protein, 113 aa, Artificial Sequence
  source: /note="Description of Artificial Sequence: Synthetic polypeptide"
AQVLTQTASPVSAAVGSTVTINCQASQSVYQNNYLAWFQQKPGQPPKRLIYSASTLASGVSSRFKGSGSGTQFTLTISDVQCDDAATYYCLGAYDCSGVDCSAFGGGTKVVVK

SEQ ID NO: 9642 - protein, 109 aa, Artificial Sequence
  source: /note="Description of Artificial Sequence: Synthetic polypeptide"
AQVLTQTPSPVSAAVGGKVTINCQSSQSIYTNYLSWYQQKPGQPPRLLIYSASTLASGVPSRFKGSGSGTQFTLTISEVQCDDAATYYCQAYFTGEIFPFGGGTKVVVK

SEQ ID NO: 9643 - protein, 110 aa, Artificial Sequence
  source: /note="Description of Artificial Sequence: Synthetic polypeptide"
AQVLTQTPSSTSAAVGGTVTISCQSSPSVYGNNWLGWYQKKPGQPPKLLIYSASTLASGVSSRFKGSGSGTQFTLTISDLECDDAATYYCAGGYSGNIHVFGGGTKVVVK

SEQ ID NO: 9644 - protein, 110 aa, Artificial Sequence
  source: /note="Description of Artificial Sequence: Synthetic polypeptide"
AQVLTQTPSSVSAAVGGTVTINCQSSQSVNNNNFLSWYQQKPGQPPKQLIYRASTLASGVPSRFKGSGSGTQFTLTISDVQCDDAATYFCAGGYSGNIYAFGGGTEVVVE

SEQ ID NO: 9645 - protein, 110 aa, Artificial Sequence
  source: /note="Description of Artificial Sequence: Synthetic polypeptide"
AYDMTQTPASVEVAVGGTVTIKCQASQSIYSYLAWYQQKPGQPPKLLIYSASYLASGVPSRFSGSGSGTEFTLTISDLECADAATYYCQHGYISGNVDNAFGGGTKVVVK

SEQ ID NO: 9646 - protein, 110 aa, Artificial Sequence
  source: /note="Description of Artificial Sequence: Synthetic polypeptide"
DIVMTQTPASVSEPVGGTVTIKCQASQSISNWLAWYQQKPGQPPKLLIYRASTLASGVSSRFKGSGSGTEFTLTISDLECADAATYYCQSDYGIDTYGSAFGGGTKVVVK

SEQ ID NO: 9647 - protein, 112 aa, Artificial Sequence
  source: /note="Description of Artificial Sequence: Synthetic polypeptide"
AAVLTQTPSSVSAAVGGTVTIKCQSSQSVYNNNEFSWYQQKPGQPPKLLIYDASKLASGVPSRFSGSGSGTQFTLTISGVQCDDVATYYCLGGYNDDTNRWAFGGGTEVVVE

SEQ ID NO: 9648 - protein, 112 aa, Artificial Sequence
  source: /note="Description of Artificial Sequence: Synthetic polypeptide"
AIVMTQTPSSKSVPVGDTVTINCQASESVANNNWLAWFQQKPGQPPKLLIYKASTLASGVSSRFKGSGSGTQFTLTIGDVVCDDAATYYCAGYKSSTTDAVAFGGGTEVVVK

SEQ ID NO: 9649 - protein, 110 aa, Artificial Sequence
  source: /note="Description of Artificial Sequence: Synthetic polypeptide"
AQVLTQTPASVSEPVGGTVTIKCQASQTIYSGLAWYQQKPGQPPKLLIYRASTLASGVSSRFKGSGSGTEFILTISDLECGDAATYYCQVGGYGVSYDHAFGGGTKVVVK

SEQ ID NO: 9650 - protein, 110 aa, Artificial Sequence
  source: /note="Description of Artificial Sequence: Synthetic polypeptide"
AQVLTQTPSSTSAAVGGTVTINCQSSQNVVNNNWFSWFQQKPGQPPKVLIYFVSKLASGVPSRFKGSGSGTQFTLTISDLECDDAATYYCGGGYSDNIYAFGGGTEVVVE

SEQ ID NO: 9651 - protein, 113 aa, Artificial Sequence
  source: /note="Description of Artificial Sequence: Synthetic polypeptide"
AQVLTQTPSSVSAAVGGTVTINCQASQSLYNKKNLAWYQQKPGQPPKLLIYYASTLASGVSSRFKGSGSGTQFTLTISGVQCDDAATYYCQGEFSCSSVDCVAFGGGTKVVVK

SEQ ID NO: 9652 - protein, 113 aa, Artificial Sequence
  source: /note="Description of Artificial Sequence: Synthetic polypeptide"
AQVLTQTPSSVSAAVGGTVTINCQASQSLYNKKNLAWYQQKPGQPPKLLMFFTSTLASGISSRFKGSGSGTQFTLTISGVQCDDAATYYCQGEFSCSSGDCLAFGGGTKVVVK

SEQ ID NO: 9653 - protein, 113 aa, Artificial Sequence
  source: /note="Description of Artificial Sequence: Synthetic polypeptide"
AQVLTQTPSSVSATVGGTVTINCQASQSLYNKKNLAWYQQKPGQPPKLLIYFASTLASGVSSRFKGSGSGTQFTLTISDVQCDDAATYYCQGEFICSSGDCVAFGGGTKVVVK

SEQ ID NO: 9654 - protein, 110 aa, Artificial Sequence
  source: /note="Description of Artificial Sequence: Synthetic polypeptide"
AYDMTQTPASVEVAVGGTVTINCQASESIGTALAWYQQKPGQPPKLLIYKASTLESGVPSRFKGGGSGTQFTLTISGVQCDDAATYYCQQGETANRIDNAFGGGTEVVVK

SEQ ID NO: 9655 - protein, 110 aa, Artificial Sequence
  source: /note="Description of Artificial Sequence: Synthetic polypeptide"
AYDMTQTPASVEVAVGGTVTINCQASESINTALAWYQQKPGQPPKVLIYAASDLASGVPSRFKGSGSGKQFTLTISGVQCADAATYYCQQGYTANNIDNAFGGGTEVVVK

SEQ ID NO: 9656 - protein, 107 aa, Artificial Sequence
  source: /note="Description of Artificial Sequence: Synthetic polypeptide"
DIQMTQSPSSLSASVGDRGTVTCRASQNIRTYLNWYQQKPGKAPKLLIYAASSLQSGVPSRFSGSGSGTDFTLTISSLQPEDFATYYCQQSYGTPYTFGQGTKLEIK

SEQ ID NO: 9657 - protein, 107 aa, Homo sapiens
DIQMTQSPSSLSASVGDRVTITCRASQGISNYLAWFQQRPGRAPKSLIYAASSLQRGVPSKFSGSGSGTDFTLTISSLQPEDFATYYCQQYNSYPITFGQGTRLEIK

SEQ ID NO: 9658 - protein, 107 aa, Homo sapiens
DIQMTQSPSSLSVSVGDRITITCRASQDISNSLAWFQQKPGKAPKSLIFAASSLQSGVPSKFSGSGSGTDFNFTISSLQPEDFATYYCQQYNSFPLTFGGGTKVEIK

SEQ ID NO: 9659 - protein, 107 aa, Homo sapiens
DIQMTQSPSSLSVSVGDRVIITCRASQDIRNSLAWFQQKPGKAPKSLIFAASSLQSGVPSKFRGSGFGTDFTLTITSLQPEDFATYYCQQYSSYPLTFGGGTKVEIK

SEQ ID NO: 9660 - protein, 95 aa, Homo sapiens
DIQMTQSPSSVSASVGDRVTITCRASQGISSWLAWYQQKPGKAPKLLIYAASSLQSGVPSRFSGSGSGTDFTLTISSLQPEDFATYYCQQANSFP

SEQ ID NO: 9661 - protein, 214 aa, Homo sapiens
DIQMTQSPSSVSASVGDRVTITCRASQGISSWLAWYQQKPGKAPKLLIYGASSLESGVPSRFSGSGSGTDFTLTISSLQPEDFASYYCQQANSFPYTFGQGTKLEIKRTVAAPSVFIFPPSDEQLKSGTASVVCLLNNFYPREAKVQWKVDNALQSGNSQESVTEQDSKDSTYSLSSTLTLSKADYEKHKVYACEVTHQGLSSPVTKSFNRGEC

SEQ ID NO: 9662 - protein, 111 aa, Homo sapiens
DIVMTQSPLSLPVSPGEPASISCRSSQSLLYSTGYNYLDWYLQKPGLSPQLLIYLGSIRASGVPDRFSGSGSGTDFTLSISRVEAEDVGIYYCMQALQTPTFGGGTKVEIK

SEQ ID NO: 9663 - protein, 112 aa, Homo sapiens
DIVMTQSPLSLPVTLGQPASISCRSSQSLIYSDGNTYLNWFQQRPGQSPRRLIYKVSNRDSGVPDRFSGSGSGTDFTLKISRVEAEDVGVYYCLQGTLWPITFGQGTRLEIK

SEQ ID NO: 9664 - protein, 111 aa, Homo sapiens
DIVMTQSPLSLPVTPGEPASISCRSSQSLLFSTGYNYLDWYLQKPGLSPQLLIYLGSNRASGVPDRFSGSGSGTDFTLKISRVEAEDVGVYYCMQALQTPTFGGGTKVEIK

SEQ ID NO: 9665 - protein, 111 aa, Homo sapiens
DIVMTQSPLSLPVTPGEPASISCRSSQSLLYSTGYNYLDWYLQKPGLSPHLLIYLGSNRASGVPDRFSGSGSGTDFTLKISRVEAEDVGVYYCMQALQTPTFGGGTKVEIK

SEQ ID NO: 9666 - protein, 111 aa, Homo sapiens
DIVMTQSPLSLPVTPGEPASISCRSSQSLLYSTGYNYLDWYLQKPGLSPQLLIYLGSNRASGVPDRFSGSGSGTDFTLKISRVEAEDVGVYYCMQALQTPTFGGGTKVEIK

SEQ ID NO: 9667 - protein, 111 aa, Homo sapiens
DIVMTQSPLSLPVTPGEPASISCRSSQSLLYTTGYNYLDWYLQKPGLSPQLLIYLGSYRASGVPDRFTGSGSGTDFTLKISRVEAEDVGVYYCMQALQAPTFGGGTKLEIK

SEQ ID NO: 9668 - protein, 111 aa, Homo sapiens
DIVMTQSPLSLSVTPGEPASISCRSSQSLLYSTGYNYLDWYLQKPGLSPQLLIYLGSNRASGVPDRFSGSGSGTDFTLKISRVEAEDVGFYYCMQALQAPTFGGGTKVEIK

SEQ ID NO: 9669 - protein, 112 aa, Homo sapiens
DIVMTQTPLSSPVTLGQPASISCRSSQSLVHSDGNTYLSWLQQRPGQPPRLLIYRISNRFSGVPDRFSGSGAGTDFTLKISRVEAEDVGVYYCMQTTQFPLTFGGGTKVEIK

SEQ ID NO: 9670 - protein, 114 aa, Artificial Sequence
  source: /note="Description of Artificial Sequence: Synthetic polypeptide"
DIVMTQTPSSVSAAVGGTVTINCQASQSVYGTNRLSWYQQKPGQRPKLLIYGASTLTSGVPSRFKGSGSGTQFTLTISGVQCDDAATYYCLGGWFESSSSLDWAFGGGTEVVVE

SEQ ID NO: 9671 - protein, 114 aa, Artificial Sequence; identical to SEQ ID NO: 9670
  source: /note="Description of Artificial Sequence: Synthetic polypeptide"

SEQ ID NO: 9672 - protein, 213 aa, Artificial Sequence
  source: /note="Description of Artificial Sequence: Synthetic polypeptide"
DPVLTQTPSPVSAAVGGTVTISCQASESVESGNWLAWYQQKPGQPPKLLIYYTSTLASGVPSRFKGSGSGAHFTLTISGVQCDDAATYYCQGAFYGVNTFGGGTEVVVKRTPVAPTVLLFPPSSDEVATGTVTIVCVANKYFPDVTVTWEVDGTTQTTGIENSKTPQNSADCTYNLSSTLTLTSTQYNSHKEYTCKVTQGTTSVVQSFSRKNC

SEQ ID NO: 9673 - protein, 215 aa, Artificial Sequence
  source: /note="Description of Artificial Sequence: Synthetic polypeptide"
DPVMTQTPSSVSAAVGGTVTINCQSSQSVNQNDLSWYQQKPGQPPKRLIYYASTLASGVSSRFKGSGSGTQFTLTISDMQCDDAATYYCQGSFRVSGWYWAFGGGTEVVVKRTPVAPTVLLFPPSSDEVATGTVTIVCVANKYFPDVTVTWEVDGTTQTTGIENSKTPQNSADCTYNLSSTLTLTSTQYNSHKEYTCKVTQGTTSVVQSFSRKNC

SEQ ID NO: 9674 - protein, 112 aa, Homo sapiens
DVVMTQSPLSLPVTLGQPASISCRSSQSLVFSDGNTYLTWFQQRPGQSPRRLIYKVSDRDSGVPDRFSGSGSGTDFTLQISRVEAEDVGLYYCMQGSHWPLTFGGGTKVEIK

SEQ ID NO: 9675 - protein, 112 aa, Homo sapiens
DVVMTQSPLSLPVTLGQPASISCRSSQSLVYSDGNTYLNWFQQRPGQSPRRLIYKVSNRDSGVPDRFSGSGSGTDFTLKISRVEAEDVGVYYCMQGTLWPITLGQGTRLEIK

SEQ ID NO: 9676 - protein, 213 aa, Homo sapiens
EIVLTQSPATLSLSPGERATLSCSASISVSYMYWYQQKPGQAPRLLIYDMSNLASGIPARFSGSGSGTDFTLTISSLEPEDFAVYYCMQWSGYPYTFGGGTKVEIKRTVAAPSVFIFPPSDEQLKSGTASVVCLLNNFYPREAKVQWKVDNALQSGNSQESVTEQDSKDSTYSLSSTLTLSKADYEKHKVYACEVTHQGLSSPVTKSFNRGEC

SEQ ID NO: 9677 - protein, 106 aa, Homo sapiens
GQPKAAPSVTLFPPSSEELQANKATLVCLISDFYPGAVTVAWKADSSPVKAGVETTTPSKQSNNKYAASSYLSLTPEQWKSHRSYSCQVTHEGSTVEKTVAPTECS

SEQ ID NO: 9678 - protein, 215 aa, Artificial Sequence
  source: /note="Description of Artificial Sequence: Synthetic polypeptide"
IVMTQTPSSRSVPVGGTVTINCQASEIVNRNNRLAWFQQKPGQPPKLLMYLASTPASGVPSRFRGSGSGTQFTLTISDVVCDDAATYYCTAYKSSNTDGIAFGGGTEVVVKRTPVAPTVLLFPPSSDEVATGTVTIVCVANKYFPDVTVTWEVDGTTQTTGIENSKTPQNSADCTYNLSSTLTLTSTQYNSHKEYTCKVTQGTTSVVQSFSRKNC

SEQ ID NO: 9679 - protein, 12 aa, Homo sapiens
LTFGGGTKVEIK

SEQ ID NO: 9680 - protein, 448 aa, Clostridium botulinum
MPFVNKQFNYKDPVNGVDIAYIKIPNVGQMQPVKAFKIHNKIWVIPERDTFTNPEEGDLNPPPEAKQVPVSYYDSTYLSTDNEKDNYLKGVTKLFERIYSTDLGRMLLTSIVRGIPFWGGSTIDTELKVIDTNCINVIQPDGSYRSEELNLVIIGPSADIIQFECKSFGHEVLNLTRNGYGSTQYIRFSPDFTFGFEESLEVDTNPLLGAGKFATDPAVTLAHELIHAGHRLYGIAINPNRVFKVNTNAYYEMSGLEVSFEELRTFGGHDAKFIDSLQENEFRLYYYNKFKDIASTLNKAKSIVGTTASLQYMKNVFKEKYLLSEDTSGKFSVDKLKFDKLYKMLTEIYTEDNFVKFFKVLNRKTYLNFDKAVFKINIVPKVNYTIYDGFNLRNTNLAANFNGQNTEINNMNFTKLKNFTGLFEFYKLLCVRGIITSKTKSLDKGYNK

SEQ ID NO: 9681 - protein, 430 aa, Clostridium botulinum
MPFVNKQFNYKDPVNGVDIAYIKIPNVGQMQPVKAFKIHNKIWVIPERDTFTNPEEGDLNPPPEAKQVPVSYYDSTYLSTDNEKDNYLKGVTKLFERIYSTDLGRMLLTSIVRGIPFWGGSTIDTELKVIDTNCINVIQPDGSYRSEELNLVIIGPSADIIQFECKSFGHEVLNLTRNGYGSTQYIRFSPDFTFGFEESLEVDTNPLLGAGKFATDPAVTLAHELIHAGHRLYGIAINPNRVFKVNTNAYYEMSGLEVSFEELRTFGGHDAKFIDSLQENEFRLYYYNKFKDIASTLNKAKSIVGTTASLQYMKNVFKEKYLLSEDTSGKFSVDKLKFDKLYKMLTEIYTEDNFVKFFKVLNRKTYLNFDKAVFKINIVPKVNYTIYDGFNLRNTNLAANFNGQNTEINNMNFTKLKNFTGLFEFYKLLC

SEQ ID NO: 9682 - protein, 449 aa, Clostridium botulinum
MPITINNFNYSDPVDNKNILYLDTHLNTLANEPEKAFRITGNIWVIPDRFSRNSNPNLNKPPRVTSPKSGYYDPNYLSTDSDKDPFLKEIIKLFKRINSREIGEELIYRLSTDIPFPGNNNTPINTFDFDVDFNSVDVKTRQGNNWVKTGSINPSVIITGPRENIIDPETSTFKLTNNTFAAQEGFGALSIISISPRFMLTYSNATNDVGEGRFSKSEFCMDPILILMHELNHAMHNLYGIAIPNDQTISSVTSNIFYSQYNVKLEYAEIYAFGGPTIDLIPKSARKYFEEKALDYYRSIAKRLNSITTANPSSFNKYIGEYKQKLIRKYRFVVESSGEVTVNRNKFVELYNELTQIFTEFNYAKIYNVQNRKIYLSNVYTPVTANILDDNVYDIQNGFNIPKSNLNVLFMGQNLSRNPALRKVNPENMLYLFTKFCHKAIDGRSLYNK

SEQ ID NO: 9683 - protein, 422 aa, Clostridium botulinum
MPTINSFNYNDPVNNRTILYIKPGGCQQFYKSFNIMKNIWIIPERNVIGTIPQDFLPPTSLKNGDSSYYDPNYLQSDQEKDKFLKIVTKIFNRINDNLSGRILLEELSKANPYLGNDNTPDGDFIINDASAVPIQFSNGSQSILLPNVIIMGAEPDLFETNSSNISLRNNYMPSNHGFGSIAIVTFSPEYSFRFKDNSMNEFIQDPALTLMHELIHSLHGLYGAKGITTKYTITQKQNPLITNIRGTNIEEFLTFGGTDLNIITSAQSNDIYTNLLADYKKIASKLSKVQVSNPLLNPYKDVFEAKYGLDKDASGIYSVNINKFNDIFKKLYSFTEFDLATKFQVKCRQTYIGQYKYFKLSNLLNDSIYNISEGYNINNLKVNFRGQNANLNPRIITPITGRGLVKKIIRFCKNIVSVKGIR

SEQ ID NO: 9684 - protein, 436 aa, Clostridium botulinum
MPVAINSFNYNDPVNDDTILYMQIPYEEKSKKYYKAFEIMRNVWIIPERNTIGTNPSDFDPPASLKNGSSAYYDPNYLTTDAEKDRYLKTTIKLFKRINSNPAGKVLLQEISYAKPYLGNDHTPIDEFSPVTRTTSVNIKLSTNVESSMLLNLLVLGAGPDIFESCCYPVRKLIDPDVVYDPSNYGFGSINIVTFSPEYEYTFNDISGGHNSSTESFIADPAISLAHELIHALHGLYGARGVTYEETIEVKQAPLMIAEKPIRLEEFLTFGGQDLNIITSAMKEKIYNNLLANYEKIATRLSEVNSAPPEYDINEYKDYFQWKYGLDKNADGSYTVNENKFNEIYKKLYSFTESDLANKFKVKCRNTYFIKYEFLKVPNLLDDDIYTVSEGFNIGNLAVNNRGQSIKLNPKIIDSIPDKGLVEKIVKFCKSVIPRK

SEQ ID NO: 9685 - protein, 442 aa, Clostridium botulinum
  MOD_RES (7)..(7): Any amino acid
MPVNIKXFNYNDPINNDDIIMMEPFNDPGPGTYYKAFRIIDRIWIVPERFTYGFQPDQFNASTGVFSKDVYEYYDPTYLKTDAEKDKFLKTMIKLFNRINSKPSGQRLLDMIVDAIPYLGNASTPPDKFAANVANVSINKKIIQPGAEDQIKGLMTNLIIFGPGPVLSDNFTDSMIMNGHSPISEGFGARMMIRFCPSCLNVFNNVQENKDTSIFSRRAYFADPALTLMHELIHVLHGLYGIKISNLPITPNTKEFFMQHSDPVQAEELYTFGGHDPSVISPSTDMNIYNKALQNFQDIANRLNIVSSAQGSGIDISLYKQIYKNKYDFVEDPNGKYSVDKDKFDKLYKALMFGFTETNLAGEYGIKTRYSYFSEYLPPIKTEKLLDNTIYTQNEGFNIASKNLKTEFNGQNKAVNKEAYEEISLEHLVIYRIAMCKPVMYK

SEQ ID NO: 9686 - protein, 441 aa, Clostridium botulinum
MPVTINNFNYNDPIDNNNIIMMEPPFARGTGRYYKAFKITDRIWIIPERYTFGYKPEDFNKSSGIFNRDVCEYYDPDYLNTNDKKNIFLQTMIKLFNRIKSKPLGEKLLEMIINGIPYLGDRRVPLEEFNTNIASVTVNKLISNPGEVERKKGIFANLIIFGPGPVLNENETIDIGIQNHFASREGFGGIMQMKFCPEYVSVFNNVQENKGASIFNRRGYFSDPALILMHELIHVLHGLYGIKVDDLPIVPNEKKFFMQSTDAIQAEELYTFGGQDPSIITPSTDKSIYDKVLQNFRGIVDRLNKVLVCISDPNININIYKNKFKDKYKFVEDSEGKYSIDVESFDKLYKSLMFGFTETNIAENYKIKTRASYFSDSLPPVKIKNLLDNEIYTIEEGFNISDKDMEKEYRGQNKAINKQAYEEISKEHLAVYKIQMCKSVK

SEQ ID NO: 9687 - protein, 442 aa, Clostridium botulinum
MTWPVKDFNYSDPVNDNDILYLRIPQNKLITTPVKAFMITQNIWVIPERFSSDTNPSLSKPPRPTSKYQSYYDPSYLSTDEQKDTFLKGIIKLFKRINERDIGKKLINYLVVGSPFMGDSSTPEDTFDFTRHTTNIAVEKFENGSWKVTNIITPSVLIFGPLPNILDYTASLTLQGQQSNPSFEGFGTLSILKVAPEFLLTFSDVTSNQSSAVLGKSIFCMDPVIALMHELTHSLHQLYGINIPSDKRIRPQVSEGFFSQDGPNVQFEELYTFGGLDVEIIPQIERSQLREKALGHYKDIAKRLNNINKTIPSSWISNIDKYKKIFSEKYNFDKDNTGNFVVNIDKFNSLYSDLTNVMSEVVYSSQYNVKNRTHYFSRHYLPVFANILDDNIYTIRDGFNLTNKGFNIENSGQNIERNPALQKLSSESVVDLFTKVCLRLTK

SEQ ID NO: 9688 - protein, 104 aa, Homo sapiens
PKANPTVTLFPPSSEELQANKATLVCLISDFYPGAVTVAWKADGSPVKAGVETTKPSKQSNNKYAASSYLSLTPEQWKSHRSYSCQVTHEGSTVEKTVAPTECS

SEQ ID NO: 9689 - protein, 216 aa, Bos sp.
QAVLNQPSSVSGSLGQRVSITCSGSSSNVGNGYVSWYQLIPGSAPRTLIYGDTSRASGVPDRFSGSRSGNTATLTISSLQAEDEADYFCASAEDSSSNAVFGSGTTLTVLGQPKSPPSVTLFPPSTEELNGNKATLVCLISDFYPGSVTVVWKADGSTITRNVETTRASKQSNSKYAASSYLSLTSSDWKSKGSYSCEVTHEGSTVTKTVKPSECS

SEQ ID NO: 9690 - protein, 212 aa, Artificial Sequence
  source: /note="Description of Artificial Sequence: Synthetic polypeptide"
QVLTQTASPVSAAVGGTVTISCQSSQSVENGNWLAWYQQKPGQPPKLLIYLASTLESGVPSRFKGSGSGTQFTLTISGVQCDDAATYYCQGAYSGINVFGGGTEVVVKRTPVAPTVLLFPPSSDEVATGTVTIVCVANKYFPDVTVTWEVDGTTQTTGIENSKTPQNSADCTYNLSSTLTLTSTQYNSHKEYTCKVTQGTTSVVQSFSRKNC

SEQ ID NO: 9691 - protein, 212 aa, Artificial Sequence
  source: /note="Description of Artificial Sequence: Synthetic polypeptide"
QVLTQTPSPVSAAVGGAVTINCQSSQSVENGNWLGWYQQKPGQPPKLLIYLASTLASGVPSRFTGSGSGTQFTLTISGVQCDDAATYYCQGAYSGINAFGGGTEVVVKRTPVAPTVLLFPPSSDEVATGTVTIVCVANKYFPDVTVTWEVDGTTQTTGIENSKTPQNSADCTYNLSSTLTLTSTQYNSHKEYTCKVTQGTTSVVQSFSRKNC

SEQ ID NO: 9692 - protein, 104 aa, Artificial Sequence
  source: /note="Description of Artificial Sequence: Synthetic polypeptide"
RTPVAPTVLLFPPSSDEVATGTVTIVCVANKYFPDVTVTWEVDGTTQTTGIENSKTPQNSADCTYNLSSTLTLTSTQYNSHKEYTCKVTQGTTSVVQSFSRKNC

SEQ ID NO: 9693 - protein, 107 aa, Artificial Sequence [sequence omitted]

SEQ ID NO: 9694 - protein, 122 aa, Llama glama
AVQESGPGLVKPSQTLSLTCTVSGGSITTKYYYWNWIRQPPGKGLEWMGAIAYSGTTYYSPSLESRTSISRDTSKNQFTLQLSSVTPEDTAVYYCARGVYSGSYYYRYLEVWGRGTLVTVSS

SEQ ID NO: 9695 - protein, 119 aa, Llama glama
ELQLVESGGGLVQPGGSLRLSCAASGFTFSSNAMTWVRQAPGKGLEWVSAISSTGNSITEADSVKGRFTISRDNAKNMLYLQMNSLKPEDTAVYYCAKLGGDTWYMEYWGQGTQVTVSS

SEQ ID NO: 9696 - protein, 122 aa, Llama glama
ELQLVESGGGLVQPGGSLRLSCAASGSTFSTAAMSWVRQAPGKGLEWVSAISSFGASTSYADSVKGRFTISRDIAKNTLYLQMNSLKPEDAAVYYCANVGLHPSWGFTSGFWGQGTQVTVSS

SEQ ID NO: 9697 - protein, 118 aa, Llama glama
ELQLVESGGGLVQPGGSLRLSCATSGFTFSNYYMSWVRQAPGKGPEWVSSIYSDLSTTYYADSVKGRFTISRDRAKNTLYLQMNSLKSEDTAVYYCARLSTVAGVDYWGKGTLVTVSS

SEQ ID NO: 9698 - protein, 119 aa, Llama glama
ELQLVESGGGLVQPGGSLTLSCAASGFTFSSNAMTWVRQAPGKGLEWVSAISSTGNSITEADSVKGRFTISRDNAKNMLYLQMNSLKPEDTAVYYCAKLGGDTWYMEYWGQGTQVTVSS

SEQ ID NO: 9699 - protein, 119 aa, Llama glama
ELQLVESGGGLVRPGGSLRVSCAASGFTFSKNAMSWVRQAPGKGLEWVSAISGSAKTTTYADSVKGRFTISRDNAKNTLNLQMNSLNVEDTAVYYCAKSDSDTWYFGSWGQGTQVTVSS

SEQ ID NO: 9700 - protein, 113 aa, Llama glama
ELQVVESGGGLVPGGSLRLSCAASGFRVSVNAMSWVRQAPGKGLEWVSHIGSGGITGYADSVKGRFTISRDSAKNTLYLQMNSLKPEDTAVYYCTKRSSGYAWGQGTQVTVSS

SEQ ID NO: 9701 - protein, 119 aa, Llama glama
ELQVVESGGGLVQPGGSLRLSCAASGFTFSSNAMTWVRQAPGKGLEWVSAISSTGNSITEADSVKGRFTISRDNAKNMLYLQMNSLKPEDTAVYYCAKLGGDTWYMEYWGQGTQVTVSS

SEQ ID NO: 9702 - protein, 115 aa, Llama glama
ESGGGLVQPGGSLRLSCATSGFTFSGYWMYWVRQAPGKGLEWVSSINTFSGTTIYADSVKGRFTISRDNAKNTLYLQINSLKPEDTALYYCARAYDLGYTVFRSWGQGTQVTVSS

SEQ ID NO: 9703 - protein, 118 aa, Llama glama
EVQLQESGGGLVQPGGSLRLSCATSGFTFSNYYMSWVRQAPGKGPEWVSSIYSDLSTTYYADSVKGRFTISRDRAKNTLSLQMNSLKSEDTAVYYCARLSTVAGVDYWGKGTLVTVSS

SEQ ID NO: 9704 - protein, 119 aa, Llama glama
EVQLQESGGGSVQPGGSLRLSCAASGFTFSANAMTWVRQAPGKGLEWVSAISGTGASTSYADSVKGRFTVSRDNAKNTLYLQVNNLKPEDTAVYRCAKLGGDTWYMEYWAKGTLVTVSS

SEQ ID NO: 9705 - protein, 118 aa, Llama glama
EVQLVESEGGSVQPGDSLRLSCAASGFSFSNAGMSWVRQAPGKGLEWVSAIIPGGYAPYYADSVKGRFTISRDNAKNTVSLQMNSLKPEDTALYYCAKYGGNWDLEVWGQGTLVTVSS

SEQ ID NO: 9706 - protein, 119 aa, Llama glama
EVQLVESGGGLVQPGGSLRLSCAASGFTFSRNAMTWVRQAPGKGLEWVSAISSTGNSITEADSVKGRFTISRDNAKNMLYLQMNSLKPEDTAVYYCAKLGGDTWYMEYWGQGTQVTVSS

SEQ ID NO: 9707 - protein, 119 aa, Llama glama
EVQLVESGGGLVQPGGSLRLSCAASGFTFSSNAMTWVRQAPGKGLEWVSAISSTGNSITEADSVKGRFTISRDNAKNMLYLQMNSLKPEDTAVYYCAKLGGDTWYMEYWGQGTQVTVSS

SEQ ID NO: 9708 - protein, 121 aa, Llama glama
EVQLVESGGGLVQPGGSLRLSCATSGFTFSNHYMSWVRQAPGKGLEWVSSIYSDGSDGGTTYYADSVKGRFTISRDRAKNTLSLQMNSLKSEDTAVYYCARLSTVAGMDYWGKGTLVTVSS

SEQ ID NO: 9709 - protein, 118 aa, Llama glama
EVQLVESGGGLVQPGGSLRLSCATSGFTFSNYYMSWVRQAPGKGPEWVSSIYSDLSTTYYADSVKGRFTISRDRAKNTLYLQMNSLKSEDTAVYYCARLSTVAGMDYWGKGTLVTVSS

SEQ ID NO: 9710 - protein, 130 aa, Llama glama
EVQLVQPGAELRNPGASVKVSCKASGYTFTAYYIDWVRQAPGQGLEWMGRIDPEDGGTTYEQKFQGRVTFTADTSTSTVYVELSSLRSEDTAVYYCARSTEIPTIRYYGMDYWGKGTPVTVSSASAAASG

SEQ ID NO: 9711 - protein, 123 aa, Llama glama
EVQLVQPGAELRNPGASVKVSCKASGYTFTSHYIDWVRQAPGQGLEWMGRIDPEDGGTTYEQKFQGRVTFTADTSTSTVYVELSSLRSEDTAVYYCARSTEIPTIRYYGMDYWGKGTPVTVSS

SEQ ID NO: 9712 - protein, 119 aa, Llama glama
EVQVQESGGGLVQPGGSLRLSCAASGFTFSSNAMTWVRQAPGKGLEWVSAISSTGNSITEADSVKGRFTISRDNAKNMLYLQMNSLKPEDTAVYYCAKLGGDTWYMEYWGQGTQVTVSS

SEQ ID NO: 9713 - protein, 118 aa, Llama glama
EVQVQESGGGLVQPGGSLRLSCATSGFTFSNYYMSWVRQAPGKGPEWVSSIYSDLSTTYYADSVKGRFTISRDRAKNTLYLQMNSLKSEDTAVYYCARLSTVAGVDYWGKGTLVTVSS

SEQ ID NO: 9714 - protein, 122 aa, Llama glama
EVQVQESGPGLVKPSQTLSLTCTVSGESITTNYYYWNWIRQPPGKALEWMGAIGDSGTTWYNPSLKSRTSISRDTSKNQFTLQLISVTPEDTAVYYCARGFYDGSSLDFASWGQGTQVTVSS

SEQ ID NO: 9715 - protein, 126 aa, Llama glama
EVQVQESGPGLVKPSQTLSLTCTVSGGSITTDYSYWSWIRQPPGKGLEWMGAIAFSDTTYYSPSLKSRTSISRDTSKNQFTLQLSSVTPEDTAVYYCARLSTVAGMDYWGKGTLVTVSSASAAASG

SEQ ID NO: 9716 - protein, 113 aa, Llama glama
GGGLVQPGGSLILSCAASGFTFSTYAMNWVRQAPGKGPEWVSSIARGGGSAYYADSMKGRFAISRDDAKNTLYLQMNSLKPEDTAVYYCSTNGVDGNWAFDYWGQGTQVTISS

SEQ ID NO: 9717 - protein, 114 aa, Llama glama
GGGLVQPGGSLRLSCAASGFAFSSAWMLWVRHSPGTGLEWVSGINTQTGTTYYADSVKGRFTISRDNAKNTLSLQMNSLKLEDTAVYYCAIVVYTLAPDGYDYWGQGTQLTVSS

SEQ ID NO: 9718 - protein, 112 aa, Llama glama
GGGLVQPGGSLRLSCAASGFTFSNLGMHWVRQAPGKGLEWVSAINAGGSTTYYTDSVKGRFTISRDNAKNTLYLQMNSLKPEDTAVYHCAKLGGDTWYVDYWAKGTLVTVSS

SEQ ID NO: 9719 - protein, 114 aa, Llama glama
GGSLVQPGGSLKLSCAASGFTFSSSWMYWVPQAPGKGLEWVSTIDSDGTNTYYADSVKGRFTISRDNAKNTLYLQMNSLKSEDTAVYYCLKISDYGIYWGQGTWGQGTQVTVSS

SEQ ID NO: 9720 - protein, 113 aa, Llama glama
GVGGGFVQPGGSLRLSCAASGFAFSGYAMSWVRQAPGEGLEWVAAIDSAGGNTTYVDSVKGRFTISRDNAKNTLYLQMNNLTYEDTGVYYCTRPPMGISPNYWGQGIQVTVSS

SEQ ID NO: 9721 - protein, 113 aa, Llama glama
GVGGGLVQPGGSLRLSCAGSGFTFSTAWMYWVRQAPGKGLEWVSGINTVNSDGTYYARSVKGRFTISRDNARNTVYLQMNALEPEDTALYYCARESVTTGWDWGQGTQVTVSS

SEQ ID NO: 9722 - protein, 112 aa, Llama glama
GVGGGLVQPGGSLRLSCVGSGFTFDDYVLNWVRQAPGKGLEWVSTIASGAGTTYYAGSVKGRFTISRDYYKNTLYLQMNSLTPDDTAVYHCTTGSWYRYNSWGQGTQVIVSS

SEQ ID NO: 9723 - protein, 111 aa, Llama glama
LPVLTQPPSVSGTLGKTVTISCAGTSSDIGDYNYVSWYQQLPGTAPKLLIYKVSTRASGIPDRFSGSKSGNTASLTISGLQSEDEADYYCASYRTSNNVVFGGGTHLTVLG

SEQ ID NO: 9724 - protein, 107 aa, Llama glama
LPVLTQPSALSVTLGQTAKITCQGDNLGSTYVHWYQHKPGQAPVLVIYVDSRRPSGIPERFSGSNSGNTATLTITGAQAEDEADYYCQVWDSSTAVFGGGTHLTVLG

SEQ ID NO: 9725 - protein, 107 aa, Llama glama
LPVLTQPSAVSVSLGQTARITCQGGNVGSYYTSWYQQKPGQAPVLVIYKDSERPSGIPERFSGSSSGNTATLTVSGAQAEDEGDYYCQVWDSSAAVFGGGTHLTVLG

SEQ ID NO: 9726 - protein, 108 aa, Llama glama
LSYELTQSPSVSVALRQAAKITCGGNNIASKFVNWYQQKPGQAPILVISKDTNRPSGIPERFSGSNSGNTATLTVSGAQAEDEADYYCQVWDGSAAVFGGGTHLTVLG

SEQ ID NO: 9727 - protein, 117 aa, Llama glama
PGAAAGVGGGLVQPGGSLRLSCVGSGFTFDDYVLNWVRQAPGKGLEWVSTIASGAGTTYYAGSVKGRFTISRDYYKNTLYLQMNSLTPDDTAVYHCTTGSWYRYNSWGQGTQVIVSS

SEQ ID NO: 9728 - protein, 107 aa, Llama glama
PGGSLRLSCTASGFTFSSSFMNWVRQAPGKGLEWVSTINGRGIDRYYADSVKGRFGISRDNAKNTAYLQMNSLKLDDTAVYYCANLWPATVPDFGSWGQGTQVTVSS

SEQ ID NO: 9729 - protein, 112 aa, Llama glama
QAGLTQLPSVSGSPGQKITISCTGSSNNIGAGYSVQWFQQVPGSPPRLLIDGATNRDSGVPDRFSDSRSGSSASLTITGLQAEDEADYYCECYDNSLRGAVFGGGTHLTVLG

SEQ ID NO: 9730 - protein, 106 aa, Llama glama
QAGLTQLPSVSGSPGQKITISCTGSSNNIGAGYSVQWFQQVPGSPPRLLIDGATNRDSGVPDRFSDSRSGSSASLTITGLQAEDEADYYWMLQQPQGVLCSAEGPI

SEQ ID NO: 9731 - protein, 111 aa, Llama glama
QAVVTQEPSLSVSPGGTVTLTCGLNSGSVTNGNYPGWYQQTPGQAPRALIYSTNSRHSGVPGRYSGSISGNKAALTITGAEPEDEADYYCALWQAAGTVVFGGGTHLTVLG

SEQ ID NO: 9732 - protein, 111 aa, Llama glama
QAVVTQEPSLSVSPGGTVTLTCGLSSGSVTSSNYPVWYQQTPGQAPHLLIYNTNTRHSGVPSRFSGFISGNKAALTITGAQPEDEADYYCASYRRSGRAVFGGGTHLTVLG

SEQ ID NO: 9733 - protein, 115 aa, Llama glama
QLQESGPGLVKPSQTLSLTCTVSGGSITTNYYYWSWIRHTPGKGLQWMGAIAYSGSTYYNPSLKSRTSISRDTFKNQFTLQLSSVTPEDTAVYYCARDLLGPSLLGQGTQVTVSS

SEQ ID NO: 9734 - protein, 118 aa, Llama glama
QLQLVESGGGLQQPGGSLRLSCAASGFTFSSYAMGWVRQAPGKGLEWISIILNDGHRTYYTDSVKGRFTISRDNAKDTLSLQMNSLKPEDTAVYFCVKYVLNWAISDWGQGTQVTVSS

SEQ ID NO: 9735 - protein, 118 aa, Llama glama
QLQLVESGGGLVEPGGSLRLSCAASGFTFSNYYMSWVRQAPGKGPEWVSSIYSDLSTTYYADSVKGRFTISRDRAKNTLYLQMNSLKSEDTAVYYCARLSTVAGVDYWGKGTLVTVSS

SEQ ID NO: 9736 - protein, 119 aa, Llama glama
QLQLVESGGGLVQPGGSLRLSCAASGFTFSKNAMSWVRQAPGKGLEWVSVISSTGNTTAHADSVKGRFTISRDNARNIMYLQMNRLKPEDTAVYYCAKLGGATWYMDSWGQGTQVTVSS

SEQ ID NO: 9737 - protein, 119 aa, Llama glama
QLQLVESGGGLVQPGGSLRLSCAASGFTFSSNAMTWVRQAPGKGLEWVSAISSTGNSITEADSMKGRFTISRDNAKNMLYLQMNSLKPEDTAVYYCAKLGGDTWYMEYWGRGTQVTVSS

SEQ ID NO: 9738 - protein, 119 aa, Llama glama
QLQLVESGGGLVQPGGSLRLSCAASGFTFSSNAMTWVRQAPGKGLEWVSAISSTGNSITEADSVKGRFTISRDNAKNMLYLQMNSLKPEDTAVYYCAKLGGDTWYMEYWGQGTQVTVSS

SEQ ID NO: 9739 - protein, 116 aa, Llama glama
QLQLVESGGGLVQPGGSLRLSCAASGFTFSSSWMYWVRQAPGKGLEWVSSIATVSLSTYYADSVKGRLTISRDNAKNTLYLQMDSLRSDDTAVYYCARNTATWDSWGQGTQVTVSS

SEQ ID NO: 9740 - protein, 118 aa, Llama glama
QLQLVESGGGLVQPGGSLRLSCAASGGIFDVMGWYHQAPGKQRGLVASITPAGSTNYADSVKGRFTISRDNAKNTVYLQMNSLKPDDTGVYYCYADGIDPRYGGDEFWGQGTQVTVSS

SEQ ID NO: 9741 - protein, 118 aa, Llama glama
QLQLVESGGGLVQPGGSLRLSCATSGFTFSNYYMSWVRQAPGKGPEWVSSIYSDLSTTYYADSVKGRFTISRDRAKNTLYLQMNSLKSEDTAVYYCARLSTVAGVDYWGKGTLVTVSS

SEQ ID NO: 9742 - protein, 119 aa, Llama glama
QLQVVESGGGLVQPGESLRLSCAASGFTFSKNAMSWVRQAPGKGLEWVSVISSTGNTTAHADSVKGRFTISRDNARNIMYLQMNRLKPEDTAVYYCAKLGGATWYMDSWGQGTQVTVSS

SEQ ID NO: 9743 - protein, 124 aa, Llama glama
QLQVVESGGGLVQPGGSLRLSCAASGFTFDSYWMYWVRQAPGKGLEWLSAINPGGGMTYYADSVKGRFTIARDNAKNTVYLQMNSLKSEDTAVYYCAKELRGSYYYISSEYDYWGQGTQVTVSS

SEQ ID NO: 9744 - protein, 119 aa, Llama glama
QLQVVESGGGLVQPGGSLRLSCAASGFTFSRNAMTWVRQAPGKGLEWVSAISSTGNSITEADSVKGRFTISRDNAKNMLYLQMNSLKPEDTAVYYCAKLGGDTWYMEYWGQGTQVTVSS

SEQ ID NO: 9745 - protein, 119 aa, Llama glama
QLQVVESGGGLVQPGGSLRLSCAASGFTFSSNAMTWVRQAPGKGLEWVSAISSTGNSITEADSVKGRFTISRDNAKNMLYLQMNSLKPEDTAVYYCAKLGGDTWYMEYWGQGTQVTVSS

SEQ ID NO: 9746 - protein, 124 aa, Llama glama
QLQVVESGGGLVQPGGSLRLSCAASGFTFSTYVMSWVRQAPGKGLEWVSGINSGGGSTSYADSVKGRFTISRDNAKNTLYLQMNSLKPEDTAVYYCAKVGDGSAWYYYYGMDYWGQGTQVTVSS

SEQ ID NO: 9747 - protein, 118 aa, Llama glama
QLQVVESGGGLVQPGGSLRLSCATSGFTFSNYYMSWVRQAPGKGPEWVSSIYSDLSTTYYADSVKGRFTISRDRAKNTLYLQMNSLKSEDTAVYYCARLSTVAGVDYWGKGTLVTVSS

SEQ ID NO: 9748 - protein, 111 aa, Llama glama
QSALTQPPSVSGTLGKTVTISCTGTSSDIGGYNSVSWYQQLPGTAPKLLIYEVNKRASGIPDRFSGSKSGDTASLTISGLQSADEADYYCASYRNTRKSVFGGGTHLTVLG

SEQ ID NO: 9749 - protein, 108 aa, Llama glama
QSALTQPSALSVTLGQTAKITCQGGSLSNNYAHWYQQKPGQAPVMAIYDDDSRPSGIPERFSGSRSGGIATLTISGAQAEDEADYYCQVWDSSANAVFGGGTQLTVLG

SEQ ID NO: 9750 - protein, 111 aa, Llama glama
QSVLTQPPSVSGSPGKTVTISCAGTSSDVGYGNYVSWYQQLPGMAPKLLIYNANKRASGITDRFSASKSGNTASLTISGLQSGDEAVYYCASYRYRDNAVFGGGTHLTVLG

SEQ ID NO: 9751 - protein, 108 aa, Llama glama
QSVLTQPSAVSVSLGQTARITCQGGSLGSYGANWHQQKPGQAPVLLIYGDNSRPSGIPERFSGSKSGGTATLTISGAQAEDEADYYCQSFDYSGNAVFGGGTHLTVLG

SEQ ID NO: 9752 - protein, 115 aa, Llama glama
QVPLLESGGSLVPPGGSPTIPRATPGFPFHNYWMYWVPPAPGKALQWVSRFNFCGGSTYYTHSVKGIFTISRDNQKNTLYLQMNSLQPEDTALYYCRGGIVLHYWGQGTQVTVSS

SEQ ID NO: 9753 - protein, 119 aa, Llama glama
QVQLQESGGGLVQPGGSLRLSCAASGFTFSSNAMTWVRQAPGKGLEWVSAISSTGNSITEADSVKGRFTISRDNAKNMLYLQMNSLKPEDTAVYYCAKLGGDTWYMEYWGQGTQVTVSS

SEQ ID NO: 9754 - protein, 125 aa, Llama glama
QVQLQESGGGLVQPGGSLRLSCAASGFTFSWYAMSWVRQGPGKGLEWVSGINGGGGSTSYEDSVKGRFTISRDNAKNTLYLEMNSLKPEDTAVYYCARYSDGYSGSYTYTDMDYWGKGTLVSVSS

SEQ ID NO: 9755 - protein, 119 aa, Llama glama
QVQLQESGGGLVQPGGSLRLSCATSGFTFSANAMTWVRQAPGKGLEWVSAISGSGASTSYADSVKGRFTISRDNAKNTLYLQMNNLKPEDTAVYHCAKLGGDTWYMEYWAKGTLVTVSS

SEQ ID NO: 9756 - protein, 122 aa, Llama glama
QVQLQESGPGLVKPSQTLSLTCTVSGGSITTNYYYWSWIRQPPGKGLEWMGAIAYSGSTYYSPSLKSRTSISRDTSKNQFTLQLSSVTPEDTAVYYCARGYYSGSSLDFGSWGQGTQVTVSS

SEQ ID NO: 9757 - protein, 119 aa, Llama glama
QVQLVESGGGLVQPGESLRLSCAASGFTFSKNAIAWVRQAPGKGLEWVSVISSTGNTTAHADSVKGRFTISRDNARNIMYLQMNSLKPEDTAVYYCAKLGGATWYMDSWGQGTQVTVSS

SEQ ID NO: 9758 - protein, 119 aa, Llama glama
QVQLVESGGGLVQPGGSLRLSCAASGFTFSANAMTWVRQAPGKGLEWVSAISGTGATTTYTDSVKGRFTISRDNAKNTLYLQMNNLKPEDTAVYHCAKLGGDTWYMEHWAKGTLVIVSS

SEQ ID NO: 9759 - protein, 119 aa, Llama glama
QVQLVESGGGLVQPGGSLRLSCAASGFTFSRNAMTWVRQAPGKGLEWVSAISSTGNSITEADSVKGRFTISRDNAKNMLYLQMNSLKPEDTAVYYCAKLGGDTWYMEYWGQGTQVTVSS

SEQ ID NO: 9760 - protein, 119 aa, Llama glama
QVQLVESGGGLVQPGGSLRLSCAASGFTFSSNAMSWVRQAPGKGLEWVSAISASGATTAYADSVRGRFTISRDNAKNTLYLQMNSLKPDDTAVYYCAKSEGATWYYAYWGQGTQVTVSS

SEQ ID NO: 9761 - protein, 119 aa, Llama glama
QVQLVESGGGLVQPGGSLRLSCAASGFTFSSNAMTWVRQAPGKGLEWVSAISSTGNSITEADSVKGRFTISRDNAKNMLYLQMNSLKPEDTAVYYCAKLGGDTWYMEYWGQGTQVTVSS

SEQ ID NO: 9762 - protein, 116 aa, Llama glama
QVQLVESGGGLVQPGGSLRLSCAASGFTFSSNAMTWVRQAPGKGLEWVSAISSTGNSITEADSVKGRFTISRDNAKNMLYLQMNSLKPEDTAVYYCAKLGWYMEYWGQGTQVTVSS

SEQ ID NO: 9763 - protein, 125 aa, Llama glama
QVQLVESGGGLVQPGGSLRLSCAASGFTFSSYAMTWVRQAPGKGLEWVSTITSNGDSTSYADSVKGRFTISRDNAKNTLYLQMDSLKPEDTAVYYCAKLGDGSYWFYYYGMDYWGQGTQVTVTSS

SEQ ID NO: 9764 - protein, 125 aa, Llama glama
QVQLVESGGGLVQPGGSLRLSCAASGFTFSWYAMSWVRQGPGKGLEWVSAINGGGGSTSYEDSVKGRFTISRDNAKNTLYLEMNSLKPEDTAVYYCARYSDGYSGSYTYTDMDYWGKGTLVTVSS

SEQ ID NO: 9765 - protein, 118 aa, Llama glama
QVQLVESGGGLVQPGGSLRLSCATSGFTFSNYYMSWVRQAPGKGPEWVSSIYSDLSTTYYADSVKGRFTISRDRAKNTLYLQMNSLKSEDTAVYYCARLSTVAGMDYWGKGTLVTVSS

SEQ ID NO: 9766 - protein, 118 aa, Llama glama
QVQRQESGGGLVQPGGSLRLSCATSGFTFSNYYMSWVRQAPGKGPEWVSSIYSDLSTTYYADSVKGRFTISRDRAKNTLYLQMNSLKSEDTAVYYCARLSTVAGVDYWGKGTLVTVSS

SEQ ID NO: 9767 - protein, 119 aa, Llama glama
QVQVQESGGGLVQPGEFLRLSCAASGFTFSSNAMTWVRQAPGKGLEWVSAISSTGNSITEADSVKGRFTISRDNAKNMLYLQMNSLKPEDTAVYYCAKLGGDTWYMEYWGQGTQVTVSS

SEQ ID NO: 9768 - protein, 118 aa, Llama glama
QVQVQESGGGLVQPGGSLRLSCATSGFTFSNYYMSWVRQAPGKGPEWVSSIYSDLSTTYYADSVKGRFTISRDRAKNTLYLQMNSLKSEDTAVYYCARLSTVAGMDYWGKGTLVTVSS

SEQ ID NO: 9769 - protein, 118 aa, Llama glama
QVQVQESGGGLVQPGGSLRLSCATSGFTFSNYYMSWVRQAPGKGPEWVSSIYSDLSTTYYADSVKGRFTISRDRAKNTLYLQMNSLKSEDTAVYYCARLSTVAGVDYWGKGTLVTVSS

SEQ ID NO: 9770 - protein, 117 aa, Llama glama
SGPGLVKPSQTLSLTCTVSGGSITASHYYWSWIRQPPGKGLEWMGTIRYSGITYYSPSLKSRTSISRDTSTNQFHLQLSSVTPEDTAVYYCARDSGSFYGFVKYDYWGQGTQVTVSS

SEQ ID NO: 9771 - protein, 112 aa, Llama glama
SGPGLVKPSQTLSLTCTVSGGSITTNYYYWSWIRQSPGKGLEWMGAMTYTGSAYYSPSLKSRASISRDTFKNQFTLQLSSVTPEDTAVYYCARGGYSPYDYWGQGTQVTVSS

SEQ ID NO: 9772 - protein, 118 aa, Llama glama
SGPGLVKSSQTLSLTCTVSGGSITTIYHYWSWIRQPPGKGLEWMGAIHSSGSTYDSPSLKSRTSFSRDTSKNQFILQLSSVTPEDTAVYYCARGNTWGLRRGVRYDVWGQGTQVTVSS

SEQ ID NO: 9773 - protein, 111 aa, Llama glama
SSALTQPPSVSGSPGKTVTISCAGTSSDVGYGNYVSWYQQLPGMAPKLLIHDVNKRASGITDRFSGSKSGNTASLTISGLQSEDEADYYCASYRRRNEVVFGGGTHLTVLG

SEQ ID NO: 9774 - protein, 108 aa, Llama glama
SSALTQPSAVSVSLGQTARITCQGDNFGSIDPHWYQQKPGQDPVVVIYQYNNRPSGIPERFSGLKSGNTATLIISGAQAEDEADYYCQLWDSRAKAVFGGGTHLTVLG

SEQ ID NO: 9775 - protein, 108 aa, Llama glama
SSALTQPSAVSVSLGQTARITCQGDNFGSSYPHWYQQKSGQVPVLVIYQYNDRPSGIPERFSGTKSGDTATLTISGAQAEDEADYYCQVWDSSANAVFGGGTHLTVLG

SEQ ID NO: 9776 - protein, 109 aa, Llama glama
SSALTQPSAVSVSLGQTARITCQGGNLDGYYHAWYQQKPGQAPVQVIFGNNNRPSGIPERFSGSSSGGTTTLTISGAQAEDEADYYCQSYENSGYNIVFGGGTHLTVLG

SEQ ID NO: 9777 - protein, 108 aa, Llama glama
SYELTQSPRVSVALRQTAKITCGGDNIGSKSAQWYQQKPGQAPVLVIYADSRRPSGIPERFSGSNSGNTATLTISGAQAEDEADYYCQVWDSSANAVFGGGTHLTVLG

SEQ ID NO: 9778 - protein, 108 aa, Llama glama
SYELTQSPSMSVALRQTAKITCGGNNIGSKSAQWYQQKPGQAPVLVIYADNRRPSGIPERFSGSNSGNTATLTISGAQAEDEADYYCQVWDSSANAVFGRGTHLTVLG

SEQ ID NO: 9779 - protein, 107 aa, Llama glama
SYELTQSPSVSVALRQAAKITCDGDDIASKYANWYQQKPGQAPVMVIYKDNNRPSGIPERFSGSNSGNTATLTVSGAQAEDEADYYCQVWDSSAAVFGGGTHLTVLG

SEQ ID NO: 9780 - protein, 107 aa, Llama glama
SYELTQSPSVSVALRQAAKITCGGDNIASKYANWYQQKPGQAPVLVIYKDSNRPSGIPERFSGSNSGNTATLTVNGAQAEDEADYYCQVWDNSAAVFGGGTHLTVLG

SEQ ID NO: 9781 - protein, 107 aa, Llama glama
SYELTQSPSVSVALRQAAKITCGGDNIASKYANWYQQKPGQAPVLVIYKDSNRPSGIPERFSGSNSGNTATLTVSGAQAEDEADYYCQVWDSSAAVFGGGTHLTVLG

SEQ ID NO: 9782 - protein, 107 aa, Llama glama
SYELTQSPSVSVALRQAAKITCGGDNIASKYANWYQQKPGQAPVVVIYKDSNRPSGIPERFSGSNSGNTATLTVSGAQAEDEADYYCQVWDSGAAVFGGGTHLTVLG

SEQ ID NO: 9783 - protein, 107 aa, Llama glama
SYELTQSPSVSVALRQAAKITCGGDNIGSKNAHWYQQKPGQAPVLVIYADSRRPSGIPERFSGSNSGNTATLVVSGAQAEDEADYYCQVWDSSAAVFGGGTHLTVLG

SEQ ID NO: 9784 - protein, 109 aa, Llama glama
SYELTQSPSVSVALRQAAKITCGGDNMGSKSAQWYQQKPGQAPELVIYADNRRPSEIPERFSGSNSGDTATLTISGAQAEDEADYYCQVWDSGANAAVFGGGTHLTVLG

SEQ ID NO: 9785 - protein, 109 aa, Llama glama
SYELTQSPSVSVALRQAAKITCGGNDIGSKSAQWYQQKPGQAPVLVIYADSRRPSGIPERFSGSNSGNTATLTISGAQAEDEADYYCQVWDSSANAAVFGGGTHLTVLG

SEQ ID NO: 9786 - protein, 109 aa, Llama glama
SYELTQSPSVSVALRQTAKITCGGDNIGSKSAQWYQQKPGQAPVLVIYADSRRPSGIPERFSGSNSGNTATLTISGAQAEDEADYYCQVWDSSANAAVFGGGTHLTVLG

SEQ ID NO: 9787 - protein, 109 aa, Llama glama
SYELTQSPSVSVALRQTAKITCGGDNIGSKSAQWYQQKPGQAPVLVIYAGSRRPSGIPERFSGSNSGNTATLTVSGAQAEDEANYSCQVWDSSANASVFGGGTHLTVLG

SEQ ID NO: 9788 - protein, 107 aa, Llama glama
SYELTQSPSVSVALRQTAKITCGGDNIGSKYVNWYQQKPSQTPVLVIYKDSNRPSGIPERFSGSNSGNTAALTISGAQAEDEADYYCQVWDGSAAVFGGGTHLSVLG

SEQ ID NO: 9789 - protein, 109 aa, Llama glama
SYELTQSPSVSVALRQTAKITCGGNDIESKSAQWYQQKPDQAPVLVIYADDRRPSEIPERFSGSNSGDTATLTISGAQAEDEADYYCQVWDSSANAAVFGGGTHLTVLG

SEQ ID NO: 9790 - protein, 109 aa, Llama glama
SYELTQSPSVSVALRQTAKITCGGNGIGSKIVHWYQQKPGQAPVLVIYADVRRPSEIPERFSGSNSGDTATLTVSGAQAEDEADYYCQVWDSSANAAVFGGGTHLTVLG

SEQ ID NO: 9791 - protein, 109 aa, Llama glama
SYELTQSPSVSVALRQTAKITCGGNNIGDKSAQWYQQKPDQAPVLVIYADNRRPSEIPERFSGSNSGDTATLTISGAQAEDEADYYCQVWDSGANAAVFGGGTHLTVLG

SEQ ID NO: 9792 - protein, 109 aa, Llama glama
SYELTQSPSVSVALRQTAKITCGGNNIGDKSAQWYQQKPDQAPVLVIYADNRRPSEIPERFSGSNSGDTATLTISGAQAEDEADYYCQVWDVGANAAVFGGGTHLTVLG

SEQ ID NO: 9793 - protein, 108 aa, Llama glama
SYELTQSPSVSVALRQTAKITCGGNNIGSKNAHWYQQKPGQAPVLVIYKDNERSSGTPERFSGSSSGDTATLTISGAQAEDEADYYCQVWDSSANAVFGGGTHLTVLG

SEQ ID NO: 9794 - protein, 109 aa, Llama glama
SYELTQSPSVSVALRQTAKITCGGNNIGSKSAQWYQQKPGQAPVLVIYADNRRPSEIPERFSGSNSGDTATLTISGAQAEDEADYYCQVWDSSANAAVFGGGTHLTVLG

SEQ ID NO: 9795 - protein, 109 aa, Llama glama
SYELTQSPSVSVALRQTAKITCGGNNIGSKSAQWYQQKPGQAPVLVIYADSRRPSGIPEKFSGSNSGNTATLTISGAQAEDEADYYCQVWDSSANAAVFGGGTHLTVLG

SEQ ID NO: 9796 - protein, 107 aa, Llama glama
SYELTQSPSVSVALRQTAKITCGGNNIGSKSAQWYQQKPGQAPVLVIYADSRRPSGIPERFSGSNSGNTATLTISGAQAEDEADYYCQVWDSSAAVFGGGTHLTVLG

SEQ ID NO: 9797 - protein, 109 aa, Llama glama
SYELTQSPSVSVALRQTAKITCGGNNIGSKSAQWYQQKPGQAPVLVIYADSRRPSGIPERFSGSNSGNTATLTISGAQAEDEADYYCQVWDSSANAAVFGGGTHLTVLG

SEQ ID NO: 9798 - protein, 109 aa, Llama glama
SYELTQSPSVSVALRQTAKITCGGNNIGSKSAQWYQQKPGQAPVLVIYADSRRPSGIPERFSGSNSGNTATLTISGAQAEDEADYYCQVWDSSSNGAVFGGGTHLTVLG

SEQ ID NO: 9799 - protein, 109 aa, Llama glama
SYELTQSPSVSVALRQTAKITCGGNNIGSKSAQWYQQKPGQAPVLVIYADVRRPSEIPERFSGSNSGNTATLSVSGAQAEDEADYYCQVWDSSANAAVFGGGTHLTVLG

SEQ ID NO: 9800 - protein, 109 aa, Llama glama
SYELTQSPSVSVALRQTAKITCGGNNIGSKSAQWYQQKPGQAPVLVIYADYRRPSGIPERFSGSNSGNTATLTISGAQAEDEADYYCQVWDSSANAAVFGGGTHLTVLG

SEQ ID NO: 9801 - protein, 109 aa, Llama glama
SYELTQSPSVSVALRQTAKITCGGTNIGSKSAQWYQQKPGQAPMLVIYGDSRRPSGIPERFSGSNSGNTATLTISGAQAEDEADYYCQVWDSSANAAVFGGGTHLTVLG

SEQ ID NO: 9802 - protein, 109 aa, Llama glama
SYELTQSSAVSLSLGQTARITCQGDNLGRYYVNWYQQKPGQAPVQVIYGNSNRPSGIPERFSGSSSGGTATLTISGAQAEDEADYYCQTYENSGVNLVFGGGTKLTVLG

SEQ ID NO: 9803 - DNA, 342 bp, Artificial Sequence
  source: /note="Description of Artificial Sequence: Synthetic polynucleotide"
aaggtgcagctggtggagtctgggggaggcttggtacagtttggggggtccctgagactctcctgtgcagcttctggattcacctttagcagctatggtatgaactgggtccgccagactccagggaaggggctcgagtgggtctcggctattggtggaagtggtggtagcacatactacgcagactccgtgaagggccggttcaccatctccagagacaattccaagaacacgctgtatctgcaaatgactagcctgagagccgaggacacggccgtatattactgtgcgaaaggggcctacgatgtctggggccaagggaccacggtcaccgtctcctca

SEQ ID NO: 9804 - DNA, 354 bp, Artificial Sequence
  source: /note="Description of Artificial Sequence: Synthetic polynucleotide"
aaggtgcagctggtggagtctgggggaggcttggtcaagcctggggggtccctgagactctcctgtgcagcctctggattcaccttcagtgaccattacatgaactggatccgccaggctccagggaaggggctggagtgggtttcatactttagtagtaatgttaataccatatactacaccgactctgtgaagggccgattcaccatctccagggacaacgccaaaaactcactgtatctacaaatgaacagcctgagagccgaggacacggccgtatattactgtgcgaaaaggacaccagctggtccatttgactactggggccagggaaccctggtcaccgtctcctca

SEQ ID NO: 9805 - DNA, 342 bp, Artificial Sequence
  source: /note="Description of Artificial Sequence: Synthetic polynucleotide"
aaggtgcagctgttggagtctgggggaggcttggtacagtttggggggtccctgaaactctcctgtgcagcttctggattcacctttaccagctatggtatgaactgggtccgccaaactccagggaaggggctcgagtgggtctcggctattggtggaagtggtggtagcacatactacgcagactccgtgaagggccggttcaccatctccagagacaattccaagaacacgctgtatctgcaaatgactagcctgagagccgaggacacggccgtatattactgtgcgaaaggggcctacgatgtctggggccaagggaccacggtcaccgtctcctca

SEQ ID NO: 9806 - DNA, 1407 bp, Homo sapiens
atgctggccgtcggctgcgcgctgctggctgccctgctggccgcgccgggagcggcgctggccccaaggcgctgccctgcgcaggaggtggcgagaggcgtgctgaccagtctgccaggagacagcgtgactctgacctgcccgggggtagagccggaagacaatgccactgttcactgggtgctcaggaagccggctgcaggctcccaccccagcagatgggctggcatgggaaggaggctgctgctgaggtcggtgcagctccacgactctggaaactattcatgctaccgggccggccgcccagctgggactgtgcacttgctggtggatgttccccccgaggagccccagctctcctgcttccggaagagccccctcagcaatgttgtttgtgagtggggtcctcggagcaccccatccctgacgacaaaggctgtgctcttggtgaggaagtttcagaacagtccggccgaagacttccaggagccgtgccagtattcccaggagtcccagaagttctcctgccagttagcagtcccggagggagacagctctttctacatagtgtccatgtgcgtcgccagtagtgtcgggagcaagttcagcaaaactcaaacctttcagggttgtggaatcttgcagcctgatccgcctgccaacatcacagtcactgccgtggccagaaacccccgctggctcagtgtcacctggcaagacccccactcctggaactcatctttctacagactacggtttgagctcagatatcgggctgaacggtcaaagacattcacaacatggatggtcaaggacctccagcatcactgtgtcatccacgacgcctggagcggcctgaggcacgtggtgcagcttcgtgcccaggaggagttcgggcaaggcgagtggagcgagtggagcccggaggccatgggcacgccttggacagaatccaggagtcctccagctgagaacgaggtgtccacccccatgcaggcacttactactaataaagacgatgataatattctcttcagagattctgcaaatgcgacaagcctcccagtgcaagattcttcttcagtaccactgcccacattcctggttgctggagggagcctggccttcggaacgctcctctgcattgccattgttctgaggttcaagaagacgtggaagctgcgggctctgaaggaaggcaagacaagcatgcatccgccgtactctttggggcagctggtcccggagaggcctcgacccaccccagtgcttgttcctctcatctccccaccggtgtcccccagcagcctggggtctgacaatacctcgagccacaaccgaccagatgccagggacccacggagcccttatgacatcagcaatacagactacttcttccccagatag

SEQ ID NO: 9807 - DNA, 420 bp, Artificial Sequence
  source: /note="Description of Artificial Sequence: Synthetic polynucleotide"
atggaatggaactgggtcgttctcttcctcctgtcattaactgcaggtgtctatgcccagggtcagatgcagcagtctggagctgagctggtgaagcctggggcttcagtgaagctgtcctgcaagacttctggcttcaccttcagcagtagctatataagttggttgaagcaaaagcctggacagagtcttgagtggattgcatggatttatgctggaactggtggtactagctataatcagaagttcacaggcaaggcccaactgactgtagacacatcctccagcacagcctacatgcaattcagcagcctgacaactgaggactctgccatctattactgtgcaagacaagatggtaactacaggtactggtacttcgatgtctggggcgcagggaccacggtcaccgtctcctca

SEQ ID NO: 9808 - DNA, 5965 bp, Homo sapiens
atggcaatgttgcctcccccaggacctcagagctttgtccatttcacaaaacagtctcttgccctcattgaacaacgcattgctgaaagaaaatcaaaggaacccaaagaagaaaagaaagatgatgatgaagaagccccaaagccaagcagtgacttggaagctggcaaacagctgcccttcatctatggggacattcctcccggcatggtgtcagagcccctggaggacttggacccctactatgcagacaaaaagactttcatagtattgaacaaagggaaaacaatcttccgtttcaatgccacacctgctttatatatgctttctcctttcagtcctctaagaagaatatctattaagattttagtacactccttattcagcatgctcatcatgtgcactattctgacaaactgcatatttatgaccatgaataacccaccggactggaccaaaaatgtcgagtacacttttactggaatatatacttttgaatcacttgtaaaaatccttgcaagaggcttctgtgtaggagaattcacttttcttcgtgacccgtggaactggctggattttgtcgtcattgtttttgcgtatttaacagaatttgtaaacctaggcaatgtttcagctcttcgaactttcagagtattgagagctttgaaaactatttctgtaatcccaggcctgaagacaattgtaggggctttgatccagtcagtgaagaagctttctgatgtcatgatcctgactgtgttctgtctgagtgtgtttgcactaattggactacagctgttcatgggaaacctgaagcataaatgttttcgaaattcacttgaaaataatgaaacattagaaagcataatgaataccctagagagtgaagaagactttagaaaatatttttattacttggaaggatccaaagatgctctcctttgtggtttcagcacagattcaggtcagtgtccagaggggtacacctgtgtgaaaattggcagaaaccctgattatggctacacgagctttgacactttcagctgggccttcttagccttgtttaggctaatgacccaagattactgggaaaacctttaccaacagacgctgcgtgctgctggcaaaacctacatgatcttctttgtcgtagtgattttcctgggctccttttatctaataaacttgatcctggctgtggttgccatggcatatgaagaacagaaccaggcaaacattgaagaagctaaacagaaagaattagaatttcaacagatgttagaccgtcttaaaaaagagcaagaagaagctgaggcaattgcagcggcagcggctgaatatacaagtattaggagaagcagaattatgggcctctcagagagttcttctgaaacatccaaactgagctctaaaagtgctaaagaaagaagaacagaagaaagaaaaagaatcaaaagaagctctccagtggagaggaaaagggagatgctgagaaattgtcgaaatcagaatcagaggacagcatcagaagaaaaagtttccaccttggtgtcgaagggcataggcgagcacatgaaaagaggttgtctacccccaatcagtcaccactcagcattcgtggctccttgttttctgcaaggcgaagcagcagaacaagtctttttagtttcaaaggcagaggaagagatataggatctgagactgaatttgccgatgatgagcacagcatttttggagacaatgagagcagaaggggctcactgtttgtgccccacagaccccaggagcgacgcagcagtaacatcagccaagccagtaggtccccaccaatgctgccggtgaacgggaaaatgcacagtgctgtggactgcaacggtgtggtctccctggttgatggacgctcagccctcatgctccccaatggacagcttctgccagaggtgataatagataaggcaacttctgatgacagcggcacgaccaatcaaatacacaagaaaaggcgttgtagttcctatctcctttcagaggatatgctgaatgatcccaacctcagacagagagcaatgagtagagcaagcatattaacaaacactgtggaagaacttgaagagtccagacaaaaatgtccaccttggtggtacagatttgcacacaaattcttgatctggaattgctctccatattggataaaattcaaaaagtgtatctattttattgtaatggatccttttgtagatcttgcaattaccatttgcatagttttaaacacattatttatggctatggaacaccacccaatgactgaggaattcaaaaatgtactgctataggaaatttggtctttactggaatctttgcagctgaaatggtattaaaactgattgccatggatccatatgagtatttccaagtaggctggaatatttttgacagccttattgtgactttaagtttagtggagctctttctagcagatgtggaaggattgtcagttctgcgatcattcagactgctccgagtcttcaagttggcaaaatcctggccaacattgaacatgctgattaagatcattggtaactcagtaggggctctaggtaacctcaccttagtgttggccatcatcgtcttcatttttgctgtggtcggcatgcagctctttggtaagagctacaaagaatgtgtctgcaagatcaatgatgactgtacgctcccacggtggcacatgaacgacttcttccactccttcctgattgtgttccgcgtgctgtgtggagagtggatagagaccatgtgggactgtatggaggtcgctggtcaagctatgtgccttattgtttacatgatggtcatggtcattggaaacctggtggtcctaaacctatttctggccttattattgagctcatttagttcagacaatcttacagcaattgaagaagaccctgatgcaaacaacctccagattgcagtgactagaattaaaaagggaataaattatgtgaaacaaaccttacgtgaatttattctaaaagcattttccaaaaagccaaagatttccagggagataagacaagcagaagatctgaatactaagaaggaaaactatatttctaaccatacacttgctgaaatgagcaaaggtcacaatttcctcaaggaaaaagataaaatcagtggttttggaagcagcgtggacaaacacttgatggaagacagtgatggtcaatcatttattcacaatcccagcctcacagtgacagtgccaattgcacctggggaatccgatttggaaaatatgaatgctgaggaacttagcagtgattcggatagtgaatacagcaaagtgagattaaaccggtcaagctcctcagagtgcagcacagttgataaccctttgcctggagaaggagaagaagcagaggctgaacctatgaattccgatgagccagaggcctgtttcacagatggttgtgtatggaggttctcatgctgccaagttaacatagagtcagggaaaggaaaaatctggtggaacatcaggaaaacctgctacaagattgttgaacacagttggtttgaaagcttcattgtcctcatgatcctgctcagcagtggtgccctggcttttgaagatatttatattgaaaggaaaaagaccattaagattatcctggagtatgcagacaagatcttcacttacatcttcattctggaaatgcttctaaaatggatagcatatggttataaaacatatttcaccaatgcctggtgttggctggatttcctaattgttgatgtttctttggttactttagtggcaaacactcttggctactcagatcttggccccattaaatcccttcggacactgagagctttaagacctctaagagccttatctagatttgaaggaatgagggtcgttgtgaatgcactcataggagcaattccttccatcatgaatgtgctacttgtgtgtcttatattctggctgatattcagcatcatgggagtaaatttgtttgctggcaagttctatgagtgtattaacaccacagatgggtcacggtttcctgcaagtcaagttccaaatcgttccgaatgttttgcccttatgaatgttagtcaaaatgtgcgatggaaaaacctgaaagtgaactttgataatgtcggacttggttacctatctctgcttcaagttgcaacttttaagggatggacgattattatgtatgcagcagtggattctgttaatgtagacaagcagcccaaatatgaatatagcctctacatgtatatttattttgtcgtctttatcatctttgggtcattcttcactttgaacttgttcattggtgtcatcatagataatttcaaccaacagaaaaagaagcttggaggtcaagacatctttatgacagaagaacagaagaaatactataatgcaatgaaaaagctggggtccaagaagccacaaaagccaattcctcgaccagggaacaaaatccaaggatgtatatttgacctagtgacaaatcaagcctttgatattagtatcatggttcttatctgtctcaacatggtaaccatgatggtagaaaaggagggtcaaagtcaacatatgactgaagttttatattggataaatgtggtttttataatccttttcactggagaatgtgtgctaaaactgatctccctcagacactactacttcactgtaggatggaatatttttgattttgtggttgtgattatctccattgtaggtatgtttctagctgatttgattgaaacgtattttgtgtcccctaccctgttccgagtgatccgtcttgccaggattggccgaatcctacgtctagtcaaaggagcaaaggggatccgcacgctgctctttgctttgatgatgtcccttcctgcgttgtttaacatcggcctcctgctcttcctggtcatgttcatctacgccatctttggaatgtccaactttgcctatgttaaaaaggaagatggaattaatgacatgttcaattttgagacctttggcaacagtatgatttgcctgttccaaattacaacctctgctggctgggatggattgctagcacctattcttaacagtaagccacccgactgtgacccaaaaaaagttcatcctggaagttcagttgaaggagactgtggtaacccatctgttggaatattctactttgttagttatatcatcatatccttcctggttgtggtgaacatgtacattgcagtcatactggagaattttagtgttgccactgaagaaagtactgaacctctgagtgaggatgactttgagatgttctatgaggtttgggagaagtttgatcccgatgcgacccagtttatagagttctctaaactctctgattttgcagctgccctggatcctcctcttctcatagcaaaacccaacaaagtccagctcattgccatggatctgcccatggttagtggtgaccggatccattgtcttgacatcttatttgcttttacaaagcgtgttttgggtgagagtggggagatggattctcttcgttcacagatggaagaaaggttcatgtctgcaaatccttccaaagtgtcctatgaacccatcacaaccacactaaaacggaaacaagaggatgtgtctgctactgtcattcagcgtgcttatagacgttaccgcttaaggcaaaatgtcaaaaatatatcaagtatatacataaaagatggagacagagatgatgatttactcaataaaaaagatatggcttttgataatgttaatgagaactcaagtccagaaaaaacagatgccacttcatccaccacctctccaccttcatatgatagtgtaacaaagccagacaaagagaaatatgaacaagacagaacagaaaaggaagacaaagggaaagacagcaaggaaagcaaaaaatag

SEQ ID NO: 9809 - DNA, 351 bp, Artificial Sequence
  source: /note="Description of Artificial Sequence: Synthetic polynucleotide"
caagtgcagctggtgcagtctgggggagacttggtacagcccggcaggtccctgagactctcctgtgcagcctctggattcacctttgatgtttatgccatgcactgggtccggcaagctccagggaagggcctggagtgggtctcaggtattagttggaatagtggttacattggctatgcggactctgtgaagggccgattcaccatctccagagacaacgccaagaactccctgtatctgcaaatgaacagtctgagagctgaggacacggccttgtattactgtgcaaaagataagggtataggttttgactactggggccagggaaccctggtcaccgtctcctca

SEQ ID NO: 9810 - DNA, 357 bp, Artificial Sequence
  source: /note="Description of Artificial Sequence: Synthetic polynucleotide"
caagtgcagctggtgcagtctgggggaggcgtggtccagcctgggaggtccctgagactctcctgtgcagcctctggattcaccttcagtagctatggcatgcactgggtccgccaggctccaggcaaggggctggagtgggtggcagttatatcatatcaggaaagtaataaatactatgtagactccgtgaagggccgattcaccatctccagagacaattccaagaacacgctatatctgcaaatgaacagcctgagcgctgaggacacggctgtgtattactgtgcgcaaagtcgtggatacagctatggtctaggttactggggccagggaaccctggtcaccgtctcctca

SEQ ID NO: 9811 - DNA, 354 bp, Artificial Sequence
  source: /note="Description of Artificial Sequence: Synthetic polynucleotide"
caagtgcagctggtgcagtctgggggaggcgtggtccagcctgggaggtccctgagactctcctgtgcagcgtctggattcaccttcagtaactatggcatgcactgggtccgccaggctccaggcaaggggctggagtggttggcagttatatcatatgatggcagtaataaacactatgtagactccgtgaagggccgattcaccatttccagagacaattccaagaacacgctgtatctgcaaatgaacagcctgagagctgaggacacggctgtgcattactgtgtgagagggggcagtggctggtcctttgactcctggggccagggaaccctggtcaccgtctcctca

SEQ ID NO: 9812 - DNA, 384 bp, Artificial Sequence
  source: /note="Description of Artificial Sequence: Synthetic polynucleotide"
caagtgcagctggtgcagtctgggggaggcttggtacagcctggcaggtccctgagactctcctgtgcagcctctggattcacctttgatgattatgccatgcactgggtccggcaaactccagggaagggcctggagtgggtctcaggtattagttggaatagtggtagcataggctatgcggactctgtgaagggccgattcaccatctccagagacaacgccaagaactccctgtatctgcaaatgaacagtctgataactgaggacacggccttgtattactgtgcaaaagatatggaatattacgatattttgactggttattatagctactacattatggacgtctggggccaagggaccacggtcaccgtctcctca

SEQ ID NO: 9813 - DNA, 342 bp, Artificial Sequence
  source: /note="Description of Artificial Sequence: Synthetic polynucleotide"
caagtgcagctggtggagtctgggggaggcttggtcaagcctggagggtccctgagactctcctgtgcagcctctggattcaccttcagtgactactacataagctggatccggcaggctccagggaaggggctggagtgggtttcatacattagtagtagtggtagtaccagatactacgcagactctgtgaagggccgattcaccatctccagggacaacgccaagaactcactgtatctgcaaatgaacagcctgagagccgaggacacggccgtgtattactgtgtgagatccggaatggacgtctggggccaagggaccacggtcaccgtctcctca

SEQ ID NO: 9814 - DNA, 354 bp, Artificial Sequence
  source: /note="Description of Artificial Sequence: Synthetic polynucleotide"
caagtgcagctggtggagtctgggggaggcttggtccagcctggggggtccctgagactctcctgtgcagcctctggattcactttcagcagctatgccatgagctgggtccgccaggctccaggcaaggggctggagtgggtgtcagctattatggatgatggaggtaatacatactacgcagactctgtgaagggccggttcaccatctccagagacaattccaagaacatgctgtatctgcaaatgaacagcctgagagccgaggacacggccgtatattactgtgcgagaggacaatttttgatgtggttcgacccctggggccagggaaccctggtcaccgtctcctca

SEQ ID NO: 9815 - DNA, 372 bp, Artificial Sequence
  source: /note="Description of Artificial Sequence: Synthetic polynucleotide"
cagcagcagttgctggagtccgggggaggcctggtccagcctgagggatccctggcactcacctgcacagcttctggattctccttcagtagcggctacgacatgtgctgggtccgccagcctccagggaaggggctggagtgggtcggctgcatttatagtggtgatgataatgatattacttattacgcgagctgggcgagaggccgattcaccatctccaacccctcgtcgaccactgtgactctgcaaatgaccagtctgacagtcgcggacacggccacctatttctgtgcgcgaggtcatgctatttatgataattatgatagtgtccacttgtggggccaggggaccctcgtcaccgtctcgagc

SEQ ID NO: 9816 - DNA, 360 bp, Artificial Sequence
  source: /note="Description of Artificial Sequence: Synthetic polynucleotide"
cagctgcagctgcaggagtcgggcccaggactggtgaagtcttcggagaccctgtccctcaaatgcactgtctctggtggctccatcagcagtagtggttactactggggctggatccgccagcccccagggaagggactggagtggattgggagtatccatcgtagtgggagcaccttctacaacccgtccctcaagagtcgagtcaccatatccgttgacacgtccaagagccagttctccctgaggctgacctctgtgaccgccgcagacacgtctgtgtatttctgtgggagacacggacgagactactactacggtatggacgtctggggccaagggaccacggtcaccgtctcc

SEQ ID NO: 9817 - DNA, 360 bp, Artificial Sequence
  source: /note="Description of Artificial Sequence: Synthetic polynucleotide"
caggagcagttggtggagtccgggggaggcctggtccagcctggggcatccctgacactcacctgcacagcttctggattctccttcagtaacaccaattacatgtgctgggtccgccaggctccagggaggggcctggagtgggtcggatgcatgcccgttggttttattgccagcactttctacgcgacctgggcgaaaggccgatccgccatctccaagtcctcgtcgaccgcggtgactctgcaaatgaccagtctgacagtcgcggacacggccacctatttctgtgcgagagaaagcggtagtggctgggcgcttaacttgtggggccaagggaccctggtcaccgtctcgagc

SEQ ID NO: 9818 - DNA, 363 bp, Artificial Sequence
  source: /note="Description of Artificial Sequence: Synthetic polynucleotide"
caggtacagctgcagcagtcgggcgcaggactgttgaagccttcggagaccctgtccctcacctgcgctgtctatggtgggtccttcagtggtcactactggagctggatccggcagcccccagggaaggggctggagtggattggggaaatcaatcatagaggaagcaccaactataacccgtccctcaagagtcgagccaccatatcagtagacacgtccaagaaccagttctccctgaagctgagctctgtgaccgccgcggacacggctgtgtattactgtgcgagagagggtagtttggcagctcgtctctggtttttcgatctctggggccgtgataccctggtcactgtctcctca

SEQ ID NO: 9819 - DNA, 363 bp, Artificial Sequence
  source: /note="Description of Artificial Sequence: Synthetic polynucleotide"
caggtacagctgcagcagtggggcgcaggactgttgaagccttcggagaccctgtccctcacctgcgctgtctatggtgggtccttcagtggtcactactggacctggatccggcagcccccagggaaggggctggagtggattggggaaatcaatcatagaggaaacaccaactataacccgtccctcaagagtcgagccaccatatcagtagacacgtccaagaaccagttctccctgaagctgagctctgtgaccgccgcggacacggctgtgtattactgtgcgagagagggtagtttggcagctcgtctctggtttttcgatctctggggccgtgacaccctggtcactgtctcctca

SEQ ID NO: 9820 - DNA, 363 bp, Artificial Sequence
  source: /note="Description of Artificial Sequence: Synthetic polynucleotide"
caggtacagctgcagcagtggggcgcaggactgttgaagccttcggagaccctgtccctcacctgcgctgtctatggtgggtccttcagtggtcactactggagctggatccggcagcccccagggaaggggctggagtggattggggaaatcaatcatagaggaagcaccaactataacccgtccctcaagagtcgagccaccatatcagtagacacgtccaagaaccagttctccctgaagctgagctctgtgaccgccgcggacacggctgtgtattactgtgcgagagagggtagtttggcagctcgtctctggtttttcgatctctggggccgtgataccctggtcactgtctcctca

SEQ ID NO: 9821 - DNA, 351 bp, Artificial Sequence
  source: /note="Description of Artificial Sequence: Synthetic polynucleotide"
caggtccagctggtacagtctggagctgaggtgaagaagcctggggcctcagtgaaggtctcctgcaaggcttctggttacacctttaccacctatggtatctcctgggtgcgacaggcccctggacaagggcttgagtggatgggatggatcagcgcttacaatggtaaaacaaactatgcacagaagttccagggcagagtcaccatgaccacagacacatccacgaacacagcctacatggagctgaggagcctgagatttgacgacacggccgtgtattactgtgcgagagacggtggaactcctttttactactggggccagggaaccctggtcaccgtctcctca

SEQ ID NO: 9822 - DNA, 354 bp, Artificial Sequence
  source: /note="Description of Artificial Sequence: Synthetic polynucleotide"
caggtgcaactggtggagtctgggggaggcgtggtccagcctgagaggtccctgagactctcctgtgcagcctctggattcaccttcagtagctatggcatgcactgggtccgccaggctccaggcgaggggctggagtgggtggcagtgatatcatatgatggaagtaatacaaagtatgcagactccgtgaggggccgattcaccatctccagagacaattccaagaacatgttgtatctgcaaatgaacagcctgagagctgaagacacggctgtgttttactgtgcgaggggatatagtggctacgcttttgactactggggccagggaatcctggtcaccgtctcctca

SEQ ID NO: 9823 - DNA, 354 bp, Artificial Sequence
  source: /note="Description of Artificial Sequence: Synthetic polynucleotide"
caggtgcaactggtggagtctgggggaggcgtggtccagcctgggaggtccctgagactctcctgtgcagcctctggattcaccttcagtagttatggcatgcactgggtccgccaggctccaggcaagggactggagtgggtggcagttatatcatatgatggaaataataaacactttgcagactcagtgaagggccgattcaccatctccagagacaattccaagaacacgctgaatctacaaatgaacagcctgagagctgaggacagggctgtttattattgtgcgagaggggccagtggctttgttcttgatatctggggccaagggacaatggtcaccgtctcttca

SEQ ID NO: 9824 - DNA, 363 bp, Artificial Sequence
  source: /note="Description of Artificial Sequence: Synthetic polynucleotide"
caggtgcagctgcagcagtggggcgcaggactgttgaagccttcggagaccctgtccctcacctgcgctgtctatggtgggtccttcagtggtcactactggacctggatccggcagcccccagggaaggggctggagtggattggggaaatcaatcatagaggaaacaccaactataacccgtccctcaagagtcgagccaccatatcagtagacacgtccaagaaccagttctccctgaagctgagctctgtgaccgccgcggacacggctgtgtattactgtgcgagagagggtagtttggcagctcgtctctggtttttcgatctctggggccgtgacaccccggtcaccgtctcctca

SEQ ID NO: 9825 - DNA, 363 bp, Artificial Sequence
  source: /note="Description of Artificial Sequence: Synthetic polynucleotide"
caggtgcagctgcagcagtggggcgcaggactgttgacgccttcggagaccctgtccctcacctgcgctgtctatggtgggtccttcagtggtcactactggagctggatccgccagcccccagggaaggggctggaatggattggggaaatcaatcctagaggaagcaccaactataaaccgtccctcaagagtcgagtcaccatatcagtagacacgtccaagaaccagttctccctgaacctgaggtctgtgaccgccgcggacacggctatgtattactgtgcgagagagggtaatttggcagctcgtctctggttcttcgatctctggggccgtggcaccctggtcaccgtctcctca

SEQ ID NO: 9826 - DNA, 364 bp, Artificial Sequence
  source: /note="Description of Artificial Sequence: Synthetic polynucleotide"
caggtgcagctgcagcagtggggcgcaggactgttgacgccttcggagaccctgtccctcacctgcgctgtctatggtgggtccttcagtggtcactactggagctggatccgccagcccccagggaaggggctggaatggattggggaaatcaatcctagaggaagcaccaactataaaccgtccctcaagagtcgagtcaccatatcagtagacacgtccaagaaccagttctccctgaacctgaggtctgtgaccgccgcggacacggctatgtattactgtgcgagagagggtaatttggcagctcgtctctggttcttcgatctctggggccgtggcaccctggtcaccgtctcctcaa

SEQ ID NO: 9827 - DNA, 345 bp, Artificial Sequence
  source: /note="Description of Artificial Sequence: Synthetic polynucleotide"
caggtgcagctgcaggagtcgggcccaggactggtgaagccttcggagaccctgtccctcacctgcactgtctctggtggctccatcagtggttactactggagccggatccggcagcccccaggaaagggactggagtggattgggtatatctattacagtgggaacaccaactacgacccctccctcaagagtcgagtcaccatatctgtagacacgtccaagaaccagttctccctgaagctgaggtctgtgaccgccgcagacacggccgtatatcactgtgcgagactgggccgggcttttgatatctggggccaagggacaatggtcaccgtctcctca

SEQ ID NO: 9828 - DNA, 381 bp, Artificial Sequence
  source: /note="Description of Artificial Sequence: Synthetic polynucleotide"
caggtgcagctgctgcagtctgggggaggcttggtcaagcctggagggtccctgagactctcctgtgcagcctctggattcaccttcagtgactactacatgaactggatccgccaggctccagggaaggggctggagtgggtttcatacattagtactggtggtagtaccatatactacgcagactctgtgaagggccgattcaccatctccagggacaacgccaaaaactcactatatctgcaaatgaacagcctgagagccgacgacacggccgtatattactgtgcgagaggcgttgactccgatgactacgaggatttctactcctattacgatttggacgtctggggccaagggaccacggtcaccgtctcctca

SEQ ID NO: 9829 - DNA, 357 bp, Artificial Sequence
  source: /note="Description of Artificial Sequence: Synthetic polynucleotide"
caggtgcagctggtacagtcggggggaggcgtggtccagcctgggaggtccctgagactctcctgtgcagcctctggattcaccttcagtagctatggcatgcactgggtccgccaggctccaggcaaggggctggagtgggtggctcttatatcatatgttggaagtaataaacactatgcagactccgtgaagggccgattcaccatttccagagacaattccaaaaacacgctgtatctgcaaatgaacagcctgagagctgaggacacggctgtgtattactgtgcgaaaagtcgtggatacagctatggtctagactactggggccagggaaccctggtcactgtctcctca

SEQ ID NO: 9830 - DNA, 381 bp, Artificial Sequence
  source: /note="Description of Artificial Sequence: Synthetic polynucleotide"
caggtgcagctggtacagtctgggggaggcttggtcaagcctggagggtccctgagactctcctgtgcagcctctggattcaccttcagtgactactacatgaactggatccgccaggctccagggaaggggctggagtgggtttcatacattagtactggtggtagtaccatatactacgcagactctgtgaagggccgattcaccatctccagggacaacgccaagaactcactgtatctgcaaatgaacagcctgagagccgaggacacggccctatattactgtgcgagaggggttgactccgatgactacgaagattactactcctactacgatatggacgtctggggccaagggaccacggtcaccgtctcttca

SEQ ID NO: 9831 - DNA, 354 bp, Artificial Sequence
  source: /note="Description of Artificial Sequence: Synthetic polynucleotide"
caggtgcagctggtgcagtcggggggaggcgtggtccagcctgggaggtccctgagactctcctgtgtagcctctggattcaccttcaataactatggccttcactggttccgccaggctccaggcaagggcctggagtggttggcagttatatcatatgatggcaatgataaacactatgtagactacgtgaagggccgattcaccatttccagagacaattccagatacacactgaatctgcaaatgaacagcctgagaactgaggacacggctttgtattactgtgcgagagggggcagtggctggtcctttgactcctggggccagggaaccctggtcaccgtctcctca

SEQ ID NO: 9832 - DNA, 366 bp, Artificial Sequence
  source: /note="Description of Artificial Sequence: Synthetic polynucleotide"
caggtgcagctggtgcagtctggaactgacgtgaagaagccaggggcctcactgaaggtctcctgcgaggtttctggttacacctttgccaactatggtctcagctgggtgcgacaggcccctggacaagggcttgagtggatggggtggatcatcgcttacactactaacacaaactatgcacagaagctccaggacagagtcaccataaccacagacacatccacgagcacagcctacatggaactgaggagcctgagatctgacgacacggcggtttattactgtgcgagagtgtttagtggtaccaaccaccttaactactttgactactggggccagggaaccctggtcaccgtctcctca

SEQ ID NO: 9833 - DNA, 375 bp, Artificial Sequence
  source: /note="Description of Artificial Sequence: Synthetic polynucleotide"
caggtgcagctggtgcagtctggagctgaggtgaagaagcccggggcctcagtgaaggtctcctgcaaggcttctggttacacgtttagcaactatggtatcagctgggtgcgacaggcccctggacaagggcttgagtggatgggatggatcaacacttacaatggtgacacaaactatgcacaggagctccagggcagagtcaccatgaccacagacacatccacgaacacagcctacatggagatgaggagcctgagatctgacgacacggccgtgtattattgtgtgagagttgtagtagtaccagctgacggccactactactacggtatggacgtctggggccaagggaccacggtcaccgtctcctca

SEQ ID NO: 9834 - DNA, 342 bp, Artificial Sequence
  source: /note="Description of Artificial Sequence: Synthetic polynucleotide"
caggtgcagctggtgcagtctggagctgaggtgaagaagcctggggcctcagtgaaggtctcctgcaaggcttctggttacacctttaccagctatggtgtcagctgggtgcgacaggcccctgggcaagggcttgagtggatgggatggatcagcgcttacaatggtaacacaaactatgcacagaaactccagggcagagtcaccatgaccacagacacatccacgagcacagcctacatggagctgacgagcctgagatctgacgacacggccgtgtattactgtgcgagaaactggggagactactggggccagggaaccctggtcactgtctcctca

SEQ ID NO: 9835 - DNA, 378 bp, Artificial Sequence
  source: /note="Description of Artificial Sequence: Synthetic polynucleotide"
caggtgcagctggtgcagtctggcgctgaggtgaagaagcctggggcctcagtgaaggtctcctgcaaggcttctggttacacctttaccagctatggtatcagctgggtgcgacaggcccctggacaagggcttgagtggatgggatggatcagcgcttacaatggtaacacaaactatgcacagaagctccagggcagagtcaccatgaccacagacacatccacgagtacagtctacatggagctgaggcgcctgagatctgacgacacggccgtttattactgtgcgagagatggcagtcccactatggttactcgctactactcctacggtatggacgtctggggccaagggaccctggtcaccgtctcctca

SEQ ID NO: 9836 - DNA, 360 bp, Artificial Sequence
  source: /note="Description of Artificial Sequence: Synthetic polynucleotide"
caggtgcagctggtgcagtctggggctgacgtgaacaagcctggggcctcactgaaggtctcctgcgcagcttctggatacaccttcaccaattatgatatcaactgggtgccacaggccactggacaagggcttgagtggatgggatggatgaaccctaccagtggtaacacatgctattcacacaagttccagggcagagtcaccatgaccaggagcacctccataagcacagcctacatggagctgagcagcctgagatctgaggacacggccgtgtattactgtgcgagagatatagtgggagctcttgatgcttttgatatctggggccaagggacaatggtcaccgtctcttca

SEQ ID NO: 9837 - DNA, 354 bp, Artificial Sequence
  source: /note="Description of Artificial Sequence: Synthetic polynucleotide"
caggtgcagctggtgcagtctgggggaggcgtggtccagcctgggaggtccctgaaactctcctgtgcagcctctggattcaccttcaataattatggcatgcactgggtccgccaggctccaggcaaggggctggagtggttggcagttatatcatatgatggcaatgataaacactatgttgactccgtgaagggccgattcaccacttccaaagacaattccaagaacacgctgtatctgcaaatgaacagcctgagagttgaggacacggctgtgttttactgtgtgagagggggcagtggctggtcctttgactcctggggccagggaaccccggtcaccgtttcctca

SEQ ID NO: 9838 - DNA, 357 bp, Artificial Sequence
  source: /note="Description of Artificial Sequence: Synthetic polynucleotide"
caggtgcagctggtgcagtctgggggaggcgtggtccagcctgggaggtccctgagactctcctgtgaagcctctggattcaccttcagtagctatggcatgcactgggtccgccaggctccaggcaaggggctggagtgggtggcagttatatcatatgatggaagtaataaacactatgcagactccgtgaagggccgattcaccatctccagagacaattccaagaacacgctgtatgtgcaaatgaacagcctgagagctgaggacacggctgtgtattactgtgcgcaaagtcgtggatacagctatggtctaggctactggggccagggaaccctggtcaccgtctcctca

SEQ ID NO: 9839 - DNA, 354 bp, Artificial Sequence
  source: /note="Description of Artificial Sequence: Synthetic polynucleotide"
caggtgcagctggtgcagtctgggggaggcgtggtccagcctgggaggtccctgagactctcctgtgcagcctccggattcaccttcagtaactatggcatgcactgggtccgccaggctccaggccaggggctggagtggttggcggttatatcatatgatggcaataataaacactatgtagactccgtgaagggccgattcaccatttccagagacaattccaagagcacgctttttctgcaaatgaacagcctgagaactgaagacacgactgtgtattactgtgcgagagggggcagtggctggtcctttgactcctggggccagggaaccctggtcaccgtctcctca

SEQ ID NO: 9840 - DNA, 360 bp, Artificial Sequence
  source: /note="Description of Artificial Sequence: Synthetic polynucleotide"
caggtgcagctggtgcagtctgggggaggcgtggtccagcctgggaggtccctgagactctcctgtgcagcctcgggattcaccttcagtagctatggcatgcactgggtccgccaggctccaggcaaggggctggagtgggtggcaattatatcatatgatggaattaataaatactatgtagactccgtgaagggccgattcaccatctccagagacaattccaagaacacgctgtatctgcaaatgaacagcctgagagctgaggacacggctgtgtatttctgtgcgaaaggggactacggtgacttcgatgcttttgatatctggggccaagggacaatggtcaccgtctcttca

SEQ ID NO: 9841 - DNA, 354 bp, Artificial Sequence
  source: /note="Description of Artificial Sequence: Synthetic polynucleotide"
caggtgcagctggtgcagtctgggggaggcgtggtccagcctgggaggtccctgagactctcctgtgcagcctctggattcaccttcagtaactatggcatgcactgggtccgccaggctccaggcaaggggctggagtggttggcagttatatcatatgatggcagtaataaacactatgtagactccgtgaagggccgattcaccatttccagggacaattccaagaatacgctgtatctgcaaatgaacagtctgagaactgaagacacggctgtgcattactgtgtgagagggggcagtggctggtcctttgactcctggggccagggaaccctggtcaccgtctcctca

SEQ ID NO: 9842 - DNA, 396 bp, Artificial Sequence
  source: /note="Description of Artificial Sequence: Synthetic polynucleotide"
caggtgcagctggtgcagtctgggggaggcgtggtccagcctgggaggtccctgagactctcctgtgcagcctctggattcaccttcagtagctatggcatgcactgggtccgccaggctccaggcaaggggctggagtgggcggcatttatttcatatgatggaagtaataaattctatgcagactccgtgaagggccgactcaccatctccagggacaattccaagaacattctgtatctgcaaatgaacagcctgagagctgaggacacggctgtatattactgtgcgaaagggggtgtagttgtaccaggtcctacacggtataactggaaccactactactactatggtatggacgtctggggccaagggaccacggtcaccgtctcctca

SEQ ID NO: 9843 - DNA, 357 bp, Artificial Sequence
  source: /note="Description of Artificial Sequence: Synthetic polynucleotide"
caggtgcagctggtgcagtctgggggaggcgtggtccagcctgggaggtccctgagactctcctgtgcagcctctggattcaccttcagtagctatggcatgcactgggtccgccaggctccaggcaaggggctggagtgggtgacagttatatcatatgatggaagtaatagaaactatgcagactccgtgaagggccgattcaccatctccagagacaattccgagaacacgctgtatctgcaaatgaacagcctgagagctgacgacacggctgtgtattactgtgcgcaaagtcgtggatacagctatggtctagggtactggggccagggaaccctggtcaccgtctcctca

SEQ ID NO: 9844 - DNA, 357 bp, Artificial Sequence
  source: /note="Description of Artificial Sequence: Synthetic polynucleotide"
caggtgcagctggtgcagtctgggggaggcgtggtccagcctgggaggtccctgagactctcctgtgcagcctctggattcaccttcagtagctatggcatgcactgggtccgccaggctccaggcaaggggctggagtgggtggcacttatatcatatgctggaattaatgaatactatgcagactccgtgaagggccgattcaccatttccagagacgattccaagaacacgctgtatctgcaaatgaacagcctgagagttgaggacacggctgtgtattactgtgcgaaaagtcgtggatacagctatggtctaggctactggggccagggaaccctggtcactgtctcctca

SEQ ID NO: 9845 - DNA, 354 bp, Artificial Sequence
  source: /note="Description of Artificial Sequence: Synthetic polynucleotide"
caggtgcagctggtgcagtctgggggaggcgtggtccagcctgggaggtccctgagactctcctgtgcagcctctggattcaccttcagtagctatggcatgcactgggtccgccaggctccaggcaaggggctggagtgggtggcagttatatcatatgatggaagtgataaaaagtatgcagactccgtgaagggccgaatcaccatctccagagacaattccaagaatacgctgtatctgcaaatgaacagcctgagagctgaggacacggctgtgtattactgtgcgaaaggggggagtgggagctcctttgactactggggccagggaatcctggtcaccgtctcctca

SEQ ID NO: 9846 - DNA, 360 bp, Artificial Sequence
  source: /note="Description of Artificial Sequence: Synthetic polynucleotide"
caggtgcagctggtgcagtctgggggaggcgtggtccagcctgggaggtccctgagactctcctgtgcagcctctggattcaccttcagtagctatggcatgcactgggtccgccaggctccaggcaaggggctggagtgggtggcagttatatcatatgatggaattaataaatactatgtagactccgtgaagggccgattcaccatctccagagacaattccaagaacacgctgtatctgcaaatgaacagcctgagaactgaggacacggctgtgtatttctgtgcgaaaggggactacggtgacttcgatgcttttgatatctggggccaagggacaatggtcaccgtctcctca

SEQ ID NO: 9847 - DNA, 357 bp, Artificial Sequence
  source: /note="Description of Artificial Sequence: Synthetic polynucleotide"
caggtgcagctggtgcagtctgggggaggcgtggtccagcctgggaggtccctgagactctcctgtgcagcctctggattcaccttcagtagctatggcatgcactgggtccgccaggctccaggcaaggggctggagtgggtggcagttatttcatatcaggaaagtaataaacactatgtagactccgtgaagggccgattcaccatctccagagacaattccaagaacacactgtatctgcaaatgaacagcctgagagctgaggacacggctgtgtattactgtgcgaaaagtcgtggatacagctatggtctaggttactggggccagggaaccctggtcaccgtctcctca

SEQ ID NO: 9848 - DNA, 357 bp, Artificial Sequence
  source: /note="Description of Artificial Sequence: Synthetic polynucleotide"
caggtgcagctggtgcagtctgggggaggcgtggtccagcctgggaggtccctgagactctcctgtgcagcctctggattcaccttcagtagctatggcatgcactgggtccgccaggctccaggcaaggggctggagtgggtggcagttatttcatatcaggaaagtaataaacactatgtagactccgtgaagggccgattcaccatctccagagacaattccaagaacacgctgtatctgcaaatgaacagcctgagagctgaggacacggctgtgtattactgtgcgaaaagtcgtggatacagctatggtctaggttactggggccagggaaccctggtcaccgtctcttca

SEQ ID NO: 9849 - DNA, 354 bp, Artificial Sequence
  source: /note="Description of Artificial Sequence: Synthetic polynucleotide"
caggtgcagctggtgcagtctgggggaggcgtggtccagcctgggaggtccctgagactctcctgtgcagcctctggattcaccttcagtagctatggcatgcactgggtccgccaggctccaggcaaggggctggagtgggtggcagttatttcatatcaggaaagtaataaacactatgtagactccgtgaagggccgattcaccatctccagagacaattccaagaacacgctgtatctgcaaatgaacagcctgagagctgaggacacggctgtgtattactgtgcgaaaagtcgtggatacagttatggtctaggttactggggccagggacccggtcacgtctcctca

SEQ ID NO: 9850 - DNA, 396 bp, Artificial Sequence
  source: /note="Description of Artificial Sequence: Synthetic polynucleotide"
caggtgcagctggtgcagtctgggggaggcgtggtccagcctgggaggtccctgagactctcctgtgcagcctctggattcaccttcagtagctatggcatgcactgggtccgccaggctccaggcaaggggctggagtgggtggcatttatatcatatgatggaagtaataaatactatgcagactccgtgaagggccgactcaccatctccagggacaattccaagaacatgctgtatctgcaaatgaacagcctgagagctgaggacacggctgtgtattactgtgcgaaagggggtgtagtagtaccaggtcctacacggtataactggaaccactactactactatggtatggacgtctggggccaagggaccacggtcaccgtctcctca

SEQ ID NO: 9851 - DNA, 396 bp, Artificial Sequence
  source: /note="Description of Artificial Sequence: Synthetic polynucleotide"
caggtgcagctggtgcagtctgggggaggcgtggtccagcctgggaggtccctgagactctcctgtgcagcctctggattcaccttcagtagctatggcatgcactgggtccgccaggctccaggcaaggggctggagtgggtggcatttatttcatatgatggaagtaataaattctatgcagactccgtgaagggccgactcaccatctccagggacaattccaagaacatgctgtatctgcaaatgaacagcctgagagctgaggacacggctgtgtattactgtgcgaaagggggtgtagtaataccaggtcctacacggtataactggaaccactactactactatggtatggacgtctggggccaagggaccacggtcaccgtctcctca

SEQ ID NO: 9852 - DNA, 354 bp, Artificial Sequence
  source: /note="Description of Artificial Sequence: Synthetic polynucleotide"
caggtgcagctggtgcagtctgggggaggcgtggtccagcctgggaggtccctgagactctcctgtgcagcctctggattcaccttcagtagctatggcattcactgggtccgccaggctccaggcaaggggctggagtgggtggcagttatatcatatgatggaagtgataaaaagtatgcagactccgtgaagggccgaatcaccatctccagagacaattccaagaatacgctgtatctgcaaatgaacagcctgagagctgaggacacggctgtgtattactgtgcgaaaggggggagtgggagctcctttgactactggggccagggaatcctggtcaccgtctcctca

SEQ ID NO: 9853 - DNA, 363 bp, Artificial Sequence
  source: /note="Description of Artificial Sequence: Synthetic polynucleotide"
caggtgcagctggtgcagtctgggggaggcgtggtccagcctgggaggtccctgagactctcctgtgcagcctctggattcaccttcagtagctatggcttgcactgggtccgccaggctccaggcaaggggctggagtgggtggcagttatatcatatgatggaagtaataaatactatgcagactccgtgaagggccgattcaccatctccagagacaattccaagaacacgctgtatctgcaaatgaacagcctgagagctgaggacacggctgtgtattactgtgcgaagcccatagcagtggcccggtactacggtatggacgtctggggccaagggaccacggtcaccgtctcctca

SEQ ID NO: 9854 - DNA, 357 bp, Artificial Sequence
  source: /note="Description of Artificial Sequence: Synthetic polynucleotide"
caggtgcagctggtgcagtctgggggaggcgtggtccagcctgggaggtccctgagactctcctgtgcagcctctggattcaccttcagtagttatggcatgcactgggtccgccaggctccaggcaaggggctggagtgggtggcacttatttcatatgctggaagcaataaacactatgcagactccgtgaagggccgattcaccatctccagagacgattccaagaacacgctttatctgcaaatgaacagcctgagagttgaggacacggctgtgtattactgtgcgaaaagtcgtggatacagctatggtctaggctactggggccagggaaccatggtcaccgtctcctca

SEQ ID NO: 9855 - DNA, 357 bp, Artificial Sequence
  source: /note="Description of Artificial Sequence: Synthetic polynucleotide"
caggtgcagctggtgcagtctgggggaggcgtggtccagcctgggaggtccctgagactctcctgtgcagcctctggattcaccttcagtagttatggcatgcactgggtccgccaggctccaggcaaggggctggagtgggtggcagttatatcatatgaaggaagtaacaaacactatgcagactccgtgaagggccgattcaccatctccagagacaattccaagaacacgttgtatctgcaaatgaacagcctgagagctgaggacacggctgtgttttactgtgcgcaaagtcgtggatacagctatggtctaggctactggggccagggaaccctggtcaccgtctcctca

SEQ ID NO: 9856 - DNA, 354 bp, Artificial Sequence
  source: /note="Description of Artificial Sequence: Synthetic polynucleotide"
caggtgcagctggtgcagtctgggggaggcgtggtccagcctgggaggtccctgagactctcctgtgcagcctctggattcaccttcagtagttatggcatgcactgggtccgccaggctccaggcaaggggctggagtgggtggcagttatatcatatgatggaagtaataaaaagtatgcagactccgtgaagggccgaatcaccatctctagagacaattccaagaatacgctgtatctgcaaatgaacagcctgagagctgaggacacggctgtgttttactgtgcgaaaggggggagtgggtactcctttgactactggggccagggaaccctggtcaccgtctcttca

SEQ ID NO: 9857 - DNA, 357 bp, Artificial Sequence
  source: /note="Description of Artificial Sequence: Synthetic polynucleotide"
caggtgcagctggtgcagtctgggggaggcgtggtccagcctgggaggtccctgagactctcctgtgcagcctctggattctccttcagtagctttggcatgcactgggtccgccaggctccaggcaaggggctggagtgggtggcagttatatcatatggtggaattaataaacactattcagactccgtgaagggccgattcaccatctccagagacgattccaagaacacgctgtatctgcaaatgaacagtttgagagctgaggacacggctgtctattactgtgcgaaaagggagggatacaggtatgcttacgactactggggccagggaaccctggtcaccgtctcctca

SEQ ID NO: 9858 - DNA, 357 bp, Artificial Sequence
  source: /note="Description of Artificial Sequence: Synthetic polynucleotide"
caggtgcagctggtgcagtctgggggaggcgtggtccagcctgggaggtccctgagactctcctgtgcagcctctggattctccttcagtagctttggcatgcactgggtccgccaggctccaggcaaggggctggagtgggtggcagttatatcatatggtggaattaataaacactattcagactccgtgaagggccggttcaccatctccagagacgattccaagaacacgctctatctgcaaatgaacagcctgagagctgaggacacggctgtctattactgtgcgaaaagggagggatacaggtatgcttacgactactggggccagggaaccctggtcaccgtctcctca

SEQ ID NO: 9859 - DNA, 357 bp, Artificial Sequence
  source: /note="Description of Artificial Sequence: Synthetic polynucleotide"
caggtgcagctggtgcagtctgggggaggcgtggtccagcctgggaggtccctgagactctcctgtgcggcctctggattcaccttcagtagctatggcatgcactgggtccgccaggctccaggcaaggggctggagtgggtggcagttatttcatatcaggaaagtaataaacactatttagactccgtgaagggccgattcaccatctccagagacaattccaagaacacgctgtatctgcaaatgaacagcctgagagctgaggacacggctgtgtattactgtgcgaaaagtcgtggatacagctatggtctaggttactggggccagggaaccctggtcaccgtctcctca

SEQ ID NO: 9860 - DNA, 357 bp, Artificial Sequence
  source: /note="Description of Artificial Sequence: Synthetic polynucleotide"
caggtgcagctggtgcagtctgggggaggcgtggtccagcctgggaggtccctgagactctcctgtgtagcctctggaatcatcttcagtagttatggcatgcactgggtccgccaggctccaggcaaggggctggagtgggtggcagttatagcatatgatggaagtaataaaaattatgtagactccgtgaagggccgattcaccatttccagagacaattccaagaacacgctgtatctgcaaatgaacagcctgagagctgaggacacggctgtgtattattgtgcgaaaagtcgtggatacagttatggtctagtctattggggccagggaaccatggtcaccgtctcctca

SEQ ID NO: 9861 - DNA, 372 bp, Artificial Sequence
  source: /note="Description of Artificial Sequence: Synthetic polynucleotide"
caggtgcagctggtgcagtctgggggaggcgtggtccagcctgggaggtccctgcgactctcctgtgaagcgtctggattcaccatcagtagctatggcatgcactgggtccgccaggctccaggcaaggggctggagtgggtggcagctatatggtatgatggaaataataaatactatgcagactccgtgaagggccgattcaccatctccagagacaagtccaggaatacgctgtatctgcaaatgaacagcctgagagccgaggatacggctgtgtattactgtgcgagagataactggaactacgaggactactactactacggtatggacgtctggggccaagggaccacggtcaccgtctcctca

SEQ ID NO: 9862 - DNA, 372 bp, Artificial Sequence
  source: /note="Description of Artificial Sequence: Synthetic polynucleotide"
caggtgcagctggtgcagtctgggggaggcgtggtccagcctgggaggtccctgcgactctcctgtgaagcgtctggattcaccatcagtagctatggcatgcactgggtccgccaggctccaggcaaggggctggagtgggtggcagttatttggtatgatggaagtaataaatactatgcagactccgtgaagggccgattcaccatctccagagacaagtccaggaatacgctgtatctgcaaatgaacagcctgagagccgaggatacggctgtgtattactgtgcgagagataactggaactacgaggactattactactacggtatggacgtctggggccaagggaccacggtcaccgtctcctca

SEQ ID NO: 9863 - DNA, 366 bp, Artificial Sequence
  source: /note="Description of Artificial Sequence: Synthetic polynucleotide"
caggtgcagctggtgcagtctgggggaggcttggtaaagcctggggggtcccttagactctcctgtgcagcctctggattcactttcagtaacgcctggatgagttgggtccgccaggctccagggaaggggctggagtggattggccgtattaaaagtaaaactgatggtgggacaacagactacgctgcacccgtgaaaggcagattcaccatttcaagagatgattcaaaaaacacgctgtatctgcaaatgaacagcctgaaaaccgaggacacagccgcatattactgtttcacagacgatttttggagtggggattatacgcactgctggggccagggaaccctggtcaccgtctcctca

SEQ ID NO: 9864 - DNA, 366 bp, Artificial Sequence
  source: /note="Description of Artificial Sequence: Synthetic polynucleotide"
caggtgcagctggtgcagtctgggggaggcttggtaaagcctggggggtcccttagactctcctgtgcagcctctggattcactttcagtgacgcctggatgacttgggtccgccaggctccaggtaaggggctggagtggattggccgtattaaaagcaaaactgatggtgggacaacagactacgctgcacccgtgaaaggcagattcaccatttcaagagatgattcaaaaaacacgctgtatctgcaaatgaacagcctgaaaaccgaggacacagccgcatattactgtttcacagacgatttttggagtggggattatacgcactgctggggccagggaaccctggtcaccgtctcctca

SEQ ID NO: 9865 - DNA, 357 bp, Artificial Sequence
  source: /note="Description of Artificial Sequence: Synthetic polynucleotide"
caggtgcagctggtgcagtctgggggaggcttggtacagccgggggggtccctgagactctcctgtgcagcctctggattcaccttaagtagttatgccatgagctgggtccgccaggctccagggaagggactggagtgggtctcaactattagtggtagtggtataatatactacacagactccgtgaagggccggttcaccatctccagagacagttccaagaacacggtgtatctgcaaatgaccagcctgagagtcgaggacacggccgtatattactgtgcgaaagatcgtggagcagcagctggagcctttgactactggggccagggaaccctggtcaccgtctcctca

SEQ ID NO: 9866 - DNA, 357 bp, Artificial Sequence
  source: /note="Description of Artificial Sequence: Synthetic polynucleotide"
caggtgcagctggtgcagtctgggggaggcttggtacagccgggggggtccctgagactctcctgtgcagcctctggattcaccttaagtagttatgccatgagctgggtccgccaggctccagggaaggggctggagtgggtctcaacttttagtggtagtggtataatatactatttagactccgtgaagggccggttcaccatctccagagacagttccaagaacacgctgtatctgcaaatgaacagcctgagagtcgaggacacggccgtattttactgtgcgaaagatcgtggagcagcagctggagcctttgactactggggccagggaaccctggtcaccgtctcctca

SEQ ID NO: 9867 - DNA, 366 bp, Artificial Sequence
  source: /note="Description of Artificial Sequence: Synthetic polynucleotide"
caggtgcagctggtgcagtctgggggaggcttggtacagcctggggggtccctgagactctcctgtgcagcctctggattcacctttagcaactatgccatgagctgggtccgccaggctccagggaaggggctggagtgggtctcagctattagtggtagtggtgataacacatactacgcagactccgtgaggggccggttcaccatctccagagacaattccaagaacacgctgtatctgcaaatgaacagtctgagagccgaggacacggccatatattactgtgcgaaagatccgcatagcagcaggtggcccgggttcttcgatctctggggccgtggcaccctggtcaccgtctcctca

SEQ ID NO: 9868 - DNA, 366 bp, Artificial Sequence
  source: /note="Description of Artificial Sequence: Synthetic polynucleotide"
caggtgcagctggtgcagtctgggggaggcttggtacagcctggggggtccctgagactctcctgtgcagcctctggattcacctttagcaactatgccatgagctgggtccgccaggctccagggaaggggctggagtgggtctcagctattagtggtagtggtgataacacatactacgcagactccgtgaggggccggttcaccatctccagagacaattccaagaacacgctgtatctgcaaatgaacagtctgagagccgaggacacggccgtatattactgtgcgaaagatccgcatagcagcaggtggcccgggttcttcgatctctggggccgtggcaccctggtcacggtctcctca

SEQ ID NO: 9869 - DNA, 342 bp, Artificial Sequence
  source: /note="Description of Artificial Sequence: Synthetic polynucleotide"
caggtgcagctggtgcagtctgggggaggcttggtacagcctggggggtccctgagactctcctgtgcagcctctggattcacctttagcagctatgccatgaactgggtccgccaggctccagggaagggactggagtgggtctcaactattagtggtagtggtggtagcacatactacgcagactccgtgaagggccggttcaccttctccagagacaattccaagaacacgctgtatctgcaaatgaacaacctgagagccgaggacacggccgtatattactgtgcgaaagtcggaggagacgtctggggccaagggaccacggtcaccgtctcctca

SEQ ID NO: 9870 - DNA, 339 bp, Artificial Sequence
  source: /note="Description of Artificial Sequence: Synthetic polynucleotide"
caggtgcagctggtgcagtctgggggaggcttggtacagcctggggggtccctgagactctcctgtgcagcctctggattcacctttagcagctatgccatgagttgggtccgccaggctcccgggaagggactggagtgggtctcagttattaatcgtagtggtggtggtacatactacgcagactccgtgaagggccggttcaccatctccagagacaattccaagaacgcgctgtatctgcaaatgaacagcctgagaaccgaggacacggccgtatattactgtgcgaaagaggtggaggactggggccagggaaccctggtcaccgtctcctca

SEQ ID NO: 9871 - DNA, 351 bp, Artificial Sequence
  source: /note="Description of Artificial Sequence: Synthetic polynucleotide"
caggtgcagctggtgcagtctgggggaggcttggtacagcctggggggtccctgagactctcctgtgcagcctctggattcacctttagcagctatgtcatgagctgggtccgccagactccagggaagggactggagtgggtctcagctattcgtactagtggtggtggcacatactacgcagactccgtgaagggccggttcaccatctccagagacaattccaagagcacgctgtatctgcaaatgaacagcctgagagccgaggactcggccgtatattactgtgcgaaagatggctacggtgcctttgactactggggccagggaaccctggtcaccgtctcctca

SEQ ID NO: 9872 - DNA, 360 bp, Artificial Sequence
  source: /note="Description of Artificial Sequence: Synthetic polynucleotide"
caggtgcagctggtgcagtctgggggaggcttggtacagcctggggggtccctgagactctcctgtgcagcctctggcttcacctttagcagctatgccatgagctgggtccgccagggtccagggaaggggctggagtgggtctcagttattagtggtagtggtggtagcacatactacgcagactccgtgaagggccggttcaccatctccagagacaattccaagaacacgctgtatctgcaaatgaacagcctgagagccgaggacacggccgtatattactgtgcgaaacatataactggaattgcggacggtatggacgtctggggccaagggaccacggtcaccgtctcctca

SEQ ID NO: 9873 - DNA, 342 bp, Artificial Sequence
  source: /note="Description of Artificial Sequence: Synthetic polynucleotide"
caggtgcagctggtgcagtctgggggaggcttggtacagtttggggggtccctgagactctcctgtgcagcttctggattcacctttagcagctatggtatgaactgggtccgccagactccagggaaggggctcgagtgggtctcggctattggtggaagtggtggtagcacatactacgcagactccgtgaagggccggttcaccatctccagagacaattccaagaacacgctgtatctgcaaatgactagcctgagagccgaggacacggccgtatattactgtgcgaaaggggcctacgatgtctggggccaagggaccacggtcaccgtctcctca

SEQ ID NO: 9874 - DNA, 381 bp, Artificial Sequence
  source: /note="Description of Artificial Sequence: Synthetic polynucleotide"
caggtgcagctggtgcagtctgggggaggcttggtcaagcctggagggtccctgagactctcctgtgcagcctctggagtcaccttcagtgactactacatgaactggatccgccaggctccagggaaggggctggagtgggtttcatacattagtactagtggtagtatcatatactacacagactctgtgaagggccgattcaccatctccagggacaacgccaagaactcactgtatctgcaaatgaacagcctgagagccgaggacacggccgtatattactgtgcgggaggggttgactccgatgactacgaggattactactcctactacgatatggacgtctggggccaagggaccacggtcaccgtctcctca

SEQ ID NO: 9875 - DNA, 381 bp, Artificial Sequence
  source: /note="Description of Artificial Sequence: Synthetic polynucleotide"
caggtgcagctggtgcagtctgggggaggcttggtcaagcctggagggtccctgagactctcctgtgcagcctctggattcaccttcagtgactactacatgaactggatccgccaggctccagggaagggactggagtgggtttcatacattagtactggtggtactaccatatactacgcagactctgtgaagggccgattcaccatctccagggacaacgccaagaactcactgtatctgcaaatgaacagcctgagagccgacgacacggccgtatattactgtgcgagaggagttgactccgatgactacgaggatttctactcctactacgatttggacgtctggggccaagggaccacggtcaccgtctcctca

SEQ ID NO: 9876 - DNA, 381 bp, Artificial Sequence
  source: /note="Description of Artificial Sequence: Synthetic polynucleotide"
caggtgcagctggtgcagtctgggggaggcttggtcaagcctggagggtccctgagactctcctgtgcagcctctggattcaccttcagtgactactacatgaactggatccgccaggctccagggaaggggctggagtgggtttcatacattagtactggtggtagtaccatatactacgcagactctgtgaagggccgattcaccatctccagggacaacgccaagaactcactgtatctgcaaatgaacagcctgagagccgaggacacggccctatattactgtgcgagaggggttgactccgatgactacgaagattactactcctactacgatatggacgtctggggccaagggaccacggtcaccgtctcctca

SEQ ID NO: 9877 - DNA, 381 bp, Artificial Sequence
  source: /note="Description of Artificial Sequence: Synthetic polynucleotide"
caggtgcagctggtgcagtctgggggaggcttggtcaagcctggagggtccctgagactctcctgtgcagcctctggattcaccttcagtgactactacatgaattggatccgccaggctccagggaaggggctggagtgggtttcatacattagtactagtggtagtaccatatactacgcggactctgtgaagggccgattcaccatctccagggacaacgccaagaactcactgtatctgcaaatgaccagcctgagagccgaggacacggccgtgtattactgtgcgagaggggttgactccagtgactacgaggattactactcctactacgatatggacgtctggggccaagggaccacggtcaccgtctcctca

SEQ ID NO: 9878 - DNA, 348 bp, Artificial Sequence
  source: /note="Description of Artificial Sequence: Synthetic polynucleotide"
caggtgcagctggtgcagtctgggggaggcttggttaagccgggggggtcccttagactctcctgtgcagcctctggattcaccttcagtaacgtctggatgagctgggtccgccaggctccagggcagggtctggagtgggttggccgtattaaaagcaaaattgatggtgggacaacagactacgctgcacccgtgaaaggcagattcttcatctcaagagatgattcaaaaaatacgctgtatctgcaaatgaatagcctgaaaaccgaggacacagccgtgtattactgtaccacagggggtgggacctactggggccagggaaccctggtcaccgtctcctca

SEQ ID NO: 9879 - DNA, 357 bp, Artificial Sequence
  source: /note="Description of Artificial Sequence: Synthetic polynucleotide"
caggtgcagctggtgcagtctgtgggaggcgtggtccagcctgggaggtccctgagactctcctgtgcagcctctggattcaccttcagtagctatggcatgcactgggtccgccaggctccaggcaaggggctggagtgggtggcacttatatcatatgctggaattaatgaatactatgcagactccgtgaagggccgattcaccatttccagagacgattccaagaacacgctgtatctgcaaatgaacagcctgagagttgaggacacggctgtgtattactgtgccaaaagtcgtggatacagctatggtctaggctactggggccagggaaccctggtcaccgtctcctca

SEQ ID NO: 9880 - DNA, 354 bp, Artificial Sequence
  source: /note="Description of Artificial Sequence: Synthetic polynucleotide"
caggtgcagctggtggaatctgggggaaccttggtacagcctggcaggtccctgagactctcctgtgcagcctctggattcacctttgatgattatgccatgcactgggtccggcaagctccagggaagggcctggagtgggtctcaggtattagttggattggaggtagaattggctatgcggactctgtgaagggccgattcaccatctccagagacaacgccaagaactccctgtatctgcaaatgaacagtctgagagctgaggacacggccttgtattactgtgtaaaagatgacaacagcagtttgggggactactggggccagggaaccctggtcaccgtctcctca

SEQ ID NO: 9881 - DNA, 354 bp, Artificial Sequence
  source: /note="Description of Artificial Sequence: Synthetic polynucleotide"
caggtgcagctggtggagtcggggggaggcgtggtccagcctgggaggtcccagagactctcctgtgcagcctctggattcaccttcagtcactatggaatgcattgggtccgccaggctccaggcaaggggctggagtgggtggcagttatatcatatgatggaaataataaacactatgcagactccgtgaagggccgattcaccacctccagagacaattccaagaatacgctgtttctgcaaatgaacagcctgagagctgaggacacggctgtgtattactgtgcccgtggatatagtggctacgtccttgactactggggccagggaaccctggtcaccgtctcctca

SEQ ID NO: 9882 - DNA, 357 bp, Artificial Sequence
  source: /note="Description of Artificial Sequence: Synthetic polynucleotide"
caggtgcagctggtggagtcggggggaggcgtggtccagcctgggaggtccctgagactctcctgtgcagcctctggattcaccttcagtagctatggcatgcactgggtccgccaggctccaggcaaggggctggagtgggtggctcttatatcatatgttggaagtaataaacactatgcagactccgtgaagggccgattcaccatttccagagacaattccaaaaacacgctgtatctgcaaatgaacagcctgagagctgaggacacggctgtgtattactgtgcgaaaagtcgtggatacagctatggtctagactactggggccagggaaccctggtcaccgtctcctca

SEQ ID NO: 9883 - DNA, 351 bp, Artificial Sequence
  source: /note="Description of Artificial Sequence: Synthetic polynucleotide"
caggtgcagctggtggagtctggagctgaggtgaagaagcctggggcctcagtgaaggtctcctgcaaggcttctggttacacctttaccacctatggtatctcctgggtgcgacaggcccctggacaagggcttgagtggatgggatggatcagcgcttacaatggtaaaacaaactatgcacagaagttccagggcagagtcaccatgaccacagacacatccacgaacacagcctacatggagctgaggagcctgagatttgacgacacggccgtgtattactgtgcgagagacggtggaactcctttttactactggggccagggaaccctggtcaccgtctcctca

SEQ ID NO: 9884 - DNA, 342 bp, Artificial Sequence
  source: /note="Description of Artificial Sequence: Synthetic polynucleotide"
caggtgcagctggtggagtctggagctgaggtgaagaagcctggggcctcagtgaaggtctcctgcaaggcttctggttacacctttaccagctatggtatcagctgggtgcgacaggcccctggacaagggcttgagtggatgggatggatcagcggttacaatggtaacacaaaatatgcacagaaggtccagggcagagtcaccatgaccacagacgcatccacgagcacagcctacatggagctgaggagcctgagatctgacgacacggccgtgtattactgtgcgagaaactggggagactactggggccagggaaccctggtcaccgtctcctca

SEQ ID NO: 9885 - DNA, 351 bp, Artificial Sequence
  source: /note="Description of Artificial Sequence: Synthetic polynucleotide"
caggtgcagctggtggagtctggggcaggcgtgatcaaccctggggcgtccctgatactctcctgtgcagcttctggatacaccttcactagctaccatattcactgggtgcgacaggcccctggccaggggctggagtggatgggatggataaaccataacggtggtgacaaaaactatgcacactattttcagggccgggtcaccttgaccagagacacttccaacaccacactctacctggaattgaacaggctgagatctgacgacacggctgtgtattactgtgcgaaagacgggatcggaaactttgactactggggccagggaaccctggtcaccgtctcctcc

SEQ ID NO: 9886 - DNA, 360 bp, Artificial Sequence
  source: /note="Description of Artificial Sequence: Synthetic polynucleotide"
caggtgcagctggtggagtctgggggagacttggtacagcctggggggtccctgagactctcctgtgcagcctctggattcacctttagcagctatgccatgagttgggtccgccaggctccagggaaggggctggaatgggtctcagctattagtggtagtggtgattacacatactacgcagactccgtgaagggccggttcaccatctccagagacaattccaagaacacgctgtatctgcaaatgaacagcctgagagccgaggacacggccgtatattactgtgcgaaatacagttatggcctctactactacttcgatctctggggccgtggcaccacggtcaccgtctcctca

SEQ ID NO: 9887 - DNA, 354 bp, Artificial Sequence
  source: /note="Description of Artificial Sequence: Synthetic polynucleotide"
caggtgcagctggtggagtctgggggaggcgtggtccaacctgggaggtccctgagactctcctgtgtagcctctggattcatcttcagtgactatggcatgcactgggtccgccaggctccaggcaaggggctggagtgggtggcagttatatcatatgatggaagtgataaaaactatgtagactccgtgaagggccgcttcaccatctccagagacaattccaagaaaacgcagtatctgcaaatgaacagcctgagagctgaggacacggctgtctattattgtgcgaaagggggcagtggctggtcctttgattactggggcccgggaaccctggtcaccgtctcctca

SEQ ID NO: 9888 - DNA, 378 bp, Artificial Sequence
  source: /note="Description of Artificial Sequence: Synthetic polynucleotide"
caggtgcagctggtggagtctgggggaggcgtggtccagcctgggaggtccctgaaactctcctgtgcagcgtctggattcaccttcagtagctatggcatgcactgggtccgccaggctccaggcaaggggctggagtgggtggcagttatatggtatgatggaagtaataaatactatgcagactccgtgaagggccgattcaccatctccagagacaattccaagaacacgctgtatctgcaaatgaacagcctgagagccgaggacacggctgtgtattactgtgcaagagatgaggggcgggggttcgggacgtactactactactacggtatggacgtctggggccaagggaccacggtcaccgtctcctca

SEQ ID NO: 9889 - DNA, 381 bp, Artificial Sequence
  source: /note="Description of Artificial Sequence: Synthetic polynucleotide"
caggtgcagctggtggagtctgggggaggcgtggtccagcctgggaggtccctgagactctcctgtacagcgtctggattcaccttcagtgtctatggcatacactgggtccgccaggctccaggcaaggggctggagtgggtggcagttatatggtatgatggaagtaataaatactatacagactccgtgaagggccgattcaccatctccagagacaattccaagaacacgctgtatctgcaaatgaacagcctgagagccgaggacacggctctatattactgtgcgagagagggggatcttagcagctcgtccggctccgggggctaccactacgttgtggacgtctggggccaagggaccacggtcaccgtctcc

SEQ ID NO: 9890 - DNA, 354 bp, Artificial Sequence
  source: /note="Description of Artificial Sequence: Synthetic polynucleotide"
caggtgcagctggtggagtctgggggaggcgtggtccagcctgggaggtccctgagactctcctgtgcagcctctggattcaccttcaataattatggcatgcactgggtccgccaggctccaggcaaggggctggagtggttggcagttatatcatatgatggcaatgataaacactatgttgactccgtgaagggccgattcaccacttccagagacaattccaagaacacgctgtatctgcaaatgaacagcctgagagttgaggacacggctgtgttttactgtgtgagagggggcagtggctggtcctttgactcctggggccagggaaccctggtcaccgtctcctca

SEQ ID NO: 9891 - DNA, 351 bp, Artificial Sequence
  source: /note="Description of Artificial Sequence: Synthetic polynucleotide"
caggtgcagctggtggagtctgggggaggcgtggtccagcctgggaggtccctgagactctcctgtgcagcctctggattcaccttcaatgactatggcatgcactggttccgccaggctccaggcaagggactggaatggttggcagttatatcatatgatggcaatgataaacagtatgaagactccgtgaagggccgattcaccatttccagagacaattccaagaacacactgtttctgcaaatgactagtctgagagctgaggacacggctatgtatttctgtgcaagagggggcagtggctggacctttgactcctggggccagggaaccctggtcacgtctccc

SEQ ID NO: 9892 - DNA, 354 bp, Artificial Sequence
  source: /note="Description of Artificial Sequence: Synthetic polynucleotide"
caggtgcagctggtggagtctgggggaggcgtggtccagcctgggaggtccctgagactctcctgtgcagcctctggattcaccttcagtaactatggaatgcattgggtccgccaggctccaggcaaggggctggagtgggtggcagtcacatcatatgatggaagtaataaacactatgcagactccgtgaagggccgattcagcacctccagagacaatcccaagaacacgctgtatctgcaaatggacagcctgagaggtgaggacacggctgtgtattactgtgcccgtggatatagtggcttcgtccttgacaactggggccagggaaccctggtcaccgtctcctca

SEQ ID NO: 9893 - DNA, 354 bp, Artificial Sequence
  source: /note="Description of Artificial Sequence: Synthetic polynucleotide"
caggtgcagctggtggagtctgggggaggcgtggtccagcctgggaggtccctgagactctcctgtgcagcctctggattcaccttcagtagctatggcatgcactgggtccgccaggctccaggcaagggactggagtgggtggcagttatatcgtatgatggaagtgataaaaaatatgcagactctgtgaagggccgattcaccatcgccagagacaattccaaaagcacgctgcatctgcaaatgaacagcctgagagttgaggacacggctgtgttttattgtgtgagagggggcaggggatttgtttttgatatgtggggccaagggacaatggtcaccgtctcttca

SEQ ID NO: 9894 - DNA, 357 bp, Artificial Sequence
  source: /note="Description of Artificial Sequence: Synthetic polynucleotide"
caggtgcagctggtggagtctgggggaggcgtggtccagcctgggaggtccctgagactctcctgtgcagcctctggattcaccttcagtagctatggcatgcactgggtccgccaggctccaggcaaggggctggaatgggtggctgttatttcatatcaggaaagtaataaacactatgtagactccgtgaagggccgattcaccatctccagagacaattccaagaacacgctgtatctgcaaatgaacagcctgagagctgaggacacggctgtgtattactgtgcgcaaagtcgtggatacagctatggtctaggttactggggccagggaaccctggtcaccgtctcctca

SEQ ID NO: 9895 - DNA, 354 bp, Artificial Sequence
  source: /note="Description of Artificial Sequence: Synthetic polynucleotide"
caggtgcagctggtggagtctgggggaggcgtggtccagcctgggaggtccctgagactctcctgtgcagcctctggattcaccttcagtagctatggcatgcactgggtccgccaggctccaggcaaggggctggagtgggtgacagttatatcatatgatggaagtgataaatactatgcagactccgtgaagggccgattcaccatctccagagacaattccaagaacacgctgtatctgcaaatgaacagcctgagagctgaggacacggctatgtattactgtgtgaaagggggcagtggctggtcctttgactactggggccagggaaccctggtcaccgtctcctca

SEQ ID NO: 9896 - DNA, 354 bp, Artificial Sequence
  source: /note="Description of Artificial Sequence: Synthetic polynucleotide"
caggtgcagctggtggagtctgggggaggcgtggtccagcctgggaggtccctgagactctcctgtgcagcctctggattcaccttcagtagctatggcatgcactgggtccgccaggctccaggcaaggggctggagtgggtggcagtcatatcgtatgatggaaatgataaaaaatatgcagactccgtgaagggccgattcaccatctccagagacaattccaagagcacgctgtatctgcaaatgaacaccctgagagatgaggacacggctattttttactgtgcgaaagggggcaggggatttgcttttgatatctggggccaagggacaatggtcaccgtctcttca

SEQ ID NO: 9897 - DNA, 354 bp, Artificial Sequence
  source: /note="Description of Artificial Sequence: Synthetic polynucleotide"
caggtgcagctggtggagtctgggggaggcgtggtccagcctgggaggtccctgagactctcctgtgcagcctctggattcaccttcagtagctatggcatgcactgggtccgccaggctccaggcaaggggctggagtgggtggcagttatatcatatgatggaaataataaatactatgcagactccgtgaagggccgattcaccatctccagagacaattccaagaacacgctgtatctgcaaatgaacagcctgagagctgaggacacggctgtgtattactgtgcgaaaggatctgctggctacgcccttgactactggggccagggaaccctggtcaccgtctcctca

SEQ ID NO: 9898 - DNA, 357 bp, Artificial Sequence
  source: /note="Description of Artificial Sequence: Synthetic polynucleotide"
caggtgcagctggtggagtctgggggaggcgtggtccagcctgggaggtccctgagactctcctgtgcagcctctggattcaccttcagtagctatggcatgcactgggtccgccaggctccaggcaaggggctggagtgggtggcagttatttcatatcaggaaagtaataaacactatgtagactccgtgaagggccgattcaccatctccagagacaattccaagaacacgctgtatctgcaaatgaacagcctgagagctgaggacacggctgtgtattactgtgcgaaaagtcgtggatacagctatggtctaggttactggggccagggaaccctggtcaccgtctcctca

SEQ ID NO: 9899 - DNA, 357 bp, Artificial Sequence
  source: /note="Description of Artificial Sequence: Synthetic polynucleotide"
caggtgcagctggtggagtctgggggaggcgtggtccagcctgggaggtccctgagactctcctgtgcagcctctggattcaccttcagtagctatggcatgcactgggtccgccaggctccaggcaaggggctggagtgggtggcagttatttcatatcaggaaagtaataaacactatgtagactccgtgaagggccgattcaccatctccagagacaattccaagaacacgctgtatctgcaaatgaacagtttgagagctgaggacacggctgtgtattactgtgcgcaaagtcgtggatacagctatggtctaggttactggggccagggaaccctggtcaccgtctcctca

SEQ ID NO: 9900 - DNA, 357 bp, Artificial Sequence
  source: /note="Description of Artificial Sequence: Synthetic polynucleotide"
caggtgcagctggtggagtctgggggaggcgtggtccagcctgggaggtccctgagactctcctgtgcagcctctggattcaccttcagtagctatggcatgcactgggtccgccaggctccaggcaaggggctggagtgggtggcagttatttcatatcaggaaagtaataaacactatgtagactccgtgaagggccgattcaccatctccagagacaattccaagaacacgctgtttctgcaaatgaacagcctgagagctgaggacacggctgtgtattactgtgcgcaaagtcgtggatacagctttggtctaggttactggggccagggaacccggtccaccgtctcctca

SEQ ID NO: 9901 - DNA, 396 bp, Artificial Sequence
  source: /note="Description of Artificial Sequence: Synthetic polynucleotide"
caggtgcagctggtggagtctgggggaggcgtggtccagcctgggaggtccctgagactctcctgtgcagcctctggattcaccttcagtagctatggcatgcactgggtccgccaggctccaggcaaggggctggagtgggtggcatttatttcatatgatggaggtaataaattctatgcagactccgtgaagggccgactcaccatctccagggacaattccaagaacattctgtatctgcaaatgaacagcctgacagctgaggacacggctgtgtattactgtgcgaaagggggtgtagttgtaccaggtcctacacggtataactggaaccactactactactatggtatggacgtctggggccaagggaccacggtcaccgtctcctca

SEQ ID NO: 9902 - DNA, 354 bp, Artificial Sequence
  source: /note="Description of Artificial Sequence: Synthetic polynucleotide"
caggtgcagctggtggagtctgggggaggcgtggtccagcctgggaggtccctgagactctcctgtgcagcctctggattcaccttcagtagctatggcatgcactgggtccgccaggctccaggcaaggggctggagtggttggcagttatatcatatgatggcactaataaacactatgtagactccgtgaagggccgattcaccatttccagagacaattccaagaacacggtgtatctgcaaatgaacagcctaagagctgaggacacggctttatattactgtgcgagagggggcagtggctggtcctttgactcctggggccagggaaccctggtcaccgtctcctca

SEQ ID NO: 9903 - DNA, 357 bp, Artificial Sequence
  source: /note="Description of Artificial Sequence: Synthetic polynucleotide"
caggtgcagctggtggagtctgggggaggcgtggtccagcctgggaggtccctgagactctcctgtgcagcctctggattcaccttcagtagttatggcatgcactgggtccgccaggctccaggcaaggggctggagtgggtggcacttatttcatatgctggaagcaataaacactatgcagactccgtgaagggccgattcaccatctccagagacgattccaagaacacgctttatctgcaaatgaacagcctgagagttgaggacacggctgtgtattactgtgcgaaaagtcgtggatacagctatggtctaggctactggggccagggaaccctggtcactgtctcctca

SEQ ID NO: 9904 - DNA, 357 bp, Artificial Sequence
  source: /note="Description of Artificial Sequence: Synthetic polynucleotide"
caggtgcagctggtggagtctgggggaggcgtggtccagcctgggaggtccctgagactctcctgtgcagcctctggattcaccttcagtagttatggcatgcactgggtccgccaggctccaggcaaggggctggagtgggtggcagttatatcatatgaaggaagtaacaaacactatgcagactccgtgaagggccgattcaccatctccagagacaattccaagaacacgttgtatctgcaaatgaacagcctgagagctgaggacacggctgtgttttactgtgcgcaaagtcgtggatacagctatggtctaggctactggggccagggaaccctggtcaccgtctcctca

SEQ ID NO: 9905 - DNA, 354 bp, Artificial Sequence
  source: /note="Description of Artificial Sequence: Synthetic polynucleotide"
caggtgcagctggtggagtctgggggaggcgtggtccagcctgggaggtccctgagactctcctgtgcagcctctggattcaccttcagtgactatggcatgcactgggtccgccaggctccaggcaaggggctggagtgggtgtcagttatatcatatgatggaactaataaatactatgcagactccgtgaagggccgattcaccatctccagagacaattccaagaacacgctgtatctgcaaatgagcagcctgagacctgaggacacggctgtgtattactgtccgaaagggggcagtggctggtcctttgactactggggccagggaaccctggtcaccgtctcctca

SEQ ID NO: 9906 - DNA, 354 bp, Artificial Sequence
  source: /note="Description of Artificial Sequence: Synthetic polynucleotide"
caggtgcagctggtggagtctgggggaggcgtggtccagcctgggaggtccctgagactctcctgtgcagcctctggattcacgttcagtagctatggcatgcactgggtccgccaggccccaggcaaggggctggagtgggtggcagttatatcatatgatggaagtgataaaaaatatgcagactctgtgaagggccgattcaccatcgccagagacaattccaagagcacgctgcatctgcaaatgaacagcctgagagttgaggacacggctgtgttttattgtgcgagagggggcaggggatttgtttttgatatgtggggccaagggacaatggtcaccgtctcctca

SEQ ID NO: 9907 - DNA, 357 bp, Artificial Sequence
  source: /note="Description of Artificial Sequence: Synthetic polynucleotide"
caggtgcagctggtggagtctgggggaggcgtggtccagcctgggaggtccctgagactctcctgtgcagcctctggattctccttcagtagctttggcatgcactgggtccgccaggctccaggcaaggggctggagtgggtggcagttatatcatatggtggaattaataaacactattcagactccgtgaagggccggttcaccatctccagagacgattccaagaacacgctgtatctgcaaatgaacagcctgagagctgaggacacggctgtctattactgtgcgaaaagggagggatacaggtatgcttacgactactggggccagggaaccctggtcactgtctcctca

SEQ ID NO: 9908 - DNA, 363 bp, Artificial Sequence
  source: /note="Description of Artificial Sequence: Synthetic polynucleotide"
caggtgcagctggtggagtctgggggaggcgtggtccagcctgggaggtccctgagactctcctgtgcagcctctggatttatcttcagtaactatggcatgcactgggtccgccaggctccaggcaaggggctggagtgggtggcagttatagcatatgatggaagtagtaaacactatgtagactccgtgaagggccgattcaccatctccagagacaattccaagaacacgctgtatctgcaaatgaacagcctgagagctgaggacacggctgtgtattactgtgcgaagcccatagcagtggcccggtattacggtatggacgtctggggccaagggatcacggtcaccgtctcctca

SEQ ID NO: 9909 - DNA, 351 bp, Artificial Sequence
  source: /note="Description of Artificial Sequence: Synthetic polynucleotide"
caggtgcagctggtggagtctgggggaggcgtggtccagcctgggaggtccctgagactctcctgtgcagcgtctggattcaccttcagtaactatggcatgcactgggtccgccaggctccaggcaaggggctggagtgggtggcagctatatggtttgatggaagtaataagaagtatgtagactccgtgaagggccgattcaccatctccagagacaattccaagaacacactgtatctgcaaatgaacagcctgagagccggggacacggctgtatattactgtacgagggatcggagtgggagctttgactattggggccagggaaccctggtcaccgtctcctca

SEQ ID NO: 9910 - DNA, 351 bp, Artificial Sequence
  source: /note="Description of Artificial Sequence: Synthetic polynucleotide"
caggtgcagctggtggagtctgggggaggcgtggtccagcctgggaggtccctgagactctcctgtgcagcgtctggattcaccttcagtaactatggcatgcactgggtccgccaggctccaggcaaggggctggagtgggtggcagctatatggtttgatggaagtaataagaagtatgtagactccgtgaagggccgattcaccatctccagagacaattccaagaacacactgtatctgcaaatgaacagcctgagagccggggacacggctgtatattactgtacgagggatcggagtgggagctttgactattggggccagggaaccctggtcactgtctcctca

SEQ ID NO: 9911 - DNA, 360 bp, Artificial Sequence
  source: /note="Description of Artificial Sequence: Synthetic polynucleotide"
caggtgcagctggtggagtctgggggaggcgtggtccagcctgggaggtccctgagactctcctgtgcagcgtctggattcaccttcagtagctatggcatgcactgggtccgccaggctccaggcaaggggctggagtgggtggcagttatatggtatgatggaagtaataaatactatgtagactccgttaagggccgattcaccacctccagagacaattccaagaacacgctgtatctgcaaatgaacagcctgagagccgaggacacggctatgtattactgtgtgagaggaagaggcacacaggaccccctctttgacaactggggccagggaaccctggtcaccgtctcctca

SEQ ID NO: 9912 - DNA, 354 bp, Artificial Sequence
  source: /note="Description of Artificial Sequence: Synthetic polynucleotide"
caggtgcagctggtggagtctgggggaggcgtggtccagcctgggaggtccctgagactctcctgtgtagcctctggattcaccttcagtgactatggcatgcactgggtccgccaggctccaggcaaggggctggagtgggtggcagttatatcatatgatggaaataataaaaactatgcagactccgtgatgggccgcttcaccatctccagagacaattccaagaaaacgcagtatctgcaaatgaacagcctgagagctgaggacacggctgtctattactgtgcgaaagggggcagtggctggtcctttgactactggggcccgggaaccctggtcaccgtctcctca

SEQ ID NO: 9913 - DNA, 354 bp, Artificial Sequence
  source: /note="Description of Artificial Sequence: Synthetic polynucleotide"
caggtgcagctggtggagtctgggggaggcgtggtccagcctggggggtccctgagactctcctgtgcagcctctggattcaccttcagtagctatggcatgcactgggtccgccaggctccaggcaagggtctggaatgggtggcagttatatcatatgatggaagtaataaaaattatgcagactccgtgaagggccgatttaccatcttcagagacaattccaagaacacgctgtatctgttaatgaacaccttgagagctgaggacacggctgtatattattgtgcagaaaggggcagtggctggtcctttgactactggggccagggaaccctggtcaccgtctcctca

SEQ ID NO: 9914 - DNA, 357 bp, Artificial Sequence
  source: /note="Description of Artificial Sequence: Synthetic polynucleotide"
caggtgcagctggtggagtctgggggaggcttggtacagccgggggggtccctgagactctcctgtgcagcctctggattcaccttaagtagttatgccatgagctgggtccgccaggctccagggaaggggctggagtgggtctcaactattagtggtagtggtataatatactacacagactccgtgaagggccggttcaccatctccagagacagttccaagaacacgctgtatctgcaaatgaacagcctgagagtcgaggacacggccgtatattactgtgcgaaagatcgtggagcagcagctggagcctttgactactggggccagggaaccctggtcaccgtctcctca

SEQ ID NO: 9915 - DNA, 339 bp, Artificial Sequence
  source: /note="Description of Artificial Sequence: Synthetic polynucleotide"
caggtgcagctggtggagtctgggggaggcttggtacagccgggggggtccctgagactctcctgtgcagcctctggattcacctttagcagctatgccatgaactgggtccgccaggctccagggaaggggctggagtgggtctcaactattagtggtagtggtggtagcacatactacccagactccgtgaagggccggttcaccatctccagagacaattccaagaacacgttgtatctgcaaatgaacagcctgaaagccgaggacacggccgtatattactgtgcgaaagtcggaggagacgtctggggccaagggaccacggtcatgttctct

SEQ ID NO: 9916 - DNA, 354 bp, Artificial Sequence
  source: /note="Description of Artificial Sequence: Synthetic polynucleotide"
caggtgcagctggtggagtctgggggaggcttggtacagcctggcaggtccctgagaatatcctgtgtagcctctggattcagctttgatgattatgccatgcactgggtccggcaagctccagggaagggcctggagtgggtctcaggtattagttggattagtggtagaataggctatgcggactctgtgaagggccgattcaccatctccagagacaacgccaagaaatccctgtatctgcaaatgaacagtctgagaactgaggacacggccttgtattactgtgtaaaagatgacaacagcagcttgggggactactggggccagggaaccctggtcactgtctcctca

SEQ ID NO: 9917 - DNA, 354 bp, Artificial Sequence
  source: /note="Description of Artificial Sequence: Synthetic polynucleotide"
caggtgcagctggtggagtctgggggaggcttggtacagcctggcaggtccctgagactctcctgtgcagcctctggattcacctttgatgattatgccatgcactgggtccggcaagctccagggaagggcctggagtgggtctcaggtattagttggaagagtggtaggataggctatgcggactctgtgaagggccgattcaccatctccagagacaacgccaagaactccctgtatctgcaaatgaacagtctgagacctgaggacacggccttatattactgtgcaaaagatgacggcagcagtttgggggactactggggccagggaaccctggtcactgtctcctca

SEQ ID NO: 9918 - DNA, 384 bp, Artificial Sequence
  source: /note="Description of Artificial Sequence: Synthetic polynucleotide"
caggtgcagctggtggagtctgggggaggcttggtacagcctggcaggtccctgagactctcctgtgcagcctctggattcacctttgatgattatgccatgcactgggtccggcaagttccagggaagggcctggagtgggtctcaggtattaattggaatagtggtagcataggctatgcggactctgtgaagggccgattcaccatctccagagacaacgccaagaactccctgtttctgcaaatgaacagtctgagagctgaggacacggccttgtattactgtgcgaaagatatagagtattacgatattttgactggttattatagctactacattatggacgtctggggccaagggaccacggtcaccgtctcctca

SEQ ID NO: 9919 - DNA, 357 bp, Artificial Sequence
  source: /note="Description of Artificial Sequence: Synthetic polynucleotide"
caggtgcagctggtggagtctgggggaggcttggtacagcctggggggtccctgagactctcctgtgcagcctctggattcaccttcagtagctacgacatgcactgggtccgccaagctacaggaaaaggtctggagtgggtctcagctattggtactgctggtgacacatactatccaggctccgtgaagggccgattcaccatctccagagaaaatgcctacaactccttgtatcttcaaatgaacagcctgagagccggggacacggctgtgtattactgtgcagccgagtatagcagctcgggaggggcttttgatatctggggccaagggacaatggtcaccgtctcttca

SEQ ID NO: 9920 - DNA, 363 bp, Artificial Sequence
  source: /note="Description of Artificial Sequence: Synthetic polynucleotide"
caggtgcagctggtggagtctgggggaggcttggtacagcctggggggtccctgagactctcctgtgcagcctctggattcacctttagcagctatgccatgagctgggtccgccaggctccagggaaggggctggagtgggtctcagctattagtggtagtggtggtagcacatactacgcagactccgtgaagggccggttcaccatctccagagacaattccaagaacacgctgtatctgcaaatgaacagcctgagagccgaggacacggccgtatattactgtgcgaaagccccatatagtggctacgattggtactttgactactggggccagggaaccctggtcaccgtctcctca

SEQ ID NO: 9921 - DNA, 378 bp, Artificial Sequence
  source: /note="Description of Artificial Sequence: Synthetic polynucleotide"
caggtgcagctggtggagtctgggggaggcttggtacagcctggggggtccctgagactctcctgtgcagcctctggattcacctttagcagctatggcatgagctgggtccgccaggttccagggaaggggctggagtgggtctcagctattagtggtagtggtggtagcacatactacgtagactccgtgaagggccggttcaccatctccagagacaatttcaagaacacgctgtatctgcaaatgaacagcctgagagtcgaggacacggccgtatattactgtgcgaaagatgtgggatattgtagtactaccagctgtaggggtgatgcatttgatgtctggggccaagggacaatggtcaccgtctcttca

SEQ ID NO: 9922 - DNA, 366 bp, Artificial Sequence
  source: /note="Description of Artificial Sequence: Synthetic polynucleotide"
caggtgcagctggtggagtctgggggaggcttggtacagcctggggggtccctgagactctcctgtgtagcctctggattcacctttagtagctatgccatgagctgggtccgccaggctccagggaaggggctggagtgggtctcaggtattagtggtagtggtggtaacacatactacgcagactccgtgaagggccgattcaccatctccagagacaactccgagaatacgctgtatctgcaaatgaacagcctgagagccgaggacacggccgtatatcactgtgcgaaagatccgcatagcagcaggtggcccggattcttcgatctctggggccgtggcaccctggtcactgtctcctca

SEQ ID NO: 9923 - DNA, 342 bp, Artificial Sequence
  source: /note="Description of Artificial Sequence: Synthetic polynucleotide"
caggtgcagctggtggagtctgggggaggcttggtacagtttggggggtccctgaaactctcctgtgcagcttctggattcacctttagcagctatggtatgaactgggtccgccagactccagggaaggggctcgagtgggtctcggctattggtggaagtggtggtagcacatactacgcagactccgtgaagggccggttcaccatctccagagacaattccaagaacacgctgtatctgcaaatgactagcctgagagccgaggacacggccgtatattactgtgcgaaaggggcctacgatgtctggggccaagggaccacggtcaccgtctcctca

SEQ ID NO: 9924 - DNA, 342 bp, Artificial Sequence
  source: /note="Description of Artificial Sequence: Synthetic polynucleotide"
caggtgcagctggtggagtctgggggaggcttggtacagtttggggggtccctgaaactctcctgtgcagcttctggattcacctttagcagctatggtatgaactgggtccgccagactccagggaaggggctcgagtgggtctcggctattggtggaagtggtggtagcacatactacgcagactccgtgaagggccggttcaccatctccagagacaattccaagaacacgctgtatctgcaaatgactagcctgagagccgaggacacggccgtatattactgtgcgaaaggggcctacgatgtctgggcccaagggaccacggtcaccgtctcctca

SEQ ID NO: 9925 - DNA, 342 bp, Artificial Sequence
  source: /note="Description of Artificial Sequence: Synthetic polynucleotide"
caggtgcagctggtggagtctgggggaggcttggtacagtttggggggtccctgagactctcctgtgcagcttctggattcacctttagcagctatggtatgaactgggtccgccagactccagggaaggggctcgagtgggtctcggctattggtggaagtggtggtagcacatactacgcagactccgtgaagggccggttcaccatctccagagacaattccaagaacacgctgtatctgcaaatgactagcctgagagccgaggacacggccgtatattactgtgcgaaaggggcctacgatgtctggggccaagggaccacggtcaccgtctcctca

SEQ ID NO: 9926 - DNA, 342 bp, Artificial Sequence
  source: /note="Description of Artificial Sequence: Synthetic polynucleotide"
caggtgcagctggtggagtctgggggaggcttggtacagtttggggggtccctgagactctcctgtgcagcttctggattcacctttagcagctatggtatgaactgggtccgccagagtccagggaaggggctcgagtgggtctcggctattggtggaagtggtggtagcacatactacgcagactccgtgaagggccggttcaccatctccagagacaattccaagaacacgctgtatctgcaaatgactagcctgagagccgaggacacggccgtatattactgtgcgaaaggggcctacgatgtctggggccaagggaccacggtcaccgtctcctca

SEQ ID NO: 9927 - DNA, 378 bp, Artificial Sequence
  source: /note="Description of Artificial Sequence: Synthetic polynucleotide"
caggtgcagctggtggagtctgggggaggcttggtcaagcctggagggtccctgagactctcctgtgcagcctctggagtcaccttcagtgactactacatgacctggatccgccaggctccagggaagggcctggagtgggtttcatacattagtactgatggtcgtaccatatactacgcagactctgtgaagggccgattcaccatctccagggacaacgctaagaactcactgtatctgcaaatgaacaacctgagagccgaggacacggccgtatattactgtgcgagaggggttgactccgatgactacgaggatttctactcctactacgatatggacgtctggggccaagggaccacggtcaccgtctcc

SEQ ID NO: 9928 - DNA, 348 bp, Artificial Sequence
  source: /note="Description of Artificial Sequence: Synthetic polynucleotide"
caggtgcagctggtggagtctgggggaggcttggtcaagcctggagggtccctgagactctcctgtgcagcctctggattcaccttcagtgactactacatgagctggatccgccaggctccagggaaggggctggagtgggtttcatgcataactagtagtggtggtaccaaaaaatacgcagactctgtgaagggccgattcaccatctccagggacaacgccgagaactcactttatctgcaaatgaacagcctgagagccgaggacacggccgtgtattactgtgcgagagtttcgagaggctttgaccactggggccagggaaccctggtcaccgtctcctca

SEQ ID NO: 9929 - DNA, 381 bp, Artificial Sequence
  source: /note="Description of Artificial Sequence: Synthetic polynucleotide"
caggtgcagctggtggagtctgggggaggcttggtcaagcctggagggtccctgagactctcctgtgcagcctctggattcaccttcagtgactattacatgaattggatccgccaggctccagggaaggggctggagtgggtttcatacattagtactagtggtagtaccatatactacgcagactctgtgaagggccgattcaccatctccagggacaacgccaagaactcactatatctgcaaatgaacaccctgagagccgaggacacggccgtgtattactgtgcgagaggggttgactccagtgactacgaggattactactcctactacgatttggacgtctggggccaagggaccacggtcaccgtctcctca

SEQ ID NO: 9930 - DNA, 354 bp, Artificial Sequence
  source: /note="Description of Artificial Sequence: Synthetic polynucleotide"
caggtgcaggtggtggagtctgggggaggcgtggtccagcctgggaggtccctgagactctcctgtgcagcctctggattcaccttcagtaactatggcatgcactgggtccgccaggctccaggcaaggggctggagtgggtaacagtaatatcatatgatggaagtaataaaaactatgcagactccgtgaagggccgattcaccatctccagagacaattccaagaacacgctgtatctgcaaatgaatagcctgagagctgaggacacggctatgtattactgtgcgagagggggcagtggctttgcttttgatatctggggccaagggacaatggtcaccgtctcttca

SEQ ID NO: 9931 - DNA, 369 bp, Artificial Sequence
  source: /note="Description of Artificial Sequence: Synthetic polynucleotide"
caggtgcagttggtggagtctgggggaggcgtggtccagcctgggaggtccctgacactctcctgtgcagcgtctggattcatgttcaatagatttggcatgcactgggtccgccaggctccaggcaaggggctggactgggtggcagttatatggtatgatggaagtaataaatactatgcagactccgtgaagggccgattcaccatctccagagacaattccaagaatacgttgtatctgcaagtgaacagcctgagagccgaggacacggctgtgtattactgtgcgagagagggcaccccccattactacgatagtagcggccttgactactggggccagggaaccctggtcaccgtctcctca

SEQ ID NO: 9932 - DNA, 363 bp, Artificial Sequence
  source: /note="Description of Artificial Sequence: Synthetic polynucleotide"
caggtgcagttggtggagtctgggggaggcgtggtccagcctgggaggtccctgagtctctcctgtgcagcctctggattcaccttcagtaactatggcatgcattgggtccgccaggctccaggcaaggggctggagtgggtggcagccatatcatatgatggaaatactaaatactatgtagactccgtgaagggccgattcaccatctccagagacaattccaagaacacgctctatctgcaaatgaatagcctgagaggtgaggacatggctgtgtattactgtgtaggagctcgtccgggatacgaccactacggtatggacgtctggggccaagggaccacggtcaccgtctcctca

SEQ ID NO: 9933 - DNA, 354 bp, Artificial Sequence
  source: /note="Description of Artificial Sequence: Synthetic polynucleotide"
cagtcgttggaggagtccgggggagacctggtcaagcctggggcatccctgacactcacctgcacagcctctggattctccttcagtagcggctacgacatgtgttgggtccgccaggctccagggaaggggctggagtggatcgcctgtatttaccctaataatcctgtcacttactacgcgagctgggcgaaaggccgattcaccatctccaaaacctcgtcgaccacggtgactctgcaaatgaccagtctgacagccgcggacacggccacctatttctgtgggagatctgatagtaatggtcatacctttaacttgtggggccaaggcaccctcgtcaccgtctcgagc

SEQ ID NO: 9934 - DNA, 357 bp, Artificial Sequence
  source: /note="Description of Artificial Sequence: Synthetic polynucleotide"
cagtcgttggaggagtccgggggaggcctggtcaagcctgagggatccctgacactcacctgcaaagcctctggattctccttcactggcgcccactacatgtgctgggtccgccaggctccagggaaggggctggagtggatcgcatgtatttatggtggtagtgttgatataactttctacgcgagctgggcgaaaggccgattcgccatctccaagtcctcgtcgaccgcggtgactctgcaaatgaccagtctgacagccgcggacacggccacctatgtctgtgcgagagaaagcggtagtggctgggcgcttaacttgtggggcccggggaccctagtcaccgtctcgagc

SEQ ID NO: 9935 - DNA, 357 bp, Artificial Sequence
  source: /note="Description of Artificial Sequence: Synthetic polynucleotide"
cagtcgttggaggagtccgggggaggcctggtccagcctgagggatccctgacactcacctgtacagcctctggattcttcttcagtggcgcccactacatgtgctgggtccgccaggctccagggcaggggctggagtggatcggatgcacttatggtggtagtgttgatatcactttctacgcgagctgggcgaaaggccgattcgccatctccaaaacctcgtcgaccacggtgactctgcaactgaccagtctgacagccgcggacacggccacctatgtctgtgcgagagaaagcggtagtggctgggcacttaacttgtggggccaggggaccctcgtcaccgtctcgagc

SEQ ID NO: 9936 - DNA, 360 bp, Artificial Sequence
  source: /note="Description of Artificial Sequence: Synthetic polynucleotide"
gaagtgcagctggtgcagtctgggggaggcttggtacagcctggggggtccctgagactctcctgtgcagcctctggattcacctttagcagctatgccatgagttgggtccgccaggctccagggaaggggctggagtgggtctcagctattagtggtagtggtgattacacatactacgcagactccgtgaagggccggttcaccatctccagagacaattccaagaacacgctgtatctgcaaatgagcagcctgagagccgaagacacggccgtatattactgtgcgaaatacagttatggcctctactactacttcgatctctggggccgtggcaccctggtcaccgtctcctca

SEQ ID NO: 9937 - DNA, 381 bp, Artificial Sequence
  source: /note="Description of Artificial Sequence: Synthetic polynucleotide"
gaagtgcagctggtgcagtctgggggaggcttggtcaagcctggagggtccctgagactctcctgtgcagcctctggagtcaccttcagtgactactacatgaattggatccgccaggctccagggaaggggctggagtgggtttcatacattagtactagtggtagtatcatatactacacagactctgtgaagggccgattcaccatctccagggacaacgccaagaactcactgtatctgcaaatgaacagcctgagagccgaggacacggccgtatattactgtgcgggaggggttgactccgatgactacgaggattactactcctactacgatatggacgtctggggccaagggaccatggtcaccgtctcttca

SEQ ID NO: 9938 - DNA, 363 bp, Artificial Sequence
  source: /note="Description of Artificial Sequence: Synthetic polynucleotide"
gaagtgcagctggtggagtcgggcccaggactggtgaagccttcggagaccctgtccctcaaatgcactgtctctggtggctccatcaggagtagtggttactactggggctggatccgccagcccccagggaaggggctggagtggattgggagtatccatcatagtgggagcacctactacaatccgtccctgaagagtcgagtcaccatatccgttgacacgtccaagagccagttctccctgaggctgacctctgtgaccgccgcagacacggctgtgtattattgtgggagacacggacgagactattattacggaatggacgtctggggccaagggaccacggtcaccgtctcctca

SEQ ID NO: 9939 - DNA, 372 bp, Artificial Sequence
  source: /note="Description of Artificial Sequence: Synthetic polynucleotide"
gaggtacagctggtggagtctgggggaggcttggtccagcctggggggtccctgagactctcctgtgcagcctctggattcacctttagtatcttctggatgaactgggtccgccaggctccagggaaggggctggagtgggtggccaagataaagcaagatggaagtgagaaatactatgtggactctatgaagggccgattcaccatctccagagacaacgtcaagaactcactgtatctgcaaatgaacagcctgagagccgaggacacggctgtgtattactgtgcgagaggcgtttgggggagttatcgttatacctctagtggtttggacgtctggggccaagggaccacggtcaccgtctcctca

SEQ ID NO: 9940 - DNA, 342 bp, Llama glama
gaggtccagctggttcagccaggggctgaggtgagacgccctggggcagcagtgaaggtctcctgcaaggcttctggatttgcgttgataagctcgtacatagactgggtgcggcaggcccctggacaagggcttgagtggatggggaggattgaccctgaagatggtggtacatcatatgcacaaaagttccagggccgagtcacggtcactgtcgacacggccaccagcacagcctacgtggagttgagcagtctgagatctgacgacacgggcgtctatttctgcatggtgggggattcaggctactggggccaggggacccaggtcaccgtgtcctca

SEQ ID NO: 9941 - DNA, 348 bp, Llama glama
gaggtgcagctgcaggagtcgggcccaggcctggtgaagccctcgcagacgctctctctcacctgcactgtctctggtggctccatctcaaccagtggtactggttggagctggatccgccagcccccagggaaggggctggagtggatggggatcataggttatgatggcggcacttactacaacccatctctcaagagccgcacttccatctccagagacacgtccaagaaccagttctccctgcagttgacctctgtgacccctgaggacacggccgtgtattactgtgccagagggctggggccctggggccaggggatccaggtcaccgtgtcctcagccagt

SEQ ID NO: 9942 - DNA, 363 bp, Artificial Sequence
  source: /note="Description of Artificial Sequence: Synthetic polynucleotide"
gaggtgcagctggtgcagtcgggcccaggactggtgaagtcttcggagaccctgtccctcaaatgcactgtctctggtggctccatcagcagtagtggttactactggggctggatccgccagcccccagggaagggactggagtggattgggagtatccatcgtagtgggagcaccttctacaacccgtccctcaagagtcgagtcaccatatccgttgacacgtccaagagccagttctccctgaggctgacctctgtgaccgccgcagacacgtctgtgtatttctgtgggagacacggacgagactactactacggtatggacgtctggggccaagggaccacggtcaccgtctcctca

SEQ ID NO: 9943 - DNA, 384 bp, Artificial Sequence
  source: /note="Description of Artificial Sequence: Synthetic polynucleotide"
gaggtgcagctggtgcagtctgggggaggcgtggtccagcctgggaggtccctgagactctcctgtacagcgtctggattcaccttcagtgtctatggcatacactgggtccgccaggctccaggcaaggggctggagtgggtggcagttatatggtatgatggaagtaataaatactatacagactccgtgaagggccgattcaccatctccagagacaattccaagaacacgctgtatctgcaaatgaacagcctgagagccgaggacacggctctatattactgtgcgagagagggggatcttagcagctcgtccggctccgggggctaccactacgttgtggacgtctggggccaagggaccatggtcaccgtctcttca

SEQ ID NO: 9944 - DNA, 357 bp, Artificial Sequence
  source: /note="Description of Artificial Sequence: Synthetic polynucleotide"
gaggtgcagctggtgcagtctgggggaggcgtggtccagcctgggaggtccctgagactctcctgtgaagcctctggattcaccttcagtagctatggcatgcactgggtccgccaggctccaggcaaggggctggagtgggtggcagttatatcatatgatggaagtaataaacactatacagactccgtgaagggccgattcaccatctccagagacaattccaagaacacgctgtatctgcaaatgaacagcctgagagctgaggacacggctgtgtatttctgtgcgcaaagtcgtggatacagctatggtctaggctactggggccagggaaccctggtcaccgtctcctca

SEQ ID NO: 9945 - DNA, 354 bp, Artificial Sequence
  source: /note="Description of Artificial Sequence: Synthetic polynucleotide"
gaggtgcagctggtgcagtctgggggaggcgtggtccagcctgggaggtccctgagactctcctgtgcagcctctggattcaccttcaataattatggcatgcactgggtccgccaggctccaggcaaggggctggagtggttggcagttatatcatatgatggcaatgataaacactatgttgactccgtgaagggccgattcaccacttccagggacaattccaagaacacgctgtatctgcaaatgaacagcctgagagttgaggacacggctgtgttttactgtgtgagagggggcagtggctggtcctttgactcctggggccagggaaccctggtcaccgtctcctca

SEQ ID NO: 9946 - DNA, 363 bp, Artificial Sequence
  source: /note="Description of Artificial Sequence: Synthetic polynucleotide"
gaggtgcagctggtgcagtctgggggaggcgtggtccagcctgggaggtccctgagactctcctgtgcagcctctggattcaccttcagtagctatggcatgcactgggtccgccaggctccaggcaaggggctggagtgggtggcagttatatcatatgctggaattaataaatactatgcagactccgtgaagggccgattcaccatttccagagacgattccaagaacacgctgtttctgcaaatgaacagcctgagaactgaggacacggctgtgtattactgtgcgaaaagggatagtgggatctcccatgatccttttgatatttggggccaagggacaatggtcaccgtctcttca

SEQ ID NO: 9947 - DNA, 357 bp, Artificial Sequence
  source: /note="Description of Artificial Sequence: Synthetic polynucleotide"
gaggtgcagctggtgcagtctgggggaggcgtggtccagcctgggaggtccctgagactctcctgtgcagcctctggattcaccttcagtagctatggcatgcactgggtccgccaggctccaggcaaggggctggagtgggtggcagttatttcatatcaggaaagtaataaacactatgtagactccgtgaagggccgattcaccatctccagagacaattccaagaacacgctgtatctgcaaatgaacagcctgagagctgaggacacggctgtgtattactgtgcgaaaagtcgtggatacagctatggtctaggttactggggccagggaaccatggtcactgtctcttca

SEQ ID NO: 9948 - DNA, 357 bp, Artificial Sequence
  source: /note="Description of Artificial Sequence: Synthetic polynucleotide"
gaggtgcagctggtgcagtctgggggaggcgtggtccagcctgggaggtccctgagactctcctgtgcagcctctggattcaccttcagtagctatggcatgcactgggtccgccaggctccaggcaaggggctggagtgggtggcagttatttcatatcaggaaagtaataaacactatgtagactccgtgaagggccgattcaccatctccagagacaattccaagaacacgctgtatctgcaaatgaacagcctgagagctgaggacacggctgtgtattactgtgcgaaaagtcgtggatacagctatggtctaggttactggggccagggaaccctggtcaccgtctcctca

SEQ ID NO: 9949 - DNA, 357 bp, Artificial Sequence
  source: /note="Description of Artificial Sequence: Synthetic polynucleotide"
gaggtgcagctggtgcagtctgggggaggcgtggtccagcctgggaggtccctgagactctcctgtgcagcctctggattcaccttcagtagctatggcatgcactgggtccgccaggctccaggcaaggggctggagtgggtggcagttatttcatatcaggaaagtaataaacactatgtagactccgtgaagggccgattcaccatctccagagacaattccaagaacacgctgtatctgcacatgaacagcctgagagctgaggacacggctgtgtattactgtgcgcaaagtcgtggatacagctatggtctaggttactggggccagggaaccctggtcaccgtctcctca

SEQ ID NO: 9950 - DNA, 357 bp, Artificial Sequence
  source: /note="Description of Artificial Sequence: Synthetic polynucleotide"
gaggtgcagctggtgcagtctgggggaggcgtggtccagcctgggaggtccctgagactctcctgtgcagcctctggattcagcttcagtagctatggcatgcactgggtccgccaggctccaggcagggggctggagtgggtggcagttatatcatatgttggaattaataaatattatggagactccgtgaagggccgattcaccatctccagagacgattccaagaacacgctgtatctgcaaatgaacagcctgagagctgaggacacggctgtgtattactgtgcgaaaagtcgtggatacagttatggtctagtctactggggccagggaaccctggtcaccgtctcctca

SEQ ID NO: 9951 - DNA, 363 bp, Artificial Sequence
  source: /note="Description of Artificial Sequence: Synthetic polynucleotide"
gaggtgcagctggtgcagtctgggggaggcgtggtccagcctgggaggtccctgagactctcctgtgcagcgtctggattcaccttcagtagctatggcatgcactgggtccgccaggctccaggcaaggggctggagtgggtggcagttatatggtatgatggaagtaataaatactatgcagactccgtgaagggccgattcaccatctccagagacaattccaagaacacgctgtatctgcaaatgaacagcctgagagccgaggacacggctgtgtattactgtgcgacgagatccggttatagcagcacctggtacgttgactactggggccagggaaccctggtcaccgtctcctca

SEQ ID NO: 9952 - DNA, 351 bp, Artificial Sequence
  source: /note="Description of Artificial Sequence: Synthetic polynucleotide"
gaggtgcagctggtgcagtctgggggaggcgtggtccagcctgggaggtccctgagactctcctgtgcagcgtctggattcaccttcagtagctatggcatgcactgggtccgccaggctccaggcaaggggctggagtgggtggtagttatatggtatgatggaagtaataaatactatggagactccgtgaagggccgattcaccatctccagagacaattccaagaacacgctgtatctgcaaatgaacagcctgagagccgaggacacggctgtttattactgtgcgagaggaaactactttgcttttgatatttggggccaagggacaatggtcaccgtctcctca

SEQ ID NO: 9953 - DNA, 372 bp, Artificial Sequence
  source: /note="Description of Artificial Sequence: Synthetic polynucleotide"
gaggtgcagctggtgcagtctgggggaggcttggtaaagcctggggggtcccttagactctcctgtacagcctctggattcactttcagtaacgcctggatgagctgggtccgccaggctccagggaaggggctggagtgggttggccgtattaaaagcaaacctgctggtgggacaacagactacgctgcacccgtgaaagacagattctccatctcaagagatgattcaaaaaccacgctgtatctgcgaatgaacagcctgaaaaccgaggacacagccgtgtattactgtaccacaagtataacaactcgaagggggacgtactactttgactactggggccagggaaccctggtcaccgtctcctca

SEQ ID NO: 9954 - DNA, 366 bp, Artificial Sequence
  source: /note="Description of Artificial Sequence: Synthetic polynucleotide"
gaggtgcagctggtgcagtctgggggaggcttggtaaagcctggggggtcccttagactctcctgtgcagcctctggattcactttcagtaacgcctggatgacctgggtccgccaggctccagggaaggggctggagtgggttggccgtattaaaagcaaaactgatggtgggacaacagactacgctgcacccgtgaaaggcagattcaccatttcaagagatgattcaaaaaacacgctgtatctgcaaatgaacagcctgaaaaccgaggacacagccgtatattactgtctcacagacgatttttggagtgaatattatacacactgctggggccagggaaccctggtcaccgtctcctca

SEQ ID NO: 9955 - DNA, 369 bp, Artificial Sequence
  source: /note="Description of Artificial Sequence: Synthetic polynucleotide"
gaggtgcagctggtgcagtctgggggaggcttggtaaagcctggggggtcccttagactctcctgtgcagcctctggattcactttcagtgacgcctggatgacttgggtccgccaggctccaggtaaggggctggagtggattggccgtattaaaagcaaaactgatggtgggacaacagactacgctgcacccgtgaaaggcagattcaccatttcaagagatgattcaaaaaacacgctgtatctgcaaatgaacagcctgaaaaccgaggacacagccgcatattactgtttcacagacgatttttggagtggggattatacgcactgctggggccagggaaccctggtcaccgtctcctccagc

SEQ ID NO: 9956 - DNA, 384 bp, Artificial Sequence
  source: /note="Description of Artificial Sequence: Synthetic polynucleotide"
gaggtgcagctggtgcagtctgggggaggcttggtacagcctggcaggtccctgagactctcctgtgcagcctctggattcacctttgatgattatgcaatgcactgggtccggcaagctccagggaagggcctggagtgggtctcaggtattagttggaacagtggtagcataggctatgcggactctgtgaagggccgattcaccatctccagagacaacgccaagaattcactgtatctgcaaatgaacagtctgagagctgaggacacggccttgtattattgtgcaaaagatatagagtattacgatattttgactggttattatagctactacattatggacgtctggggccaagggaccacggtcaccgtctcctca

SEQ ID NO: 9957 - DNA, 384 bp, Artificial Sequence
  source: /note="Description of Artificial Sequence: Synthetic polynucleotide"
gaggtgcagctggtgcagtctgggggaggcttggtacagcctggcaggtccctgagactctcctgtgcagcctctggattcacctttgatgattatgccatgcactgggtccggcaagctccagggaagggcctggagtgggtctcaggtattagttggaatagtggtagtataggctatgcggactctgtgaagggccgattcaccagctccagagacaacgccaagaactccctgtatctgcaaatgaacagtctgagagctgaggacacggccctgtattactgtgcaaaagatatggaatattacgatattttgactggttattatagctactacattatggacgtctggggccaagggaccacggtcaccgtctcctca

SEQ ID NO: 9958 - DNA, 363 bp, Artificial Sequence
  source: /note="Description of Artificial Sequence: Synthetic polynucleotide"
gaggtgcagctggtgcagtctgggggaggcttggtacagcctggggggtccctgaaactctcctgtgcagcctctggattcacctttagcaactatgccatgagctgggtccgccaggctccagggaaggggctggagtgggtctcagctattagtggtgatggtggtaacacatactacccaaactccgtgaagggccggttcaccatctccagagacaattccaagaacacgctgtatctgcaaatgaacagcctgagagccgaggacacggccgtatattactgtgcaaaagattattgtaatagcacctactactacggagaggactggggccggggaaccacggtcaccgtctcctca

SEQ ID NO: 9959 - DNA, 351 bp, Artificial Sequence
  source: /note="Description of Artificial Sequence: Synthetic polynucleotide"
gaggtgcagctggtgcagtctgggggaggcttggtacagcctggggggtccctgagactctcctgtgcagcctctggattcacctttagaagctatgtcatgagctgggtccgccaggctccagggatggggctggagtgggtctcagctattactgctagtggtggtagcacatactacggagactccgtgaagggccggttcaccatctccagagacaattccaagaacacgctgtatctgcaaatgaacagcctgagagccgaggacacggccgtatattactgtgcgaaagattactatgggccgtttgactactggggccagggaaccctggtcactgtctcctca

SEQ ID NO: 9960 - DNA, 366 bp, Artificial Sequence
  source: /note="Description of Artificial Sequence: Synthetic polynucleotide"
gaggtgcagctggtgcagtctgggggaggcttggtacagcctggggggtccctgagactctcctgtgcagcctctggattcacctttagcagctatgccatgagctgggtccgccaggctccagggaagggactggagtgggtctcagctattagtggtagtggtggtaacacatactacgcagactccgtgaagggccggttcaccatctccagagacaattccaagaacacgctgtatctgcaaatgaacagcctgagagccgaggacacggccgtatattactgtgcgaaagatccacatagcagtaattggcccgggttcttcgatctctggggccgtggcaccctggtcaccgtctcctca

SEQ ID NO: 9961 - DNA, 342 bp, Artificial Sequence
  source: /note="Description of Artificial Sequence: Synthetic polynucleotide"
gaggtgcagctggtgcagtctgggggaggcttggtacagtttggggggtccctgagactctcctgtgcagcttctggattcacctttagcagctatggtatgaactgggtccgccagactccagggaaggggctcgagtgggtctcggctattggtggaagtggtggtagcacatactacgcagactccgtgaagggccggttcaccatctccagagacaattccaagaacacgctgtatctgcaaatgactagcctgagagccgaggacacggccgtatattactgtgcgaaaggggcctacgatgtctggggccaagggaccacggtcaccgtctcctca

SEQ ID NO: 9962 - DNA, 381 bp, Artificial Sequence
  source: /note="Description of Artificial Sequence: Synthetic polynucleotide"
gaggtgcagctggtgcagtctgggggaggcttggtcaagcctggagggtccctgacactctcctgtgcagcctctggattcaccttcagtgactactacatgaactggatccgccaggctccagggaaggggctggagtgggtttcatacattagtactggtggtagtaccatatactacgcagactctgtgaagggccgattcaccatctccagggacaacgccaaaaactcactatatctgcaaatgaacagcctgaaagccgacgacccggccgtatattactgtgccagaggcgttgactccgatgactacgaggatttctactcctattacgatttggacgtctggggccaagggaccacggtcaccgtctcctca

SEQ ID NO: 9963 - DNA, 381 bp, Artificial Sequence
  source: /note="Description of Artificial Sequence: Synthetic polynucleotide"
gaggtgcagctggtgcagtctgggggaggcttggtcaagcctggagggtccctgagactctcctgtgcagcctctggagtcaccttcagtgactactacatgacctggatccgccaggctccagggaagggcctggagtgggtttcatacattagtactagtggtcgtaccatatactacgcagactctgtgaagggccgattcaccatctccagggacaacgctaagaactcactgtatctgcaaatgaacaacctgagagccgaggacacggccgtatattactgtgcgagaggggttgactccgatgactacgaggatttctactcctactacgatatggacgtctggggccaagggaccacggtcaccgtctcctca

SEQ ID NO: 9964 - DNA, 381 bp, Artificial Sequence
  source: /note="Description of Artificial Sequence: Synthetic polynucleotide"
gaggtgcagctggtgcagtctgggggaggcttggtcaagcctggagggtccctgagactctcctgtgcagcctctggattcaccttcagtgactactacatgaactggatccgccaggctccagggaaggggctggagtgggtttcatacattagtactggtggtagtaccatatactacgcagactctgtgaagggccgattcaccatctccagggacaacgccaagaactcactatatctgcaaatgaacagcctgagagccgacgacacggccgtatattactgtgcgagaggagttgactccgatgactacgaagatttctactcctactacgatttggacgtctggggccaagggaccacggtcaccgtctcttca

SEQ ID NO: 9965 - DNA, 348 bp, Artificial Sequence
  source: /note="Description of Artificial Sequence: Synthetic polynucleotide"
gaggtgcagctggtgcagtctgggggaggcttggtcaagcctggagggtccctgagactctcctgtgcagcctctggattcaccttcagtgactactacatgagctggatccgccaggctccagggaaggggctggagtgggtttcatgcataactagtagtggtagtaccaaaaaacacgcagactctgtgaagggccgattcaccatctccagggacaacgccaagaactcactgtatctgcaaatgaacagcctgagagccgaggacacggccgtgtattactgtgcgagagtttcgagaggctttgaccactggggccagggaaccctggtcaccgtctcctca

SEQ ID NO: 9966 - DNA, 378 bp, Artificial Sequence
  source: /note="Description of Artificial Sequence: Synthetic polynucleotide"
gaggtgcagctggtgcagtctgggggaggcttggtccagcctggggggtccctgagactctcctgtgcagcctctggattcacctttagtagctattggatgagctgggtccgccaggctccagggaaggggctggagtgggtggccaacataaagcaagatggaagtgagaaatactatgtggactctgtgaagggccgattcaccatctccagagacaacgccaagagctcactgcatctgcaaatgaacagcctgagagccgaggacacggctgtgtattactgtgcgagagaaaccgttgattactatgataatagtgagtattcgtacggtatggacgtctggggccaagggaccacggtcaccgtctcctca

SEQ ID NO: 9967 - DNA, 348 bp, Artificial Sequence
  source: /note="Description of Artificial Sequence: Synthetic polynucleotide"
gaggtgcagctggtgcagtctgggggaggcttggttaagccgggggggtcccttagactctcctgtgcagcctctggattcaccttcagtaacgtctggatgagctgggtccgccaggctccagggcaggggctggagtgggttggccgtattaaaagcaaaattgatggtgggacaacagactacgctgcacccgtgaaaggcagattcaccatctcaagagatgattcaaaaaatacgctgtatctgcaaatgaacagcctgaaaaccgaggacacagccgtgtattactgtaccacagggggtgggacctactggggccagggaaccctggtcaccgtctcctca

SEQ ID NO: 9968 - DNA, 363 bp, Artificial Sequence
  source: /note="Description of Artificial Sequence: Synthetic polynucleotide"
gaggtgcagctggtggagtcgggcccaggactggtgaagtcttcggagaccctgtccctcaaatgcactgtctctggtggctccatcagcagtagtggttactactggggctggatccgccagcccccagggaagggactggagtggattgggagtatccatcgtagtgggagcaccttctacaacccgtccctcaagagtcgagtcaccatatccgttgacacgtccaagagccagttctccctgaggctgacctctgtgaccgccgcagacacgtctgtgtatttctgtgggagacacggacgagactactactacggtatggacgtctggggccaagggaccacggtcaccgtctcctca

SEQ ID NO: 9969 - DNA, 360 bp, Artificial Sequence
  source: /note="Description of Artificial Sequence: Synthetic polynucleotide"
gaggtgcagctggtggagtctgggggaggcctggtcaagcctggggggtccctgagactctcctgtgcagcctctggattcaccttcagtagctacaccattcactgggtccgccaggctccagggaaggggctggagtgggtctcatccattagtagtagtagtagttacatatactacgtagactcagtgaagggccgattcaccatctccagagacaacgccaagaactcagtgtatctgcaaatgaacagcctgagagccgaggacacggctgtctattactgtgcgacctcgagtataacagctcgaggttactttgactactggggccagggaaccctggtcaccgtctcctca

SEQ ID NO: 9970 - DNA, 357 bp, Artificial Sequence
  source: /note="Description of Artificial Sequence: Synthetic polynucleotide"
gaggtgcagctggtggagtctgggggaggcgtggtccagcctgggaggtccctgagaatctcctgtgcagcctctggattcaccttcagttcctacggcatgcactgggtccgccacgctccaggcaaggggctggagtgggtggcaatgatatcatatgagggaagtaatagacactatgtggactccgtgaagggccgattcaccatctccagagacaattccaacaatacgctgtatctgcaaatgaacagtctgagagctgaggacacggctgtgtatttctgtgcgaaaaggaattctacgaagggttattttgatatctggggccaagggacaatggtcaccgtctcctca

SEQ ID NO: 9971 - DNA, 354 bp, Artificial Sequence
  source: /note="Description of Artificial Sequence: Synthetic polynucleotide"
gaggtgcagctggtggagtctgggggaggcgtggtccagcctgggaggtccctgagactctcctgtgcagcctctggattcaccttcagtagctatggcatgcactgggtccgccaggctccaggcaaggggctggagtgggtgacagttatatcatatgatggaagtgataaatactatgcagactccgtgaagggccgattcaccatctccagagacaattccaagaacacgctgtatctgcaaatgaacagcctgagagctgaggacacggctatgtattactgtgtgaaagggggcagtggctggtcctttgactactggggccagggaaccctggtcactgtctcctca

SEQ ID NO: 9972 - DNA, 357 bp, Artificial Sequence
  source: /note="Description of Artificial Sequence: Synthetic polynucleotide"
gaggtgcagctggtggagtctgggggaggcgtggtccagcctgggaggtccctgagactctcctgtgcagcctctggattcaccttcagtagctatggcatgcactgggtccgccaggctccaggcaaggggctggagtgggtggcagttatatcatatgatggaagtaataaacactatacagactccgtgaagggccgattcaccatctccagagacaattccaagaacacgctgtatctgcaaatgaacagcctgagagttgaggacacggctgtttattactgtgcgcaaagtcgtggatacagctatggtctaggctactggggccagggaaccctggtcaccgtctcctca

SEQ ID NO: 9973 - DNA, 396 bp, Artificial Sequence
  source: /note="Description of Artificial Sequence: Synthetic polynucleotide"
gaggtgcagctggtggagtctgggggaggcgtggtccagcctgggaggtccctgagactctcctgtgcagcctctggattcaccttcagtagctatggcatgcactgggtccgccaggctccaggcaaggggctggagtgggtggcatttatttcatatgatggaagtaataaattctatgcagactccgtgaagggccgactcaccatctccagggacaattccaagaacatgctgtatctgcaaatgaacagcctgagagctgaggacacggctgtgtattactgtgcgaaagggggtgtagtaataccaggtcctacacggtataactggaaccactactactactatggtatggacgtctggggccaagggaccacggtcaccgtctcctca

SEQ ID NO: 9974 - DNA, 354 bp, Artificial Sequence
  source: /note="Description of Artificial Sequence: Synthetic polynucleotide"
gaggtgcagctggtggagtctgggggaggcgtggtccagcctgggaggtccctgagactctcctgtgcagcctctggattcaccttcagtagttatggcattcactgggtccgccaggctccaggcaaggggctggagtggttggcagttatatcatatgatggcagtaataaacactatgtagactccgtgaagggccgactcaccatttccagagacaattccaagaacacgctgtatctgcaaatgaacagcctgagagctgaggacacggctgtgtattactgtgcgagagggggccgtggctggtcctttgactcctggggccagggaaccacggtcaccgtctcctca

SEQ ID NO: 9975 - DNA, 357 bp, Artificial Sequence
  source: /note="Description of Artificial Sequence: Synthetic polynucleotide"
gaggtgcagctggtggagtctgggggaggcttggtacagccgggggggtccctgagactctcctgtgcagcctctggattcaccttaagtagttatgccatgagctgggtccgccaggctccagggaaggggctggagtgggtctcaactattagtggtagtggtataatatactacacagactccgtgaagggccggttcaccatctccagagacagttccaagaacacgctgtatctgcaaatgaacagcctgagagtcgaggacacggccgtatattactgtgcgaaagatcgtggagcagcagctggagcctttgactactggggccagggaaccctggtcactgtctcctca

SEQ ID NO: 9976 - DNA, 366 bp, Artificial Sequence
  source: /note="Description of Artificial Sequence: Synthetic polynucleotide"
gaggtgcagctggtggagtctgggggaggcttggtacagcctggggggtccctgagactctcctgtgcagcctctggattcacctttagcaactatgccatgagctgggtccgccaggctccagggaaggggctggagtgggtctcagctattagtggtagtggtgataacacatactacgcagactccgtgaggggccggttcaccatctccagagacaattccaagaacacgctgtatctgcaaatgaacagtctgagagccgaggacacggccatatattactgtgcgaaagatccgcatagcagcaggtggcccgggttcttcgatctctggggccgtggcaccctggtcactgtctcctca

SEQ ID NO: 9977 - DNA, 342 bp, Artificial Sequence
  source: /note="Description of Artificial Sequence: Synthetic polynucleotide"
gaggtgcagctggtggagtctgggggaggcttggtacagcctggggggtccctgagactctcctgtgcagcctctggattcacctttagcagctatgccatgaactgggtccgccaggctccagggaaggggctggaatgggtctcaactattagtggtagtagtggtagcacatactacgcagactccgtaaagggccggttcaccatctccagagacaattccaagaacacgctgtatctgcaaatgaacagcctgacagccgaggacacggccgtatattactgtgcgaaagtcggaggagacgtctggggccaagggaccacggtcaccgtctcctca

SEQ ID NO: 9978 - DNA, 378 bp, Artificial Sequence
  source: /note="Description of Artificial Sequence: Synthetic polynucleotide"
gaggtgcagctggtggagtctgggggaggcttggtacagcctggggggtccctgagactctcctgtgcagcctctggattcacctttagcagctatggcatgagctgggtccgccaggttccagggaaggggctggagtgggtctcagctattagtggtagtggtggtagcacatactacgtagactccgtgaagggccggttcaccatctccagagacaatttcaagaacacgctgtatctgcaaatgaacagcctgagagtcgaggacacggccgtatattactgtgcgaaagatgtgggatattgtagtactaccagctgtaggggtgatgcatttgatgtctggggccaagggacaatggtcaccgtctcctca

SEQ ID NO: 9979 - DNA, 342 bp, Artificial Sequence
  source: /note="Description of Artificial Sequence: Synthetic polynucleotide"
gaggtgcagctggtggagtctgggggaggcttggtacagtttggggggtccctgagactctcctgtgcagcttctggattcacctttaccagctatggtatgaactgggtccgccagactccagggaaggggctcgagtgggtctcggctattggtggaagtggtggtagcacatactacgcagactccgtgaagggccggttcaccatctccagagacaattccaagaacacgctgtatctgcaaatgactagcctgagagccgaggacacggccgtatattactgtgcgaaaggggcctacgatgtctggggccaagggaccacggtcaccgtctcctca

SEQ ID NO: 9980 - DNA, 342 bp, Artificial Sequence
  source: /note="Description of Artificial Sequence: Synthetic polynucleotide"
gaggtgcagctggtggagtctgggggaggcttggtacagtttggggggtccctgagactctcctgtgcagcttctggattcacctttagcagctatggcatgaactgggtccgccagactccagggaaggggctggagtgggtctcagctattggtggaagtggtggtagcacatactacgcagactccgtgaagggccggttcaccatctccagagacaattccaagaacacgctgtatctgcaaatgactagcctgagagccgaggacacggccgtatattactgtgcgaaaggggcctacgatgtctggggccaagggaccacggtcaccgtctcctca

SEQ ID NO: 9981 - DNA, 342 bp, Artificial Sequence
  source: /note="Description of Artificial Sequence: Synthetic polynucleotide"
gaggtgcagctggtggagtctgggggaggcttggtacagtttggggggtccctgagactctcctgtgcagcttctggattcacctttagcagctatggtatgaactgggtccgccagactccagggaaggggctcgagtgggtctcggctattggtggaagtggtggtagcacatactacgcagactccgtgaagggccggttcaccatctccagagacaattccaagaacacgctgtatctgcaaatgactagcctgagagccgaggacacggccgtatattactgtgcgaaaggggcctacgatgtctggggccaagggaccacggtcaccgtctcctca

SEQ ID NO: 9982 - DNA, 381 bp, Artificial Sequence
  source: /note="Description of Artificial Sequence: Synthetic polynucleotide"
gaggtgcagctggtggagtctgggggaggcttggtcaagcctggagggtccctgagactctcctgtgcagcctctggagtcaccttcagtgactactacatgacctggatccgccaggctccagggaagggcctggagtgggtttcatacattagtactgatggtcgtaccatatactacgcagactctgtgaagggccgattcaccatctccagggacaacgctaagaactcactgtatctgcaaatgaacaacctgagagccgaggacacggccgtatattactgtgcgagaggggttgactccgatgactacgaggatttctactcctactacgatatggacgtctggggccaagggaccacggtcaccgtctcctca

SEQ ID NO: 9983 - DNA, 381 bp, Artificial Sequence
  source: /note="Description of Artificial Sequence: Synthetic polynucleotide"
gaggtgcagctggtggagtctgggggaggcttggtcaagcctggagggtccctgagactctcctgtgcagcctctggattcaccttcagtgactactacatgaactggatccgccaggctccagggaaggggctggagtgggtttcatacattagtactggtggtagtaccatatactacgcagactctgtgaagggccgattcaccatctccagggacaacgccaagaactcactatatctgcaaatgaacagcctgagagccgacgacacggccgtatattactgtgcgagaggagttgactccgatgactacgaggatttctactcctactacgatttggacgtctggggccaaggtaccacggtcaccgtctcctca

SEQ ID NO: 9984 - DNA, 354 bp, Artificial Sequence
  source: /note="Description of Artificial Sequence: Synthetic polynucleotide"
gaggtgcagctggtggagtctgggggaggtgtggtccagcctgggaggtccctgagactctcctgtgcagcctctggattcaccttcagaagttatggcatgcattgggtccgccaggctccaggcaaggggctggagtggttggcagttacatcatatgatggtaatagtcaacactatgtagactccgtgaagggccgattcaccatttccagagacaattccaagaacacgctgtatctgcaaatgaacagcctgagagctgaggacacggctgtgttttactgtgcgagagggggcagtggctggtcctttgactcctggggccagggaaccctggtcaccgtctcttca

SEQ ID NO: 9985 - DNA, 354 bp, Artificial Sequence
  source: /note="Description of Artificial Sequence: Synthetic polynucleotide"
gaggtgcagctgttggagtctgggggaggcgtggtccagcctgggaggtccctgagactctcctgtgcagcctctggattcaccttcagttaccatggcatgcactgggtccgccaggctccaggcaaggggctggagtggttggcagttatctcatatgatggcagcgatagacactatatagactccgtgaagggccgattcaccaatgccagagacaattccaagaacacgctgtatctgcaaatgaacagcctgagacctgaagacacggctgtgtattactgtgcgagagggggcagtggctggtcctttgactcctggggccagggaaccctggtcaccgtctcttca

SEQ ID NO: 9986 - DNA, 372 bp, Llama glama
gaggtgcaggtgcaggagtcgggcccaggcctggtgacaccctcgcagacactctccctcacctgcactgtctctggtggctccattaaaaacaactattactactggaactggatccgccagccccccggaaaggggctggaatggatgggagccatagcttatagcggcagcacttactacagcccatccctccagagccgcacctccatctccagggacacgtccaagaaccagttcaccctgcagctgagctctgtgacccctgaagacacagccgtgtattactgtgccagagtgccgtcggtatttggccttccttatggcggcatgaactactggggcaaagggaccctggtcactgtctcctca

SEQ ID NO: 9987 - DNA, 984 bp, Homo sapiens
gcttccaccaagggcccatcggtcttccccctggcgccctgctccaggagcacctccgagagcacagccgccctgggctgcctggtcaaggactacttccccgaaccggtgacggtgtcgtggaactcaggcgccctgaccagcggcgtgcacaccttcccggctgtcctacagtcctcaggactctactccctcagcagcgtggtgaccgtgccctccagcagcttgggcacgaagacctacacctgcaacgtagatcacaagcccagcaacaccaaggtggacaagagagttgagtccaaatatggtcccccatgcccatcatgcccagcacctgagttcctggggggaccatcagtcttcctgttccccccaaaacccaaggacactctcatgatctcccggacccctgaggtcacgtgcgtggtggtggacgtgagccaggaagaccccgaggtccagttcaactggtacgtggatggcgtggaggtgcataatgccaagacaaagccgcgggaggagcagttcaacagcacgtaccgtgtggtcagcgtcctcaccgtcctgcaccaggactggctgaacggcaaggagtacaagtgcaaggtctccaacaaaggcctcccgtcctccatcgagaaaaccatctccaaagccaaagggcagccccgagagccacaggtgtacaccctgcccccatcccaggaggagatgaccaagaaccaggtcagcctgacctgcctggtcaaaggcttctaccccagcgacatcgccgtggagtgggagagcaatgggcagccggagaacaactacaagaccacgcctcccgtgctggactccgacggctccttcttcctctacagcaggctcaccgtggacaagagcaggtggcaggaggggaatgtcttctcatgctccgtgatgcatgaggctctgcacaaccactacacacagaagagcctctccctgtctctgggtaaatga

SEQ ID NO: 9988 - DNA, 24 bp, Artificial Sequence
  source: /note="Description of Artificial Sequence: Synthetic oligonucleotide"
ggattcaccttcagtagctacacc

SEQ ID NO: 9989 - protein, 112 aa, Llama glama
ATMLTQSPGSLSVVPGESASISCKASQSLVHTDGKTYLSWLLQKPGQRPQLLIYQVSNRGSGVPDRFTGSGSGTDFTLKISGVKAEDAGVYYCAQAIYYPPSFGSGTRLEIK

SEQ ID NO: 9990 - protein, 112 aa, Llama glama
ATMLTQSPGSLSVVPGESASISCKASQSLVHTDGNTYLSWLLQKPGQRPQLLITQVSNRNSGVPNRFTGSGSGTDFTLKISGVKPEDAAVYYCAQVTRYPVTFGGGTRLEIK

SEQ ID NO: 9991 - protein, 214 aa, Homo sapiens
DIVMTQSPLSLPVTPGEPASISCRSSQSLLYSIGYNYLDWYLQKSGQSPQLLIYLGSNRASGVPDRFSGSGSGTDFTLKISRVEAEDVGFYYCMQALQTPYTFGQGTKLEIKRTVAAPSVFIFPPSDEQLKSGTASVVCLLNNFYPREAKVQWKVDNALQSGNSQESVTEQDSKDSTYSLSSTLTLSKADYEKHKVYACEVTHQGLSSPVTKSF

SEQ ID NO: 9992 - protein, 113 aa, Llama glama
DIVMTQSPSSVTASVGEKVTITCKSSQSVVWASNLKTYLNWYQQRPGQPPRLLIYYASTQQSGIPDRFSGSGSTTDFTLTISSVQPEDAAVYYCQQVYRTPWTFGQGTRLEIK

SEQ ID NO: 9993 - protein, 111 aa, Llama glama
DLVLTQIPGSLSVVPGESASISCKASQSLVQTDGKTYLSWLLQKPGQRPQLLIYQVSNRVSGVPDRFTGSGSGTDFTLKISGVNAEDAGVYYCAQVTYAASFGSGTRLEMK

SEQ ID NO: 9994 - protein, 112 aa, Llama glama
DVVLTQTPGSLSVVPGESASISCKASQSLVHTDGKTYLYWLLQKPGQSPQRLIYQVSNRGSGVPDRFTGSGSGTDFTLKISGVKAEDAGVYYCAQATYSLYSFGSGTRLEIK

SEQ ID NO: 9995 - protein, 113 aa, Llama glama
EIVLTQSPSSVTASAGEKVTINCKSSQSVLYSSNQKNYLAWYQQRLGQSPRLLIYWASTRESGVPDRFSGSGSTTDFTLTISNFQPEDAAVYYCQQAYKTPLTFGQGTKVELN

SEQ ID NO: 9996 - protein, 112 aa, Llama glama
EIVLTQTPGSLSVVPGESASISCKASQSLVHSDGKTYLYWLLQKPGQSPQRLIYQVSNRGSGVPDRFTGSGSGTDFTLKISGVKAEDAGVYYCAQATYYPYTFGSGTRLEIK

SEQ ID NO: 9997 - protein, 118 aa, Llama glama
ELQLVESGGGLVEPGGSLRLSCAASGFTFSNYAMTWVRQAPGKGLEWVSAINSGGGSTYYGDAVKGRFTISRDNAKNTLYLQINSLKPEDTAVYYCAKVGGLGYVDYWGQGTQVTVSS

SEQ ID NO: 9998 - protein, 120 aa, Llama glama
ELQLVESGGGLVQPGGSLRLSCAASGFTFDDYAMSWVRQAPGKGLEWVSGTTRNGGRTYYAESMKGRFTISRDNDKNTLYLQMNSPKSEDTGVYYCAKSDYALGSTFSSWGQGTQVTVSS

SEQ ID NO: 9999 - protein, 118 aa, Artificial Sequence
  source: /note="Description of Artificial Sequence: Synthetic polypeptide"
EVQLLESGGGVVQPGRSLRLSCAASGFTFSYHGMHWVRQAPGKGLEWLAVISYDGSDRHYIDSVKGRFTNARDNSKNTLYLQMNSLRPEDTAVYYCARGGSGWSFDSWGQGTLVTVSS

SEQ ID NO: 10000 - protein, 114 aa, Llama glama
EVQLQESGGALVQPGGSLRLSCAASGFTFSRSWMYWVRQAPGKGLEWVSAMNPGGGSTYYADSVKGRFTISRDNAKNTLYLQMNSLKPEDTALYYCARAGMSTWGKGTLVTVSS

SEQ ID NO: 10001 - protein, 120 aa, Llama glama
EVQLQESGGGLVQPGGSLRLSCAASGFTFDDYAMSWVRQAPGKGLEWVSAISWNGGSTYYAESMKGRFTISRDNAKNTLYLQMNSLKSKDTAVYYCARRRYGLGSEYDYWGQGTQVTVSS

SEQ ID NO: 10002 - protein, 114 aa, Llama glama
EVQLQESGPGLVKPSQTLSLTCTVSGGSISTSGTGWSWIRQPPGKGLEWMGIIGYDGGTYYNPSLKSRTSISRDTSKNQFSLQLTSVTPEDTAVYYCARGLGPWGQGIQVTVSS

SEQ ID NO: 10003 - protein, 124 aa, Llama glama
EVQLQESGPGLVKPSQTLSLTCTVSGGSITNSYYASSWIRQPPGKGLEWMGVIIYDGSTYYSPSLKSRTSISRDTSKNQFSLQLSSVTPEDTAVYYCARGLRVAGSYFTDFGTWGQGTQVTVSS

SEQ ID NO: 10004 - protein, 126 aa, Llama glama
EVQLVESGGGLAQPGGSLRLSCRASGFAFGSFWMYWVRQTPGKGLEWVSTVDAAGANTYYPDTVKGRFTISRDNAKNTLYLRMNSLKPEDTARYYCVTDGAYDDPAIRGKIPLASWGQGTLVTVSS

SEQ ID NO: 10005 - protein, 125 aa, Homo sapiens [sequence omitted]

SEQ ID NO: 10006 - protein, 127 aa, Artificial Sequence
  source: /note="Description of Artificial Sequence: Synthetic polypeptide"
EVQLVESGGGLVKPGGSLRLSCAASGFTFSDYYMNWIRQAPGKGLEWVSYISTGGSTIYYADSVKGRFTISRDNAKNSLYLQMNSLRADDTAVYYCARGVDSDDYEDFYSYYDLDVWGQGTTVTVSS

SEQ ID NO: 10007 - protein, 120 aa, Artificial Sequence
  source: /note="Description of Artificial Sequence: Synthetic polypeptide"
EVQLVESGGGLVKPGGSLRLSCAASGFTFSSYTIHWVRQAPGKGLEWVSSISSSSSYIYYVDSVKGRFTISRDNAKNSVYLQMNSLRAEDTAVYYCATSSITARGYFDYWGQGTLVTVSS

SEQ ID NO: 10008 - protein, 127 aa, Artificial Sequence
  source: /note="Description of Artificial Sequence: Synthetic polypeptide"
EVQLVESGGGLVKPGGSLRLSCAASGVTFSDYYMTWIRQAPGKGLEWVSYISTDGRTIYYADSVKGRFTISRDNAKNSLYLQMNNLRAEDTAVYYCARGVDSDDYEDFYSYYDMDVWGQGTTVTVSS

SEQ ID NO: 10009 - protein, 114 aa, Artificial Sequence
  source: /note="Description of Artificial Sequence: Synthetic polypeptide"
EVQLVESGGGLVQFGGSLRLSCAASGFTFSSYGMNWVRQTPGKGLEWVSAIGGSGGSTYYADSVKGRFTISRDNSKNTLYLQMTSLRAEDTAVYYCAKGAYDVWGQGTTVTVSS

SEQ ID NO: 10010 - protein, 114 aa, Artificial Sequence
  source: /note="Description of Artificial Sequence: Synthetic polypeptide"
EVQLVESGGGLVQFGGSLRLSCAASGFTFTSYGMNWVRQTPGKGLEWVSAIGGSGGSTYYADSVKGRFTISRDNSKNTLYLQMTSLRAEDTAVYYCAKGAYDVWGQGTTVTVSS

SEQ ID NO: 10011 - protein, 116 aa, Llama glama
EVQLVESGGGLVQPGGSLRLSCAASGFTFSFSEYVMSWVRQAPGKGLEWVSDINSGGEITAYADSVKGRFTVSRDNTKNTVYLQMNSLKPEDTAVYYCAQGSFGAWGQGTQVTVSS

SEQ ID NO: 10012 - protein, 124 aa, Artificial Sequence
  source: /note="Description of Artificial Sequence: Synthetic polypeptide"
EVQLVESGGGLVQPGGSLRLSCAASGFTFSIFWMNWVRQAPGKGLEWVAKIKQDGSEKYYVDSMKGRFTISRDNVKNSLYLQMNSLRAEDTAVYYCARGVWGSYRYTSSGLDVWGQGTTVTVSS

SEQ ID NO: 10013 - protein, 122 aa, Artificial Sequence
  source: /note="Description of Artificial Sequence: Synthetic polypeptide"
EVQLVESGGGLVQPGGSLRLSCAASGFTFSNYAMSWVRQAPGKGLEWVSAISGSGDNTYYADSVRGRFTISRDNSKNTLYLQMNSLRAEDTAIYYCAKDPHSSRWPGFFDLWGRGTLVTVSS

SEQ ID NO: 10014 - protein, 114 aa, Artificial Sequence
  source: /note="Description of Artificial Sequence: Synthetic polypeptide"
EVQLVESGGGLVQPGGSLRLSCAASGFTFSSYAMNWVRQAPGKGLEWVSTISGSSGSTYYADSVKGRFTISRDNSKNTLYLQMNSLTAEDTAVYYCAKVGGDVWGQGTTVTVSS

SEQ ID NO: 10015 - protein, 126 aa, Artificial Sequence
  source: /note="Description of Artificial Sequence: Synthetic polypeptide"
EVQLVESGGGLVQPGGSLRLSCAASGFTFSSYGMSWVRQVPGKGLEWVSAISGSGGSTYYVDSVKGRFTISRDNFKNTLYLQMNSLRVEDTAVYYCAKDVGYCSTTSCRGDAFDVWGQGTMVTVSS

SEQ ID NO: 10016 - protein, 117 aa, Llama glama
EVQLVESGGGLVQPGGSLRLSCAASGFTFSTYAMAWVRQAPGKGPEWVSFINKYGDGYADSVKGRFTISRDNAKNTLTLQMNSLKPEDTAVYWCAKSRGDHDDYDYWGQGTQVTVSS

SEQ ID NO: 10017 - protein, 119 aa, Artificial Sequence
  source: /note="Description of Artificial Sequence: Synthetic polypeptide"
EVQLVESGGGLVQPGGSLRLSCAASGFTLSSYAMSWVRQAPGKGLEWVSTISGSGIIYYTDSVKGRFTISRDSSKNTLYLQMNSLRVEDTAVYYCAKDRGAAAGAFDYWGQGTLVTVSS

SEQ ID NO: 10018 - protein, 117 aa, Llama glama
EVQLVESGGGLVQPGGTLRLSCAASGFTFSNYWMHWVRQAPGKGLEWVSVIDRGGGGTRYADSVKGRFTISRDNAKNTLYLRMNSLKPEDTALYYCTRDRNGEYDYWGRGTQVTVSS

SEQ ID NO: 10019 - protein, 119 aa, Artificial Sequence
  source: /note="Description of Artificial Sequence: Synthetic polypeptide"
EVQLVESGGGVVQPGRSLRISCAASGFTFSSYGMHWVRHAPGKGLEWVAMISYEGSNRHYVDSVKGRFTISRDNSNNTLYLQMNSLRAEDTAVYFCAKRNSTKGYFDIWGQGTMVTVSS

SEQ ID NO: 10020 - protein, 118 aa, Artificial Sequence
  source: /note="Description of Artificial Sequence: Synthetic polypeptide"
EVQLVESGGGVVQPGRSLRLSCAASGFTFRSYGMHWVRQAPGKGLEWLAVTSYDGNSQHYVDSVKGRFTISRDNSKNTLYLQMNSLRAEDTAVFYCARGGSGWSFDSWGQGTLVTVSS

SEQ ID NO: 10021 - protein, 118 aa, Artificial Sequence
  source: /note="Description of Artificial Sequence: Synthetic polypeptide"
EVQLVESGGGVVQPGRSLRLSCAASGFTFSSYGIHWVRQAPGKGLEWLAVISYDGSNKHYVDSVKGRLTISRDNSKNTLYLQMNSLRAEDTAVYYCARGGRGWSFDSWGQGTTVTVSS

SEQ ID NO: 10022 - protein, 132 aa, Artificial Sequence
  source: /note="Description of Artificial Sequence: Synthetic polypeptide"
EVQLVESGGGVVQPGRSLRLSCAASGFTFSSYGMHWVRQAPGKGLEWVAFISYDGSNKFYADSVKGRLTISRDNSKNMLYLQMNSLRAEDTAVYYCAKGGVVIPGPTRYNWNHYYYYGMDVWGQGTTVTVSS

SEQ ID NO: 10023 - protein, 119 aa, Artificial Sequence
  source: /note="Description of Artificial Sequence: Synthetic polypeptide"
EVQLVESGGGVVQPGRSLRLSCAASGFTFSSYGMHWVRQAPGKGLEWVAVISYDGSNKHYTDSVKGRFTISRDNSKNTLYLQMNSLRVEDTAVYYCAQSRGYSYGLGYWGQGTLVTVSS

SEQ ID NO: 10024 - protein, 118 aa, Artificial Sequence
  source: /note="Description of Artificial Sequence: Synthetic polypeptide"
EVQLVESGGGVVQPGRSLRLSCAASGFTFSSYGMHWVRQAPGKGLEWVTVISYDGSDKYYADSVKGRFTISRDNSKNTLYLQMNSLRAEDTAMYYCVKGGSGWSFDYWGQGTLVTVSS

SEQ ID NO: 10025 - protein, 121 aa, Artificial Sequence
  source: /note="Description of Artificial Sequence: Synthetic polypeptide"
EVQLVESGPGLVKPSETLSLKCTVSGGSIRSSGYYWGWIRQPPGKGLEWIGSIHHSGSTYYNPSLKSRVTISVDTSKSQFSLRLTSVTAADTAVYYCGRHGRDYYYGMDVWGQGTTVTVSS

SEQ ID NO: 10026 - protein, 121 aa, Artificial Sequence
  source: /note="Description of Artificial Sequence: Synthetic polypeptide"
EVQLVESGPGLVKSSETLSLKCTVSGGSISSSGYYWGWIRQPPGKGLEWIGSIHRSGSTFYNPSLKSRVTISVDTSKSQFSLRLTSVTAADTSVYFCGRHGRDYYYGMDVWGQGTTVTVSS

SEQ ID NO: 10027 - protein, 113 aa, Llama glama
EVQLVQPGAELRNPGASVKVSCKASGDTFTDYYIHWVRQAPGQGLEWMGRIDPEDGGTKYTQKFQGRVTFTADTSTSTVYLELDSLRSEDTAVYYCVGDMDYWGKGTLVTVSS

SEQ ID NO: 10028 - protein, 114 aa, Llama glama
EVQLVQPGAELRNPGASVKVSCKASGYIFTSAYIDWVRQAPGQGLEWMGRIDPEDGETRYAHQFRDRVTFTADTSTSTVYAELNSLRSEDTAVYYCAITIEGFWGQGTQVTVSS

SEQ ID NO: 10029 - protein, 113 aa, Llama glama
EVQLVQPGAELRNPGASVKVSCKASGYTFTKYYIDWVRQAPGQGLEWMGLIDPEDGATKYAQKFQGRVTFTTDTSTSTAYVELSSLRSEDTAVYYCLIFPRYWGQGTLVTVSS

SEQ ID NO: 10030 - protein, 114 aa, Llama glama
EVQLVQPGAELRNPGASVKVSCKASGYTFTRYYIDWVRQAPGQGLEWMGRIDPEDGGTKVARKFQGRVTFTADTSASTVYLSLTNLRSDDTGVYYCATRGRGSWGQGTRVTVSS

SEQ ID NO: 10031 - protein, 118 aa, Llama glama
EVQLVQPGAELRNPGASVKVSCKASGYTFTSSYIDWVRQVPGQGFEWMGRMDPEDGTTKPAPKFQGRVTFTADTSAHTAYMELTTLRVDDTAVYFCAIDDGLGALNYWGHGTQVTVSS

SEQ ID NO: 10032 - protein, 117 aa, Llama glama
EVQLVQPGAELRNPGASVKVSCKASGYTFTSSYINWLRQAPGQGPEWMGRIDPEDGRTKSRQNFQGRVTFTADTSTSTAYVELRNLRSEDTAVYYCVAGAPDEYAYWGQGTQVTVSS

SEQ ID NO: 10033 - protein, 113 aa, Llama glama
EVQLVQPGAELRNPGASVKVSCKASGYTYTSAYIVWVRQAPGEGLEWMGRIDPEDGGTKYAQKFQGRVTFTADTSTNTAYVELSSLRSDDTAVYYCTAGLDYWGKGTLVTVSS

SEQ ID NO: 10034 - protein, 114 aa, Llama glama
EVQLVQPGAELRNPGTSVKVSCKTSGYYFTSSDIQWVRQAPAQGLEWMGRIDPEDGATKYAPKFQGRVTFTADTFTRTAYVELSNLRSDDTAVYYCMTAGGEYWGKGTLVTVSS

SEQ ID NO: 10035 - protein, 113 aa, Llama glama
EVQLVQPGAELTKPGASVKVSCNTSGYTFTGYYIDWVRQVPGEGLEWMGRIDPEDGDTKYAQKFQGRVTITADTSTTTAYMELSSLRSEDTAVYYCSLGVDYWGQGTQVTVSS

SEQ ID NO: 10036 - protein, 114 aa, Llama glama
EVQLVQPGAEVRRPGAAVKVSCKASGFALISSYIDWVRQAPGQGLEWMGRIDPEDGGTSYAQKFQGRVTVTVDTATSTAYVELSSLRSDDTGVYFCMVGDSGYWGQGTQVTVSS

SEQ ID NO: 10037 - protein, 114 aa, Llama glama
EVQLVQPGAEVRRPGAAVKVSCKASGFALISSYIDWVRQAPGQGLEWMGRIDPEDGGTSYAQKFQGRVTVTVDTATSTVYVELSSLRSDDTGVYFCMVGDSGYWGQGTQVTVSS

SEQ ID NO: 10038 - protein, 116 aa, Llama glama
EVQLVQPGHELKNPGASVKVSCKASGYIFTNHYIHWVRQAPGQGLEWMGRIDPEDGGVKYAQRFRGRVTFTVDTSTTTAYVELHSLRTDDTGVYYCAFWSDDDDYWGQGTQVTVSS

SEQ ID NO: 10039 - protein, 113 aa, Llama glama
EVQLVQPGTELRNPGASVKVSCKTSGYTFTGYYIDWVRQRPGEGLEWMGRIDPEDGDTKYAQKFQGGVTITADTSTTTAYLELSSLRSEDTAVYYCALGVDYWGQGTQVTVSS

SEQ ID NO: 10040 - protein, 113 aa, Llama glama
EVQLVQPGTELRNPGSSVKVSCKASGYIFSNYFIDWVRQAPGQGLEWVGSIDPEDGGTQTAQKFQGRVIFTVDTSTSTAYVEVSSLRPEDTGVYYCVIPWNYWGQGTQVTVSS

SEQ ID NO: 10041 - protein, 123 aa, Artificial Sequence
  source: /note="Description of Artificial Sequence: Synthetic polypeptide"
EVQLVQSGGGLVKPGGSLRLSCAASGFTFSDAWMTWVRQAPGKGLEWIGRIKSKTDGGTTDYAAPVKGRFTISRDDSKNTLYLQMNSLKTEDTAAYYCFTDDFWSGDYTHCWGQGTLVTVSSS

SEQ ID NO: 10042 - protein, 127 aa, Artificial Sequence
  source: /note="Description of Artificial Sequence: Synthetic polypeptide"
EVQLVQSGGGLVKPGGSLRLSCAASGFTFSDYYMNWIRQAPGKGLEWVSYISTGGSTIYYADSVKGRFTISRDNAKNSLYLQMNSLRADDTAVYYCARGVDSDDYEDFYSYYDLDVWGQGTTVTVSS

SEQ ID NO: 10043 - protein, 116 aa, Artificial Sequence
  source: /note="Description of Artificial Sequence: Synthetic polypeptide"
EVQLVQSGGGLVKPGGSLRLSCAASGFTFSDYYMSWIRQAPGKGLEWVSCITSSGSTKKHADSVKGRFTISRDNAKNSLYLQMNSLRAEDTAVYYCARVSRGFDHWGQGTLVTVSS

SEQ ID NO: 10044 - protein, 122 aa, Artificial Sequence
  source: /note="Description of Artificial Sequence: Synthetic polypeptide"
EVQLVQSGGGLVKPGGSLRLSCAASGFTFSNAWMTWVRQAPGKGLEWVGRIKSKTDGGTTDYAAPVKGRFTISRDDSKNTLYLQMNSLKTEDTAVYYCLTDDFWSEYYTHCWGQGTLVTVSS

SEQ ID NO: 10045 - protein, 116 aa, Artificial Sequence
  source: /note="Description of Artificial Sequence: Synthetic polypeptide"
EVQLVQSGGGLVKPGGSLRLSCAASGFTFSNVWMSWVRQAPGQGLEWVGRIKSKIDGGTTDYAAPVKGRFTISRDDSKNTLYLQMNSLKTEDTAVYYCTTGGGTYWGQGTLVTVSS

SEQ ID NO: 10046 - protein, 127 aa, Artificial Sequence
  source: /note="Description of Artificial Sequence: Synthetic polypeptide"
EVQLVQSGGGLVKPGGSLRLSCAASGVTFSDYYMNWIRQAPGKGLEWVSYISTSGSIIYYTDSVKGRFTISRDNAKNSLYLQMNSLRAEDTAVYYCAGGVDSDDYEDYYSYYDMDVWGQGTMVTVSS

SEQ ID NO: 10047 - protein, 127 aa, Artificial Sequence
  source: /note="Description of Artificial Sequence: Synthetic polypeptide"
EVQLVQSGGGLVKPGGSLRLSCAASGVTFSDYYMTWIRQAPGKGLEWVSYISTSGRTIYYADSVKGRFTISRDNAKNSLYLQMNNLRAEDTAVYYCARGVDSDDYEDFYSYYDMDVWGQGTTVTVSS

SEQ ID NO: 10048 - protein, 124 aa, Artificial Sequence
  source: /note="Description of Artificial Sequence: Synthetic polypeptide"
EVQLVQSGGGLVKPGGSLRLSCTASGFTFSNAWMSWVRQAPGKGLEWVGRIKSKPAGGTTDYAAPVKDRFSISRDDSKTTLYLRMNSLKTEDTAVYYCTTSITTRRGTYYFDYWGQGTLVTVSS

SEQ ID NO: 10049 - protein, 127 aa, Artificial Sequence
  source: /note="Description of Artificial Sequence: Synthetic polypeptide"
EVQLVQSGGGLVKPGGSLTLSCAASGFTFSDYYMNWIRQAPGKGLEWVSYISTGGSTIYYADSVKGRFTISRDNAKNSLYLQMNSLKADDPAVYYCARGVDSDDYEDFYSYYDLDVWGQGTTVTVSS

SEQ ID NO: 10050 - protein, 114 aa, Artificial Sequence
  source: /note="Description of Artificial Sequence: Synthetic polypeptide"
EVQLVQSGGGLVQFGGSLRLSCAASGFTFSSYGMNWVRQTPGKGLEWVSAIGGSGGSTYYADSVKGRFTISRDNSKNTLYLQMTSLRAEDTAVYYCAKGAYDVWGQGTTVTVSS

SEQ ID NO: 10051 - protein, 121 aa, Artificial Sequence
  source: /note="Description of Artificial Sequence: Synthetic polypeptide"
EVQLVQSGGGLVQPGGSLKLSCAASGFTFSNYAMSWVRQAPGKGLEWVSAISGDGGNTYYPNSVKGRFTISRDNSKNTLYLQMNSLRAEDTAVYYCAKDYCNSTYYYGEDWGRGTTVTVSS

SEQ ID NO: 10052 - protein, 117 aa, Artificial Sequence
  source: /note="Description of Artificial Sequence: Synthetic polypeptide"
EVQLVQSGGGLVQPGGSLRLSCAASGFTFRSYVMSWVRQAPGMGLEWVSAITASGGSTYYGDSVKGRFTISRDNSKNTLYLQMNSLRAEDTAVYYCAKDYYGPFDYWGQGTLVTVSS

SEQ ID NO: 10053 - protein, 120 aa, Artificial Sequence
  source: /note="Description of Artificial Sequence: Synthetic polypeptide"
EVQLVQSGGGLVQPGGSLRLSCAASGFTFSSYAMSWVRQAPGKGLEWVSAISGSGDYTYYADSVKGRFTISRDNSKNTLYLQMSSLRAEDTAVYYCAKYSYGLYYYFDLWGRGTLVTVSS

SEQ ID NO: 10054 - protein, 122 aa, Artificial Sequence
  source: /note="Description of Artificial Sequence: Synthetic polypeptide"
EVQLVQSGGGLVQPGGSLRLSCAASGFTFSSYAMSWVRQAPGKGLEWVSAISGSGGNTYYADSVKGRFTISRDNSKNTLYLQMNSLRAEDTAVYYCAKDPHSSNWPGFFDLWGRGTLVTVSS

SEQ ID NO: 10055 - protein, 126 aa, Artificial Sequence
  source: /note="Description of Artificial Sequence: Synthetic polypeptide"
EVQLVQSGGGLVQPGGSLRLSCAASGFTFSSYWMSWVRQAPGKGLEWVANIKQDGSEKYYVDSVKGRFTISRDNAKSSLHLQMNSLRAEDTAVYYCARETVDYYDNSEYSYGMDVWGQGTTVTVSS

SEQ ID NO: 10056 - protein, 128 aa, Artificial Sequence
  source: /note="Description of Artificial Sequence: Synthetic polypeptide"
EVQLVQSGGGLVQPGRSLRLSCAASGFTFDDYAMHWVRQAPGKGLEWVSGISWNSGSIGYADSVKGRFTISRDNAKNSLYLQMNSLRAEDTALYYCAKDIEYYDILTGYYSYYIMDVWGQGTTVTVSS

SEQ ID NO: 10057 - protein, 128 aa, Artificial Sequence
  source: /note="Description of Artificial Sequence: Synthetic polypeptide"
EVQLVQSGGGLVQPGRSLRLSCAASGFTFDDYAMHWVRQAPGKGLEWVSGISWNSGSIGYADSVKGRFTSSRDNAKNSLYLQMNSLRAEDTALYYCAKDMEYYDILTGYYSYYIMDVWGQGTTVTVSS

SEQ ID NO: 10058 - protein, 119 aa, Artificial Sequence
  source: /note="Description of Artificial Sequence: Synthetic polypeptide"
EVQLVQSGGGVVQPGRSLRLSCAASGFSFSSYGMHWVRQAPGRGLEWVAVISYVGINKYYGDSVKGRFTISRDDSKNTLYLQMNSLRAEDTAVYYCAKSRGYSYGLVYWGQGTLVTVSS

SEQ ID NO: 10059 - protein, 118 aa, Artificial Sequence
  source: /note="Description of Artificial Sequence: Synthetic polypeptide"
EVQLVQSGGGVVQPGRSLRLSCAASGFTFNNYGMHWVRQAPGKGLEWLAVISYDGNDKHYVDSVKGRFTTSRDNSKNTLYLQMNSLRVEDTAVFYCVRGGSGWSFDSWGQGTLVTVSS

SEQ ID NO: 10060 - protein, 121 aa, Artificial Sequence
  source: /note="Description of Artificial Sequence: Synthetic polypeptide"
EVQLVQSGGGVVQPGRSLRLSCAASGFTFSSYGMHWVRQAPGKGLEWVAVISYAGINKYYADSVKGRFTISRDDSKNTLFLQMNSLRTEDTAVYYCAKRDSGISHDPFDIWGQGTMVTVSS

SEQ ID NO: 10061 - protein, 119 aa, Artificial Sequence
  source: /note="Description of Artificial Sequence: Synthetic polypeptide"
EVQLVQSGGGVVQPGRSLRLSCAASGFTFSSYGMHWVRQAPGKGLEWVAVISYQESNKHYVDSVKGRFTISRDNSKNTLYLHMNSLRAEDTAVYYCAQSRGYSYGLGYWGQGTLVTVSS

SEQ ID NO: 10062 - protein, 119 aa, Artificial Sequence
  source: /note="Description of Artificial Sequence: Synthetic polypeptide"
EVQLVQSGGGVVQPGRSLRLSCAASGFTFSSYGMHWVRQAPGKGLEWVAVISYQESNKHYVDSVKGRFTISRDNSKNTLYLQMNSLRAEDTAVYYCAKSRGYSYGLGYWGQGTLVTVSS

SEQ ID NO: 10063 - protein, 119 aa, Artificial Sequence
  source: /note="Description of Artificial Sequence: Synthetic polypeptide"
EVQLVQSGGGVVQPGRSLRLSCAASGFTFSSYGMHWVRQAPGKGLEWVAVISYQESNKHYVDSVKGRFTISRDNSKNTLYLQMNSLRAEDTAVYYCAKSRGYSYGLGYWGQGTMVTVSS

SEQ ID NO: 10064 - protein, 121 aa, Artificial Sequence
  source: /note="Description of Artificial Sequence: Synthetic polypeptide"
EVQLVQSGGGVVQPGRSLRLSCAASGFTFSSYGMHWVRQAPGKGLEWVAVIWYDGSNKYYADSVKGRFTISRDNSKNTLYLQMNSLRAEDTAVYYCATRSGYSSTWYVDYWGQGTLVTVSS

SEQ ID NO: 10065 - protein, 117 aa, Artificial Sequence
  source: /note="Description of Artificial Sequence: Synthetic polypeptide"
EVQLVQSGGGVVQPGRSLRLSCAASGFTFSSYGMHWVRQAPGKGLEWVVVIWYDGSNKYYGDSVKGRFTISRDNSKNTLYLQMNSLRAEDTAVYYCARGNYFAFDIWGQGTMVTVSS

SEQ ID NO: 10066 - protein, 119 aa, Artificial Sequence
  source: /note="Description of Artificial Sequence: Synthetic polypeptide"
EVQLVQSGGGVVQPGRSLRLSCEASGFTFSSYGMHWVRQAPGKGLEWVAVISYDGSNKHYTDSVKGRFTISRDNSKNTLYLQMNSLRAEDTAVYFCAQSRGYSYGLGYWGQGTLVTVSS

SEQ ID NO: 10067 - protein, 128 aa, Artificial Sequence
  source: /note="Description of Artificial Sequence: Synthetic polypeptide"
EVQLVQSGGGVVQPGRSLRLSCTASGFTFSVYGIHWVRQAPGKGLEWVAVIWYDGSNKYYTDSVKGRFTISRDNSKNTLYLQMNSLRAEDTALYYCAREGDLSSSSGSGGYHYVVDVWGQGTMVTVSS

SEQ ID NO: 10068 - protein, 121 aa, Artificial Sequence
  source: /note="Description of Artificial Sequence: Synthetic polypeptide"
EVQLVQSGPGLVKSSETLSLKCTVSGGSISSSGYYWGWIRQPPGKGLEWIGSIHRSGSTFYNPSLKSRVTISVDTSKSQFSLRLTSVTAADTSVYFCGRHGRDYYYGMDVWGQGTTVTVSS

SEQ ID NO: 10069 - protein, 114 aa, Llama glama
EVQVQESGPGLVKPSQTLSLTCTVSGASIADKSSAWSWIRQPPGKGLEWMGVIRYDGNTRYSPTLKSRTTISRDTSKNQISLQLTSVTPDDTAVYYCSREITLWGQGTQVTVSS

SEQ ID NO: 10070 - protein, 124 aa, Llama glama
EVQVQESGPGLVTPSQTLSLTCTVSGGSIKNNYYYWNWIRQPPGKGLEWMGAIAYSGSTYYSPSLQSRTSISRDTSKNQFTLQLSSVTPEDTAVYYCARVPSVFGLPYGGMNYWGKGTLVTVSS

SEQ ID NO: 10071 - protein, 111 aa, Llama glama
HSAVTQPPSVSGSPGKTVTISCAGTSSDVGYGDYVSWYQQLPGMAPKLLISGVNKRASGIADRFSGSKSGNTASLTISGLQSEDEADYYCASYKYSNNVVFGGGTHLTVLG

SEQ ID NO: 10072 - protein, 114 aa, Artificial Sequence
  source: /note="Description of Artificial Sequence: Synthetic polypeptide"
KVQLLESGGGLVQFGGSLKLSCAASGFTFTSYGMNWVRQTPGKGLEWVSAIGGSGGSTYYADSVKGRFTISRDNSKNTLYLQMTSLRAEDTAVYYCAKGAYDVWGQGTTVTVSS

SEQ ID NO: 10073 - protein, 118 aa, Artificial Sequence
  source: /note="Description of Artificial Sequence: Synthetic polypeptide"
KVQLVESGGGLVKPGGSLRLSCAASGFTFSDHYMNWIRQAPGKGLEWVSYFSSNVNTIYYTDSVKGRFTISRDNAKNSLYLQMNSLRAEDTAVYYCAKRTPAGPFDYWGQGTLVTVSS

SEQ ID NO: 10074 - protein, 114 aa, Artificial Sequence
  source: /note="Description of Artificial Sequence: Synthetic polypeptide"
KVQLVESGGGLVQFGGSLRLSCAASGFTFSSYGMNWVRQTPGKGLEWVSAIGGSGGSTYYADSVKGRFTISRDNSKNTLYLQMTSLRAEDTAVYYCAKGAYDVWGQGTTVTVSS

SEQ ID NO: 10075 - protein, 140 aa, Artificial Sequence
  source: /note="Description of Artificial Sequence: Synthetic polypeptide"
MEWNWVVLFLLSLTAGVYAQGQMQQSGAELVKPGASVKLSCKTSGFTFSSSYISWLKQKPGQSLEWIAWIYAGTGGTSYNQKFTGKAQLTVDTSSSTAYMQFSSLTTEDSAIYYCARQDGNYRYWYFDVWGAGTTVTVSS

SEQ ID NO: 10076 - protein, 825 aa, Homo sapiens
MGWLCSGLLFPVSCLVLLQVASSGNMKVLQEPTCVSDYMSISTCEWKMNGPTNCSTELRLLYQLVFLLSEAHTCIPENNGGAGCVCHLLMDDVVSADNYTLDLWAGQQLLWKGSFKPSEHVKPRAPGNLTVHTNVSDTLLLTWSNPYPPDNYLYNHLTYAVNIWSENDPADFRIYNVTYLEPSLRIAASTLKSGISYRARVRAWAQCYNTTWSEWSPSTKWHNSYREPFEQHLLLGVSVSCIVILAVCLLCYVSITKIKKEWWDQIPNPARSRLVAIIIQDAQGSQWEKRSRGQEPAKCPHWKNCLTKLLPCFLEHNMKRDEDPHKAAKEMPFQGSGKSAWCPVEISKTVLWPESISVVRCVELFEAPVECEEEEEVEEEKGSFCASPESSRDDFQEGREGIVARLTESLFLDLLGEENGGFCQQDMGESCLLPPSGSTSAHMPWDEFPSAGPKEAPPWGKEQPLHLEPSPPASPTQSPDNLTCTETPLVIAGNPAYRSFSNSLSQSPCPRELGPDPLLARHLEEVEPEMPCVPQLSEPTTVPQPEPETWEQILRRNVLQHGAAAAPVSAPTSGYQEFVHAVEQGGTQASAVVGLGPPGEAGYKAFSSLLASSAVSPEKCGFGASSGEEGYKPFQDLIPGCPGDPAPVPVPLFTFGLDREPPRSPQSSHLPSSSPEHLGLEPGEKVEDMPKPPLPQEQATDPLVDSLGSGIVYSALTCHLCGHLKQCHGQEDGGQTPVMASPCCGCCCGDRSSPPTTPLRAPDPSPGGVPLEASLCPASLAPSGISEKSKSSSSFHPAPGNAQSSSQTPKIVNFVSVGPTYMRVS

SEQ ID NO: 10077 - protein, 468 aa, Homo sapiens
MLAVGCALLAALLAAPGAALAPRRCPAQEVARGVLTSLPGDSVTLTCPGVEPEDNATVHWVLRKPAAGSHPSRWAGMGRRLLLRSVQLHDSGNYSCYRAGRPAGTVHLLVDVPPEEPQLSCFRKSPLSNVVCEWGPRSTPSLTTKAVLLVRKFQNSPAEDFQEPCQYSQESQKFSCQLAVPEGDSSFYIVSMCVASSVGSKFSKTQTFQGCGILQPDPPANITVTAVARNPRWLSVTWQDPHSWNSSFYRLRFELRYRAERSKTFTTWMVKDLQHHCVIHDAWSGLRHVVQLRAQEEFGQGEWSEWSPEAMGTPWTESRSPPAENEVSTPMQALTTNKDDDNILFRDSANATSLPVQDSSSVPLPTFLVAGGSLAFGTLLCIAIVLRFKKTWKLRALKEGKTSMHPPYSLGQLVPERPRPTPVLVPLISPPVSPSSLGSDNTSSHNRPDARDPRSPYDISNTDYFFPR

SEQ ID NO: 10078 - protein, 113 aa, Llama glama
NFMLTQLPSVSGSPGQKVTISCTGSSSNIGGGYSVQWFQQLPGTPPKLLIYGNSNRASGVPDRFSGSRSGSSASLTITGLQAEDEADYYCSSWDDSLSGHPVFGGGTKLTVLG

SEQ ID NO: 10079 - protein, 107 aa, Llama glama
NFMLTQPPSVSVALRQTAKITCGGEDIRTKNVHWYQQKPGQAPVLVIYKDSERPSGIPERFSGSSSGGTATLTISGVQAEDEADYYCQSVDSSNIVFGGGTKLTVLG

SEQ ID NO: 10080 - protein, 120 aa, Artificial Sequence
  source: /note="Description of Artificial Sequence: Synthetic polypeptide"
QEQLVESGGGLVQPGASLTLTCTASGFSFSNTNYMCWVRQAPGRGLEWVGCMPVGFIASTFYATWAKGRSAISKSSSTAVTLQMTSLTVADTATYFCARESGSGWALNLWGQGTLVTVSS

SEQ ID NO: 10081 - protein, 121 aa, Artificial Sequence
  source: /note="Description of Artificial Sequence: Synthetic polypeptide"
QLQLQESGPGLVKSSETLSLKCTVSGGSISSSGYYWGWIRQPPGKGLEWIGSIHRSGSTFYNPSLKSRVTISVDTSKSQFSLRLTSVTAADTSVYFCGRHGRDYYYGMDVWGQGTTVTVSS

SEQ ID NO: 10082 - protein, 120 aa, Llama glama
QLQLVESGGGLVQPGGSLRLSCAASGFTFDDYAMSWVRQAPGKGLEWVSAISWNGGSTYYAESMKGRFTISRDNAKNTLYLQMNSLKSKDTAVYYCARRRYGLGSEYDYWGQGTQVTVSS

SEQ ID NO: 10083 - protein, 116 aa, Llama glama
QLQLVESGGGLVQPGGSLRLSCAASGFTFSFSEYVMSWVRQAPGKGLEWVSDINSGGEITAYADSVKGRFTVSRDNTKNTVYLQMNSLKPEDTAVYYCAQGSFGAWGQGTQVTVSS

SEQ ID NO: 10084 - protein, 124 aa, Artificial Sequence
  source: /note="Description of Artificial Sequence: Synthetic polypeptide"
QQQLLESGGGLVQPEGSLALTCTASGFSFSSGYDMCWVRQPPGKGLEWVGCIYSGDDNDITYYASWARGRFTISNPSSTTVTLQMTSLTVADTATYFCARGHAIYDNYDSVHLWGQGTLVTVSS

SEQ ID NO: 10085 - protein, 118 aa, Artificial Sequence
  source: /note="Description of Artificial Sequence: Synthetic polypeptide"
QSLEESGGDLVKPGASLTLTCTASGFSFSSGYDMCWVRQAPGKGLEWIACIYPNNPVTYYASWAKGRFTISKTSSTTVTLQMTSLTAADTATYFCGRSDSNGHTFNLWGQGTLVTVSS

SEQ ID NO: 10086 - protein, 119 aa, Artificial Sequence
  source: /note="Description of Artificial Sequence: Synthetic polypeptide"
QSLEESGGGLVKPEGSLTLTCKASGFSFTGAHYMCWVRQAPGKGLEWIACIYGGSVDITFYASWAKGRFAISKSSSTAVTLQMTSLTAADTATYVCARESGSGWALNLWGPGTLVTVSS

SEQ ID NO: 10087 - protein, 119 aa, Artificial Sequence
  source: /note="Description of Artificial Sequence: Synthetic polypeptide"
QSLEESGGGLVQPEGSLTLTCTASGFFFSGAHYMCWVRQAPGQGLEWIGCTYGGSVDITFYASWAKGRFAISKTSSTTVTLQLTSLTAADTATYVCARESGSGWALNLWGQGTLVTVSS

SEQ ID NO: 10088 - protein, 127 aa, Artificial Sequence
  source: /note="Description of Artificial Sequence: Synthetic polypeptide"
QVQLLQSGGGLVKPGGSLRLSCAASGFTFSDYYMNWIRQAPGKGLEWVSYISTGGSTIYYADSVKGRFTISRDNAKNSLYLQMNSLRADDTAVYYCARGVDSDDYEDFYSYYDLDVWGQGTTVTVSS

SEQ ID NO: 10089 - protein, 115 aa, Artificial Sequence
  source: /note="Description of Artificial Sequence: Synthetic polypeptide"
QVQLQESGPGLVKPSETLSLTCTVSGGSISGYYWSRIRQPPGKGLEWIGYIYYSGNTNYDPSLKSRVTISVDTSKNQFSLKLRSVTAADTAVYHCARLGRAFDIWGQGTMVTVSS

SEQ ID NO: 10090 - protein, 124 aa, Llama glama
QVQLQESGPGLVKPSQTLSLACTVSGGSITLNGGYWSWIRQPPGKGLEWMGAIAYTGSTYISPSLKSRTSISRDASENQFTLQLSAVTPEDSAVYYCARHHYDSNWYYYGMDYWGKGTLVTVSS

SEQ ID NO: 10091 - protein, 123 aa, Llama glama
QVQLQESGPGLVKPSQTLSLTCTVSGGSITNYGWSWIRQPPGKGLEWMGVIAYDGSTYYSPSLKSRTSISRDTSKNQFSLQLSSVTPEDTAVYYCASAMVTTSSPWVKTFGAWGQGTQVTVSS

SEQ ID NO: 10092 - protein, 120 aa, Llama glama
QVQLQESGPGLVKPSQTLSLTCTVSGGSITTSFYAWSWIRQPPGKGLEWMGVIAYDGRTFYSPSLKSRTHISRDTSKNQFSLQLSSVTPEDTAVYYCARGGVVAWSYDYWGQGTQVTVSS

SEQ ID NO: 10093 - protein, 121 aa, Artificial Sequence
  source: /note="Description of Artificial Sequence: Synthetic polypeptide"
QVQLQQWGAGLLKPSETLSLTCAVYGGSFSGHYWSWIRQPPGKGLEWIGEINHRGSTNYNPSLKSRATISVDTSKNQFSLKLSSVTAADTAVYYCAREGSLAARLWFFDLWGRDTLVTVSS

SEQ ID NO: 10094 - protein, 121 aa, Artificial Sequence
  source: /note="Description of Artificial Sequence: Synthetic polypeptide"
QVQLQQWGAGLLKPSETLSLTCAVYGGSFSGHYWTWIRQPPGKGLEWIGEINHRGNTNYNPSLKSRATISVDTSKNQFSLKLSSVTAADTAVYYCAREGSLAARLWFFDLWGRDTPVTVSS

SEQ ID NO: 10095 - protein, 121 aa, Artificial Sequence
  source: /note="Description of Artificial Sequence: Synthetic polypeptide"
QVQLQQWGAGLLTPSETLSLTCAVYGGSFSGHYWSWIRQPPGKGLEWIGEINPRGSTNYKPSLKSRVTISVDTSKNQFSLNLRSVTAADTAMYYCAREGNLAARLWFFDLWGRGTLVTVSS

SEQ ID NO: 10096 - protein, 121 aa, Artificial Sequence
  source: /note="Description of Artificial Sequence: Synthetic polypeptide"
  MOD_RES (7)..(7): Any amino acid
QVQLQQXGAGLLKPSETLSLTCAVYGGSFSGHYWSWIRQPPGKGLEWIGEINHRGSTNYNPSLKSRATISVDTSKNQFSLKLSSVTAADTAVYYCAREGSLAARLWFFDLWGRDTLVTVSS

SEQ ID NO: 10097 - protein, 114 aa, Artificial Sequence
  source: /note="Description of Artificial Sequence: Synthetic polypeptide"
QVQLVESGAEVKKPGASVKVSCKASGYTFTSYGISWVRQAPGQGLEWMGWISGYNGNTKYAQKVQGRVTMTTDASTSTAYMELRSLRSDDTAVYYCARNWGDYWGQGTLVTVSS

SEQ ID NO: 10098 - protein, 117 aa, Artificial Sequence
  source: /note="Description of Artificial Sequence: Synthetic polypeptide"
QVQLVESGAEVKKPGASVKVSCKASGYTFTTYGISWVRQAPGQGLEWMGWISAYNGKTNYAQKFQGRVTMTTDTSTNTAYMELRSLRFDDTAVYYCARDGGTPFYYWGQGTLVTVSS

SEQ ID NO: 10099 - protein, 117 aa, Artificial Sequence
  source: /note="Description of Artificial Sequence: Synthetic polypeptide"
QVQLVESGAGVINPGASLILSCAASGYTFTSYHIHWVRQAPGQGLEWMGWINHNGGDKNYAHYFQGRVTLTRDTSNTTLYLELNRLRSDDTAVYYCAKDGIGNFDYWGQGTLVTVSS

SEQ ID NO: 10100 - protein, 120 aa, Artificial Sequence
  source: /note="Description of Artificial Sequence: Synthetic polypeptide"
QVQLVESGGDLVQPGGSLRLSCAASGFTFSSYAMSWVRQAPGKGLEWVSAISGSGDYTYYADSVKGRFTISRDNSKNTLYLQMNSLRAEDTAVYYCAKYSYGLYYYFDLWGRGTTVTVSS

SEQ ID NO: 10101 - protein, 114 aa, Artificial Sequence
  source: /note="Description of Artificial Sequence: Synthetic polypeptide"
QVQLVESGGGLVKPGGSLRLSCAASGFTFSDYYISWIRQAPGKGLEWVSYISSSGSTRYYADSVKGRFTISRDNAKNSLYLQMNSLRAEDTAVYYCVRSGMDVWGQGTTVTVSS

SEQ ID NO: 10102 - protein, 127 aa, Artificial Sequence
  source: /note="Description of Artificial Sequence: Synthetic polypeptide"
QVQLVESGGGLVKPGGSLRLSCAASGFTFSDYYMNWIRQAPGKGLEWVSYISTSGSTIYYADSVKGRFTISRDNAKNSLYLQMNTLRAEDTAVYYCARGVDSSDYEDYYSYYDLDVWGQGTTVTVSS

SEQ ID NO: 10103 - protein, 116 aa, Artificial Sequence
  source: /note="Description of Artificial Sequence: Synthetic polypeptide"
QVQLVESGGGLVKPGGSLRLSCAASGFTFSDYYMSWIRQAPGKGLEWVSCITSSGGTKKYADSVKGRFTISRDNAENSLYLQMNSLRAEDTAVYYCARVSRGFDHWGQGTLVTVSS

SEQ ID NO: 10104 - protein, 127 aa, Artificial Sequence
  source: /note="Description of Artificial Sequence: Synthetic polypeptide"
QVQLVESGGGLVKPGGSLRLSCAASGVTFSDYYMTWIRQAPGKGLEWVSYISTDGRTIYYADSVKGRFTISRDNAKNSLYLQMNNLRAEDTAVYYCARGVDSDDYEDFYSYYDMDVWGQGTTVTVSS

SEQ ID NO: 10105 - protein, 114 aa, Artificial Sequence
  source: /note="Description of Artificial Sequence: Synthetic polypeptide"
QVQLVESGGGLVQFGGSLKLSCAASGFTFSSYGMNWVRQTPGKGLEWVSAIGGSGGSTYYADSVKGRFTISRDNSKNTLYLQMTSLRAEDTAVYYCAKGAYDVWAQGTTVTVSS

SEQ ID NO: 10106 - protein, 114 aa, Artificial Sequence
  source: /note="Description of Artificial Sequence: Synthetic polypeptide"
QVQLVESGGGLVQFGGSLKLSCAASGFTFSSYGMNWVRQTPGKGLEWVSAIGGSGGSTYYADSVKGRFTISRDNSKNTLYLQMTSLRAEDTAVYYCAKGAYDVWGQGTTVTVSS

SEQ ID NO: 10107 - protein, 114 aa, Artificial Sequence
  source: /note="Description of Artificial Sequence: Synthetic polypeptide"
QVQLVESGGGLVQFGGSLRLSCAASGFTFSSYGMNWVRQSPGKGLEWVSAIGGSGGSTYYADSVKGRFTISRDNSKNTLYLQMTSLRAEDTAVYYCAKGAYDVWGQGTTVTVSS

SEQ ID NO: 10108 - protein, 114 aa, Artificial Sequence
  source: /note="Description of Artificial Sequence: Synthetic polypeptide"
QVQLVESGGGLVQFGGSLRLSCAASGFTFSSYGMNWVRQTPGKGLEWVSAIGGSGGSTYYADSVKGRFTISRDNSKNTLYLQMTSLRAEDTAVYYCAKGAYDVWGQGTTVTVSS

SEQ ID NO: 10109 - protein, 117 aa, Llama glama
QVQLVESGGGLVQPGGSLRLSCAASGFTFGSYDMSWVRQAPGKGPEWVSAINKSGGSTYYADSVKGRFTISRDNAKNTLYLQMNSLKPEDTAVYYCATMYGSSWSYWGQGTQVTVSS

SEQ ID NO: 10110 - protein, 113 aa, Artificial Sequence
  source: /note="Description of Artificial Sequence: Synthetic polypeptide"
QVQLVESGGGLVQPGGSLRLSCAASGFTFSSYAMNWVRQAPGKGLEWVSTISGSGGSTYYPDSVKGRFTISRDNSKNTLYLQMNSLKAEDTAVYYCAKVGGDVWGQGTTVMFS

SEQ ID NO: 10111 - protein, 118 aa, Artificial Sequence
  source: /note="Description of Artificial Sequence: Synthetic polypeptide"
QVQLVESGGGLVQPGGSLRLSCAASGFTFSSYAMSWVRQAPGKGLEWVSAIMDDGGNTYYADSVKGRFTISRDNSKNMLYLQMNSLRAEDTAVYYCARGQFLMWFDPWGQGTLVTVSS

SEQ ID NO: 10112 - protein, 121 aa, Artificial Sequence
  source: /note="Description of Artificial Sequence: Synthetic polypeptide"
QVQLVESGGGLVQPGGSLRLSCAASGFTFSSYAMSWVRQAPGKGLEWVSAISGSGGSTYYADSVKGRFTISRDNSKNTLYLQMNSLRAEDTAVYYCAKAPYSGYDWYFDYWGQGTLVTVSS

SEQ ID NO: 10113 - protein, 119 aa, Artificial Sequence
  source: /note="Description of Artificial Sequence: Synthetic polypeptide"
QVQLVESGGGLVQPGGSLRLSCAASGFTFSSYDMHWVRQATGKGLEWVSAIGTAGDTYYPGSVKGRFTISRENAYNSLYLQMNSLRAGDTAVYYCAAEYSSSGGAFDIWGQGTMVTVSS

SEQ ID NO: 10114 - protein, 126 aa, Artificial Sequence
  source: /note="Description of Artificial Sequence: Synthetic polypeptide"
QVQLVESGGGLVQPGGSLRLSCAASGFTFSSYGMSWVRQVPGKGLEWVSAISGSGGSTYYVDSVKGRFTISRDNFKNTLYLQMNSLRVEDTAVYYCAKDVGYCSTTSCRGDAFDVWGQGTMVTVSS

SEQ ID NO: 10115 - protein, 119 aa, Artificial Sequence
  source: /note="Description of Artificial Sequence: Synthetic polypeptide"
QVQLVESGGGLVQPGGSLRLSCAASGFTLSSYAMSWVRQAPGKGLEWVSTISGSGIIYYTDSVKGRFTISRDSSKNTLYLQMNSLRVEDTAVYYCAKDRGAAAGAFDYWGQGTLVTVSS

SEQ ID NO: 10116 - protein, 122 aa, Artificial Sequence
  source: /note="Description of Artificial Sequence: Synthetic polypeptide"
QVQLVESGGGLVQPGGSLRLSCVASGFTFSSYAMSWVRQAPGKGLEWVSGISGSGGNTYYADSVKGRFTISRDNSENTLYLQMNSLRAEDTAVYHCAKDPHSSRWPGFFDLWGRGTLVTVSS

SEQ ID NO: 10117 - protein, 118 aa, Artificial Sequence
  source: /note="Description of Artificial Sequence: Synthetic polypeptide"
QVQLVESGGGLVQPGRSLRISCVASGFSFDDYAMHWVRQAPGKGLEWVSGISWISGRIGYADSVKGRFTISRDNAKKSLYLQMNSLRTEDTALYYCVKDDNSSLGDYWGQGTLVTVSS

SEQ ID NO: 10118 - protein, 118 aa, Artificial Sequence
  source: /note="Description of Artificial Sequence: Synthetic polypeptide"
QVQLVESGGGLVQPGRSLRLSCAASGFTFDDYAMHWVRQAPGKGLEWVSGISWKSGRIGYADSVKGRFTISRDNAKNSLYLQMNSLRPEDTALYYCAKDDGSSLGDYWGQGTLVTVSS

SEQ ID NO: 10119 - protein, 128 aa, Artificial Sequence
  source: /note="Description of Artificial Sequence: Synthetic polypeptide"
QVQLVESGGGLVQPGRSLRLSCAASGFTFDDYAMHWVRQVPGKGLEWVSGINWNSGSIGYADSVKGRFTISRDNAKNSLFLQMNSLRAEDTALYYCAKDIEYYDILTGYYSYYIMDVWGQGTTVTVSS

SEQ ID NO: 10120 - protein, 118 aa, Artificial Sequence
  source: /note="Description of Artificial Sequence: Synthetic polypeptide"
QVQLVESGGGVVQPERSLRLSCAASGFTFSSYGMHWVRQAPGEGLEWVAVISYDGSNTKYADSVRGRFTISRDNSKNMLYLQMNSLRAEDTAVFYCARGYSGYAFDYWGQGILVTVSS

SEQ ID NO: 10121 - protein, 118 aa, Artificial Sequence
  source: /note="Description of Artificial Sequence: Synthetic polypeptide"
QVQLVESGGGVVQPGGSLRLSCAASGFTFSSYGMHWVRQAPGKGLEWVAVISYDGSNKNYADSVKGRFTIFRDNSKNTLYLLMNTLRAEDTAVYYCAERGSGWSFDYWGQGTLVTVSS

SEQ ID NO: 10122 - protein, 126 aa, Artificial Sequence
  source: /note="Description of Artificial Sequence: Synthetic polypeptide"
QVQLVESGGGVVQPGRSLKLSCAASGFTFSSYGMHWVRQAPGKGLEWVAVIWYDGSNKYYADSVKGRFTISRDNSKNTLYLQMNSLRAEDTAVYYCARDEGRGFGTYYYYYGMDVWGQGTTVTVSS

SEQ ID NO: 10123 - protein, 121 aa, Artificial Sequence
  source: /note="Description of Artificial Sequence: Synthetic polypeptide"
QVQLVESGGGVVQPGRSLRLSCAASGFIFSNYGMHWVRQAPGKGLEWVAVIAYDGSSKHYVDSVKGRFTISRDNSKNTLYLQMNSLRAEDTAVYYCAKPIAVARYYGMDVWGQGITVTVSS

SEQ ID NO: 10124 - protein, 119 aa, Artificial Sequence
  source: /note="Description of Artificial Sequence: Synthetic polypeptide"
QVQLVESGGGVVQPGRSLRLSCAASGFSFSSFGMHWVRQAPGKGLEWVAVISYGGINKHYSDSVKGRFTISRDDSKNTLYLQMNSLRAEDTAVYYCAKREGYRYAYDYWGQGTLVTVSS

SEQ ID NO: 10125 - protein, 117 aa, Artificial Sequence
  source: /note="Description of Artificial Sequence: Synthetic polypeptide"
QVQLVESGGGVVQPGRSLRLSCAASGFTFNDYGMHWFRQAPGKGLEWLAVISYDGNDKQYEDSVKGRFTISRDNSKNTLFLQMTSLRAEDTAMYFCARGGSGWTFDSWGQGTLVTSP

SEQ ID NO: 10126 - protein, 118 aa, Artificial Sequence
  source: /note="Description of Artificial Sequence: Synthetic polypeptide"
QVQLVESGGGVVQPGRSLRLSCAASGFTFNNYGMHWVRQAPGKGLEWLAVISYDGNDKHYVDSVKGRFTTSRDNSKNTLYLQMNSLRVEDTAVFYCVRGGSGWSFDSWGQGTLVTVSS

SEQ ID NO: 10127 - protein, 118 aa, Artificial Sequence
  source: /note="Description of Artificial Sequence: Synthetic polypeptide"
QVQLVESGGGVVQPGRSLRLSCAASGFTFSDYGMHWVRQAPGKGLEWVSVISYDGTNKYYADSVKGRFTISRDNSKNTLYLQMSSLRPEDTAVYYCPKGGSGWSFDYWGQGTLVTVSS

SEQ ID NO: 10128 - protein, 117 aa, Artificial Sequence
  source: /note="Description of Artificial Sequence: Synthetic polypeptide"
QVQLVESGGGVVQPGRSLRLSCAASGFTFSNYGMHWVRQAPGKGLEWVAAIWFDGSNKKYVDSVKGRFTISRDNSKNTLYLQMNSLRAGDTAVYYCTRDRSGSFDYWGQGTLVTVSS

SEQ ID NO: 10129 - protein, 118 aa, Artificial Sequence
  source: /note="Description of Artificial Sequence: Synthetic polypeptide"
QVQLVESGGGVVQPGRSLRLSCAASGFTFSNYGMHWVRQAPGKGLEWVAVTSYDGSNKHYADSVKGRFSTSRDNPKNTLYLQMDSLRGEDTAVYYCARGYSGFVLDNWGQGTLVTVSS

SEQ ID NO: 10130 - protein, 118 aa, Artificial Sequence
  source: /note="Description of Artificial Sequence: Synthetic polypeptide"
QVQLVESGGGVVQPGRSLRLSCAASGFTFSSYGMHWVRQAPGKGLEWLAVISYDGTNKHYVDSVKGRFTISRDNSKNTVYLQMNSLRAEDTALYYCARGGSGWSFDSWGQGTLVTVSS

SEQ ID NO: 10131 - protein, 132 aa, Artificial Sequence
  source: /note="Description of Artificial Sequence: Synthetic polypeptide"
QVQLVESGGGVVQPGRSLRLSCAASGFTFSSYGMHWVRQAPGKGLEWVAFISYDGGNKFYADSVKGRLTISRDNSKNILYLQMNSLTAEDTAVYYCAKGGVVVPGPTRYNWNHYYYYGMDVWGQGTTVTVSS

SEQ ID NO: 10132 - protein, 119 aa, Artificial Sequence
  source: /note="Description of Artificial Sequence: Synthetic polypeptide"
QVQLVESGGGVVQPGRSLRLSCAASGFTFSSYGMHWVRQAPGKGLEWVALISYAGSNKHYADSVKGRFTISRDDSKNTLYLQMNSLRVEDTAVYYCAKSRGYSYGLGYWGQGTLVTVSS

SEQ ID NO: 10133 - protein, 119 aa, Artificial Sequence
  source: /note="Description of Artificial Sequence: Synthetic polypeptide"
QVQLVESGGGVVQPGRSLRLSCAASGFTFSSYGMHWVRQAPGKGLEWVALISYVGSNKHYADSVKGRFTISRDNSKNTLYLQMNSLRAEDTAVYYCAKSRGYSYGLDYWGQGTLVTVSS

SEQ ID NO: 10134 - protein, 118 aa, Artificial Sequence
  source: /note="Description of Artificial Sequence: Synthetic polypeptide"
QVQLVESGGGVVQPGRSLRLSCAASGFTFSSYGMHWVRQAPGKGLEWVAVISYDGNDKKYADSVKGRFTISRDNSKSTLYLQMNTLRDEDTAIFYCAKGGRGFAFDIWGQGTMVTVSS

SEQ ID NO: 10135 - protein, 118 aa, Artificial Sequence
  source: /note="Description of Artificial Sequence: Synthetic polypeptide"
QVQLVESGGGVVQPGRSLRLSCAASGFTFSSYGMHWVRQAPGKGLEWVAVISYDGNNKHFADSVKGRFTISRDNSKNTLNLQMNSLRAEDRAVYYCARGASGFVLDIWGQGTMVTVSS

SEQ ID NO: 10136 - protein, 118 aa, Artificial Sequence
  source: /note="Description of Artificial Sequence: Synthetic polypeptide"
QVQLVESGGGVVQPGRSLRLSCAASGFTFSSYGMHWVRQAPGKGLEWVAVISYDGNNKYYADSVKGRFTISRDNSKNTLYLQMNSLRAEDTAVYYCAKGSAGYALDYWGQGTLVTVSS

SEQ ID NO: 10137 - protein, 118 aa, Artificial Sequence
  source: /note="Description of Artificial Sequence: Synthetic polypeptide"
QVQLVESGGGVVQPGRSLRLSCAASGFTFSSYGMHWVRQAPGKGLEWVAVISYDGSDKKYADSVKGRFTIARDNSKSTLHLQMNSLRVEDTAVFYCARGGRGFVFDMWGQGTMVTVSS

SEQ ID NO: 10138 - protein, 118 aa, Artificial Sequence
  source: /note="Description of Artificial Sequence: Synthetic polypeptide"
QVQLVESGGGVVQPGRSLRLSCAASGFTFSSYGMHWVRQAPGKGLEWVAVISYDGSDKKYADSVKGRFTIARDNSKSTLHLQMNSLRVEDTAVFYCVRGGRGFVFDMWGQGTMVTVSS

SEQ ID NO: 10139 - protein, 119 aa, Artificial Sequence
  source: /note="Description of Artificial Sequence: Synthetic polypeptide"
QVQLVESGGGVVQPGRSLRLSCAASGFTFSSYGMHWVRQAPGKGLEWVAVISYEGSNKHYADSVKGRFTISRDNSKNTLYLQMNSLRAEDTAVFYCAQSRGYSYGLGYWGQGTLVTVSS

SEQ ID NO: 10140 - protein, 119 aa, Artificial Sequence
  source: /note="Description of Artificial Sequence: Synthetic polypeptide"
QVQLVESGGGVVQPGRSLRLSCAASGFTFSSYGMHWVRQAPGKGLEWVAVISYQESNKHYVDSVKGRFTISRDNSKNTLFLQMNSLRAEDTAVYYCAQSRGYSFGLGYWGQGTRSTVSS

SEQ ID NO: 10141 - protein, 119 aa, Artificial Sequence
  source: /note="Description of Artificial Sequence: Synthetic polypeptide"
QVQLVESGGGVVQPGRSLRLSCAASGFTFSSYGMHWVRQAPGKGLEWVAVISYQESNKHYVDSVKGRFTISRDNSKNTLYLQMNSLRAEDTAVYYCAKSRGYSYGLGYWGQGTLVTVSS

SEQ ID NO: 10142 - protein, 119 aa, Artificial Sequence
  source: /note="Description of Artificial Sequence: Synthetic polypeptide"
QVQLVESGGGVVQPGRSLRLSCAASGFTFSSYGMHWVRQAPGKGLEWVAVISYQESNKHYVDSVKGRFTISRDNSKNTLYLQMNSLRAEDTAVYYCAQSRGYSYGLGYWGQGTLVTVSS

SEQ ID NO: 10143 - protein, 120 aa, Artificial Sequence
  source: /note="Description of Artificial Sequence: Synthetic polypeptide"
QVQLVESGGGVVQPGRSLRLSCAASGFTFSSYGMHWVRQAPGKGLEWVAVIWYDGSNKYYVDSVKGRFTTSRDNSKNTLYLQMNSLRAEDTAMYYCVRGRGTQDPLFDNWGQGTLVTVSS

SEQ ID NO: 10144 - protein, 118 aa, Artificial Sequence
  source: /note="Description of Artificial Sequence: Synthetic polypeptide"
QVQLVESGGGVVQPGRSLRLSCAASGFTFSSYGMHWVRQAPGKGLEWVTVISYDGSDKYYADSVKGRFTISRDNSKNTLYLQMNSLRAEDTAMYYCVKGGSGWSFDYWGQGTLVTVSS

SEQ ID NO: 10145 - protein, 128 aa, Artificial Sequence
  source: /note="Description of Artificial Sequence: Synthetic polypeptide"
QVQLVESGGGVVQPGRSLRLSCTASGFTFSVYGIHWVRQAPGKGLEWVAVIWYDGSNKYYTDSVKGRFTISRDNSKNTLYLQMNSLRAEDTALYYCAREGDLSSSSGSGGYHYVVDVWGQGTTVTVSS

SEQ ID NO: 10146 - protein, 118 aa, Artificial Sequence
  source: /note="Description of Artificial Sequence: Synthetic polypeptide"
QVQLVESGGGVVQPGRSLRLSCVASGFIFSDYGMHWVRQAPGKGLEWVAVISYDGSDKNYVDSVKGRFTISRDNSKKTQYLQMNSLRAEDTAVYYCAKGGSGWSFDYWGPGTLVTVSS

SEQ ID NO: 10147 - protein, 118 aa, Artificial Sequence
  source: /note="Description of Artificial Sequence: Synthetic polypeptide"
QVQLVESGGGVVQPGRSLRLSCVASGFTFSDYGMHWVRQAPGKGLEWVAVISYDGNNKNYADSVMGRFTISRDNSKKTQYLQMNSLRAEDTAVYYCAKGGSGWSFDYWGPGTLVTVSS

SEQ ID NO: 10148 - protein, 121 aa, Artificial Sequence
  source: /note="Description of Artificial Sequence: Synthetic polypeptide"
QVQLVESGGGVVQPGRSLSLSCAASGFTFSNYGMHWVRQAPGKGLEWVAAISYDGNTKYYVDSVKGRFTISRDNSKNTLYLQMNSLRGEDMAVYYCVGARPGYDHYGMDVWGQGTTVTVSS

SEQ ID NO: 10149 - protein, 123 aa, Artificial Sequence
  source: /note="Description of Artificial Sequence: Synthetic polypeptide"
QVQLVESGGGVVQPGRSLTLSCAASGFMFNRFGMHWVRQAPGKGLDWVAVIWYDGSNKYYADSVKGRFTISRDNSKNTLYLQVNSLRAEDTAVYYCAREGTPHYYDSSGLDYWGQGTLVTVSS

SEQ ID NO: 10150 - protein, 118 aa, Artificial Sequence
  source: /note="Description of Artificial Sequence: Synthetic polypeptide"
QVQLVESGGGVVQPGRSQRLSCAASGFTFSHYGMHWVRQAPGKGLEWVAVISYDGNNKHYADSVKGRFTTSRDNSKNTLFLQMNSLRAEDTAVYYCARGYSGYVLDYWGQGTLVTVSS

SEQ ID NO: 10151 - protein, 118 aa, Artificial Sequence
  source: /note="Description of Artificial Sequence: Synthetic polypeptide"
QVQLVESGGTLVQPGRSLRLSCAASGFTFDDYAMHWVRQAPGKGLEWVSGISWIGGRIGYADSVKGRFTISRDNAKNSLYLQMNSLRAEDTALYYCVKDDNSSLGDYWGQGTLVTVSS

SEQ ID NO: 10152 - protein, 120 aa, Artificial Sequence
  source: /note="Description of Artificial Sequence: Synthetic polypeptide"
QVQLVQSGADVNKPGASLKVSCAASGYTFTNYDINWVPQATGQGLEWMGWMNPTSGNTCYSHKFQGRVTMTRSTSISTAYMELSSLRSEDTAVYYCARDIVGALDAFDIWGQGTMVTVSS

SEQ ID NO: 10153 - protein, 125 aa, Artificial Sequence
  source: /note="Description of Artificial Sequence: Synthetic polypeptide"
QVQLVQSGAEVKKPGASVKVSCKASGYTFSNYGISWVRQAPGQGLEWMGWINTYNGDTNYAQELQGRVTMTTDTSTNTAYMEMRSLRSDDTAVYYCVRVVVVPADGHYYYGMDVWGQGTTVTVSS

SEQ ID NO: 10154 - protein, 126 aa, Artificial Sequence
  source: /note="Description of Artificial Sequence: Synthetic polypeptide"
QVQLVQSGAEVKKPGASVKVSCKASGYTFTSYGISWVRQAPGQGLEWMGWISAYNGNTNYAQKLQGRVTMTTDTSTSTVYMELRRLRSDDTAVYYCARDGSPTMVTRYYSYGMDVWGQGTLVTVSS

SEQ ID NO: 10155 - protein, 114 aa, Artificial Sequence
  source: /note="Description of Artificial Sequence: Synthetic polypeptide"
QVQLVQSGAEVKKPGASVKVSCKASGYTFTSYGVSWVRQAPGQGLEWMGWISAYNGNTNYAQKLQGRVTMTTDTSTSTAYMELTSLRSDDTAVYYCARNWGDYWGQGTLVTVSS

SEQ ID NO: 10156 - protein, 117 aa, Artificial Sequence
  source: /note="Description of Artificial Sequence: Synthetic polypeptide"
QVQLVQSGAEVKKPGASVKVSCKASGYTFTTYGISWVRQAPGQGLEWMGWISAYNGKTNYAQKFQGRVTMTTDTSTNTAYMELRSLRFDDTAVYYCARDGGTPFYYWGQGTLVTVSS

SEQ ID NO: 10157 - protein, 117 aa, Artificial Sequence
  source: /note="Description of Artificial Sequence: Synthetic polypeptide"
QVQLVQSGGDLVQPGRSLRLSCAASGFTFDVYAMHWVRQAPGKGLEWVSGISWNSGYIGYADSVKGRFTISRDNAKNSLYLQMNSLRAEDTALYYCAKDKGIGFDYWGQGTLVTVSS

SEQ ID NO: 10158 - protein, 122 aa, Artificial Sequence
  source: /note="Description of Artificial Sequence: Synthetic polypeptide"
QVQLVQSGGGLVKPGGSLRLSCAASGFTFSDAWMTWVRQAPGKGLEWIGRIKSKTDGGTTDYAAPVKGRFTISRDDSKNTLYLQMNSLKTEDTAAYYCFTDDFWSGDYTHCWGQGTLVTVSS

SEQ ID NO: 10159 - protein, 127 aa, Artificial Sequence
  source: /note="Description of Artificial Sequence: Synthetic polypeptide"
QVQLVQSGGGLVKPGGSLRLSCAASGFTFSDYYMNWIRQAPGKGLEWVSYISTGGSTIYYADSVKGRFTISRDNAKNSLYLQMNSLRAEDTALYYCARGVDSDDYEDYYSYYDMDVWGQGTTVTVSS

SEQ ID NO: 10160 - protein, 127 aa, Artificial Sequence
  source: /note="Description of Artificial Sequence: Synthetic polypeptide"
QVQLVQSGGGLVKPGGSLRLSCAASGFTFSDYYMNWIRQAPGKGLEWVSYISTGGTTIYYADSVKGRFTISRDNAKNSLYLQMNSLRADDTAVYYCARGVDSDDYEDFYSYYDLDVWGQGTTVTVSS

SEQ ID NO: 10161 - protein, 127 aa, Artificial Sequence
  source: /note="Description of Artificial Sequence: Synthetic polypeptide"
QVQLVQSGGGLVKPGGSLRLSCAASGFTFSDYYMNWIRQAPGKGLEWVSYISTSGSTIYYADSVKGRFTISRDNAKNSLYLQMTSLRAEDTAVYYCARGVDSSDYEDYYSYYDMDVWGQGTTVTVSS

SEQ ID NO: 10162 - protein, 122 aa, Artificial Sequence
  source: /note="Description of Artificial Sequence: Synthetic polypeptide"
QVQLVQSGGGLVKPGGSLRLSCAASGFTFSNAWMSWVRQAPGKGLEWIGRIKSKTDGGTTDYAAPVKGRFTISRDDSKNTLYLQMNSLKTEDTAAYYCFTDDFWSGDYTHCWGQGTLVTVSS

SEQ ID NO: 10163 - protein, 116 aa, Artificial Sequence
  source: /note="Description of Artificial Sequence: Synthetic polypeptide"
QVQLVQSGGGLVKPGGSLRLSCAASGFTFSNVWMSWVRQAPGQGLEWVGRIKSKIDGGTTDYAAPVKGRFFISRDDSKNTLYLQMNSLKTEDTAVYYCTTGGGTYWGQGTLVTVSS

SEQ ID NO: 10164 - protein, 127 aa, Artificial Sequence
  source: /note="Description of Artificial Sequence: Synthetic polypeptide"
QVQLVQSGGGLVKPGGSLRLSCAASGVTFSDYYMNWIRQAPGKGLEWVSYISTSGSIIYYTDSVKGRFTISRDNAKNSLYLQMNSLRAEDTAVYYCAGGVDSDDYEDYYSYYDMDVWGQGTTVTVSS

SEQ ID NO: 10165 - protein, 114 aa, Artificial Sequence
  source: /note="Description of Artificial Sequence: Synthetic polypeptide"
QVQLVQSGGGLVQFGGSLRLSCAASGFTFSSYGMNWVRQTPGKGLEWVSAIGGSGGSTYYADSVKGRFTISRDNSKNTLYLQMTSLRAEDTAVYYCAKGAYDVWGQGTTVTVSS

SEQ ID NO: 10166 - protein, 122 aa, Artificial Sequence
  source: /note="Description of Artificial Sequence: Synthetic polypeptide"
QVQLVQSGGGLVQPGGSLRLSCAASGFTFSNYAMSWVRQAPGKGLEWVSAISGSGDNTYYADSVRGRFTISRDNSKNTLYLQMNSLRAEDTAIYYCAKDPHSSRWPGFFDLWGRGTLVTVSS

SEQ ID NO: 10167 - protein, 122 aa, Artificial Sequence
  source: /note="Description of Artificial Sequence: Synthetic polypeptide"
QVQLVQSGGGLVQPGGSLRLSCAASGFTFSNYAMSWVRQAPGKGLEWVSAISGSGDNTYYADSVRGRFTISRDNSKNTLYLQMNSLRAEDTAVYYCAKDPHSSRWPGFFDLWGRGTLVTVSS

SEQ ID NO: 10168 - protein, 114 aa, Artificial Sequence
  source: /note="Description of Artificial Sequence: Synthetic polypeptide"
QVQLVQSGGGLVQPGGSLRLSCAASGFTFSSYAMNWVRQAPGKGLEWVSTISGSGGSTYYADSVKGRFTFSRDNSKNTLYLQMNNLRAEDTAVYYCAKVGGDVWGQGTTVTVSS

SEQ ID NO: 10169 - protein, 113 aa, Artificial Sequence
  source: /note="Description of Artificial Sequence: Synthetic polypeptide"
QVQLVQSGGGLVQPGGSLRLSCAASGFTFSSYAMSWVRQAPGKGLEWVSVINRSGGGTYYADSVKGRFTISRDNSKNALYLQMNSLRTEDTAVYYCAKEVEDWGQGTLVTVSS

SEQ ID NO: 10170 - protein, 120 aa, Artificial Sequence
  source: /note="Description of Artificial Sequence: Synthetic polypeptide"
QVQLVQSGGGLVQPGGSLRLSCAASGFTFSSYAMSWVRQGPGKGLEWVSVISGSGGSTYYADSVKGRFTISRDNSKNTLYLQMNSLRAEDTAVYYCAKHITGIADGMDVWGQGTTVTVSS

SEQ ID NO: 10171 - protein, 117 aa, Artificial Sequence
  source: /note="Description of Artificial Sequence: Synthetic polypeptide"
QVQLVQSGGGLVQPGGSLRLSCAASGFTFSSYVMSWVRQTPGKGLEWVSAIRTSGGGTYYADSVKGRFTISRDNSKSTLYLQMNSLRAEDSAVYYCAKDGYGAFDYWGQGTLVTVSS

SEQ ID NO: 10172 - protein, 119 aa, Artificial Sequence
  source: /note="Description of Artificial Sequence: Synthetic polypeptide"
QVQLVQSGGGLVQPGGSLRLSCAASGFTLSSYAMSWVRQAPGKGLEWVSTFSGSGIIYYLDSVKGRFTISRDSSKNTLYLQMNSLRVEDTAVFYCAKDRGAAAGAFDYWGQGTLVTVSS

SEQ ID NO: 10173 - protein, 119 aa, Artificial Sequence
  source: /note="Description of Artificial Sequence: Synthetic polypeptide"
QVQLVQSGGGLVQPGGSLRLSCAASGFTLSSYAMSWVRQAPGKGLEWVSTISGSGIIYYTDSVKGRFTISRDSSKNTVYLQMTSLRVEDTAVYYCAKDRGAAAGAFDYWGQGTLVTVSS

SEQ ID NO: 10174 - protein, 128 aa, Artificial Sequence
  source: /note="Description of Artificial Sequence: Synthetic polypeptide"
QVQLVQSGGGLVQPGRSLRLSCAASGFTFDDYAMHWVRQTPGKGLEWVSGISWNSGSIGYADSVKGRFTISRDNAKNSLYLQMNSLITEDTALYYCAKDMEYYDILTGYYSYYIMDVWGQGTTVTVSS

SEQ ID NO: 10175 - protein, 118 aa, Artificial Sequence
  source: /note="Description of Artificial Sequence: Synthetic polypeptide"
QVQLVQSGGGVVQPGRSLKLSCAASGFTFNNYGMHWVRQAPGKGLEWLAVISYDGNDKHYVDSVKGRFTTSKDNSKNTLYLQMNSLRVEDTAVFYCVRGGSGWSFDSWGQGTPVTVSS

SEQ ID NO: 10176 - protein, 119 aa, Artificial Sequence
  source: /note="Description of Artificial Sequence: Synthetic polypeptide"
QVQLVQSGGGVVQPGRSLRLSCAASGFSFSSFGMHWVRQAPGKGLEWVAVISYGGINKHYSDSVKGRFTISRDDSKNTLYLQMNSLRAEDTAVYYCAKREGYRYAYDYWGQGTLVTVSS

SEQ ID NO: 10177 - protein, 118 aa, Artificial Sequence
  source: /note="Description of Artificial Sequence: Synthetic polypeptide"
QVQLVQSGGGVVQPGRSLRLSCAASGFTFSNYGMHWVRQAPGKGLEWLAVISYDGSNKHYVDSVKGRFTISRDNSKNTLYLQMNSLRAEDTAVHYCVRGGSGWSFDSWGQGTLVTVSS

SEQ ID NO: 10178 - protein, 118 aa, Artificial Sequence
  source: /note="Description of Artificial Sequence: Synthetic polypeptide"
QVQLVQSGGGVVQPGRSLRLSCAASGFTFSNYGMHWVRQAPGKGLEWLAVISYDGSNKHYVDSVKGRFTISRDNSKNTLYLQMNSLRTEDTAVHYCVRGGSGWSFDSWGQGTLVTVSS

SEQ ID NO: 10179 - protein, 118 aa, Artificial Sequence
  source: /note="Description of Artificial Sequence: Synthetic polypeptide"
QVQLVQSGGGVVQPGRSLRLSCAASGFTFSNYGMHWVRQAPGQGLEWLAVISYDGNNKHYVDSVKGRFTISRDNSKSTLFLQMNSLRTEDTTVYYCARGGSGWSFDSWGQGTLVTVSS

SEQ ID NO: 10180 - protein, 118 aa, Artificial Sequence
  source: /note="Description of Artificial Sequence: Synthetic polypeptide"
QVQLVQSGGGVVQPGRSLRLSCAASGFTFSSYGIHWVRQAPGKGLEWVAVISYDGSDKKYADSVKGRITISRDNSKNTLYLQMNSLRAEDTAVYYCAKGGSGSSFDYWGQGILVTVSS

SEQ ID NO: 10181 - protein, 121 aa, Artificial Sequence
  source: /note="Description of Artificial Sequence: Synthetic polypeptide"
QVQLVQSGGGVVQPGRSLRLSCAASGFTFSSYGLHWVRQAPGKGLEWVAVISYDGSNKYYADSVKGRFTISRDNSKNTLYLQMNSLRAEDTAVYYCAKPIAVARYYGMDVWGQGTTVTVSS

SEQ ID NO: 10182 - protein, 132 aa, Artificial Sequence
  source: /note="Description of Artificial Sequence: Synthetic polypeptide"
QVQLVQSGGGVVQPGRSLRLSCAASGFTFSSYGMHWVRQAPGKGLEWAAFISYDGSNKFYADSVKGRLTISRDNSKNILYLQMNSLRAEDTAVYYCAKGGVVVPGPTRYNWNHYYYYGMDVWGQGTTVTVSS

SEQ ID NO: 10183 - protein, 132 aa, Artificial Sequence
  source: /note="Description of Artificial Sequence: Synthetic polypeptide"
QVQLVQSGGGVVQPGRSLRLSCAASGFTFSSYGMHWVRQAPGKGLEWVAFISYDGSNKFYADSVKGRLTISRDNSKNMLYLQMNSLRAEDTAVYYCAKGGVVIPGPTRYNWNHYYYYGMDVWGQGTTVTVSS

SEQ ID NO: 10184 - protein, 132 aa, Artificial Sequence
  source: /note="Description of Artificial Sequence: Synthetic polypeptide"
QVQLVQSGGGVVQPGRSLRLSCAASGFTFSSYGMHWVRQAPGKGLEWVAFISYDGSNKYYADSVKGRLTISRDNSKNMLYLQMNSLRAEDTAVYYCAKGGVVVPGPTRYNWNHYYYYGMDVWGQGTTVTVSS

SEQ ID NO: 10185 - protein, 120 aa, Artificial Sequence
  source: /note="Description of Artificial Sequence: Synthetic polypeptide"
QVQLVQSGGGVVQPGRSLRLSCAASGFTFSSYGMHWVRQAPGKGLEWVAIISYDGINKYYVDSVKGRFTISRDNSKNTLYLQMNSLRAEDTAVYFCAKGDYGDFDAFDIWGQGTMVTVSS

SEQ ID NO: 10186 - protein, 119 aa, Artificial Sequence
  source: /note="Description of Artificial Sequence: Synthetic polypeptide"
QVQLVQSGGGVVQPGRSLRLSCAASGFTFSSYGMHWVRQAPGKGLEWVALISYAGINEYYADSVKGRFTISRDDSKNTLYLQMNSLRVEDTAVYYCAKSRGYSYGLGYWGQGTLVTVSS

SEQ ID NO: 10187 - protein, 119 aa, Artificial Sequence
  source: /note="Description of Artificial Sequence: Synthetic polypeptide"
QVQLVQSGGGVVQPGRSLRLSCAASGFTFSSYGMHWVRQAPGKGLEWVALISYAGSNKHYADSVKGRFTISRDDSKNTLYLQMNSLRVEDTAVYYCAKSRGYSYGLGYWGQGTMVTVSS

SEQ ID NO: 10188 - protein, 119 aa, Artificial Sequence
  source: /note="Description of Artificial Sequence: Synthetic polypeptide"
QVQLVQSGGGVVQPGRSLRLSCAASGFTFSSYGMHWVRQAPGKGLEWVALISYVGSNKHYADSVKGRFTISRDNSKNTLYLQMNSLRAEDTAVYYCAKSRGYSYGLDYWGQGTLVTVSS

SEQ ID NO: 10189 - protein, 120 aa, Artificial Sequence
  source: /note="Description of Artificial Sequence: Synthetic polypeptide"
QVQLVQSGGGVVQPGRSLRLSCAASGFTFSSYGMHWVRQAPGKGLEWVAVISYDGINKYYVDSVKGRFTISRDNSKNTLYLQMNSLRTEDTAVYFCAKGDYGDFDAFDIWGQGTMVTVSS

SEQ ID NO: 10190 - protein, 118 aa, Artificial Sequence
  source: /note="Description of Artificial Sequence: Synthetic polypeptide"
QVQLVQSGGGVVQPGRSLRLSCAASGFTFSSYGMHWVRQAPGKGLEWVAVISYDGSDKKYADSVKGRITISRDNSKNTLYLQMNSLRAEDTAVYYCAKGGSGSSFDYWGQGILVTVSS

SEQ ID NO: 10191 - protein, 118 aa, Artificial Sequence
  source: /note="Description of Artificial Sequence: Synthetic polypeptide"
QVQLVQSGGGVVQPGRSLRLSCAASGFTFSSYGMHWVRQAPGKGLEWVAVISYDGSNKKYADSVKGRITISRDNSKNTLYLQMNSLRAEDTAVFYCAKGGSGYSFDYWGQGTLVTVSS

SEQ ID NO: 10192 - protein, 119 aa, Artificial Sequence
  source: /note="Description of Artificial Sequence: Synthetic polypeptide"
QVQLVQSGGGVVQPGRSLRLSCAASGFTFSSYGMHWVRQAPGKGLEWVAVISYEGSNKHYADSVKGRFTISRDNSKNTLYLQMNSLRAEDTAVFYCAQSRGYSYGLGYWGQGTLVTVSS

SEQ ID NO: 10193 - protein, 119 aa, Artificial Sequence
  source: /note="Description of Artificial Sequence: Synthetic polypeptide"
QVQLVQSGGGVVQPGRSLRLSCAASGFTFSSYGMHWVRQAPGKGLEWVAVISYQESNKHYLDSVKGRFTISRDNSKNTLYLQMNSLRAEDTAVYYCAKSRGYSYGLGYWGQGTLVTVSS

SEQ ID NO: 10194 - protein, 118 aa, Artificial Sequence
  source: /note="Description of Artificial Sequence: Synthetic polypeptide"
QVQLVQSGGGVVQPGRSLRLSCAASGFTFSSYGMHWVRQAPGKGLEWVAVISYQESNKHYVDSVKGRFTISRDNSKNTLYLQMNSLRAEDTAVYYCAKSRGYSYGLGYWGQGPGHVSS

SEQ ID NO: 10195 - protein, 119 aa, Artificial Sequence
  source: /note="Description of Artificial Sequence: Synthetic polypeptide"
QVQLVQSGGGVVQPGRSLRLSCAASGFTFSSYGMHWVRQAPGKGLEWVAVISYQESNKHYVDSVKGRFTISRDNSKNTLYLQMNSLRAEDTAVYYCAKSRGYSYGLGYWGQGTLVTVSS

SEQ ID NO: 10196 - protein, 119 aa, Artificial Sequence
  source: /note="Description of Artificial Sequence: Synthetic polypeptide"
QVQLVQSGGGVVQPGRSLRLSCAASGFTFSSYGMHWVRQAPGKGLEWVAVISYQESNKYYVDSVKGRFTISRDNSKNTLYLQMNSLSAEDTAVYYCAQSRGYSYGLGYWGQGTLVTVSS

SEQ ID NO: 10197 - protein, 119 aa, Artificial Sequence
  source: /note="Description of Artificial Sequence: Synthetic polypeptide"
QVQLVQSGGGVVQPGRSLRLSCAASGFTFSSYGMHWVRQAPGKGLEWVTVISYDGSNRNYADSVKGRFTISRDNSENTLYLQMNSLRADDTAVYYCAQSRGYSYGLGYWGQGTLVTVSS

SEQ ID NO: 10198 - protein, 119 aa, Artificial Sequence
  source: /note="Description of Artificial Sequence: Synthetic polypeptide"
QVQLVQSGGGVVQPGRSLRLSCEASGFTFSSYGMHWVRQAPGKGLEWVAVISYDGSNKHYADSVKGRFTISRDNSKNTLYVQMNSLRAEDTAVYYCAQSRGYSYGLGYWGQGTLVTVSS

SEQ ID NO: 10199 - protein, 124 aa, Artificial Sequence
  source: /note="Description of Artificial Sequence: Synthetic polypeptide"
QVQLVQSGGGVVQPGRSLRLSCEASGFTISSYGMHWVRQAPGKGLEWVAAIWYDGNNKYYADSVKGRFTISRDKSRNTLYLQMNSLRAEDTAVYYCARDNWNYEDYYYYGMDVWGQGTTVTVSS

SEQ ID NO: 10200 - protein, 124 aa, Artificial Sequence
  source: /note="Description of Artificial Sequence: Synthetic polypeptide"
QVQLVQSGGGVVQPGRSLRLSCEASGFTISSYGMHWVRQAPGKGLEWVAVIWYDGSNKYYADSVKGRFTISRDKSRNTLYLQMNSLRAEDTAVYYCARDNWNYEDYYYYGMDVWGQGTTVTVSS

SEQ ID NO: 10201 - protein, 118 aa, Artificial Sequence
  source: /note="Description of Artificial Sequence: Synthetic polypeptide"
QVQLVQSGGGVVQPGRSLRLSCVASGFTFNNYGLHWFRQAPGKGLEWLAVISYDGNDKHYVDYVKGRFTISRDNSRYTLNLQMNSLRTEDTALYYCARGGSGWSFDSWGQGTLVTVSS

SEQ ID NO: 10202 - protein, 119 aa, Artificial Sequence
  source: /note="Description of Artificial Sequence: Synthetic polypeptide"
QVQLVQSGGGVVQPGRSLRLSCVASGIIFSSYGMHWVRQAPGKGLEWVAVIAYDGSNKNYVDSVKGRFTISRDNSKNTLYLQMNSLRAEDTAVYYCAKSRGYSYGLVYWGQGTMVTVSS

SEQ ID NO: 10203 - protein, 122 aa, Artificial Sequence
  source: /note="Description of Artificial Sequence: Synthetic polypeptide"
QVQLVQSGTDVKKPGASLKVSCEVSGYTFANYGLSWVRQAPGQGLEWMGWIIAYTTNTNYAQKLQDRVTITTDTSTSTAYMELRSLRSDDTAVYYCARVFSGTNHLNYFDYWGQGTLVTVSS

SEQ ID NO: 10204 - protein, 119 aa, Artificial Sequence
  source: /note="Description of Artificial Sequence: Synthetic polypeptide"
QVQLVQSVGGVVQPGRSLRLSCAASGFTFSSYGMHWVRQAPGKGLEWVALISYAGINEYYADSVKGRFTISRDDSKNTLYLQMNSLRVEDTAVYYCAKSRGYSYGLGYWGQGTLVTVSS

SEQ ID NO: 10205 - protein, 118 aa, Artificial Sequence
  source: /note="Description of Artificial Sequence: Synthetic polypeptide"
QVQVVESGGGVVQPGRSLRLSCAASGFTFSNYGMHWVRQAPGKGLEWVTVISYDGSNKNYADSVKGRFTISRDNSKNTLYLQMNSLRAEDTAMYYCARGGSGFAFDIWGQGTMVTVSS

SEQ ID NO: 10206 - protein, 111 aa, Llama glama
SSALTQPPSVSGSPGKTVTISCAGTSSDVGYGNYVSWYQQLPGMAPSLLIYEVNKRASGIADRFSGSKSGNTASLTISGLQSEDEADYYCASYRSANNAVFGGGTHLTILG

SEQ ID NO: 10207 - protein, 109 aa, Llama glama
SSELTQPSAVSVSLGQTARITCRGDSLERYGANWYQQKPGQARVQVIYGDDIRPSGIPERFSGSRLGDTATLTISGAQAEDEADYYCQSSDSSGYKNDFSSRTHLTVLG

SEQ ID NO: 10208 - protein, 111 aa, Llama glama
SYELTQPPSVSESPGKTVTISCAGTSSDVGYGNYVSWYQQLPGMAPKLLLYEVNKRASGIADRFSGSKSGNTASLTISGLQSEDEADYYCASYRSSVNVVFGGGTHLTVLG

SEQ ID NO: 10209 - protein, 108 aa, Llama glama
SYELTQSSAVSVSLGQTARITCQGGSLGSYGANWYQQKPGQAPVLLIYGDNSRPSGIPERFSGSKSGGTATLTISGAQAEDEADYYCQSFDYSGNAVFGGGTHLTVLG

SEQ ID NO: 10210 - DNA, 324 bp, Artificial Sequence
  source: /note="Description of Artificial Sequence: Synthetic polynucleotide"
aacatcaagatgatccagtctccatcctccctgtttgcatcggtaggagtcacagtcaccatcacttgcagggccagtcagggcattagaaacaatttagtctggtatcagcagaaaccagggaaagcccctaagctcctgatatatgatgcatccagtttgcgaatttgggtgccatcaaggttcagcggcagcggatggggggcagaattcattctccccatcaacagccggcagccagaagattatgcaagttattattgtcgacagcataataaatatccgttcactttcggccaagggaccaagatggagatcaaacga

SEQ ID NO: 10211 - DNA, 333 bp, Artificial Sequence
  source: /note="Description of Artificial Sequence: Synthetic polynucleotide"
atcgtgatgacccagactccatcttccaggtctgtccctgtgggaggcacagtcaccatcaattgccaggccagtgaaattgttaatagaaacaaccgcttagcctggtttcaacagaaaccagggcagcctcccaagctcctgatgtatctggcttccactccggcatctggggtcccatcgcggtttagaggcagtggatctgggacacagttcactctcaccatcagcgatgtggtgtgtgacgatgctgccacttattattgtacagcatataagagtagtaatactgatggtattgctttcggcggagggaccgaggtggtggtcaaa

SEQ ID NO: 10212 - DNA, 387 bp, Artificial Sequence
  source: /note="Description of Artificial Sequence: Synthetic polynucleotide"
atgaccatgttctcactagctcttctcctcagtcttcttctcctctgtgtctctgattctagggcagaaacaactgtgacccagtctccagcatccctgtccatggctataggagaaaaagtcaccatcagatgcataaccagcactgatattgatgatgatatgaactggtaccagcagaagccaggggaacctcctaagctccttatttcagaaggcaatactcttcgtcctggagtcccatcccgattctccagcagtggctatggtacagattttgtttttacaattgaaaacatgctctcagaagatgttgcagattactactgtttgcaaagtgataacttgcctctcacgttcggaggggggaccaagctggaaataaaa

SEQ ID NO: 10213 - DNA, 324 bp, Artificial Sequence
  source: /note="Description of Artificial Sequence: Synthetic polynucleotide"
caagtgctgacccagactgcatcgcccgtgtctgccgctgtgggaggcacagtcaccatcagttgccagtccagtcagagtgttgagaatggcaactggttagcctggtatcagcagaaaccagggcagcctcccaagctcctgatctatctggcatccactctggaatctggggtcccatcgcggttcaaaggcagtggatctgggacacagttcactctcaccatcagcggcgtacagtgtgacgatgctgccacttactactgtcagggcgcttatagtggtattaatgttttcggcggagggaccgaggtggtggtcaaa

SEQ ID NO: 10214 - DNA, 324 bp, Artificial Sequence
  source: /note="Description of Artificial Sequence: Synthetic polynucleotide"
caggtgctgacccagactccatcccccgtgtctgcagctgtgggaggcgcagtcaccatcaattgccagtccagtcagagtgttgagaatggcaactggttaggctggtatcagcagaaaccagggcagcctcccaagctcctgatctatctggcatccactctggcatctggggtcccttcgcggttcaccggcagcggatctgggacacagttcactctcaccatcagcggcgtgcagtgtgacgatgctgccacttactattgtcaaggcgcttatagtggtattaatgctttcggcggagggaccgaggtggtggtcaaa

SEQ ID NO: 10215 - DNA, 321 bp, Artificial Sequence
  source: /note="Description of Artificial Sequence: Synthetic polynucleotide"
gaaattgtgttgacacagtctccagccaccctgtctttgtctccaggggaaagagtcaccctctcctgcagggccagtcagagtgttagcagctacttagcctggtaccaacagaaacctggccaggctcccaggctcctcatctatgatgcatccaacagggccactggcatcccagccaggttcagtggcagtgggtctgggacagacttcactctcaccatcagcagcctagagcctgaagattttgcagtttattactgtcagcagcgtaacatctggcctccgacgttcggccaagggaccaaggtggaaatcaaa

SEQ ID NO: 10216 - DNA, 324 bp, Artificial Sequence
  source: /note="Description of Artificial Sequence: Synthetic polynucleotide"
gacataccgatgacccagtctccatcctccctgtctgcatctgtaggagacagagtcaccatcacttgccgggcaagtcagggcattagaaatgatttaggctggtatcagcagaaaccagggaaagcccctaagcgcctgatctatgctgcatccagtctgcaaagtggggtcccatcaaggttcaccggcagtggatctgggacagaattcactctcaccatcagcagcctgcagcctgaagattttgcaacttattactgtctacaacataatagttacccgttcactttcggccaagggaccaagatggagatcaaacga

SEQ ID NO: 10217 - DNA, 324 bp, Artificial Sequence
  source: /note="Description of Artificial Sequence: Synthetic polynucleotide"
gacataccgatgacccagtctccatccttcctgtctgcgtctgtaggaagcagagtcaccatcacttgctgggccagtcagggcattagcagttatttagtctggtatcagcaaaaaccagggaaagcccctaagctcctgatgtatgaggcatccaatccgcaaagtggggtcccatcaaggttcaccggcagtggattagggacagaattcattgtcccaatcagcagcctgcagccggaggatttttcaagttattactgtcagcagattaataaataccctctcactttcggcggagggaccaagatggagatcaaacga

SEQ ID NO: 10218 - DNA, 324 bp, Artificial Sequence
  source: /note="Description of Artificial Sequence: Synthetic polynucleotide"
gacataccgttgacccagtctccatcctccctgtctgcatctgtaggagacagagtcaccatcacttgccgggcgagtcagggcattagcaattatttagcctggtatcagcagaaaccagggaaagttcctaagctcctgatctatgctgcatccactttgcaatcaggggtcccatctcggttcagtggcagtggatctgggacagatttcactctcaccatccacagcctgcagcctgaagatgttgcaacttattactgtcaaaagtataacagtgccccttggacgttcggccaagggaccaaattggagatcaaacga

SEQ ID NO: 10219 - DNA, 342 bp, Artificial Sequence
  source: /note="Description of Artificial Sequence: Synthetic polynucleotide"
gacatccagatgacccagtctccaaactccctggaagtgtctctgggcgagagggccaccatcaactgcaagtccagccagagtgttttatccacctccaacaataagaactacttaacttggtaccagcagaaaccaggacagcctcctaacctgctcatttactgggcatctacccgtgaatccggggtccctgaccgattcactggcagcgggtctgggacagatttcactctcaccatcagcagcctgcaggctgaagatgtggcagtttattactgtcagcaatattataatattccgtacacttttggccaggggaccaaggtggaaatcaaacga

SEQ ID NO: 10220 - DNA, 342 bp, Artificial Sequence
  source: /note="Description of Artificial Sequence: Synthetic polynucleotide"
gacatccagatgacccagtctccaaactccctggctgtgtctctgggcgagagggccaccatcaactgcaagtccagccagagtgttttttacagttcctacaataagaaccacttagcttggtaccagcagaaaccaggacagcctcctaagctgctcatttactgggcatctacccgggaatccggggtccctgaccgattcagtggcagcgggtctgggacagatttcactctcaccatcagcagcctgcaggctgaagatgtggcagtttattactgtcagcaatattatagtaccgagctcactttcggcggagggaccaaggtggagatcaaacga

SEQ ID NO: 10221 - DNA, 342 bp, Artificial Sequence
  source: /note="Description of Artificial Sequence: Synthetic polynucleotide"
gacatccagatgacccagtctccaaactccctggctgtgtctctgggcgagagggcctccatcaactgcaagtccagccagaacattttattcaggtcccacaataagaacttcttaacttggtaccaacagaaaccaggacagcctcctaagctgctcatttactgggcatctacccgggaatccggggtccctgaccgattcagtggcaacgggtctgggacagatttcactctcaccatcagcagcctgcaggctgaagatgtggcggtttattactgtcagcaatattctagtactccgtacacttttggccaggggaccaaggtggaaatcaaacga

SEQ ID NO: 10222 - DNA, 342 bp, Artificial Sequence
  source: /note="Description of Artificial Sequence: Synthetic polynucleotide"
gacatccagatgacccagtctccacactccctggctgtgtctctgggcgagagggccaccatcaactgcaagtccagccagagtgttttatacagctccaaaaataagaactacttagcttggtaccagcagaaaccaggacaggctcctaagctgctcatttactgggcatctacccgggaatccggggtccctgaccgattcagtggcagcggttctgggacagatttcactctcaccatcagcagcctgcaggctgaagatgtggcagtttattactgtcaccaatattatagtaatccgtggacgttcggccaagggaccaaggtggaaatcaaacga

SEQ ID NO: 10223 - DNA, 339 bp, Artificial Sequence
  source: /note="Description of Artificial Sequence: Synthetic polynucleotide"
gacatccagatgacccagtctccactctccctgcccgtcacccctggagagccggcctccatctcctgcaggtctagtcagagcctcctgcatagtaatggatacaactttttggattggtacctgcagaagccagggcagtctccacagctcctgatctatttgggttctaatcgggcctccggggtccctgacaggttcagtggcagtggatcaggcacagattttacactgaaattcagcagagtggaggctgaggatgttggggtttattactgcatgcaaactctacaaactccgtggacgttcggccaagggaccaaggtggaaatcaaacga

SEQ ID NO: 10224 - DNA, 339 bp, Artificial Sequence
  source: /note="Description of Artificial Sequence: Synthetic polynucleotide"
gacatccagatgacccagtctccactctccctgcccgtcacccctggagagccggcctccatctcctgcaggtctagtcagagcctcctgcatagtaatggatacaactttttggattggtacctgcagaagccagggcagtctccacagctcctgatctatttgggttctaatcgggcctccggggtccctgacaggttcagtggcagtggatcaggcacagattttacactgaaattcagcagagtggaggctgaggatgttggggtttattactgcatgcaaactctacaaactccgtggacgttcggccaagggaccaaggtggagatcaaacga

SEQ ID NO: 10225 - DNA, 339 bp, Artificial Sequence
  source: /note="Description of Artificial Sequence: Synthetic polynucleotide"
gacatccagatgacccagtctccactctccctgcccgtcacccctggagagccggcctccatctcctgcaggtctagtcagagcctcctgcatagtaatggatacaactttttggattggtatctgcagaagccagggcagtctccacagctcctgatctatttgggttctaatcgggcctccggggtccctgacaggttcagtggcagtggatcaggcacagattttacactgaaattcagcagagtggaggctgaggatgttggggtttattactgcatgcaaactctacaaactccgtggacgttcggccaagggaccaaggtggagatcaaacga

SEQ ID NO: 10226 - DNA, 342 bp, Artificial Sequence
  source: /note="Description of Artificial Sequence: Synthetic polynucleotide"
gacatccagatgacccagtctccagactccctgactgtgtctctgggcgagagggccaccatcaactgcaagtccagccagagtgttttatacagctccaacaataagaactacttaacttggtaccagcagaaaccaggacagcctcctaaactgctcatttactggacatctacccgggaatccggggtccctgaccgattcagtggcagcgggtctgggacagatttcactctcaccatcagcagcctgcaggctgaagatgtggcagtttattactgtcagcaatattatagtactccgtacacttttggccaggggaccaaggtggaaatcaaacga

SEQ ID NO: 10227 - DNA, 342 bp, Artificial Sequence
  source: /note="Description of Artificial Sequence: Synthetic polynucleotide"
gacatccagatgacccagtctccagactccctggctgtgtctctgggcgagagggccaccatcaactgcaagtccagccagaatcttttatacagctcccacaataagaactacttaacttggtaccagcagaaaccagggcagcctcctaagctgctcatttactgggcatctacccgggaatccggggtccctgaccgattcagtggcagcgggtctgggacagatttcactctcaccatcagcagcctgcaggctgaagatgtggcagtttattactgtcagcaatattatactactccgtacacttttggccaggggaccaaggtggagatcaaacga

SEQ ID NO: 10228 - DNA, 342 bp, Artificial Sequence
  source: /note="Description of Artificial Sequence: Synthetic polynucleotide"
gacatccagatgacccagtctccagactccctggctgtgtctctgggcgagagggccaccatcaactgcaagtccagccagaatcttttatacagctcccacaataagaactacttaacttggtaccagcagaaaccagggcagcctcctaagctgctcatttactgggcatctacccgggaatccggggtccctgaccgattcagtggcagcgggtctgggacagatttcactctcaccatcagcagcctgcaggctgaagatgtggcagtttattactgtcagcaatattatagtactccgtacacttttggccaggggaccaaggtggaaatcaaacga

SEQ ID NO: 10229 - DNA, 342 bp, Artificial Sequence
  source: /note="Description of Artificial Sequence: Synthetic polynucleotide"
gacatccagatgacccagtctccagactccctggctgtgtctctgggcgagagggccaccatcaactgcaagtccagccagagtattttatacagctccaaaaataagaactacttagcttggtaccagcagaaaccaggacagcctcctaacctgctcatttactgggcatctacccgggaatccggggtccctgaccgattcagtggcagcgggtctgggacagatttcactctcaccatcagcagcctgcaggctgaagatgtggcattttattactgtcaccaatattatagtactccgtggacgttcggccaagggaccaaggtggaaatcaaacga

SEQ ID NO: 10230 - DNA, 342 bp, Artificial Sequence
  source: /note="Description of Artificial Sequence: Synthetic polynucleotide"
gacatccagatgacccagtctccagactccctggctgtgtctctgggcgagagggccaccatcaactgcaagtccagccagagtgttttatacagctccaaaaataagaactacttagcttggtaccagcagaaaccaggacagcctcctaagctgctcatttactgggcatctacccgggaatccggggtccctgaccgattcagtggcagcgggtctgggacaaatttcactctcaccatcagcggcctgcaggctgaagatgtggcagtttatttctgtcagcaatattatagtactccgtggacgttcggccaagggaccaaggtggaaatcaaacga

SEQ ID NO: 10231 - DNA, 342 bp, Artificial Sequence
  source: /note="Description of Artificial Sequence: Synthetic polynucleotide"
gacatccagatgacccagtctccagactccctggctgtgtctctgggcgagagggccaccatcaactgcaagtccagccagagtgttttatacagctccaaaaataagaattacttagcttggtaccagcagaaaccaggacagtctcctaagctggtcatttactgggcatcaacccgggagtccggggtccctgaccgattcagtggcagcgggtctgggacagatttcactctcaccatcagcagcctgcaggctgaagatgtggcagtttattactgtcaccaatattatagttctccgtggacgttcggccaagggaccaaggtggaaatcaaacga

SEQ ID NO: 10232 - DNA, 342 bp, Artificial Sequence
  source: /note="Description of Artificial Sequence: Synthetic polynucleotide"
gacatccagatgacccagtctccagactccctggctgtgtctctgggcgagagggccaccatcaactgcaagtccagccagagtgttttatacagctccaacaataagaactacttaacttggtaccagcagaaaccaggacagcctcctaaactgctcatttactggacatctacccgggaatccggggtccctgaccgattcagtggcagcgggtctgggacagatttcactctcaccatcagcagcctgcaggctgaagatgtggcagtttattactgtcagcaatattatagtactccgtacacttttggccaggggaccaaggtggagatcaaacga

SEQ ID NO: 10233 - DNA, 342 bp, Artificial Sequence
  source: /note="Description of Artificial Sequence: Synthetic polynucleotide"
gacatccagatgacccagtctccagactccctggctgtgtctctgggcgagagggccaccatcaactgcaagtccagccagagtgttttatacagctccaacaataagaactacttaacttggtaccagcagaaaccaggacagcctcctaaactgctcatttactggacatctacccgggaatccggggtccctgaccgattcagtggcagcgggtctgggacagatttcactctcaccatcagcagcctgcaggctgaagatgtggcagtttattactgtcagcaatattatagtactccgtacacttttggccaggggaccaaggtggaaatcaaacga

SEQ ID NO: 10234 - DNA, 342 bp, Artificial Sequence
  source: /note="Description of Artificial Sequence: Synthetic polynucleotide"
gacatccagatgacccagtctccagactccctggctgtgtctctgggcgagagggccaccatcaactgcaagtccagccagagtgttttatacagctccaacaataagaactacttaacttggtaccagcagaaaccaggacagcctcctaaactgctcatttactggacatctacccgggaatccggggtccctgaccgattcagtggcagcgggtctgggacagatttcactctcaccatcagcagcctgcaggctgaagatgtggcagtttattactgtcagcaatattataatactccgtacacttttggccaggggaccaagctggagatcaaacga

SEQ ID NO: 10235 - DNA, 342 bp, Artificial Sequence
  source: /note="Description of Artificial Sequence: Synthetic polynucleotide"
gacatccagatgacccagtctccagactccctggctgtgtctctgggcgagagggccaccatcaactgcaagtccagccagagtgttttatacagctccaacaataagaactacttaacttggtaccagcagaaaccaggacagcctcctaagctgctcatttactggacatctacccgggaatccggggtccctgaccgattcagtggcagcgggtctgggacagatttcactctcaccatcagcagcctgcaggctgaagatgtggcagtttattactgtcagcaatattttagtactccgtacacttttggccaggggaccaaggtggagatcaaacga

SEQ ID NO: 10236 - DNA, 342 bp, Artificial Sequence
  source: /note="Description of Artificial Sequence: Synthetic polynucleotide"
gacatccagatgacccagtctccagactccctggctgtgtctctgggcgagagggccaccatcaactgcaagtccagccagagtgttttatacagctccaacaataagaactacttagcttggtaccagcagaaaccaggacagcctcctaagctcctcatttactgggcatctacccgggaatccggggtccctgaccgattcagtggcagcgggtctgggacagatttcactctcaccatcagcagcctgcaggctgaagatgtggcagtttattactgtcagcaatattatagttctccgtacacttttggccaggggaccaaggtggaaatcaaacga

SEQ ID NO: 10237 - DNA, 342 bp, Artificial Sequence
  source: /note="Description of Artificial Sequence: Synthetic polynucleotide"
gacatccagatgacccagtctccagactccctggctgtgtctctgggcgagagggccaccatcaactgcaagtccagccagagtgttttatacagctccaacaataagaactacttagcttggttccagcagaaaccaggacagcctccttacctgctcatttcctgggcatctacccgggaatccggggtccctgaccgattcagtggcagcgggtctgggacagatttcactctcaccatcagcagcctgcaggctggagatgtggcagtttattactgtcagcaatattatagtattccgtggacgttcggccaagggaccaagctggagatcaaacga

SEQ ID NO: 10238 - DNA, 342 bp, Artificial Sequence
  source: /note="Description of Artificial Sequence: Synthetic polynucleotide"
gacatccagatgacccagtctccagactccctggctgtgtctctgggcgagagggccaccatcaactgcaagtccagccagagtgttttatacagctccaacaataagaactacttaggttggtaccagcagaaagcaggacagcctcctaagctgctcatttactgggcatctacccgggaatccggggtccctgaccgattcagtggcagcgggtctgggacagatttcactctcaccatcagcagcctgcaggctgaagatgtggcagtttattactgtcagcaatattatggtattccgtggacgttcggccaagggaccaaggtggagatcaaacga

SEQ ID NO: 10239 - DNA, 342 bp, Artificial Sequence
  source: /note="Description of Artificial Sequence: Synthetic polynucleotide"
gacatccagatgacccagtctccagactccctggctgtgtctctgggcgagagggccaccatcaactgcaagtccagccagagtgttttatacagctccaacaataagaactacttagtttggtaccaacagaaaccaggacagcctcctaacctgctcatttactgggcatctacccgggaatccggggtccctgaccgattcagtggcagcgggtctgggacagatttcactctcaccatcagcagcctgcaggctgaagatgtggcagtttattactgtcagcaatattataatcctccgtacacttttggccaggggaccaaggtggaaatcaaacga

SEQ ID NO: 10240 - DNA, 342 bp, Artificial Sequence
  source: /note="Description of Artificial Sequence: Synthetic polynucleotide"
gacatccagatgacccagtctccagactccctggctgtgtctctgggcgagagggccaccatcaactgcaagtccagccagagtgttttatacagctccaacaataagaactacttagtttggtaccagcagaaaccaggacagcctcctaacctgctcatttactgggcatctacccgggaatccggggtccctgaccgattcagtggcagcgggtctgggacagatttcactctcaccatcagcagcctgcaggctgaagatgtggcagtttattactgtcagcaatattataatcctccgtacacttttggccaggggaccaaggtggagatcaaacga

SEQ ID NO: 10241 - DNA, 342 bp, Artificial Sequence
  source: /note="Description of Artificial Sequence: Synthetic polynucleotide"
gacatccagatgacccagtctccagactccctggctgtgtctctgggcgagagggccaccatcaactgcaagtccagccagagtgttttatacagctccaacaatcagaattacttagcttggtaccagcagaaaccaggacagcctcctaaactgctcatttactgggcatctacccgggaatccggggtccctgaccgattcagtggcagcgggtctgggacagatttcactctcaccatcagtagcctgcaggctgaagatgtggcagtttattactgtcagcaatattatagtactccgtacacttttggccaggggaccaaggtggaaatcaaacga

SEQ ID NO: 10242 - DNA, 342 bp, Artificial Sequence
  source: /note="Description of Artificial Sequence: Synthetic polynucleotide"
gacatccagatgacccagtctccagactccctggctgtgtctctgggcgagagggccaccatcaactgcaagtccagccagagtgttttatacagctccaacaatcagaattacttagcttggtaccagcagaaaccaggacagcctcctaatctgctcatttactgggcatctacccgggaatccggggtccctgaccgattcagtggcagcgggtctgggacagatttcactctcaccatcagtagcctgcaggctgaagatgtggcagtttattactgtcagcaatattataatactccgtacacttttggccaggggaccaaggtggagatcaaacga

SEQ ID NO: 10243 - DNA, 342 bp, Artificial Sequence
  source: /note="Description of Artificial Sequence: Synthetic polynucleotide"
gacatccagatgacccagtctccagactccctggctgtgtctctgggcgagagggccaccatcaactgcaagtccagccagagtgttttatacagctccaacaatgagaactacttaacttggtaccagcagaaaccaggacagcctcctaaactgctcatttactggacatctacccgggaatccggggtccctgaccgattcagtggcagcgggtctgggacagatttcactctcaccatcagcagcctgcaggctgaagatgtggcagtttattactgtcagcaatattatagtattccgtacacttttggccaggggaccaaggtggagatcaaacga

SEQ ID NO: 10244 - DNA, 342 bp, Artificial Sequence
  source: /note="Description of Artificial Sequence: Synthetic polynucleotide"
gacatccagatgacccagtctccagactccctggctgtgtctctgggcgagagggccaccatcaactgcaagtccagccagagtgttttatacagctccaataataagaactacttagcttggtaccagcagaaaccaggacagcctcctaagctgctcatttactgggcatctacccgggaatccggggtccctgaccgattcagtggcagcgggtctgggacagatttcactctcaccatcagcagcctgcaggctgaagatgtggcagtttattactgtcagcaatattatagtactccgtggacgttcggccaagggaccaaggtggaaatcaaacga

SEQ ID NO: 10245 - DNA, 342 bp, Artificial Sequence
  source: /note="Description of Artificial Sequence: Synthetic polynucleotide"
gacatccagatgacccagtctccagactccctggctgtgtctctgggcgagagggccaccatcaactgcaagtccagccagagtgttttatacagctccagcaataagaactacttaacttggtaccagcagaaaccaggacagcctcctaaactgctcatttactgggcatctacccgggaatccggggtccctgaccgattcagtggcagcgggtctgggacagatttcactctcaccatcagcagcctgcaggctgaagatgtggcagtttattactgtcagcaatattataatattccgtacacttttggccaggggaccaaggtggagatcaaacga

SEQ ID NO: 10246 - DNA, 342 bp, Artificial Sequence
  source: /note="Description of Artificial Sequence: Synthetic polynucleotide"
gacatccagatgacccagtctccagactccctggctgtgtctctgggcgagagggccaccatcaactgcaagtccagccagagtgttttatacagttccaacaataagaactatttagcttggtaccagcagaaaccaggacagcctcctaagttgctcttttactgggcatctgcccgggaatccggggtccctgaccgcttcagtggcagcgggtctgggacagatttcactctcaccatcagcagcctgcaggctgaagatgtggcagtttattactgtcaccaatcgtataatattccgtacacttttggccaggggaccaaggtggaaatcaaacga

SEQ ID NO: 10247 - DNA, 342 bp, Artificial Sequence
  source: /note="Description of Artificial Sequence: Synthetic polynucleotide"
gacatccagatgacccagtctccagactccctggctgtgtctctgggcgagagggccaccatcaactgcaagtccagccagagtgttttatccagctccaacaataagaactacttaacatggtaccagcagaaaccaggacagcctcctaagttgctcatttactgggcatctacccgggaatccggggtccctgaccgattcagtggcagcgggtctgggacagatttcactctcaccatcagcagcctgcaggctgaagatgtggcagtttattactgtcagcaatattatagtactccgtacacttttggccaggggaccaaggtggaaatcaaacga

SEQ ID NO: 10248 - DNA, 342 bp, Artificial Sequence
  source: /note="Description of Artificial Sequence: Synthetic polynucleotide"
gacatccagatgacccagtctccagactccctggctgtgtctctgggcgagagggccaccatcaactgcaagtccagccagagtgttttatccagctccaacaataagaactacttaacttggtaccagcagaaaccaggacagcctcctaaactgctcatttactggacatctacccgggaatccggggtccctgaccgattcagtggcagcgggtctgggacagatttcactctcaccatcagcagcctgcaggctgaagatgtggcagtttattactgtcagcaatattataatattccgtacacttttggccaggggaccaaggtggaaatcaaacga

SEQ ID NO: 10249 - DNA, 342 bp, Artificial Sequence
  source: /note="Description of Artificial Sequence: Synthetic polynucleotide"
gacatccagatgacccagtctccagactccctggctgtgtctctgggcgagagggccaccatcaactgcaagtccagccagagtgttttatccagttccaacaatgagaactacttagtttggtaccagcagaaaccaggacagcctcctaagttgctcatttactgggcatctacccgggaacccggggtccctgaccgattcagtggcggcgggtctgggacagatttcactctcaccatcagcagcctgcaggctgaagatgtggcagtttattactgtcagcaatatcatagtattccgtacacttttggccaggggaccaaggtggagatcaaacga

SEQ ID NO: 10250 - DNA, 342 bp, Artificial Sequence
  source: /note="Description of Artificial Sequence: Synthetic polynucleotide"
gacatccagatgacccagtctccagactccctggctgtgtctctgggcgagagggccaccatcaactgcaagtccagccagagtgttttattcatctccaacaataagaactacttaacttggtaccagcagaaaccaggacagcctcctaaactgctcatttactggacatctacccgggaatccggggtccctgaccgattcagtggcagcgggtctgggacagatttcactctcaccatcagcagcctgcaggctgaagatgtggcagtttattactgtcagcaatattatagtactccgtacacttttggccaggggaccaaggtggagatcaaacga

SEQ ID NO: 10251 - DNA, 342 bp, Artificial Sequence
  source: /note="Description of Artificial Sequence: Synthetic polynucleotide"
gacatccagatgacccagtctccagactccctggctgtgtctctgggcgagagggccaccatcaactgcaggtccaaccagagtgttttatacagctccaccaataagaactacttagcttggtaccagcagaaaccaggacagcctcctaagctgctcatttactgggcatctacccgggattccggggtccctgaccgattcagtggcagcgggtctgggacagatttcactctcaccatcagcagcctgcaggctgaagatgtggcaatttattactgtcagcaatattatagtatttatcggacgttcggccaagggaccaaggtggagatcaaacga

SEQ ID NO: 10252 - DNA, 342 bp, Artificial Sequence
  source: /note="Description of Artificial Sequence: Synthetic polynucleotide"
gacatccagatgacccagtctccagactccctggctgtgtctctgggcgagagggccaccatcaactgcaggtccaaccagagtgttttatacagctccaccaataagaactacttagcttggtaccagcagaaaccaggacagcctcctaagctgctcatttactgggcatctacccgggattccggggtccctgaccgattcagtggcagcgggtctgggacagatttcactctcaccatcagcagcctgcaggctgaagatgtggcaatttattactgtcagcaatattatagtatttatcggacgttcggccaagggaccaaggtggaaatcaaacga

SEQ ID NO: 10253 - DNA, 342 bp, Artificial Sequence
  source: /note="Description of Artificial Sequence: Synthetic polynucleotide"
gacatccagatgacccagtctccagactccctggctgtgtctctgggcgagagggccaccatcaactgccagtccagccaaagtgttttatacagctccaaaaataagaactacttagcttggtaccagcagaaaccaggacagcctcctaatctgctcatttactgggcatctacccgggaatccggggtccctgaccgattcagtggcagcgggtctgggacagatttcactctcaccatcagcagcctgcaggctgaagatgtggcagtttattactgtcagcaatattatagtactccgtggacgttcggccaagggaccaaggtggaaatcaaacga

SEQ ID NO: 10254 - DNA, 342 bp, Artificial Sequence
  source: /note="Description of Artificial Sequence: Synthetic polynucleotide"
gacatccagatgacccagtctccagactccctggctgtgtctctgggcgagagggccaccatcgactgcaagtccagccagagtgttttatccagctccaacaatgagaactacttaacatggtaccagcagaaaccaggacagcctcctaagttgctcatttactgggcatctacccgggaatccggggtccctgaccgattcagtggcagcgggtctgggacagatttcactctcaccatcagcagcctgcaggctgaagatgtggcagtttattactgtcagcaatattatagtattccgtacacttttggccaggggaccaaggtggaaatcaaacga

SEQ ID NO: 10255 - DNA, 324 bp, Artificial Sequence
  source: /note="Description of Artificial Sequence: Synthetic polynucleotide"
gacatccagatgacccagtctccagactttcagtctgtgactccaaaggagaaagtcaccatcacctgccgggccagtcagagtattggtagtagcttacactggtaccagcagaaaccggatcagtctccaaagctcctcatcaagtatgcttcccagtccttctcaggggtcccctcgaggttcagtggcagtggatctgggacagatttcaccctcatgatcaacagcctggaagctgaagatgctgcaacgtattactgtcatcagagtggtggtttaccgtggacgttcggccaagggaccaaggtggaaatcaaacga

SEQ ID NO: 10256 - DNA, 342 bp, Artificial Sequence
  source: /note="Description of Artificial Sequence: Synthetic polynucleotide"
gacatccagatgacccagtctccagagtccctggctgtgtctctgggcgagagggccaccatcaactgcaagtccagccagagtgttttagacagctccaacaataggaactacttagcttggtaccagcagaaaccaggacagcctcctaaactgttcatttactgggcatctacccgggaatccggggtccctgaccgattcagtggcagcgggtctgggacagatttcactctcaccatcagcagcctgcaggctgaagatgtggcagtttattactgtcagcaatattatagtactcctctcactttcggcggagggaccaagctggagatcaaacga

SEQ ID NO: 10257 - DNA, 324 bp, Artificial Sequence
  source: /note="Description of Artificial Sequence: Synthetic polynucleotide"
gacatccagatgacccagtctccatcctcactgtctgcatctgtaggagacagagtcaccatcacttgtcgggcgagtcaggacattagcaattatttagcctggtttcagcagaaaccagggaaagcccctaagtccctgatctatgctgcatccagtttgcaaagtggggtcccatcaaagttcagcggcagtggatctgggacagatttcactctcaccatcagcagcctgcagcctgaagattttgcaacttattactgccaccagtataatagttaccctctcactttcggcggagggaccaaggtggaaatcaaacga

SEQ ID NO: 10258 - DNA, 324 bp, Artificial Sequence
  source: /note="Description of Artificial Sequence: Synthetic polynucleotide"
gacatccagatgacccagtctccatcctcactgtctgcatctgtaggagacagagtcaccatcacttgtcgggcgagtcagggcattaacaattatttagcctggtttcagcagaaaccagggaaagcccctaagtccctgatctatgctgcatccagtttgcaaagtggggtcccatcaaagttcagcggcagtggatctgggacagatttcactctcaccatcagcagcctgcagcctgaagatgttgcaatttattactgccaacagtataatagttaccctctcactttcggcggagggaccaaggtggagatcaaacga

SEQ ID NO: 10259 - DNA, 324 bp, Artificial Sequence
  source: /note="Description of Artificial Sequence: Synthetic polynucleotide"
gacatccagatgacccagtctccatcctcactgtctgcatctgtaggagacagagtcaccatcacttgtcgggcgagtcagggcattaacaattatttagcctggtttcagcagaaaccagggaaagcccctaagtccctgatctatgctgcatccagtttgcaaagtggggtcccatcaaagttcagcggcagtggatctgggacagatttcactctcaccatcagcagcctgcagcctgaagattttgcaatttattactgccaacagtataatagttaccctctcactttcggcggagggaccaaggtggaaatcaaacga

SEQ ID NO: 10260 - DNA, 324 bp, Artificial Sequence
  source: /note="Description of Artificial Sequence: Synthetic polynucleotide"
gacatccagatgacccagtctccatcctcactgtctgcatctgtaggagacagagtcaccatcacttgtcgggcgagtcagggcattaacaattttttagcctggtttcagcagaaaccaggaaaagcccctaagtccctgatctatgctgcatccagtttacaaagtggggtcccatcaaaattcagcggcagtggatctgggacagatttcactctcaccatcagcagcctgcagcctgaagattttgcaacttattactgcctacaatatagtagttattttcggacgttcggccaagggaccaaggtggaaatcaaacga

SEQ ID NO: 10261 - DNA, 324 bp, Artificial Sequence
  source: /note="Description of Artificial Sequence: Synthetic polynucleotide"
gacatccagatgacccagtctccatcctcactgtctgcatctgtaggagacagagtcaccatcacttgtcgggcgagtcagggcattaacaattttttagcctggtttcagcagaaaccaggaaaagcccctaagtccctgatctatgctgcatcccgtttacaaagtggggtcccatcaaaattcagcggcagtggatctgggacagatttcactctcaccatcagcagcctgcagcctgaagattttgcaacttattactgcctacagtataatagttattttcggacgttcggccaagggaccaaggtggaaatcaaacga

SEQ ID NO: 10262 - DNA, 324 bp, Artificial Sequence
  source: /note="Description of Artificial Sequence: Synthetic polynucleotide"
gacatccagatgacccagtctccatcctcactgtctgcatctgtaggagacagagtcaccatcacttgtcgggcgagtcagggcattagcaattatttagcctggtttcagcagaaaccagggaaagcccctaagtacctgatctatgctgcatccagtttgcacagtggggtcccatcaaagttcagcggcagtggatctgggacagatttcactctcaccatcagcagcctgcagcctgaagattttgcaacttattactgccaacagtataatagttaccctctcactttcggcggagggaccaaggtggaaatcaaacga

SEQ ID NO: 10263 - DNA, 324 bp, Artificial Sequence
  source: /note="Description of Artificial Sequence: Synthetic polynucleotide"
gacatccagatgacccagtctccatcctcactgtctgcatctgtaggagacagagtcaccatcacttgtcgggcgagtcagggcattagcaattatttagcctggtttcagcagaaaccagggaaagcccctaagtccctgatctatgctgcatccagtttgcaaagtggggtcccatcaaagttcagcggcagtggatctgggacagatttcactctcaccatcagcagcctgcagcctgaagattttgcaacttattactgccaacagtataatagttaccctctcactttcggcggagggaccaaggtggaaatcaaacga

SEQ ID NO: 10264 - DNA, 324 bp, Artificial Sequence
  source: /note="Description of Artificial Sequence: Synthetic polynucleotide"
gacatccagatgacccagtctccatcctcactgtctgcatctgtaggagacagagtcaccatcacttgtcgggcgagtcagggcattagcaattatttagcctggtttcagcagaaaccagggaaagcccctaagtccctgatctatgctgcatccagtttgcaaggtggggtcccatcaaggttcagcggcagtggatctgggacagatttcactctcaccatcagcagcctgcagcctgaagattttgcaacttattactgccaacagtataatagttaccctctcactttcggcggagggaccaaggtggagatcaaacga

SEQ ID NO: 10265 - DNA, 321 bp, Artificial Sequence
  source: /note="Description of Artificial Sequence: Synthetic polynucleotide"
gacatccagatgacccagtctccatcctcactgtctgcatctgtaggagacagagtcaccatcacttgtcgggcgagtcagggcattagcaattatttagcctggtttcagcagaaaccagggaaagcccctaagtccctgatctatgctgcatccagtttgcaaggtggggtcccatcaaggttcagcggcagtggatctgggacagatttcactctcaccatcagcagcctgcagcctgaagattttgcaacttattactgccaacagtataatagttaccctctcactttcggcggagggaccaaggtggagatcaaa

SEQ ID NO: 10266 - DNA, 324 bp, Artificial Sequence
  source: /note="Description of Artificial Sequence: Synthetic polynucleotide"
gacatccagatgacccagtctccatcctcactgtctgcatctgtaggagacagagtcaccatcacttgtcgggcgagtcagggcattagcaattatttagcctggtttcagcagaaaccagggaaagcccctaagtccctgatctatgctgcatccagtttgcacagtggggtcccatcaaagttcagcggcagtggatctgggacagatttcactctcaccatcagcagcctgcaacctgaagattttgcaacttattactgcctacagtataatagttaccctctcactttcggcggagggaccaaggtggaaatcaaacga

SEQ ID NO: 10267 - DNA, 324 bp, Artificial Sequence
  source: /note="Description of Artificial Sequence: Synthetic polynucleotide"
gacatccagatgacccagtctccatcctcactgtctgcatctgtaggagacagagtcaccatcacttgtcgggcgagtcagggcattagcaattatttagcctggtttcagcagaaaccagggaaagcccctaagtccctgatctatgctgcatccagtttgcacagtggggtcccatcaaagttcagcggcagtggatctgggacagatttcactctcaccatcagcagcctgcagcctgaagattttgcaacttattactgccaacagtataatagttaccctctcactttcggcggagggaccaaggtggaaatcaaacga

SEQ ID NO: 10268 - DNA, 324 bp, Artificial Sequence
  source: /note="Description of Artificial Sequence: Synthetic polynucleotide"
gacatccagatgacccagtctccatcctcactgtctgcatctgtaggagacagagtcaccatcacttgtcgggcgagtcagggcattagcaattatttagcctggtttcagcagaaaccagggaaagcccctaagtccctgatctatgctgcatccagtttgcacagtggggtcccatcaaagttcagcggcagtggatctgggacagatttcactctcaccatcagcagcctgcagcctgaagattttgcaacttattactgccaacagtataatagttaccctctcactttcggcggagggaccaaggtggagatcaaacga

SEQ ID NO: 10269 - DNA, 324 bp, Artificial Sequence
  source: /note="Description of Artificial Sequence: Synthetic polynucleotide"
gacatccagatgacccagtctccatcctcactgtctgcatctgtaggagacagagtcaccatcacttgtcgggcgagtcagggcattagcaattatttagcctggtttcagcagaaaccagggaaagcccctaagtccctgatctatgctgcatccagtttgcacagtggggtcccatcaaagttcagcggcagtggatctgggacagatttcactctcaccatcagcagcctgcagcctgaagattttgcaacttattactgccaacagtataatagttaccctctcactttcggcggagggaccaagctggagatcaaacga

SEQ ID NO: 10270 - DNA, 324 bp, Artificial Sequence
  source: /note="Description of Artificial Sequence: Synthetic polynucleotide"
gacatccagatgacccagtctccatcctcactgtctgcatctgtaggagacagagtcaccatcacttgtcgggcgagtcagggcattagcaattatttagcctggtttcagcagaaaccagggaaagcccctaagtccctgatctatgctgcatccagtttgcacagtggggtcccatcaaagttcagcggcagtggatctgggacagatttcactctcaccatcagcagcctgcagcctgaagattttgcaacttattactgccaacagtatgatagttaccctctcactttcggcggagggaccaaggtggaaatcaaacga

SEQ ID NO: 10271 - DNA, 324 bp, Artificial Sequence
  source: /note="Description of Artificial Sequence: Synthetic polynucleotide"
gacatccagatgacccagtctccatcctcactgtctgcatctgtaggagacagagtcaccatcacttgtcgggcgagtcagggcattagcaattatttagcctggtttcagcagaaaccagggaaagcccctaagtccctgatctatggtgcatccagtttgcaaagtggggtcccatcaaagttcagcggcagtggatctgggacagatttcactctcaccatcagcagcctgcagcctgaagattttgcaacttattactgccaacagtataatagttacccactcactttcggcggggggaccaaggtggaaatcaaacga

SEQ ID NO: 10272 - DNA, 324 bp, Artificial Sequence
  source: /note="Description of Artificial Sequence: Synthetic polynucleotide"
gacatccagatgacccagtctccatcctcactgtctgcatctgtaggagacagagtcaccatcacttgtcgggcgagtcagggcattagcaattatttagcctggtttcagcagaaaccagggaaagcccctaagtccctgatctatggtgcatccagtttgcaaagtggggtcccatcaaagttcagcggcagtggatctgggacagatttcactctcaccatcagcagcctgcagcctgaagattttgcaacttattactgccaacagtataatagttacccgctcactttcggcggggggaccaaggtggagatcaaacga

SEQ ID NO: 10273 - DNA, 324 bp, Artificial Sequence
  source: /note="Description of Artificial Sequence: Synthetic polynucleotide"
gacatccagatgacccagtctccatcctcactgtctgcatctgtaggagacagagtcaccatcacttgtcgggcgagtcagggcattagcaattatttagcctggtttcagcagaaaccagggaaagcccctaagtccctgatctatggtgcatccagtttgcaaagtggggtcccatcaaagttcagcggcagtggatctgggacagatttcactctcaccatcagcagcctgcagcctgaagattttgcaacttattactgccaacagtataatagttacccgctcactttcggcggggggaccaaggtggaaatcaaacga

SEQ ID NO: 10274 - DNA, 324 bp, Artificial Sequence
  source: /note="Description of Artificial Sequence: Synthetic polynucleotide"
gacatccagatgacccagtctccatcctcagtgtctgcatctgtaggagacagagtcaccatcacttgtcgggcgagtcagggcattagtaattatttagcctggtttcagcagaaaccagggaaagcccctaagtccctgatctatgctgcatccagtttgcacagtggggtcccatcaaagttcagcggcagtggatctgggacagacttcactctcaccatcagcagcctgcagcctgaagattttgcaacttattactgccaacagtataatagttaccctctcactttcggcggagggaccaaggtggaaatcaaacga

SEQ ID NO: 10275 - DNA, 324 bp, Artificial Sequence
  source: /note="Description of Artificial Sequence: Synthetic polynucleotide"
gacatccagatgacccagtctccatcctcattctctgcatctacaggaaacagagtcaccatcacttgtcgggcgagtcagggcattagcagttatttagcctggtatcaccaaaaaccacggaaagcccctaagctcctgatctatgctgcatccactttgcaaagtggggtcccatcaaggttcagcggcagtggatctgggacagatttcactctcaccatcagcagcctgcagtctgaagattttgcaacttattactgtcaacagtattatagttacccgtggacgttcggccaagggaccaaggtggagatcaaacga

SEQ ID NO: 10276 - DNA, 324 bp, Artificial Sequence
  source: /note="Description of Artificial Sequence: Synthetic polynucleotide"
gacatccagatgacccagtctccatcctccctgtctacatctgtcggagacagagtcaccatcacttgccgggcaagtcagaccattagcagctatttagattggtatcagcagaaaccagggaaagcccctaagctcctgatctatgctgcatccagtttgcaaagtggggtcccatcaaggttcagtggcagtggatctgggacagatttaactctcaccatcaccagtctgcaacctgaaaattttgcaacttactactgtcaacagacttacagagccccgtacacttttggccaggggaccaaggtggaaaccaaacga

SEQ ID NO: 10277 - DNA, 324 bp, Artificial Sequence
  source: /note="Description of Artificial Sequence: Synthetic polynucleotide"
gacatccagatgacccagtctccatcctccctgtctgcatctgtaggaaacagagtcaccatcacttgccgggcaagtcagggcattagaaatgatttaggctggtatcaccagaaaccagggaaagcccctaagcacctgatctatgctgcatccagtttgcaaagtggggtcccatcaaggttcaccggcagtggatctgggacagaattcactctcacaatcaccagcctgcagcctgaagattttgcaacttattactgtctacagcataatagttacccgtgcactttcggccaagggaccaaagtggagatcaaacga

SEQ ID NO: 10278 - DNA, 324 bp, Artificial Sequence
  source: /note="Description of Artificial Sequence: Synthetic polynucleotide"
gacatccagatgacccagtctccatcctccctgtctgcatctgtaggaaacagagtcaccatcacttgccgggcaagtcagggcattagaaatgatttaggctggtatcaccagaaaccagggaaagcccctaagcgcctgatctatgctgcatccactttgcaaagtggggtcccatcaaggttcagcggcagtggatctgggacagaattcactctcaccatcagcagcctgcagcctgaagattttgcaacttattactgtctacagcataatagttaccccttcactttcggccaagggaccaaggtggagatcaaacga

SEQ ID NO: 10279 - DNA, 324 bp, Artificial Sequence
  source: /note="Description of Artificial Sequence: Synthetic polynucleotide"
gacatccagatgacccagtctccatcctccctgtctgcatctgtaggaaacagagtcaccatcacttgccgggcaagtcagggcattagaaatgatttaggctggtatcaccagaaaccagggaaagcccctaagctcctgatctatgctgcatccagtttacaaagtggggtcccatcaaggttcagcggcagtggatctggcacagatttcactctcaccatcagcagcctgcagcctgaagattttgcaacttattactgtctacaagattacaattaccctcggacgttcggccaagggaccaaggtggagatcaaacga

SEQ ID NO: 10280 - DNA, 324 bp, Artificial Sequence
  source: /note="Description of Artificial Sequence: Synthetic polynucleotide"
gacatccagatgacccagtctccatcctccctgtctgcatctgtaggaaacagagtcaccatcacttgccgggcaagtcagggcattagaaatgatttaggctggtatcagcagaaaccagggaaagcccctaagcgcctgatctatgctgcatccagtttgcaaagtggggtcccatcaaggttcaccggcagtggatctgggacagaattcactctcacaatcagcagcctgcagcctgaagattttgcaacttattactgtctacagcataatagttacccgctcactttcggcggagggaccaaggtggagatcaaacga

SEQ ID NO: 10281 - DNA, 324 bp, Artificial Sequence
  source: /note="Description of Artificial Sequence: Synthetic polynucleotide"
gacatccagatgacccagtctccatcctccctgtctgcatctgtaggaaacagagtcaccatcacttgccgggcaagtcagggcattagaaatgatttaggctggtatcagcagaaaccagggaaagcccctaagcgcctgatctatgctgcatccagtttgcaaagtggggtcccatcaaggttcagcggcagtggatctgggacagaattcactctcacaatcagcagcctgcagcctgaagattttgcaacttattactgtctacagcataatagttacccgctcactttcggccgagggaccaaggtggagatcaaacga

SEQ ID NO: 10282 - DNA, 324 bp, Artificial Sequence
  source: /note="Description of Artificial Sequence: Synthetic polynucleotide"
gacatccagatgacccagtctccatcctccctgtctgcatctgtaggaaacagagtcaccatcacttgccgggcaagtcagggcattagaaatgatttaggctggtatcagcagaaaccagggaaagcccctaagcgcctgatctatgctgcatccagtttgcaaagtggggtcccatcaaggttcagcggcagtggatctgggacagaattcactctcacaatcagcagcctgcagcctgaagattttgcaacttattactgtctacagcataatagttacccgtggacgttcggccaagggaccaaggtggaaatcaaacga

SEQ ID NO: 10283 - DNA, 324 bp, Artificial Sequence
  source: /note="Description of Artificial Sequence: Synthetic polynucleotide"
gacatccagatgacccagtctccatcctccctgtctgcatctgtaggaaacagagtcaccatcacttgccgggcgagtcagggcattagcaattatttagcctgctatcatcagaaaccagggaaagttcctaagctcctgatctatgctgcatccactttgcaatcaggggtcccatctcggttcagtggcagtggatctgggacagatttcactctcaccatcagcagcctgcagcctgaagatgttgcaacttattactgccaaaagtataacagtgccccattcactttcggccctgggaccaaagtggatatcaaacga

SEQ ID NO: 10284 - DNA, 324 bp, Artificial Sequence
  source: /note="Description of Artificial Sequence: Synthetic polynucleotide"
gacatccagatgacccagtctccatcctccctgtctgcatctgtaggagacagaggcaccatcacttgccggacaagtcagagcattcgcagctatttaaattggtatcagcagaaaccagggaaagcccctaagctcctgatctatgctgcatccagtttgcaaagtggggtcccatcaaggttcagtggcagtggatctgggacagatttcactctcaccatcagcagtctgcaacctgaagattttgcaacttacttctgtcaacagagttacagttccccgttcacttttggccaggggaccaaggtggaaatcaaacga

SEQ ID NO: 10285 - DNA, 324 bp, Artificial Sequence
  source: /note="Description of Artificial Sequence: Synthetic polynucleotide"
gacatccagatgacccagtctccatcctccctgtctgcatctgtaggagacagaggcaccatcacttgccgggcaagtcagatcattaacacctatttaaattggtatcagcagaagccagggaaagcccctaagctcctgatctatgctgcatccagtttgcaaagtggggtcccatcaaggttcagtggcagtggatctgggacagatttcactctcaccatcagcagtctgcaacctgaagattttgcaacttactactgtcaacagagttacagttccccgttcacttttggccaggggaccaaggtggaaatcaaacga

SEQ ID NO: 10286 - DNA, 324 bp, Artificial Sequence
  source: /note="Description of Artificial Sequence: Synthetic polynucleotide"
gacatccagatgacccagtctccatcctccctgtctgcatctgtaggagacagaggcaccatcacttgccgggcaagtcaggacattcgcacctatttaaattggtatcagcagaaaccagggaaagcccctaagctcctgatctatgctgcatccagtttgcaaagtggggtcccatcaaggttcagtggcagtggatctgggacagatttcactctcaccatcagcagtctgcaacctgaagattttgcaacttactactgtcaacagagttacggtaccccgtacacttttggccaggggaccaaggtggagatcaaacga

SEQ ID NO: 10287 - DNA, 321 bp, Artificial Sequence
  source: /note="Description of Artificial Sequence: Synthetic polynucleotide"
gacatccagatgacccagtctccatcctccctgtctgcatctgtaggagacagaggcaccatcacttgccgggcaagtcaggacattcgcacctatttaaattggtatcagcagaaaccagggaaagcccctaagctcctgatctatgctgcatccagtttgcaaagtggggtcccatcaaggttcagtggcagtggatctgggacagatttcactctcaccatcagcagtctgcaacctgaagattttgcaacttactactgtcaacagagttacggtaccccgtacacttttggccaggggaccaagctggagatcaaa

SEQ ID NO: 10288 - DNA, 324 bp, Artificial Sequence
  source: /note="Description of Artificial Sequence: Synthetic polynucleotide"
gacatccagatgacccagtctccatcctccctgtctgcatctgtaggagacagaggcaccgtcacttgccgggcaagtcagaacattcgcacctatttaaattggtatcagcagaaaccagggaaagcccctaagctcctgatctatgctgcatccagtttgcaaagtggggtcccatcaaggttcagtggcagtggatctgggacagatttcactctcaccatcagcagtctgcaacctgaagattttgcaacttactactgtcaacagagttacggtaccccgtacacttttggccaggggaccaaggtggagatcaaacga

SEQ ID NO: 10289 - DNA, 321 bp, Artificial Sequence
  source: /note="Description of Artificial Sequence: Synthetic polynucleotide"
gacatccagatgacccagtctccatcctccctgtctgcatctgtaggagacagaggcaccgtcacttgccgggcaagtcagaacattcgcacctatttaaattggtatcagcagaaaccagggaaagcccctaagctcctgatctatgctgcatccagtttgcaaagtggggtcccatcaaggttcagtggcagtggatctgggacagatttcactctcaccatcagcagtctgcaacctgaagattttgcaacttactactgtcaacagagttacggtaccccgtacacttttggccaggggaccaagctggagatcaaa

SEQ ID NO: 10290 - DNA, 324 bp, Artificial Sequence
  source: /note="Description of Artificial Sequence: Synthetic polynucleotide"
gacatccagatgacccagtctccatcctccctgtctgcatctgtaggagacagagtcaccatcacttgccgggcaagtcaggacattagaaatgatttaggctggtatcagcagaaaccagggaatgcccctaagctcctgatctattctacatccagtttacaaagtggggtcccatcaaggttcagcggcagtggatctggcacagatttcactctcaccatcagcagcctgcagcctgaagattttgcaacttattactgtctacaagattacaattaccctctcactttcggcggagggaccaaggtggaaatcaaacga

SEQ ID NO: 10291 - DNA, 324 bp, Artificial Sequence
  source: /note="Description of Artificial Sequence: Synthetic polynucleotide"
gacatccagatgacccagtctccatcctccctgtctgcatctgtaggagacagagtcaccatcacttgccgggcaagtcagggcattagaaatgatttagactggtatcagcagaaaccagggaaagcccctaagcgcctgatctatactgcatccagtttgcaaagtggggtcccatcaaggttcagcggcagtggatctgggacagaattcactctcacaatcagcagcctgcagcctgaagattttgcaacttattactgtctacagtatagtaattaccctccgacgttcggccaagggaccaaggtggagatcaaacga

SEQ ID NO: 10292 - DNA, 324 bp, Artificial Sequence
  source: /note="Description of Artificial Sequence: Synthetic polynucleotide"
gacatccagatgacccagtctccatcctccctgtctgcatctgtaggagacagagtcaccatcacttgccgggcaagtcagggcattagaaatgatttaggctggtatcaccagaaaccagggaaagcccctaagctcctgatctatgctgcatccagtttgcaaagtggggtcccatcaaggttcagcggcagtggatctgggacagaattcactctcaccatcagcagcctgcagcctgaagattttgcaacttattactgtctacagcataatagttacccgttgactttcggccgagggaccaaggtggagatcaaacga

SEQ ID NO: 10293 - DNA, 324 bp, Artificial Sequence
  source: /note="Description of Artificial Sequence: Synthetic polynucleotide"
gacatccagatgacccagtctccatcctccctgtctgcatctgtaggagacagagtcaccatcacttgccgggcaagtcagggcattagaaatgatttaggctggtatcagcagaaaccagggaaagcccctaagcgcctgatctatgctgcatccagtttgcaaagtggggtcccatcaaggttcagcggcagtggatctgggacagaattcactctcacaatcagcagcctgcagcctgaagattttgcaacttattactgtctacagcataataattacccgtggacgttcggccaagggaccaaggtggaaatcaaacga

SEQ ID NO: 10294 - DNA, 324 bp, Artificial Sequence
  source: /note="Description of Artificial Sequence: Synthetic polynucleotide"
gacatccagatgacccagtctccatcctccctgtctgcatctgtaggagacagagtcaccatcacttgccgggcaagtcagggcattagaaatgatttaggctggtatcagcagaaaccagggaaagcccctaagcgcctgatctatgctgcatccagtttgcaaagtggggtcccatcaaggttcagcggcagtggatctgggacagaattcactctcacaatcagcagcctgcagcctgaagattttgcaacttattactgtctacagcataatagttacccgctcactttcggcggagggaccaaggtggagatcaaacga

SEQ ID NO: 10295 - DNA, 321 bp, Artificial Sequence
  source: /note="Description of Artificial Sequence: Synthetic polynucleotide"
gacatccagatgacccagtctccatcctccctgtctgcatctgtaggagacagagtcaccatcacttgccgggcaagtcagggcattagaaatgatttaggctggtatcagcagaaaccagggaaagcccctaagcgcctgatctatgctgcatccagtttgcaaagtggggtcccatcaaggttcagcggcagtggatctgggacagaattcactctcacaatcagcagcctgcagcctgaagattttgcaacttattactgtctacagcataatagttacccttggacgttcggccaagggaccaaggtggagatcaaa

SEQ ID NO: 10296 - DNA, 324 bp, Artificial Sequence
  source: /note="Description of Artificial Sequence: Synthetic polynucleotide"
gacatccagatgacccagtctccatcctccctgtctgcatctgtaggagacagagtcaccatcacttgccgggcaagtcagggcattagaaatgatttaggctggtatcagcagaaaccagggaaagcccctaagcgcctgatctatgctgcatccagtttgcaaagtggggtcccatcaaggttcagcggcagtggatctgggacagaattcactctcaccatcagcagcctgcagcctgaagattttgcaacttattactgtcaacagcataatagttacccgctcactttcggccaagggaccaaggtggagatcaaacga

SEQ ID NO: 10297 - DNA, 324 bp, Artificial Sequence
  source: /note="Description of Artificial Sequence: Synthetic polynucleotide"
gacatccagatgacccagtctccatcctccctgtctgcatctgtaggagacagagtcaccatcacttgccgggcaagtcagggcattagaaatgatttaggctggtatcagcagaaaccagggaaagcccctaagctcctgatctatgctgcatccagtttgcaaagtggggtcccatcaaggttcaccggcattggatctgggacagaattcactctcaccatcaccagcctgcagcctgaacattttgcaacttattactgtctacaggctaataattacccgttcacttttggccaagggaccaagatggagatcaaacga

SEQ ID NO: 10298 - DNA, 324 bp, Artificial Sequence
  source: /note="Description of Artificial Sequence: Synthetic polynucleotide"
gacatccagatgacccagtctccatcctccctgtctgcatctgtaggagacagagtcaccatcacttgccgggcaagtcagggcattagaaatgatttaggctggtatcagcagaaaccagggaaagcccctaagctcctgatctatgctgcatccagtttgcaaagtggggtcccatcaaggttcagcggcagtggatctgggacagatttcactctcaccatcagcagcctgcagcctgaagattttgcaacttattactgccaacaggataataattacccgtccacgttcggccaagggaccaaggtggagatcaaacga

SEQ ID NO: 10299 - DNA, 324 bp, Artificial Sequence
  source: /note="Description of Artificial Sequence: Synthetic polynucleotide"
gacatccagatgacccagtctccatcctccctgtctgcatctgtaggagacagagtcaccatcacttgccgggcaagtcagggcattagcaattatttaggctggtatcagcagaaaccagggaaagctcctaagcgcctgatgtatgctgcatccagtttgcaaaccggggtcccatctaggttcagcggcagtggatctgggacagaattcactctcaccatcagcagcctgcagcctgaagattttgcaacttattactgtctacagcataacagtgacccgctcactttcggcgcagggaccaaggtggagatcaaacga

SEQ ID NO: 10300 - DNA, 324 bp, Artificial Sequence
  source: /note="Description of Artificial Sequence: Synthetic polynucleotide"
gacatccagatgacccagtctccatcctccctgtctgcatctgtaggagacagagtcaccatcacttgccgggcgagtcagggcattagcaattatttagcctggtatcagcagaaaccagggaaagctcctaagctcctgatctatgctgcatccactttgcaaacaggggtcccatcacggttcaccggcagtggatctgggacagatttcactctccccatcaacagcctgcagccggaagatgttgcaacttattactgtcaaaagtataacagagccccgctcactttcggcggagggaccaaagtggagatcaaacga

SEQ ID NO: 10301 - DNA, 324 bp, Artificial Sequence
  source: /note="Description of Artificial Sequence: Synthetic polynucleotide"
gacatccagatgacccagtctccatcctccctgtctgcatctgtaggagacagagtcaccatcacttgccgggcgagtcagggcattagcaattatttagcctggtatcagcagaaaccagggaaagttcctaagctcctgatctatgctgcatccactttgcaatcaggggtcccatctcggttcagtggcagtggatctgggacagatttcactctcaccatcagcagcctgcagcctgaagatgttgcaacttattactgtcaaaagtataacagtgccccattcactttcggccctgggaccaaggtggagatcaaacga

SEQ ID NO: 10302 - DNA, 324 bp, Artificial Sequence
  source: /note="Description of Artificial Sequence: Synthetic polynucleotide"
gacatccagatgacccagtctccatcctccctgtctgcatctgtaggagacagagtcaccatcacttgccgggcgagtcagggcattagcaattatttagcctggtatcagcagaaaccagggaaagttcctaagctcctgatctatgctgcatccactttgcaatcaggggtcccatctcggttcagtggcagtggatctgggacagatttcactctcaccatcagcagcctgcagcctgaagatgttgcaacttattactgtcaaaagtataacagtgccccgctcactttcggcggagggaccaaggtggaaatcaaacga

SEQ ID NO: 10303 - DNA, 324 bp, Artificial Sequence
  source: /note="Description of Artificial Sequence: Synthetic polynucleotide"
gacatccagatgacccagtctccatcctccctgtctgcatctgtaggagacagagtcaccatcacttgccgggcgagtcagggcattagcatttatttagcctggtgtcagcagaaaccagggaaagcccctaagtccctgatctatgctgcatccagtttgcaaagtggggtcccatcaaagttcagcggcagtggatctgggacagaattcactctcaccatcagcagcctgcagcctgaagattttgcaacttattactgccaacagcttaatagttacccgctcactttcggccgagggaccaagctggagatcaaacga

SEQ ID NO: 10304 - DNA, 324 bp, Artificial Sequence
  source: /note="Description of Artificial Sequence: Synthetic polynucleotide"
gacatccagatgacccagtctccatcctccctgtctgcatctgtaggagacagagtcaccatcacttgtcgggcgagtcagggcattagcaattatttaggctggtatcagcagaaaccagggaaagcccctaagcccctgatctatgctgcatccagtttgcaaagtggggtcccatcaaggttcagcggcagtggatctgggacagatttcactctcaccatcaccagcctgcagcctgaagattttgcaacttattactgtctacagcataatagttacccgttcactttcggccgagggaccaaggtggagatcaaacga

SEQ ID NO: 10305 - DNA, 324 bp, Artificial Sequence
  source: /note="Description of Artificial Sequence: Synthetic polynucleotide"
gacatccagatgacccagtctccatcctccctgtctgcatctgtcggagacagagtcaccatcacttgccgggcgagtcaggacattaccaattatttagcctggtatcagcagaaaccagggaaagttcctaagctcctgatctatactacatccactttgcaatcaggggtcccatctcgtttcagtggcagtggatctgggacagatttcactctcaccatcaccagcctgcagcctgaagatgttgcgacttatttctgtcaaaaatataacagtgaccctttcactttcggccctgggaccaaggtggaaatcaaacga

SEQ ID NO: 10306 - DNA, 324 bp, Artificial Sequence
  source: /note="Description of Artificial Sequence: Synthetic polynucleotide"
gacatccagatgacccagtctccatcctccttgtctgcatctgttggaaacagagtcaccatcacttgccgggctagtcagggcattagaaatgatttaggctggtatcacctgaatccacggaaagccactaagcgcctgatctatgcagcatccattttgcaaagtggggtcccatcctggttcatcggcaatggatctgggacagatttcactctcacaatcagcagcctgcagcctgaagattttgcaacttattactgtctacaggataatagttaccctctcactttcggccgagggaccaaggtggagatcaaacga

SEQ ID NO: 10307 - DNA, 324 bp, Artificial Sequence
  source: /note="Description of Artificial Sequence: Synthetic polynucleotide"
gacatccagatgacccagtctccatccttcctgtctgcatctgtaggaaacagagtcaccatcacttgctgggccagtcagggcattagaaattatttagcctggtatcaccaaaaaccagggaaagcccctaagctcctgatctatgctgcatccactttacaaagtggggtcccatcaaggttcagcggcagtggatctgggacagatttcactctcaccatcagcagcctgcagcctgaagattttgcaacttattactgtcaacaacttaatagttaccctctcactttcggcggagggaccaaggtggagatcaaacga

SEQ ID NO: 10308 - DNA, 324 bp, Artificial Sequence
  source: /note="Description of Artificial Sequence: Synthetic polynucleotide"
gacatccagatgacccagtctccatccttcctgtctgcatctgtaggagacagagtcaccatcacttgctgggccagtcagggcagtggcagttatttagcctggtatcagcaaaaaccagggaaagcccctaagctcctgatctatgctgcatccactttacaaagtggggtcccatcaaggttcagcggcagtggatctgggacagaattcactctcacaatcagcagcctgcagcctgaagattttgcaacttattactgtcaacagcttaataattacctatttattttcggccctgggaccaaggtggaaatcaaacga

SEQ ID NO: 10309 - DNA, 324 bp, Artificial Sequence
  source: /note="Description of Artificial Sequence: Synthetic polynucleotide"
gacatccagatgacccagtctccatccttcctgtctgcatctgtaggagacagagtcaccatcacttgctgggccagtcagggcattagcagttatttagcctggtatcagcaaaaaccagggaaagcccctaagctcctgatctatgctacatccactttgcaaagtggggtcccatcaaggttcagcggcagtggatctgggacagaattcactctcacaatcagcagcctgcagcctgaagattttgcaacttattactgtcaacagcttaatagttacccgctcactttcggcggagggaccaaggtggaaatcaaacga

SEQ ID NO: 10310 - DNA, 324 bp, Artificial Sequence
  source: /note="Description of Artificial Sequence: Synthetic polynucleotide"
gacatccagatgacccagtctccatccttcctgtctgcatctgtaggagacagagtcaccatcacttgctgggccagtcagggcattagcagttatttagcctggtatcagcaaaaaccagggaaagcccctaagctcctgatctatgctgcatccactttgcaaagtggggtcccatcaaggttcagcggcagtggatctgggacagaattcactctcacaatcagcagcctgcagcctgaagattttgcaacttattactgtcagcagtttaatagttaccctccgacgttcggccaagggaccaaggtggaaatcaaacga

SEQ ID NO: 10311 - DNA, 324 bp, Artificial Sequence
  source: /note="Description of Artificial Sequence: Synthetic polynucleotide"
gacatccagatgacccagtctccatccttcctgtctgcatctgtaggagacagagtcaccatcacttgctgggccagtcagggcattagcagttatttagcctggtatcagcaaaaaccagggaaagcccctaagctcctgatctatgctgcatccactttgcaaagtggggtcccatcaaggttcagcggcagtggatctgggacagaattcactctcacaatcagcagcctgcagcctgaagattttgcaacttattactgtcaacagtttaatagttaccctccgacgttcggccaagggaccaaggtggaaatcaaacga

SEQ ID NO: 10312 - DNA, 324 bp, Artificial Sequence
  source: /note="Description of Artificial Sequence: Synthetic polynucleotide"
gacatccagatgacccagtctccatccttcctgtctgcatctgtaggagacagagtcaccatcacttgctgggccagtcagggcattagcagttatttagcctggtatcagcaaaaaccagggaaagcccctaagctcctgatttatgcttcatccactttgcaaagtggggtcccatccaggttcagcggcagtggatctgggacagaattcactctcacaatcagcagcctgcagcctgaagattttgcaacttattactgtcaacagtttaatagttaccctccgacgttcggccaagggaccaaggtggaaatcaaacga

SEQ ID NO: 10313 - DNA, 324 bp, Artificial Sequence
  source: /note="Description of Artificial Sequence: Synthetic polynucleotide"
gacatccagatgacccagtctccatccttcctgtctgcatctgtaggagacagagtcaccatcacttgctgggccagtcagggcattagcagttatttagcctggtatcagcaaaaaccagggaaagcccctaagttcctgatctatgctgcatccactttgcaaagtggggtcccatcaaggttcagcggcagtggatctgggacagaattcactctcacaatcagcagcctgcagcctgaagactttgcaacttattactgtcaacagcttaataataacctattcattttcggccctgggaccaaggtggaaatcaaacga

SEQ ID NO: 10314 - DNA, 324 bp, Artificial Sequence
  source: /note="Description of Artificial Sequence: Synthetic polynucleotide"
gacatccagatgacccagtctccatcttccctgtctgcatctgtaggaaacagagtcaccatcacttgccgggcaagtcagggcattagaaatgatttaggctggtatcagcaaaaaccagggaaagcccctaagcgcctgatctatgctgcatccagtttgcaaagtggggtcccatcaaggttcagcggcagtggatctgggacagaattcactctcacaatcagcagcctgcagcctgaagattttgcaacttattactgtctacagcataatagttacccgctcactttcggcggagggaccaaggtggaaatcaaacga

SEQ ID NO: 10315 - DNA, 324 bp, Artificial Sequence
  source: /note="Description of Artificial Sequence: Synthetic polynucleotide"
gacatccagatgacccagtctccatcttccgtgtctgcatctgtaggaaacagagtcaccatcacttgtcgggcgagtcagggtattagcagctggttagcctggtatcagcagaaaccagggaaagcccctaagctcctgatctatgctgcatccagtttgcaaagtggggtcccatcaaggttcagcggcagtggatctgggacagatttcactctcaccatcagcagcctgcagcctgaagattttgcaacttactattgtcaacaggctaacagtttccctccgacgttcggccaagggaccaaggtggagatcaaacga

SEQ ID NO: 10316 - DNA, 324 bp, Artificial Sequence
  source: /note="Description of Artificial Sequence: Synthetic polynucleotide"
gacatccagatgacccagtctccatcttccgtgtctgcatctgtaggagacagagtcaccatcacttgtcgggcgagtcagggtattagcagctggttagcctggtatcagcagaaaccagggaaagcccctaacctcctgatctataatgcatccagtttacaaagtggggtcccatcacggttcagcggcagtggttctgggacagatttcactctcaccatcagcagcctgcagcctgaagattttgcaacttactattgtcaacaggctaacagcttccctctcactttcggcggagggaccaaggtggaaatcaaacga

SEQ ID NO: 10317 - DNA, 324 bp, Artificial Sequence
  source: /note="Description of Artificial Sequence: Synthetic polynucleotide"
gacatccagatgacccagtctccatcttccgtgtctgcatctgtaggagacagagtcaccatcacttgtcgggcgagtcagggtattcgcagctggttagcctggtatcagcagaaaccagggaaagcccctaagctcctgatctatgctgcatccagtttgcaaagtggggtcccatcaaggttcagcggcagtggatctgggacagatttcactctcaccatcagcagcctgcagcctgaagattttgcaatttactattgtcaacaggttaacagtttcccgctcactttcggcggagggaccaaggtggaaatcaaacga

SEQ ID NO: 10318 - DNA, 324 bp, Artificial Sequence
  source: /note="Description of Artificial Sequence: Synthetic polynucleotide"
gacatccagatgacccagtctccatcttccgtgtctgcatctgtaggagacagagtcaccatcacttgtcgggcgagtcagggtattcgcagctggttagcctggtatcagcagaaaccagggaaagcccctaagctcctgatctatgctgcatccagtttgcaaagtggggtcccatcaaggttcagcggcagtggatctgggacagatttcactctcaccatcagcagcctgcagcctgtagattttgcaacttactattgtcaacaggttaacagtttcccgctcactttcggcggagggaccaaggtggaaatcaaacga

SEQ ID NO: 10319 - DNA, 324 bp, Artificial Sequence
  source: /note="Description of Artificial Sequence: Synthetic polynucleotide"
gacatccagatgacccagtctccatcttccgtgtctgcatctgtaggagacagagtcaccatcacttgtcggtcgagtcaggatattaacaactggttagtctggtatcagcagaaaccagggaaagcccctaaggtcctgatatatggtgcttccagattgcaaagtggggtcccatcaaggttcagtggcagtggatctgggacagatttcactctcaccatcagcagtctgcagcctgaagattttgcaacttactattgtcaacaggctaacagtttcccgctcactttcggcggagggaccaaggtggagatcaaacga

SEQ ID NO: 10320 - DNA, 324 bp, Artificial Sequence
  source: /note="Description of Artificial Sequence: Synthetic polynucleotide"
gacatccagatgacccagtctccatcttccgtgtctgcatctgtaggagacagagtcaccatcacttgtcggtcgagtcaggatattaacaactggttagtctggtatcagcagaaaccagggaaagcccctaaggtcctgatatatggtgcttccagattgcaaagtggggtcccatcaaggttcagtggcagtggatctgggacagatttcactctcaccatcagcagtctgcagcctgaagattttgcaacttactattgtcaacaggctaacagtttcccgctcactttcggcggagggaccaagctggagatcaaacga

SEQ ID NO: 10321 - DNA, 321 bp, Artificial Sequence
  source: /note="Description of Artificial Sequence: Synthetic polynucleotide"
gacatccagatgacccagtctccatcttccgtgtctgcatctgtaggagacagagtcaccatcacttgtcggtcgagtcaggatattaacaactggttagtctggtatcagcagaaaccagggaaagcccctaaggtcctgatatatggtgcttccagattgcaaagtggggtcccatcaaggttcagtggcagtggatctgggacagatttcactctcaccatcagcagtctgcagcctgaagattttgcaacttactattgtcaacaggctaacagtttcccgctcactttcggcggagggaccaaggtggagatcaaa

SEQ ID NO: 10322 - DNA, 324 bp, Artificial Sequence
  source: /note="Description of Artificial Sequence: Synthetic polynucleotide"
gacatccagatgacccagtctccatcttccgtgtctgcatctgtaggagacagagtcatcatcacttgtcgggcgagtcagggtattcgcacctggttagcctggtatcagcagaaaccagggaaagcccctaagctcctgatctatgctgcatccagtttgcaaagtggggtcccatcaaggttcagcggcagtggatctgggacagagttcactctcaccatcagcagcctgcagcctgaagattttgtaacttactattgtcaacaggttaacagtttcccgctcactttcggcggagggaccaaggtggagatcaaacga

SEQ ID NO: 10323 - DNA, 342 bp, Artificial Sequence
  source: /note="Description of Artificial Sequence: Synthetic polynucleotide"
gacatccagatgacccagtctccggactccctggctgtgtctctgggcgagagggccaccatcaactgcaagtccagccagactgttttacacagctccaacaatcagaacaacttagtctggtaccagcagaaaccaggacagcctcctaagctgctcatttactgggcttctacccgggaatccggggtccctgaccgattcagtggcagcgggtctgggacagatttcactctcaccatcagcagcctgcaggctgaagatgtggcaatttattactgtcagcaatattatagtactccgtacacttttggccaggggaccaagctggagatcaaacga

SEQ ID NO: 10324 - DNA, 342 bp, Artificial Sequence
  source: /note="Description of Artificial Sequence: Synthetic polynucleotide"
gacatccagatgacccagtctccggactccctggctgtgtctctgggcgagagggccaccatcaactgcaagtccagccagactgttttacacagctccaacaatcagaacaacttagtctggtaccagcagaaaccaggacagcctcctaagctgctcatttactgggcttctacccgggaatccggggtccctgaccgattcagtggcagcgggtctgggacagatttcactctcaccatcagcagcctgcaggctgaagatgtggcaatttattactgtcagcaatattatagtactccgtacacttttggccaggggaccaaggtggaaatcaaacga

SEQ ID NO: 10325 - DNA, 327 bp, Artificial Sequence
  source: /note="Description of Artificial Sequence: Synthetic polynucleotide"
gacatccagatgacccagtctccttccaccctgtctgcatctgtaggagacagagtcaccatcacttgccgggccagtcagagtattagtagctggttggcctggtatcagcagaaaccagggaaagcccctaagctcctgatctataaggcgtctagtttagaaagtggggtcccatcaaggttcaccggcagtggatctgggacagaattcactctcaccatcagcagcctgcagcctgatgattttgcaacttattactgccaacagtataatagttattctccgtggacgttcggccaagggaccaaggtggagatcaaacga

SEQ ID NO: 10326 - DNA, 321 bp, Artificial Sequence
  source: /note="Description of Artificial Sequence: Synthetic polynucleotide"
gacatccagatgacccagtctccttccaccctgtctgcatctgtaggagacagagtcaccatcacttgccgggccagtcagagtattagtagctggttggcctggtatcagcagaaaccagggaaagcccctaagctcctgatttataaggcgtctagtttaaaaagtggggtcccatcaaggttcagcggcagtggatctgggacagaattcattctcaccatcagcagcctgcagcctgatgattttgcaacttattactgccaacagtataatagttattggacgttcggccaagggaccaaggtggagatcaaacga

SEQ ID NO: 10327 - DNA, 321 bp, Llama glama
gacatccagatgacccagtctccttcctccctgtctgcatctctgggagacagagtcaccatcacctgccaggccagtcagggcatcagcaagtacttagcctggtatcagcagaaaccagggcaagctcctaagctcctgatctatagtgcatccagactagaaaccggggtcccttccaggttcagcggcagtggatcagggacaactttcaccctcgtcatcagcggcctggaggctgaagatgccggaagttactactgtcagcagtattacagagcacccgctacgttcggccaggggaccaaggtggaactcaaa

SEQ ID NO: 10328 - DNA, 324 bp, Artificial Sequence
  source: /note="Description of Artificial Sequence: Synthetic polynucleotide"
gacatccagatgacccagtctccttcctccctgtctgcatctgtaggaaacagagtcaccatcacttgccgggccagtcagggcattagaagctggttggcctggtatcaccagaaaccagggaaagcccctaagctcctgatctatgctgcgtccagtttacaaagtggggtcccatcaaggttcagcggcagtggatctgggacagaattcactctcaccatcagcagcctgcagcctgatgattttgcaacttattactgccaacagtataatagttattcgtacacttttggccaagggaccaaggtggagatcaaacga

SEQ ID NO: 10329 - DNA, 324 bp, Artificial Sequence
  source: /note="Description of Artificial Sequence: Synthetic polynucleotide"
gacatccagatgacccagtctccttcctccttgtctgcatctacaggaaacagagtcaccatcacttgccgggccagtcagggtattagcagctgtttggcctggtatcaccaaaaaccagggaaagcccctaagctcctgatctatgctgcatccactttacaaagtggggtcccatcaaggttcagcggcagtggatctgggacagatttcactctcaccatcagctgcctgcagtctgaagattttgcaacttattactgccaacagtattatagttaccctctcactttcggcggagggaccaaggtggaaatcaaacga

SEQ ID NO: 10330 - DNA, 339 bp, Artificial Sequence
  source: /note="Description of Artificial Sequence: Synthetic polynucleotide"
gacatccagttgacccagtctccactctccctgcccgtcacccctggagagccggcctccatctcctgcaggtctagtcagagcctcctgcatagtaatggatacaactttttggattggtacctgcagaagccagggcagtctccacagctcctgatctatttgggttctaatcgggcctccggggtccctgacaggttcagtggcagtggatcaggcacagattttacactgaaattcagcagagtggaggctgaggatgttggactttattactgcatgcaaactctacaaactccgtggacgttcggccaagggaccaaggtggagatcaaacga

SEQ ID NO: 10331 - DNA, 342 bp, Artificial Sequence
  source: /note="Description of Artificial Sequence: Synthetic polynucleotide"
gacatccagttgacccagtctccactctccctgcccgtcacccttggacagccggcctccatctcctgcaggtctagtcaaagcctcgtatacagtgatggaaacacctacttgaattggtttcagcagaggccaggccaatctccaaggcgcctaatttataaggtttctaaccgggactctggggtcccagacagattcagcggcagtgggtcaggcactgatttcacactgaaaatcagcagggtggaggctgaggatgttggggtttattactgcatgcaaggtacacactggcctatattcactttcggccctgggaccaaggtggaaatcaaacga

SEQ ID NO: 10332 - DNA, 342 bp, Artificial Sequence
  source: /note="Description of Artificial Sequence: Synthetic polynucleotide"
gacatccagttgacccagtctccagactccctggctgtgtctctgggcgagagggccaccatcaactgcaagtccagccagagtgttttatacagctccaacaataagaactacttaacttggtaccagcagaaaccaggacagcctcctaagctgctcatttactgggcatctacccgggaatccggggtccctgaccgattcagtggcagcgggtctgggacagatttcactctcaccatcagcagcctgcaggctgaagatgtggcagtttattactgtcagcaattttatagttttccgtacacttttggccaggggaccaaggtggaaatcaaacga

SEQ ID NO: 10333 - DNA, 342 bp, Artificial Sequence
  source: /note="Description of Artificial Sequence: Synthetic polynucleotide"
gacatccagttgacccagtctccagactccctggctgtgtctctgggcgagagggccaccatcaactgcaagtccagccagagtgttttatacagctccaacaataagaactacttaacttggtaccagcagaaaccaggacagcctcctaatctgctcatttactggacatctacccgggaatccggggtccctgaccgattcagtggcagcgggtctgggacagatttcactctcaccatcagcagcctgcaggctgaagatgtggcagtttattactgtcagcaatattatagtattccgtacacttttggccaggggaccaaggtggaaatcaaacga

SEQ ID NO: 10334 - DNA, 342 bp, Artificial Sequence
  source: /note="Description of Artificial Sequence: Synthetic polynucleotide"
gacatccagttgacccagtctccagactccctggctgtgtctctgggcgagagggccaccatcaactgcaagtccagccagagtgttttatatagttccaacaataagaactatctagcttggtaccagcagaaaccaggacagcctcctaagttgctcttttactgggcatctacccgggaatccggggtccctgaccgcttcagtggcagcgggtctgggacagatttcactctcaccatcagcagcctgcaggctgaagatgtggcagtttattactgtcaccaatcttataatattccgtacacttttggccaggggaccaaggtggaaatcaaacga

SEQ ID NO: 10335 - DNA, 324 bp, Artificial Sequence
  source: /note="Description of Artificial Sequence: Synthetic polynucleotide"
gacatccagttgacccagtctccatcctcactgtctgcatctgtaggaaacagagtcaccatcacttgtcgggcgagtcagggcattagcaattatttagcctggtttcagcagaaaccagggaaagcccctaagtccctgatctatgctgcatccagtttgcaaagtggggtcccatcaaagttcagcggcagtggatctgggacagatttcactctcaccatcagcagcctgcagcctgaagattttgcaacttattactgccaacagtataatagttacccgctcactttcggcggagggaccaagctggaaatcaaacga

SEQ ID NO: 10336 - DNA, 324 bp, Artificial Sequence
  source: /note="Description of Artificial Sequence: Synthetic polynucleotide"
gacatccagttgacccagtctccatcctccctgtctgcatctgtaggaaacagagtcaccatcacttgccgggcaagtcagggcattagaaatgatttagcctggtatcagcagaaaccagggaaagcccctaagctcctgatctatgctgcatccactttgcaaacaggggtcccatctcggttcagtggcagtggatctgggacagatttcactctcaccatcagcagcctgcagcctgaagatgttgcaacttattactgtcaaaagtataacagtgcccctctcactttcggcggagggaccaaggtggagatcaaacga

SEQ ID NO: 10337 - DNA, 324 bp, Artificial Sequence
  source: /note="Description of Artificial Sequence: Synthetic polynucleotide"
gacatccagttgacccagtctccatcctccctgtctgcatctgtaggaaacagagtcaccatcacttgccgggcaagtcagggcattagaaatgatttagcctggtttcagcagaaaccagggaaagcccctaagcccctgatctatgctgcatccagtttgcaaagtggggtcccatcaaggttcagcggcagtggatctgggacagaattcactctcacaatcagcagcctgcagcctgaagattttgcaacttattactgcctacagcataatagttacccgtggactttcggccaagggaccaaggtggaaatcaaacga

SEQ ID NO: 10338 - DNA, 324 bp, Artificial Sequence
  source: /note="Description of Artificial Sequence: Synthetic polynucleotide"
gacatccagttgacccagtctccatcctccctgtctgcatctgtaggaaacagagtcaccatcacttgccgggcgagtcagggcattagcaattatttagcctggtatcagcagaaaccagggaaagcccctaagctcctgatctatgctgcatccactttgcaatctggggtcccatctcggttcagcggcagtggatctgggacagatttcactctcaccatcagcagcctgcagcctgaagatgttgcaacttattactgtcaaaagtataacagtgccccgctcactttcggcggagggaccaaggtggaaatcaaacga

SEQ ID NO: 10339 - DNA, 324 bp, Artificial Sequence
  source: /note="Description of Artificial Sequence: Synthetic polynucleotide"
gacatccagttgacccagtctccatcctccctgtctgcatctgtaggagacagagtcaccatcacttgccgggcaagtcagggcattagaaatgatttaggctggtatcagcagaaaccagggaaagcccctaagcgcctgatctatgctgcatccagtttgcaaagtggggtcccatcaaggttcagcggcagtggatctgggacagaattcactctcacaatcagcagcctgcagcctgaagattttgcaacttattactgtctacagcataatagttacccttggacgttcggccaagggaccaaggtggagatcaaacga

SEQ ID NO: 10340 - DNA, 324 bp, Artificial Sequence
  source: /note="Description of Artificial Sequence: Synthetic polynucleotide"
gacatccagttgacccagtctccatcctccctgtctgcatctgtaggagacagagtcaccatcacttgccgggcaagtcagggcattagaaatgatttaggctggtatcagcagaaaccagggaaagcccctaagcgcctgatctatgctgcatccagtttgcaaagtggggtcccatcaaggttcagcggcagtggatctgggacagaattcactctcacaatcagcagcctgcagcctgaagattttgcaacttattactgtctacagcataatagttacccgtgcacttttggccaagggaccaaggtggaaatcaaacga

SEQ ID NO: 10341 - DNA, 321 bp, Artificial Sequence
  source: /note="Description of Artificial Sequence: Synthetic polynucleotide"
gacatccagttgacccagtctccatccttcctgtctacatctgtaggagacagagtcaccatcacttgctgggccagtcagggcattagcagttatttagcctggtatcagcaaaaaccagggaaagcccctaacctcctgatctatactgcatccactttacaaagtggggtcccatcaaggttcagcggcagtggatctgggacagaattcactctcacaatcagcagcctgcagcctgaagattttgcaacttattactgtcaacaacttaatagttacccgtacacttttggccaggggaccaaactggagatcaaa

SEQ ID NO: 10342 - DNA, 324 bp, Artificial Sequence
  source: /note="Description of Artificial Sequence: Synthetic polynucleotide"
gacatccagttgacccagtctccatccttcctgtctgcatctgtaggaaacagagtcaccatcacttgctgggccagtcaggacattagcagttatttagtctggtatcagcaaaaaccagggaaagcccctaagctcctgatctacgctgcatccactttgcaaagtggggtcccatcaaggttcagcggcagtggatctgggacagaattcactctcacaatcagcagcctgcagcctgaagattttgcaacttattactgtcaacagcttaatacttgcccattcactttcggccctgggaccaaggtggagatcaaacga

SEQ ID NO: 10343 - DNA, 324 bp, Artificial Sequence
  source: /note="Description of Artificial Sequence: Synthetic polynucleotide"
gacatccagttgacccagtctccatccttcctgtctgcatctgtaggaaacagagtcaccatcacttgctgggccagtcagggcattagcagttatttagcctggtatcagcaaaaaccagggaaagcccctaagctcctgatctatgctgcatccactttgcaaagtggggtcccatcaaggttcagcggcagtggatctgggacagaattcactctcacaatcagcagcctgcagcctgaagattttgcaacttattactgtcaacagcttaatagttacccattcactttcggccctgggaccaaggtggagatcaaacga

SEQ ID NO: 10344 - DNA, 324 bp, Artificial Sequence
  source: /note="Description of Artificial Sequence: Synthetic polynucleotide"
gacatccagttgacccagtctccatccttcctgtctgcatctgtaggaaacagagtcaccatcacttgctgggccagtcagggcattagcagttatttagcctggtatcagcaaaaaccagggaaagcccctaagctcctgatctatgctgcatccactttgcaaagtggggtcccatcaaggttcagcggcagtggatctgggacagaattcactctcacaatcagcagcctgcagcctgaagattttgcaacttattactgtcaacagcttaatagttaccctcggacgttcggccaagggaccaaggtggaaatcaaacga

SEQ ID NO: 10345 - DNA, 324 bp, Artificial Sequence
  source: /note="Description of Artificial Sequence: Synthetic polynucleotide"
gacatccagttgacccagtctccatcttccgtgtctgcatctgtaggaaacagagtcaccatcacttgtcgggcgagtcaggatattaacaactggttagtctggtatcaccaaaatccagggaaagcccctaaggtcctgatatatggtgcatcccgattgcaaagtggggtcccatcaaggttcagcggcagtggatctgggacagatttcactctcaccatcagcagcctgcagcctgaagattttgcaacttactattgtcaacaggctaacagtttcccgctcactttcggcggagggaccaaggtggagatcaaacga

SEQ ID NO: 10346 - DNA, 324 bp, Artificial Sequence
  source: /note="Description of Artificial Sequence: Synthetic polynucleotide"
gacatccagttgacccagtctccatcttccgtgtctgcatctgtaggaaacagagtcaccatcacttgtcgggcgagtcagggcattagcagctggttagcctggtatcagcagaaaccagggaaagcccctaacctcctgatctatgctatatccagtttgcgcagtggggtcccatcaaggttcagcggcagtggatctgggacagatttcactctcaccatcagcagcctgcagcctgaagattttgcaacttactattgtcaacaggctaaaagtttcccgtacacttttggccaggggaccaaggtggagatcaaacga

SEQ ID NO: 10347 - DNA, 324 bp, Artificial Sequence
  source: /note="Description of Artificial Sequence: Synthetic polynucleotide"
gacatccagttgacccagtctccatcttccgtgtctgcatctgtaggagacagagtcaccatcacttgtcgggcgagtcagggtattagcagctggttagcctggtatcagcagaaaccagggaaagcccctaagctcctgatctatgctgcatccagtttgcaaagtggggtcccatcaaggttcagcggcagtggatctgggacagatttcactctcaccatcagcagcctgcagcctgaagattttgcaacttactattgtcaacaggctaacagtttcccgctcactttcggcggagggaccaaggtggagatcaaacga

SEQ ID NO: 10348 - DNA, 324 bp, Artificial Sequence
  source: /note="Description of Artificial Sequence: Synthetic polynucleotide"
gacatcccaatgacccagtctccatcctccctgtctgcgtctgtaggaaacagagtcaccatcacttgccgggcgagtcagggcattagcaattatttagcctggtatcaccacaaaccagggaaagttcctaagctcctgatctatgctgcatccactttgcaatcaggggtcccatctcggttcagtggcagtggatctgggacagatttcactctcaccatccacagcctgcagcctgaagatgttgcaacttattactgtcaaaagtataacagtgccccattcactttcggcccagggaccaaggtggaaatcaaacga

SEQ ID NO: 10349 - DNA, 324 bp, Artificial Sequence
  source: /note="Description of Artificial Sequence: Synthetic polynucleotide"
gacatcccgatgacccagtctccatcctcattctctgcatctacaggaaacagagtcaccatcacttgtcgggcgagtcagggcattagaagttatttagcctggtatcaccaaaaaccagggaaagcccctaagctcctgatctatgctgcatccactttgcaaagtggggtcccatcaaggttcaccggcagtggatctgggacagatttcactctcaccatcagctgcctgcagtctgaagattttgcaacttattactgtcaacagtattatagttacccgttcacttttggccaggggaccaaggtggagatcaaacga

SEQ ID NO: 10350 - DNA, 324 bp, Artificial Sequence
  source: /note="Description of Artificial Sequence: Synthetic polynucleotide"
gacatcccgatgacccagtctccatcctccctgtctgcatctgtaggaaacagagtcaccatcacttgccgggcgagtcagggctttaacaattatttagcctggtatcaccagaaaccagggaaagttcctaacctcctgatctatgctgcatccactttgcaatcaggggtcccatctcggttcagtggcagtggatctgggacagatttcactctcaccatccacagcctgcagcctgaagatgttgcaacttattactgtccaaagtataacagtgccccattcactttcggcccagggaccaaagtggagatcaaacga

SEQ ID NO: 10351 - DNA, 342 bp, Artificial Sequence
  source: /note="Description of Artificial Sequence: Synthetic polynucleotide"
gacatccggatgacccagtctccagactccctggctgtgtctctgggcgagagggccaccatcaactgcaagtccagccagagtgttttatccagctccaacaataagaactacttagcttggtaccagcaaaaaccaggacagcctcctaaactgctcatttactgggcatctacccgggaatccggggtccctgaccgattcagtggcagcgggtctgggacagatttcagtctcaccatcagcagcctgcaggctgaagatttggcagtttattactgtcagcaatattatagtactcctctcactttcggcggagggaccaaggtggaaatcaaacga

SEQ ID NO: 10352 - DNA, 324 bp, Artificial Sequence
  source: /note="Description of Artificial Sequence: Synthetic polynucleotide"
gacatccggatgacccagtctccatcctccctgtctgcatctgtaggagacagaggcaccatcacttgccgggcaagtcagaacattaacagctatttaaattggtatcagctgaaaccagggaaagcccctaaactcctgatctttgctgcatccagtttgcaaagtggggtcccatcaaggttcagtggcagtggatctgggacagatttcactctcaccatcagcagtctgcaacctgaagattttgcaacttactactgtcaacagagttacagttccccgttcacttttggccaggggaccaaggtggaaatcaaacga

SEQ ID NO: 10353 - DNA, 339 bp, Artificial Sequence
  source: /note="Description of Artificial Sequence: Synthetic polynucleotide"
gacatcgtgatgacccaaactccactctcctcacctgtcacccttggacagccggcctccatctcctgcaggtctagtcaaagcctcgtacacagtgatggaaacacctacttgagttggcttcagcagaggccaggccagcctccaagactcctaatttataagatttctaaccggttctctggggtcccagacagattcagtggcagtggggcagggacagatttcacactgaaaatcagcagggtggaagctgaggatgtcggggtttattactgcatgcaagctacacaatttcctcagacgttcggccaagggaccaaggtggagatcaaacga

SEQ ID NO: 10354 - DNA, 327 bp, Artificial Sequence
  source: /note="Description of Artificial Sequence: Synthetic polynucleotide"
gacatcgtgatgacccagtctccagactccctggctgtgtctctgggcgagagggccaccatcaaatgcaagtccagccagagtgttttatacagctccaacaataagaactacttagcttggtaccagcagaaaccaggacagcctcccaacctgctcatttactgggcatctacccgggaatccggggtccctgaccgattcagtggcagcgggtctgggacagatttcactctcaccatcagcagcctgcaggctgaagatgtggcagtttattactgtcagcaatatttctcgttcggccaagggaccaaggtggaaatcaaa

SEQ ID NO: 10355 - DNA, 339 bp, Artificial Sequence
  source: /note="Description of Artificial Sequence: Synthetic polynucleotide"
gacatcgtgatgacccagtctccagactccctggctgtgtctctgggcgagagggccaccatcaactgcaagtccagccagagtgttttatacagctccaacaataagaactacttaggttggtaccagcagaaagcaggacagcctcctaagctgctcatttactgggcatctacccgggaatccggggtccctgaccgattcagtggcagcgggtctgggacagatttcactctcaccatcagcagcctgcaggctgaagatgtggcagtttattactgtcagcaatattatggtattccgtggacgttcggccaagggaccaaggtggaaatcaaa

SEQ ID NO: 10356 - DNA, 339 bp, Artificial Sequence
  source: /note="Description of Artificial Sequence: Synthetic polynucleotide"
gacatcgtgatgacccagtctccagactccctggctgtgtctctgggcgagagggccaccatcaactgcaagtccagccagagtgttttatacagctccaacaatcagaattacttagcttggtaccagcagaaaccaggacagcctcctaaactgctcatttactgggcatctacccgggaatccggggtccctgaccgattcagtggcagcgggtctgggacagatttcactctcaccatcagtagcctgcaggctgaagatgtggcagtttattactgtcagcaatattatagtactccgtacacttttggccaggggaccaagctggagatcaaa

SEQ ID NO: 10357 - DNA, 342 bp, Artificial Sequence
  source: /note="Description of Artificial Sequence: Synthetic polynucleotide"
gacatcgtgatgacccagtctccagactccctggctgtgtctctgggcgagagggccaccatcaactgcaagtccagccagagtgttttatacagttccaacaataagaactatttagcttggtaccagcagaaaccaggacagcctcctaagttgctcttttactgggcatctgcccgggaatccggggtccctgaccgcttcagtggcagcgggtgtgggacagatttcactctcaccatcagcagcctgcaggctgaagatgtggcagtttattactgtcaccaatcgtataatattccgtacacttttggccaggggaccaaggtggaaatcaaacga

SEQ ID NO: 10358 - DNA, 339 bp, Artificial Sequence
  source: /note="Description of Artificial Sequence: Synthetic polynucleotide"
gacatcgtgatgacccagtctccagactccctggctgtgtctctgggcgagagggccaccatcaactgcaagtccagccagagtgttttatccagctccaacaataagaactacttaacatggtaccagcagaaaccaggacagcctcctaagttgctcatttactgggcatctacccgggaatccggggtccctgaccgattcagtggcagcgggtctgggacagatttcactctcaccatcagcagcctgcaggctgaagatgtggcagtttattactgtcagcaatattatagtactccgtacacttttggccaggggaccaagctggagatcaaa

SEQ ID NO: 10359 - DNA, 342 bp, Artificial Sequence
  source: /note="Description of Artificial Sequence: Synthetic polynucleotide"
gacatcgtgatgacccagtctccatactccctggctgtgtctctgggcgagagggccaccatcaactgcaggtccagccaaaatcttttatacagctccaccaataagaactacttaccttggtaccagcagaaaccaggacagcctcctaagctgctcatttactgggcatctacccgggattccggggtccctgaccgattcagtggcagcgggtctgggacagatttcactctcaccatcagcagcctgcaggctgaagatgtggcagtttattactgtcagcaatattatagtatttatcggacgttcggccaagggaccaagctggagatcaaacga

SEQ ID NO: 10360 - DNA, 333 bp, Artificial Sequence
  source: /note="Description of Artificial Sequence: Synthetic polynucleotide"
gaccctgtgatgacccagactccatcctccgtgtctgcagctgtgggaggcacagtcaccatcaattgccagtccagtcagagtgttaatcagaacgacttatcctggtatcagcagaaaccagggcagcctcccaagcgcctgatctattatgcatccactctggcatctggggtctcatcgcggttcaaaggcagtggatctgggacacagttcactctcaccatcagcgacatgcagtgtgacgatgctgccacttactactgtcaaggcagttttcgtgttagtggttggtactgggctttcggcggagggaccgaggtggtggtcaaa

SEQ ID NO: 10361 - DNA, 327 bp, Artificial Sequence
  source: /note="Description of Artificial Sequence: Synthetic polynucleotide"
gaccctgtgctgacccagactccatcccccgtgtctgcagctgtgggaggcacagtcaccatcagttgccaggccagtgagagtgttgagagtggcaactggttagcctggtatcagcagaaaccagggcagcctcccaagctcctgatctattatacatccactctggcatctggggtcccatcgcggttcaaaggcagtggatctggggcacacttcactctcaccatcagcggcgtgcagtgtgacgatgctgccacttactactgtcaaggcgctttttatggtgtgaatactttcggcggagggaccgaggtggtggtcaaa

SEQ ID NO: 10362 - DNA, 339 bp, Artificial Sequence
  source: /note="Description of Artificial Sequence: Synthetic polynucleotide"
gacgtcgtgatgacccagactccactctcctctcctgtcacccttggacagccggcctccatctcctgcaggtctagtcaaggcctcgtacgcagtgatggaaacacctacttgagttggcttcagcagaggccaggccagcctccaagactcctaatttataagatttctaaccgattctctggggtcccagacagattcagtggcagtggggcagggacaactttcacacttaaaatcaacagggtggaagttgaggatgtcggggtttattactgcctgcaagctacacaatttcctttcactttcggccatgggacaaaggtggagatcaaacga

SEQ ID NO: 10363 - DNA, 336 bp, Artificial Sequence
  source: /note="Description of Artificial Sequence: Synthetic polynucleotide"
gatattgtaatgacccagactccactctcctcacctgtcacccttggacagccggcctccatctcctgcaggtctagtcaaagcctcgtacgcagtgatggaaatacctacttgagttggcttcagcagaggccgggccagcctccaagactcctaatttataagatttctaaccggttctctggggtcccagacagattcagtggcagtggggcagggacagatttcacactgaaaatcagcagggtggaagctgaggatgtcgggatttatttctgcatgcaaactacacaatttccattcactttcggccctgggaccaaagtggatatcaaa

SEQ ID NO: 10364 - DNA, 339 bp, Artificial Sequence
  source: /note="Description of Artificial Sequence: Synthetic polynucleotide"
gatattgtgatgacccagactccactctcctcacctgtcacccttggacagccggcctccatctcctgcaggtctagtcaaagcctcgagaaaagtgatggaaacacctacttgagttggcttcagcagcggccaggccagcctccaagactcctaatttataagatttctaaccgtttctctggggtcccagacagattcagtggcagtggggcagggacagatttcacactgagaatcagcagggtggaagctgaggatgtcggaatttattactgcgtgcaaactacacaatttcctttcactttcggccctgggaccaaggtggagatcaaacga

SEQ ID NO: 10365 - DNA, 336 bp, Artificial Sequence
  source: /note="Description of Artificial Sequence: Synthetic polynucleotide"
gatattgtgatgacccagactccactctcctcacctgtcacccttggacagccggcctccatctcctgcaggtctagtcaaagcctcgtaaaaagtgatggaaatacctacttgagttggcttcagcagaggccaggccagcctccaagactcctaatttataagatttctaaccggttctctggggtcccagacagattcagtggcagtggggcagggacagatttcacactgaaaatcagcagggtggaagctgaggatgtcggggtttattactgcatgcaaactacacagtttccattcactttcggccctgggaccaaagtggatatcaaa

SEQ ID NO: 10366 - DNA, 336 bp, Artificial Sequence
  source: /note="Description of Artificial Sequence: Synthetic polynucleotide"
gatattgtgatgacccagactccactctcctcacctgtcacccttggacagccggcctccatctcctgcaggtctagtcaaagcctcgtaaaaagtgatggaaatacctacttgagttggcttcagcagaggccaggccagcctccaagactcctaatttataagatttctaaccggttctctggggtcccagacagattcagtggcagtggggcagggacagatttcacactgaaaatcagcagggtggaagctgaggatgtcgggatttattattgtatgcaaactacacaatttccattcactttcggccctgggaccaaagtggatatcaaa

SEQ ID NO: 10367 - DNA, 339 bp, Artificial Sequence
  source: /note="Description of Artificial Sequence: Synthetic polynucleotide"
gatattgtgatgacccagactccactctcctcacctgtcacccttggacagccggcctccatctcctgcaggtctagtcaaagcctcgtacgcagtgatggaaacacctacttgagttggcttcagcagaggccaggccagcctccaagactcctaatttataagatttctaaccgattctctggggtcccagacagattcagtggcagtggggcagggacagatttcacactaaaaatcagcagggtggatgctgaggatgtcggggtttattactgcatgcaagctacacaatttcctttcactttcggccctgggaccaaggtggagatcaaacga

SEQ ID NO: 10368 - DNA, 336 bp, Artificial Sequence
  source: /note="Description of Artificial Sequence: Synthetic polynucleotide"
gatattgtgatgacccagactccactctcctcacctgtcacccttggacagccggcctccatctcctgcaggtctagtcaaagcctcgtacgcagtgatggaaacacctacttgagttggcttcagcagaggccaggccagcctccaagactcctaatttataagatttctaaccggttctctggggtcccagacagattcagtggcagtggggcagggacagatttcacactgaaaatcagcagggtggaagctgacgatgtcggggtttattactgcatgcaaactacacaatttccattcactttcggccctgggaccaaagtggatatcaaa

SEQ ID NO: 10369 - DNA, 336 bp, Artificial Sequence
  source: /note="Description of Artificial Sequence: Synthetic polynucleotide"
gatattgtgatgacccagactccactctcctcacctgtcacccttggacagccggcctccatctcctgcaggtctagtcaaagcctcgttcacagtgatggaaacacctacttgagttggcttcagcagaggccaggccagcctccaagactcctaatttataagatttctaaccggttctctggggtcccagacagattcattggcagtggggcagggacagatttcacactgagaatcagcagggtggaagctgaggatgtcggggtttattactgcatgcaagctacacaatttcctttcactttcggccctgggaccagagtggatatcaaa

SEQ ID NO: 10370 - DNA, 336 bp, Artificial Sequence
  source: /note="Description of Artificial Sequence: Synthetic polynucleotide"
gatattgtgatgacccagactccactctcctcacctgtcacccttggacagccggcctccatctcctgcaggtctagtcacagcctcgttcgcagtgatggaaacacctacttgagttggcttcagcagaggccaggccagcctccaagactcctaatttataagatttctaaccgattctctggggtcccagacagattcagtggcactggggcagggacagatttcacactgaaaatcaacagggtggaagctgaggatgtcgggttttattactgcatgcaagctacacaatttcctttcactttcggccctgggaccaaagtggatatcaaa

SEQ ID NO: 10371 - DNA, 339 bp, Artificial Sequence
  source: /note="Description of Artificial Sequence: Synthetic polynucleotide"
gatattgtgatgacccagactccactctcctcacctgtctcccttggacacccggcctccatctcctgcaggtctagtcaaagcctcaaaaaaagtgatggaaacacctacttgagttggcttcagcagaggccaggccagcctccaagactcctaatttataacatttctaaccggttctctggggtcccagacagattcagtggcagtggggcagggacagatttcacactgaaaatcaccagggtggaagctgaagatgtcgggttttattactgcatgcaaactactcaatttcctttcactttcggccctgggaccaaggtggagatcaaacga

SEQ ID NO: 10372 - DNA, 339 bp, Artificial Sequence
  source: /note="Description of Artificial Sequence: Synthetic polynucleotide"
gatattgtgatgactcagtctccactctccctgcccgtcacccctggagagccggcctccatctcctgcaggtctagtcagagcctcctgcacagtaatggatacaattatttggattggtacctgcagaagacagggcagtctccacaactcctgatctatttgggttctaatcgggcctccggggtccctgacaggttcagtggcagtggatcaggcacagattttacactgaaaatcagcagagtggaggctgaggatgttgggatttattactgcatgcaagctctacaagctctcccattcactttcggccctgggaccaaagtggatatcaaa

SEQ ID NO: 10373 - DNA, 324 bp, Artificial Sequence
  source: /note="Description of Artificial Sequence: Synthetic polynucleotide"
gcacatccgatgacccagtctccatccttcctgtctgcatctgtaggaaacagagtcaccatcacttgctgggccagtcagggcattagcagttatttagcctggtatcagcaaaaaccagggaaagcccctaagctcctgatctatgctgcatccactttgcaaagtggggtcccatcaaggttcaccggcagtggatctgggacagaattcactctcacaatcagcagcctgcagcctgaagattttgcaacttattactgtcaacagcttaatagttaccctcggacgttcggccaagggaccaagctggatatcaaacga

SEQ ID NO: 10374 - DNA, 342 bp, Artificial Sequence
  source: /note="Description of Artificial Sequence: Synthetic polynucleotide"
gccatccagatgacccagtctccactctccctgtccgtcacccttggacagccggcctccatctcctgcaggtctagtcaaagcctcgtatacagtgatggaaacacctacttgaattggtttcagcagaggccaggccaatctccaaggcgcctaatttataaggtttctaaccgggactctggggtcccagacagattcagcggcagtgggtcaggcactgatttcacactgaaaatcagcagggtggaggctgaggatgttggggtttattactgcatgcaaggtacacactggcctatattcactttcggccctgggaccaaggtggagatcaaacga

SEQ ID NO: 10375 - DNA, 342 bp, Artificial Sequence
  source: /note="Description of Artificial Sequence: Synthetic polynucleotide"
gccatccagatgacccagtctccagactccctggctgtgtctctgggcgagagggccaccatcaactgcaagtccagccagagtgttttatacagctccgacaatgagaactgcttaacttggtaccagcagaaaccaggacagcctcctaagttactcatttactgggcatctacccgggaatccggggtccctgaccgattcagtggcagcgggtctgggacagatttcactctcaccatcagcagcctgcaggctgaagatgtggcagtttattactgtcagcaacattataatattccgtacacttttggccaggggaccaaggtggaaatcaaacga

SEQ ID NO: 10376 - DNA, 342 bp, Artificial Sequence
  source: /note="Description of Artificial Sequence: Synthetic polynucleotide"
gccatccagatgacccagtctccagactccctggctgtgtctctgggcgagagggccaccatcaactgcaagtccagccagagtgttttatacagttccgacaataagaactacttagtttggtaccagcagaaaccaggacagcctcctaacctgctcatttactgggcatctacccgggaatccggggtccctgaccgattcagtggcagcgggtctgggacagatttcactctcaccatcagcagcctgcaggctgaagatgtggcagtttattactgtcagcaacattataatcctccgtactcttttggccaggggaccaaggtggaaatcaaacga

SEQ ID NO: 10377 - DNA, 342 bp, Artificial Sequence
  source: /note="Description of Artificial Sequence: Synthetic polynucleotide"
gccatccagatgacccagtctccagactccctggctgtgtctctgggcgagagggccaccatcaactgcaggtccagccagagtgttttatacagctccaccaataagaactacttagcttggtaccagcagaaaccaggacagcctcctaagctgctcatttactgggcatctacccgggattccggggtccctgaccgattcagtggcagcgggtctgggacagatttcactctcaccatcagcagcctgcaggctgaagatgtggcagtttattactgtcaacaatattatagtatttatcggacgttcggccaagggaccaaggtggaaatcaaacga

SEQ ID NO: 10378 - DNA, 321 bp, Artificial Sequence
  source: /note="Description of Artificial Sequence: Synthetic polynucleotide"
gccatccagatgacccagtctccatcctccctgtctgcatatgtaggggacagagtcaccatcacttgccgggcaagtcaggacattagaaatgatttaggctggtatcagcagaaaccagggaaagcccctaatctcctgatctatgatatatccagtttacaaagtggggtcccatcaaggttcagcggcagtggatctggcacagatttcactctcaccatcagcagcctgcagcctgaagattttgcaacttattactgtctacaagattacaattacccgctcactttcggcggagggaccaaggtggagatcaaa

SEQ ID NO: 10379 - DNA, 324 bp, Artificial Sequence
  source: /note="Description of Artificial Sequence: Synthetic polynucleotide"
gccatccagatgacccagtctccatcctccctgtctgcatctgtaggaaacagagtcaccatcacttgccgggcaagtcagggcattagaaatgatttaggctggtatcagcagaaaccagggaaagcccctaagctcctgatctatgctgcatccagtttacaaagtggggtcccatcaaggttcagcggcagtggatctggcacagatttcactctcaccatcagcagcctgcagcctgaagattttgcaacttattactgtctacaagattacaattaccctcacacttttggccaggggaccaaggtggagatcaaacga

SEQ ID NO: 10380 - DNA, 324 bp, Artificial Sequence
  source: /note="Description of Artificial Sequence: Synthetic polynucleotide"
gccatccagatgacccagtctccatcctccctgtctgcatctgtaggaaacagagtcaccatcacttgccgggcaagtcagggcattataaatgatttaggctggtataaccagaaaccatggaaagcccctaaacgcctgatctatgctgcatccattttgcaaagtggggtcccatcaaggttcagcggccgtggatgtgggacagaattcagtctcacaatcagcagcctgcagcctgaagattttgcaacttattactgtctacagcataatagttacccgctcactttcggcggagggaccaaggtggaaatcaaacga

SEQ ID NO: 10381 - DNA, 321 bp, Artificial Sequence
  source: /note="Description of Artificial Sequence: Synthetic polynucleotide"
gccatccagatgacccagtctccatcctccctgtctgcatctgtaggagacagagtcaccatcacttgccgggcaagtcaggacattagaaatgatttaggctggtatcagcagaaaccagggaatgcccctaagctcctgatctattctacatccagtttacaaagtggggtcccatcaaggttcagcggcagtggatctggcacagatttcactctcaccatcagcagcctgcagcctgaagattttgcaacttattactgtctacaagattacaattaccctctcactttcggcggagggaccaaggtggagatcaaa

SEQ ID NO: 10382 - DNA, 324 bp, Artificial Sequence
  source: /note="Description of Artificial Sequence: Synthetic polynucleotide"
gccatccagatgacccagtctccatcctccctgtctgcatctgtaggagacagagtcaccatcacttgccgggcaagtcagggcattagaaatgatttaggctggtatcagcagaaaccagggaaagcccctaagcgcctgatctatgctgcatccagtttgcaaagtggggtcccatcaaggttcagcggcagtggatctgggacagaattcactctcacaatcagcagcctgcagcctgaagattttgcaacttattactgtctacagcagaatagttacccgctcactttcggcggagggaccaaggtggaaatcaaacga

SEQ ID NO: 10383 - DNA, 324 bp, Artificial Sequence
  source: /note="Description of Artificial Sequence: Synthetic polynucleotide"
gccatccagatgacccagtctccatccttcctgtctgcatctgtaggagacagagtcaccatcacttgctgggccagtcagggcattagcaattatttagcctggtatcagcaaaaaccagggaaagcccctaagttcctgatctatgctgcatccactttgcaaagtggggtcccatcaaggttcagcggcagtggatctgggacagaattcactctcacaatcagcagcctgcagcctgaagactttgcaacttattactgtctacagcttaataataacctattcattttcggccctgggaccaaggtggatatcaaacga

SEQ ID NO: 10384 - DNA, 324 bp, Artificial Sequence
  source: /note="Description of Artificial Sequence: Synthetic polynucleotide"
gccatccagatgacccagtctccatcttccctgtctgcatctgtaggaaacagagtcaccatcacttgccgggcgagtcagggtattaacaactggttaggctggtatcagcagaaaccagggaaagcccctaaggtcctgatctatgctgcatccagtttgcaaagtggggtcccatcaaggttcagcggcagtggatctgggacagatttcactctcaccatcagcagcctgcagcctgaagattttgcaacttattattgtcaacaggataacagtttccctctcactttcggccgagggaccaaggtggagatcaaacga

SEQ ID NO: 10385 - DNA, 330 bp, Artificial Sequence
  source: /note="Description of Artificial Sequence: Synthetic polynucleotide"
gccatccagttgacccagtctccagactccctggctgtgtctctgggcgagagggccaccatcaaatgcaagtccagccagagtgttttatacagctccaacaataagaactacttagcttggtaccagcagaaaccaggacagcctcccaacctgctcatttactgggcatctacccgggaatccggggtccctgaccgattcagtggcagcgggtctgggacagatttcactctcaccatcagcagcctgcaggctgaagatgtggcagtttattactgtcagcaatatttctcgttcggccaagggaccaaagtggatatcaaacga

SEQ ID NO: 10386 - DNA, 324 bp, Artificial Sequence
  source: /note="Description of Artificial Sequence: Synthetic polynucleotide"
gccatccagttgacccagtctccatcctccctgtctgcatctgtaggagacagagtcaccatcacttgtcgggcgagtcaggatattaacaactggttagtctggtatcagcagaaaccagggaaagcccctaagctcctgatctatgctgcatccagtttacaaagtggggtcccatcaaggttcagtggcagtggatctgggacagatttcactctcaccatcagcagcctgcagcctgaagattttgcaacttactattgtcaacaggctaacagtttcccgctcactttcggcggagggaccaaagtggatatcaaacga

SEQ ID NO: 10387 - DNA, 342 bp, Artificial Sequence
  source: /note="Description of Artificial Sequence: Synthetic polynucleotide"
gccatccggatgacccagtctccagactccctggctatgtctctgggcgagagggccaccatcagctgcaagtccagccagagtgttttatacagctccaacaataagaactacttagcttggtatcagcagaaaccaggacagcctcctaagttgctcatttcctgggcatctacccgggaatccggggtccctgaccgattcagtggcagcgggtctgggacagatttcactctcaccatcagcagcctgcaggctgaagatgtggcagtttattactgtctgcaatattatagtattccgtggacgttcggccaagggaccaaggtggagatcaaacga

SEQ ID NO: 10388 - DNA, 342 bp, Artificial Sequence
  source: /note="Description of Artificial Sequence: Synthetic polynucleotide"
gccatccggatgacccagtctccagactccctggctgtgtctctgggcgagagggccaccatcaactgcaagtccagccagagtgttttatacagctccaacaataagaactacttaacttggtaccagcagaaaccaggacagcctcctaaactgctcatttactggacatctacccgggaatccggggtccctgaccgattcagtggcagcgggtctgggacagatttcactctcaccatcagcagcctgcaggctgaagatgtggcagtttattactgtcagcaatattatagtactccgtacacttttggccaggggaccaaggtggaaatcaaacga

SEQ ID NO: 10389 - DNA, 342 bp, Artificial Sequence
  source: /note="Description of Artificial Sequence: Synthetic polynucleotide"
gccatccggatgacccagtctccagactccctggctgtgtctctgggcgagagggccaccatcaactgcaagtccagccagagtgttttatacagttccgacaataagaactacttagtttggtaccagcagaaaccaggacagcctcctaacctgctcatttactgggcatctacccgggaatccggggtccctgaccgattcagtggcagcgggtctgggacagatttcactctcaccatcagcagcctgcaggctgaagatgtggcagtttattactgtcagcaacattataatcctccgtactcttttggccaggggaccaaggtggaaatcaaacga

SEQ ID NO: 10390 - DNA, 324 bp, Artificial Sequence
  source: /note="Description of Artificial Sequence: Synthetic polynucleotide"
gccatccggatgacccagtctccatcctcactgtctgcatctgtaggagacagagtcaccatcacttgtcgggcgagtcagggcattagcaattatttagcctggtttcagcagaaaccagggaaagcccctaagtccctgatctatgctgcatccagtttgcaaagtggggtcccatcaaagttcagcggcagtggatctgggacagatttcactctcaccatcagcagcctgcagcctgaagattttgcaacttattactgccaacagtataatagttacccattcactttcggccctgggaccaagctggagatcaaacga

SEQ ID NO: 10391 - DNA, 336 bp, Llama glama
gcgaccatgctgacccagtccccaggctccctgtctgtcgtccctggagagtcagcctccatctcctgcaaggctagtcagagcctcgtacacactgatggaaagacctatttgtcttggctcctacagaagccgggccaatctccacagcgactgatctatcaagtttccacccgtggctctggggtcccagacagggtcactggcagcgggtcagggacagatttcaccctgaaaatcagcggggtgaaggctgaggatgctggagtgtattactgtgctcaaactacatattatcctccaacgttcggccaggggaccaaggtggaactcaaa

SEQ ID NO: 10392 - DNA, 321 bp, Llama glama
tcctacgaactgactcagtcaccctcagtgacggtggcactgagacagacggccaagatcacctgtggcgggagccgcattggaagtaaaagtgttcagtggtaccagcagaagccgggccaggtccctgtgctggtcatctatgctgataacagacggccctcaaggatccctgagaggttctcaggctccaactctgggaacacggccaccctgataatcagcggggcccaggccgaggacgaggccgactactactgtcaggtgtgggacagcagtgctgctgtgttcggcggagggacccatctgaccgtcctcggt

SEQ ID NO: 10393 - protein, 108 aa, Artificial Sequence
  source: /note="Description of Artificial Sequence: Synthetic polypeptide"
AHPMTQSPSFLSASVGNRVTITCWASQGISSYLAWYQQKPGKAPKLLIYAASTLQSGVPSRFTGSGSGTEFTLTISSLQPEDFATYYCQQLNSYPRTFGQGTKLDIKR

SEQ ID NO: 10394 - protein, 110 aa, Artificial Sequence
  source: /note="Description of Artificial Sequence: Synthetic polypeptide"
AIQLTQSPDSLAVSLGERATIKCKSSQSVLYSSNNKNYLAWYQQKPGQPPNLLIYWASTRESGVPDRFSGSGSGTDFTLTISSLQAEDVAVYYCQQYFSFGQGTKVDIKR

SEQ ID NO: 10395 - protein, 108 aa, Artificial Sequence
  source: /note="Description of Artificial Sequence: Synthetic polypeptide"
AIQLTQSPSSLSASVGDRVTITCRASQDINNWLVWYQQKPGKAPKLLIYAASSLQSGVPSRFSGSGSGTDFTLTISSLQPEDFATYYCQQANSFPLTFGGGTKVDIKR

SEQ ID NO: 10396 - protein, 114 aa, Artificial Sequence
  source: /note="Description of Artificial Sequence: Synthetic polypeptide"
AIQMTQSPDSLAVSLGERATINCKSSQSVLYSSDNENCLTWYQQKPGQPPKLLIYWASTRESGVPDRFSGSGSGTDFTLTISSLQAEDVAVYYCQQHYNIPYTFGQGTKVEIKR

SEQ ID NO: 10397 - protein, 114 aa, Artificial Sequence
  source: /note="Description of Artificial Sequence: Synthetic polypeptide"
AIQMTQSPDSLAVSLGERATINCKSSQSVLYSSDNKNYLVWYQQKPGQPPNLLIYWASTRESGVPDRFSGSGSGTDFTLTISSLQAEDVAVYYCQQHYNPPYSFGQGTKVEIKR

SEQ ID NO: 10398 - protein, 114 aa, Artificial Sequence
  source: /note="Description of Artificial Sequence: Synthetic polypeptide"
AIQMTQSPDSLAVSLGERATINCRSSQSVLYSSTNKNYLAWYQQKPGQPPKLLIYWASTRDSGVPDRFSGSGSGTDFTLTISSLQAEDVAVYYCQQYYSIYRTFGQGTKVEIKR

SEQ ID NO: 10399 - protein, 114 aa, Artificial Sequence
  source: /note="Description of Artificial Sequence: Synthetic polypeptide"
AIQMTQSPLSLSVTLGQPASISCRSSQSLVYSDGNTYLNWFQQRPGQSPRRLIYKVSNRDSGVPDRFSGSGSGTDFTLKISRVEAEDVGVYYCMQGTHWPIFTFGPGTKVEIKR

SEQ ID NO: 10400 - protein, 108 aa, Artificial Sequence
  source: /note="Description of Artificial Sequence: Synthetic polypeptide"
AIQMTQSPSFLSASVGDRVTITCWASQGISNYLAWYQQKPGKAPKFLIYAASTLQSGVPSRFSGSGSGTEFTLTISSLQPEDFATYYCLQLNNNLFIFGPGTKVDIKR

SEQ ID NO: 10401 - protein, 107 aa, Artificial Sequence
  source: /note="Description of Artificial Sequence: Synthetic polypeptide"
AIQMTQSPSSLSASVGDRVTITCRASQDIRNDLGWYQQKPGNAPKLLIYSTSSLQSGVPSRFSGSGSGTDFTLTISSLQPEDFATYYCLQDYNYPLTFGGGTKVEIK

SEQ ID NO: 10402 - protein, 108 aa, Artificial Sequence
  source: /note="Description of Artificial Sequence: Synthetic polypeptide"
AIQMTQSPSSLSASVGDRVTITCRASQGIRNDLGWYQQKPGKAPKRLIYAASSLQSGVPSRFSGSGSGTEFTLTISSLQPEDFATYYCLQQNSYPLTFGGGTKVEIKR

SEQ ID NO: 10403 - protein, 108 aa, Artificial Sequence
  source: /note="Description of Artificial Sequence: Synthetic polypeptide"
AIQMTQSPSSLSASVGNRVTITCRASQGIINDLGWYNQKPWKAPKRLIYAASILQSGVPSRFSGRGCGTEFSLTISSLQPEDFATYYCLQHNSYPLTFGGGTKVEIKR

SEQ ID NO: 10404 - protein, 108 aa, Artificial Sequence
  source: /note="Description of Artificial Sequence: Synthetic polypeptide"
AIQMTQSPSSLSASVGNRVTITCRASQGINNWLGWYQQKPGKAPKVLIYAASSLQSGVPSRFSGSGSGTDFTLTISSLQPEDFATYYCQQDNSFPLTFGRGTKVEIKR

SEQ ID NO: 10405 - protein, 108 aa, Artificial Sequence
  source: /note="Description of Artificial Sequence: Synthetic polypeptide"
AIQMTQSPSSLSASVGNRVTITCRASQGIRNDLGWYQQKPGKAPKLLIYAASSLQSGVPSRFSGSGSGTDFTLTISSLQPEDFATYYCLQDYNYPHTFGQGTKVEIKR

SEQ ID NO: 10406 - protein, 107 aa, Artificial Sequence
  source: /note="Description of Artificial Sequence: Synthetic polypeptide"
AIQMTQSPSSLSAYVGDRVTITCRASQDIRNDLGWYQQKPGKAPNLLIYDISSLQSGVPSRFSGSGSGTDFTLTISSLQPEDFATYYCLQDYNYPLTFGGGTKVEIK

SEQ ID NO: 10407 - protein, 114 aa, Artificial Sequence
  source: /note="Description of Artificial Sequence: Synthetic polypeptide"
AIRMTQSPDSLAMSLGERATISCKSSQSVLYSSNNKNYLAWYQQKPGQPPKLLISWASTRESGVPDRFSGSGSGTDFTLTISSLQAEDVAVYYCLQYYSIPWTFGQGTKVEIKR

SEQ ID NO: 10408 - protein, 114 aa, Artificial Sequence
  source: /note="Description of Artificial Sequence: Synthetic polypeptide"
AIRMTQSPDSLAVSLGERATINCKSSQSVLYSSDNKNYLVWYQQKPGQPPNLLIYWASTRESGVPDRFSGSGSGTDFTLTISSLQAEDVAVYYCQQHYNPPYSFGQGTKVEIKR

SEQ ID NO: 10409 - protein, 114 aa, Artificial Sequence
  source: /note="Description of Artificial Sequence: Synthetic polypeptide"
AIRMTQSPDSLAVSLGERATINCKSSQSVLYSSNNKNYLTWYQQKPGQPPKLLIYWTSTRESGVPDRFSGSGSGTDFTLTISSLQAEDVAVYYCQQYYSTPYTFGQGTKVEIKR

SEQ ID NO: 10410 - protein, 108 aa, Artificial Sequence
  source: /note="Description of Artificial Sequence: Synthetic polypeptide"
AIRMTQSPSSLSASVGDRVTITCRASQGISNYLAWFQQKPGKAPKSLIYAASSLQSGVPSKFSGSGSGTDFTLTISSLQPEDFATYYCQQYNSYPFTFGPGTKLEIKR

SEQ ID NO: 10411 - protein, 112 aa, Llama glama
ATMLTQSPASLSVVPGESASISCKASQSLVHSDGKTYLYWLLQKPGQSPQRLIYQVSNRGSGVPDRFTGSGSGTDFTLKISGVKAEDAGVYYCAQHTYYPPSFGSGTRLEIK

SEQ ID NO: 10412 - protein, 112 aa, Llama glama
ATMLTQSPGSLSVGPGESASISCKAGQSLTHPNGKTYLSWLLQKPGQSPRRLIYETSNRDPGVPDRFTGSGSGTDFTLRIVGVTVEDAGVYYCAQTTYFPIAFGQGTKVELK

SEQ ID NO: 10413 - protein, 111 aa, Llama glama
ATMLTQSPGSLSVVPGESASISCKASQSLVHSDGKTYLYWLLQKPGQSPQRLIYQVSNRGSGVPDRFTGSGSGTDFTLKISGVKAEDAGVYYCAQATYYPTFGQGTKVELK

SEQ ID NO: 10414 - protein, 112 aa, Llama glama
ATMLTQSPGSLSVVPGESASISCKASQSLVHSDGMTYLYWLQQKPGQSPQRLIYRVSRRGSGVPDRFTGSGSGTDFTLNISDMKAEDAGVYYCAQDTYYPYSFGSGTSVEIK

SEQ ID NO: 10415 - protein, 112 aa, Llama glama
ATMLTQSPGSLSVVPGESASISCKASQSLVHTDGKTYLSWLLQKPGQSPQRLIYQVSTRGSGVPDRVTGSGSGTDFTLKISGVKAEDAGVYYCAQTTYYPPTFGQGTKVELK

SEQ ID NO: 10416 - protein, 112 aa, Llama glama
ATMLTQSPGSLSVVPGESASISCKTSQSLVHSDGKTYLYWLLQKPGQSPQRLIYQVSNRDSGVPDRFTGSGSGTDFTLKISGVKAEDAGVYYCAQTTYDPVTFGQGTKVELK

SEQ ID NO: 10417 - protein, 112 aa, Llama glama
ATMLTQSPGSLSVVPGESASISCKTSRSLVHSDGKTYLSWLLQKPGQSPQRLIYQVSNRGSGVPDRFTGSGSGTDFTLKISGVKAEDAGVYYCAQATYYPLSFGSGTRVEIK

SEQ ID NO: 10418 - protein, 112 aa, Llama glama
ATMLTQSPGSLSVVPGESATIACKANESIVHPGGKTYLYWLLQKPGQSPQRLIYQVSNRASGVPDRFTGSGSGTDFTLKISGLKAEDAGVYYCAQATFKKITFGQGTKVELK

SEQ ID NO: 10419 - protein, 108 aa, Artificial Sequence
  source: /note="Description of Artificial Sequence: Synthetic polypeptide"
DIPLTQSPSSLSASVGDRVTITCRASQGISNYLAWYQQKPGKVPKLLIYAASTLQSGVPSRFSGSGSGTDFTLTIHSLQPEDVATYYCQKYNSAPWTFGQGTKLEIKR

SEQ ID NO: 10420 - protein, 108 aa, Artificial Sequence
  source: /note="Description of Artificial Sequence: Synthetic polypeptide"
DIPMTQSPSFLSASVGSRVTITCWASQGISSYLVWYQQKPGKAPKLLMYEASNPQSGVPSRFTGSGLGTEFIVPISSLQPEDFSSYYCQQINKYPLTFGGGTKMEIKR

SEQ ID NO: 10421 - protein, 108 aa, Artificial Sequence
  source: /note="Description of Artificial Sequence: Synthetic polypeptide"
DIPMTQSPSSFSASTGNRVTITCRASQGIRSYLAWYHQKPGKAPKLLIYAASTLQSGVPSRFTGSGSGTDFTLTISCLQSEDFATYYCQQYYSYPFTFGQGTKVEIKR

SEQ ID NO: 10422 - protein, 108 aa, Artificial Sequence
  source: /note="Description of Artificial Sequence: Synthetic polypeptide"
DIPMTQSPSSLSASVGDRVTITCRASQGIRNDLGWYQQKPGKAPKRLIYAASSLQSGVPSRFTGSGSGTEFTLTISSLQPEDFATYYCLQHNSYPFTFGQGTKMEIKR

SEQ ID NO: 10423 - protein, 108 aa, Artificial Sequence
  source: /note="Description of Artificial Sequence: Synthetic polypeptide"
DIPMTQSPSSLSASVGNRVTITCRASQGFNNYLAWYHQKPGKVPNLLIYAASTLQSGVPSRFSGSGSGTDFTLTIHSLQPEDVATYYCPKYNSAPFTFGPGTKVEIKR

SEQ ID NO: 10424 - protein, 108 aa, Artificial Sequence
  source: /note="Description of Artificial Sequence: Synthetic polypeptide"
DIPMTQSPSSLSASVGNRVTITCRASQGISNYLAWYHHKPGKVPKLLIYAASTLQSGVPSRFSGSGSGTDFTLTIHSLQPEDVATYYCQKYNSAPFTFGPGTKVEIKR

SEQ ID NO: 10425 - protein, 114 aa, Artificial Sequence
  source: /note="Description of Artificial Sequence: Synthetic polypeptide"
DIQLTQSPDSLAVSLGERATINCKSSQSVLYSSNNKNYLAWYQQKPGQPPKLLFYWASTRESGVPDRFSGSGSGTDFTLTISSLQAEDVAVYYCHQSYNIPYTFGQGTKVEIKR

SEQ ID NO: 10426 - protein, 114 aa, Artificial Sequence
  source: /note="Description of Artificial Sequence: Synthetic polypeptide"
DIQLTQSPDSLAVSLGERATINCKSSQSVLYSSNNKNYLTWYQQKPGQPPKLLIYWASTRESGVPDRFSGSGSGTDFTLTISSLQAEDVAVYYCQQFYSFPYTFGQGTKVEIKR

SEQ ID NO: 10427 - protein, 114 aa, Artificial Sequence
  source: /note="Description of Artificial Sequence: Synthetic polypeptide"
DIQLTQSPDSLAVSLGERATINCKSSQSVLYSSNNKNYLTWYQQKPGQPPNLLIYWTSTRESGVPDRFSGSGSGTDFTLTISSLQAEDVAVYYCQQYYSIPYTFGQGTKVEIKR

SEQ ID NO: 10428 - protein, 114 aa, Artificial Sequence
  source: /note="Description of Artificial Sequence: Synthetic polypeptide"
DIQLTQSPLSLPVTLGQPASISCRSSQSLVYSDGNTYLNWFQQRPGQSPRRLIYKVSNRDSGVPDRFSGSGSGTDFTLKISRVEAEDVGVYYCMQGTHWPIFTFGPGTKVEIKR

SEQ ID NO: 10429 - protein, 113 aa, Artificial Sequence
  source: /note="Description of Artificial Sequence: Synthetic polypeptide"
DIQLTQSPLSLPVTPGEPASISCRSSQSLLHSNGYNFLDWYLQKPGQSPQLLIYLGSNRASGVPDRFSGSGSGTDFTLKFSRVEAEDVGLYYCMQTLQTPWTFGQGTKVEIKR

SEQ ID NO: 10430 - protein, 108 aa, Artificial Sequence
  source: /note="Description of Artificial Sequence: Synthetic polypeptide"
DIQLTQSPSFLSASVGNRVTITCWASQDISSYLVWYQQKPGKAPKLLIYAASTLQSGVPSRFSGSGSGTEFTLTISSLQPEDFATYYCQQLNTCPFTFGPGTKVEIKR

SEQ ID NO: 10431 - protein, 108 aa, Artificial Sequence
  source: /note="Description of Artificial Sequence: Synthetic polypeptide"
DIQLTQSPSFLSASVGNRVTITCWASQGISSYLAWYQQKPGKAPKLLIYAASTLQSGVPSRFSGSGSGTEFTLTISSLQPEDFATYYCQQLNSYPFTFGPGTKVEIKR

SEQ ID NO: 10432 - protein, 108 aa, Artificial Sequence
  source: /note="Description of Artificial Sequence: Synthetic polypeptide"
DIQLTQSPSFLSASVGNRVTITCWASQGISSYLAWYQQKPGKAPKLLIYAASTLQSGVPSRFSGSGSGTEFTLTISSLQPEDFATYYCQQLNSYPRTFGQGTKVEIKR

SEQ ID NO: 10433 - protein, 107 aa, Artificial Sequence
  source: /note="Description of Artificial Sequence: Synthetic polypeptide"
DIQLTQSPSFLSTSVGDRVTITCWASQGISSYLAWYQQKPGKAPNLLIYTASTLQSGVPSRFSGSGSGTEFTLTISSLQPEDFATYYCQQLNSYPYTFGQGTKLEIK

SEQ ID NO: 10434 - protein, 108 aa, Artificial Sequence
  source: /note="Description of Artificial Sequence: Synthetic polypeptide"
DIQLTQSPSSLSASVGDRVTITCRASQGIRNDLGWYQQKPGKAPKRLIYAASSLQSGVPSRFSGSGSGTEFTLTISSLQPEDFATYYCLQHNSYPCTFGQGTKVEIKR

SEQ ID NO: 10435 - protein, 108 aa, Artificial Sequence
  source: /note="Description of Artificial Sequence: Synthetic polypeptide"
DIQLTQSPSSLSASVGDRVTITCRASQGIRNDLGWYQQKPGKAPKRLIYAASSLQSGVPSRFSGSGSGTEFTLTISSLQPEDFATYYCLQHNSYPWTFGQGTKVEIKR

SEQ ID NO: 10436 - protein, 108 aa, Artificial Sequence
  source: /note="Description of Artificial Sequence: Synthetic polypeptide"
DIQLTQSPSSLSASVGNRVTITCRASQGIRNDLAWFQQKPGKAPKPLIYAASSLQSGVPSRFSGSGSGTEFTLTISSLQPEDFATYYCLQHNSYPWTFGQGTKVEIKR

SEQ ID NO: 10437 - protein, 108 aa, Artificial Sequence
  source: /note="Description of Artificial Sequence: Synthetic polypeptide"
DIQLTQSPSSLSASVGNRVTITCRASQGIRNDLAWYQQKPGKAPKLLIYAASTLQTGVPSRFSGSGSGTDFTLTISSLQPEDVATYYCQKYNSAPLTFGGGTKVEIKR

SEQ ID NO: 10438 - protein, 108 aa, Artificial Sequence
  source: /note="Description of Artificial Sequence: Synthetic polypeptide"
DIQLTQSPSSLSASVGNRVTITCRASQGISNYLAWFQQKPGKAPKSLIYAASSLQSGVPSKFSGSGSGTDFTLTISSLQPEDFATYYCQQYNSYPLTFGGGTKLEIKR

SEQ ID NO: 10439 - protein, 108 aa, Artificial Sequence
  source: /note="Description of Artificial Sequence: Synthetic polypeptide"
DIQLTQSPSSLSASVGNRVTITCRASQGISNYLAWYQQKPGKAPKLLIYAASTLQSGVPSRFSGSGSGTDFTLTISSLQPEDVATYYCQKYNSAPLTFGGGTKVEIKR

SEQ ID NO: 10440 - protein, 108 aa, Artificial Sequence
  source: /note="Description of Artificial Sequence: Synthetic polypeptide"
DIQLTQSPSSVSASVGDRVTITCRASQGISSWLAWYQQKPGKAPKLLIYAASSLQSGVPSRFSGSGSGTDFTLTISSLQPEDFATYYCQQANSFPLTFGGGTKVEIKR

SEQ ID NO: 10441 - protein, 108 aa, Artificial Sequence
  source: /note="Description of Artificial Sequence: Synthetic polypeptide"
DIQLTQSPSSVSASVGNRVTITCRASQDINNWLVWYHQNPGKAPKVLIYGASRLQSGVPSRFSGSGSGTDFTLTISSLQPEDFATYYCQQANSFPLTFGGGTKVEIKR

SEQ ID NO: 10442 - protein, 108 aa, Artificial Sequence
  source: /note="Description of Artificial Sequence: Synthetic polypeptide"
DIQLTQSPSSVSASVGNRVTITCRASQGISSWLAWYQQKPGKAPNLLIYAISSLRSGVPSRFSGSGSGTDFTLTISSLQPEDFATYYCQQAKSFPYTFGQGTKVEIKR

SEQ ID NO: 10443 - protein, 108 aa, Artificial Sequence
  source: /note="Description of Artificial Sequence: Synthetic polypeptide"
DIQMTQSPDFQSVTPKEKVTITCRASQSIGSSLHWYQQKPDQSPKLLIKYASQSFSGVPSRFSGSGSGTDFTLMINSLEAEDAATYYCHQSGGLPWTFGQGTKVEIKR

SEQ ID NO: 10444 - protein, 114 aa, Artificial Sequence
  source: /note="Description of Artificial Sequence: Synthetic polypeptide"
DIQMTQSPDSLAVSLGERATIDCKSSQSVLSSSNNENYLTWYQQKPGQPPKLLIYWASTRESGVPDRFSGSGSGTDFTLTISSLQAEDVAVYYCQQYYSIPYTFGQGTKVEIKR

SEQ ID NO: 10445 - protein, 114 aa, Artificial Sequence
  source: /note="Description of Artificial Sequence: Synthetic polypeptide"
DIQMTQSPDSLAVSLGERATINCKSSQNLLYSSHNKNYLTWYQQKPGQPPKLLIYWASTRESGVPDRFSGSGSGTDFTLTISSLQAEDVAVYYCQQYYSTPYTFGQGTKVEIKR

SEQ ID NO: 10446 - protein, 114 aa, Artificial Sequence
  source: /note="Description of Artificial Sequence: Synthetic polypeptide"
DIQMTQSPDSLAVSLGERATINCKSSQNLLYSSHNKNYLTWYQQKPGQPPKLLIYWASTRESGVPDRFSGSGSGTDFTLTISSLQAEDVAVYYCQQYYTTPYTFGQGTKVEIKR

SEQ ID NO: 10447 - protein, 114 aa, Artificial Sequence
  source: /note="Description of Artificial Sequence: Synthetic polypeptide"
DIQMTQSPDSLAVSLGERATINCKSSQSILYSSKNKNYLAWYQQKPGQPPNLLIYWASTRESGVPDRFSGSGSGTDFTLTISSLQAEDVAFYYCHQYYSTPWTFGQGTKVEIKR

SEQ ID NO: 10448 - protein, 114 aa, Artificial Sequence
  source: /note="Description of Artificial Sequence: Synthetic polypeptide"
DIQMTQSPDSLAVSLGERATINCKSSQSVLFISNNKNYLTWYQQKPGQPPKLLIYWTSTRESGVPDRFSGSGSGTDFTLTISSLQAEDVAVYYCQQYYSTPYTFGQGTKVEIKR

SEQ ID NO: 10449 - protein, 114 aa, Artificial Sequence
  source: /note="Description of Artificial Sequence: Synthetic polypeptide"
DIQMTQSPDSLAVSLGERATINCKSSQSVLSSSNNENYLVWYQQKPGQPPKLLIYWASTREPGVPDRFSGGGSGTDFTLTISSLQAEDVAVYYCQQYHSIPYTFGQGTKVEIKR

SEQ ID NO: 10450 - protein, 114 aa, Artificial Sequence
  source: /note="Description of Artificial Sequence: Synthetic polypeptide"
DIQMTQSPDSLAVSLGERATINCKSSQSVLSSSNNKNYLTWYQQKPGQPPKLLIYWASTRESGVPDRFSGSGSGTDFTLTISSLQAEDVAVYYCQQYYSTPYTFGQGTKVEIKR

SEQ ID NO: 10451 - protein, 114 aa, Artificial Sequence
  source: /note="Description of Artificial Sequence: Synthetic polypeptide"
DIQMTQSPDSLAVSLGERATINCKSSQSVLSSSNNKNYLTWYQQKPGQPPKLLIYWTSTRESGVPDRFSGSGSGTDFTLTISSLQAEDVAVYYCQQYYNIPYTFGQGTKVEIKR

SEQ ID NO: 10452 - protein, 114 aa, Artificial Sequence
  source: /note="Description of Artificial Sequence: Synthetic polypeptide"
DIQMTQSPDSLAVSLGERATINCKSSQSVLYSSKNKNYLAWYQQKPGQPPKLLIYWASTRESGVPDRFSGSGSGTNFTLTISGLQAEDVAVYFCQQYYSTPWTFGQGTKVEIKR

SEQ ID NO: 10453 - protein, 114 aa, Artificial Sequence
  source: /note="Description of Artificial Sequence: Synthetic polypeptide"
DIQMTQSPDSLAVSLGERATINCKSSQSVLYSSKNKNYLAWYQQKPGQSPKLVIYWASTRESGVPDRFSGSGSGTDFTLTISSLQAEDVAVYYCHQYYSSPWTFGQGTKVEIKR

SEQ ID NO: 10454 - protein, 114 aa, Artificial Sequence
  source: /note="Description of Artificial Sequence: Synthetic polypeptide"
DIQMTQSPDSLAVSLGERATINCKSSQSVLYSSNNENYLTWYQQKPGQPPKLLIYWTSTRESGVPDRFSGSGSGTDFTLTISSLQAEDVAVYYCQQYYSIPYTFGQGTKVEIKR

SEQ ID NO: 10455 - protein, 114 aa, Artificial Sequence
  source: /note="Description of Artificial Sequence: Synthetic polypeptide"
DIQMTQSPDSLAVSLGERATINCKSSQSVLYSSNNKNYLAWFQQKPGQPPYLLISWASTRESGVPDRFSGSGSGTDFTLTISSLQAGDVAVYYCQQYYSIPWTFGQGTKLEIKR

SEQ ID NO: 10456 - protein, 114 aa, Artificial Sequence
  source: /note="Description of Artificial Sequence: Synthetic polypeptide"
DIQMTQSPDSLAVSLGERATINCKSSQSVLYSSNNKNYLAWYQQKPGQPPKLLFYWASARESGVPDRFSGSGSGTDFTLTISSLQAEDVAVYYCHQSYNIPYTFGQGTKVEIKR

SEQ ID NO: 10457 - protein, 114 aa, Artificial Sequence
  source: /note="Description of Artificial Sequence: Synthetic polypeptide"
DIQMTQSPDSLAVSLGERATINCKSSQSVLYSSNNKNYLAWYQQKPGQPPKLLIYWASTRESGVPDRFSGSGSGTDFTLTISSLQAEDVAVYYCQQYYSSPYTFGQGTKVEIKR

SEQ ID NO: 10458 - protein, 114 aa, Artificial Sequence
  source: /note="Description of Artificial Sequence: Synthetic polypeptide"
DIQMTQSPDSLAVSLGERATINCKSSQSVLYSSNNKNYLAWYQQKPGQPPKLLIYWASTRESGVPDRFSGSGSGTDFTLTISSLQAEDVAVYYCQQYYSTPWTFGQGTKVEIKR

SEQ ID NO: 10459 - protein, 114 aa, Artificial Sequence
  source: /note="Description of Artificial Sequence: Synthetic polypeptide"
DIQMTQSPDSLAVSLGERATINCKSSQSVLYSSNNKNYLGWYQQKAGQPPKLLIYWASTRESGVPDRFSGSGSGTDFTLTISSLQAEDVAVYYCQQYYGIPWTFGQGTKVEIKR

SEQ ID NO: 10460 - protein, 114 aa, Artificial Sequence
  source: /note="Description of Artificial Sequence: Synthetic polypeptide"
DIQMTQSPDSLAVSLGERATINCKSSQSVLYSSNNKNYLTWYQQKPGQPPKLLIYWTSTRESGVPDRFSGSGSGTDFTLTISSLQAEDVAVYYCQQYFSTPYTFGQGTKVEIKR

SEQ ID NO: 10461 - protein, 114 aa, Artificial Sequence
  source: /note="Description of Artificial Sequence: Synthetic polypeptide"
DIQMTQSPDSLAVSLGERATINCKSSQSVLYSSNNKNYLTWYQQKPGQPPKLLIYWTSTRESGVPDRFSGSGSGTDFTLTISSLQAEDVAVYYCQQYYNTPYTFGQGTKLEIKR

SEQ ID NO: 10462 - protein, 114 aa, Artificial Sequence
  source: /note="Description of Artificial Sequence: Synthetic polypeptide"
DIQMTQSPDSLAVSLGERATINCKSSQSVLYSSNNKNYLTWYQQKPGQPPKLLIYWTSTRESGVPDRFSGSGSGTDFTLTISSLQAEDVAVYYCQQYYSTPYTFGQGTKVEIKR

SEQ ID NO: 10463 - protein, 114 aa, Artificial Sequence
  source: /note="Description of Artificial Sequence: Synthetic polypeptide"
DIQMTQSPDSLAVSLGERATINCKSSQSVLYSSNNKNYLVWYQQKPGQPPNLLIYWASTRESGVPDRFSGSGSGTDFTLTISSLQAEDVAVYYCQQYYNPPYTFGQGTKVEIKR

SEQ ID NO: 10464 - protein, 114 aa, Artificial Sequence
  source: /note="Description of Artificial Sequence: Synthetic polypeptide"
DIQMTQSPDSLAVSLGERATINCKSSQSVLYSSNNQNYLAWYQQKPGQPPKLLIYWASTRESGVPDRFSGSGSGTDFTLTISSLQAEDVAVYYCQQYYSTPYTFGQGTKVEIKR

SEQ ID NO: 10465 - protein, 114 aa, Artificial Sequence
  source: /note="Description of Artificial Sequence: Synthetic polypeptide"
DIQMTQSPDSLAVSLGERATINCKSSQSVLYSSNNQNYLAWYQQKPGQPPNLLIYWASTRESGVPDRFSGSGSGTDFTLTISSLQAEDVAVYYCQQYYNTPYTFGQGTKVEIKR

SEQ ID NO: 10466 - protein, 114 aa, Artificial Sequence
  source: /note="Description of Artificial Sequence: Synthetic polypeptide"
DIQMTQSPDSLAVSLGERATINCKSSQSVLYSSSNKNYLTWYQQKPGQPPKLLIYWASTRESGVPDRFSGSGSGTDFTLTISSLQAEDVAVYYCQQYYNIPYTFGQGTKVEIKR

SEQ ID NO: 10467 - protein, 114 aa, Artificial Sequence
  source: /note="Description of Artificial Sequence: Synthetic polypeptide"
DIQMTQSPDSLAVSLGERATINCKSSQTVLHSSNNQNNLVWYQQKPGQPPKLLIYWASTRESGVPDRFSGSGSGTDFTLTISSLQAEDVAIYYCQQYYSTPYTFGQGTKLEIKR

SEQ ID NO: 10468 - protein, 114 aa, Artificial Sequence
  source: /note="Description of Artificial Sequence: Synthetic polypeptide"
DIQMTQSPDSLAVSLGERATINCKSSQTVLHSSNNQNNLVWYQQKPGQPPKLLIYWASTRESGVPDRFSGSGSGTDFTLTISSLQAEDVAIYYCQQYYSTPYTFGQGTKVEIKR

SEQ ID NO: 10469 - protein, 114 aa, Artificial Sequence
  source: /note="Description of Artificial Sequence: Synthetic polypeptide"
DIQMTQSPDSLAVSLGERATINCQSSQSVLYSSKNKNYLAWYQQKPGQPPNLLIYWASTRESGVPDRFSGSGSGTDFTLTISSLQAEDVAVYYCQQYYSTPWTFGQGTKVEIKR

SEQ ID NO: 10470 - protein, 114 aa, Artificial Sequence
  source: /note="Description of Artificial Sequence: Synthetic polypeptide"
DIQMTQSPDSLAVSLGERATINCRSNQSVLYSSTNKNYLAWYQQKPGQPPKLLIYWASTRDSGVPDRFSGSGSGTDFTLTISSLQAEDVAIYYCQQYYSIYRTFGQGTKVEIKR

SEQ ID NO: 10471 - protein, 114 aa, Artificial Sequence
  source: /note="Description of Artificial Sequence: Synthetic polypeptide"
DIQMTQSPDSLTVSLGERATINCKSSQSVLYSSNNKNYLTWYQQKPGQPPKLLIYWTSTRESGVPDRFSGSGSGTDFTLTISSLQAEDVAVYYCQQYYSTPYTFGQGTKVEIKR

SEQ ID NO: 10472 - protein, 114 aa, Artificial Sequence
  source: /note="Description of Artificial Sequence: Synthetic polypeptide"
DIQMTQSPESLAVSLGERATINCKSSQSVLDSSNNRNYLAWYQQKPGQPPKLFIYWASTRESGVPDRFSGSGSGTDFTLTISSLQAEDVAVYYCQQYYSTPLTFGGGTKLEIKR

SEQ ID NO: 10473 - protein, 114 aa, Artificial Sequence
  source: /note="Description of Artificial Sequence: Synthetic polypeptide"
DIQMTQSPHSLAVSLGERATINCKSSQSVLYSSKNKNYLAWYQQKPGQAPKLLIYWASTRESGVPDRFSGSGSGTDFTLTISSLQAEDVAVYYCHQYYSNPWTFGQGTKVEIKR

SEQ ID NO: 10474 - protein, 113 aa, Artificial Sequence
  source: /note="Description of Artificial Sequence: Synthetic polypeptide"
DIQMTQSPLSLPVTPGEPASISCRSSQSLLHSNGYNFLDWYLQKPGQSPQLLIYLGSNRASGVPDRFSGSGSGTDFTLKFSRVEAEDVGVYYCMQTLQTPWTFGQGTKVEIKR

SEQ ID NO: 10475 - protein, 114 aa, Artificial Sequence
  source: /note="Description of Artificial Sequence: Synthetic polypeptide"
DIQMTQSPNSLAVSLGERASINCKSSQNILFRSHNKNFLTWYQQKPGQPPKLLIYWASTRESGVPDRFSGNGSGTDFTLTISSLQAEDVAVYYCQQYSSTPYTFGQGTKVEIKR

SEQ ID NO: 10476 - protein, 114 aa, Artificial Sequence
  source: /note="Description of Artificial Sequence: Synthetic polypeptide"
DIQMTQSPNSLAVSLGERATINCKSSQSVFYSSYNKNHLAWYQQKPGQPPKLLIYWASTRESGVPDRFSGSGSGTDFTLTISSLQAEDVAVYYCQQYYSTELTFGGGTKVEIKR

SEQ ID NO: 10477 - protein, 114 aa, Artificial Sequence
  source: /note="Description of Artificial Sequence: Synthetic polypeptide"
DIQMTQSPNSLEVSLGERATINCKSSQSVLSTSNNKNYLTWYQQKPGQPPNLLIYWASTRESGVPDRFTGSGSGTDFTLTISSLQAEDVAVYYCQQYYNIPYTFGQGTKVEIKR

SEQ ID NO: 10478 - protein, 108 aa, Artificial Sequence
  source: /note="Description of Artificial Sequence: Synthetic polypeptide"
DIQMTQSPSFLSASVGDRVTITCWASQGISSYLAWYQQKPGKAPKFLIYAASTLQSGVPSRFSGSGSGTEFTLTISSLQPEDFATYYCQQLNNNLFIFGPGTKVEIKR

SEQ ID NO: 10479 - protein, 108 aa, Artificial Sequence
  source: /note="Description of Artificial Sequence: Synthetic polypeptide"
DIQMTQSPSFLSASVGDRVTITCWASQGISSYLAWYQQKPGKAPKLLIYAASTLQSGVPSRFSGSGSGTEFTLTISSLQPEDFATYYCQQFNSYPPTFGQGTKVEIKR

SEQ ID NO: 10480 - protein, 108 aa, Artificial Sequence
  source: /note="Description of Artificial Sequence: Synthetic polypeptide"
DIQMTQSPSFLSASVGDRVTITCWASQGISSYLAWYQQKPGKAPKLLIYASSTLQSGVPSRFSGSGSGTEFTLTISSLQPEDFATYYCQQFNSYPPTFGQGTKVEIKR

SEQ ID NO: 10481 - protein, 108 aa, Artificial Sequence
  source: /note="Description of Artificial Sequence: Synthetic polypeptide"
DIQMTQSPSFLSASVGDRVTITCWASQGISSYLAWYQQKPGKAPKLLIYATSTLQSGVPSRFSGSGSGTEFTLTISSLQPEDFATYYCQQLNSYPLTFGGGTKVEIKR

SEQ ID NO: 10482 - protein, 108 aa, Artificial Sequence
  source: /note="Description of Artificial Sequence: Synthetic polypeptide"
DIQMTQSPSFLSASVGDRVTITCWASQGSGSYLAWYQQKPGKAPKLLIYAASTLQSGVPSRFSGSGSGTEFTLTISSLQPEDFATYYCQQLNNYLFIFGPGTKVEIKR

SEQ ID NO: 10483 - protein, 108 aa, Artificial Sequence
  source: /note="Description of Artificial Sequence: Synthetic polypeptide"
DIQMTQSPSFLSASVGNRVTITCWASQGIRNYLAWYHQKPGKAPKLLIYAASTLQSGVPSRFSGSGSGTDFTLTISSLQPEDFATYYCQQLNSYPLTFGGGTKVEIKR

SEQ ID NO: 10484 - protein, 108 aa, Artificial Sequence
  source: /note="Description of Artificial Sequence: Synthetic polypeptide"
DIQMTQSPSSFSASTGNRVTITCRASQGISSYLAWYHQKPRKAPKLLIYAASTLQSGVPSRFSGSGSGTDFTLTISSLQSEDFATYYCQQYYSYPWTFGQGTKVEIKR

SEQ ID NO: 10485 - protein, 107 aa, Llama glama
DIQMTQSPSSLSASLGDRVTITCQASQGISKYLAWYQQKPGQAPKLLIYSASRLETGVPSRFSGSGSGTTFTLVISGLEAEDAGSYYCQQYYRAPATFGQGTKVELK

SEQ ID NO: 10486 - protein, 108 aa, Artificial Sequence
  source: /note="Description of Artificial Sequence: Synthetic polypeptide"
DIQMTQSPSSLSASTGNRVTITCRASQGISSCLAWYHQKPGKAPKLLIYAASTLQSGVPSRFSGSGSGTDFTLTISCLQSEDFATYYCQQYYSYPLTFGGGTKVEIKR

SEQ ID NO: 10487 - protein, 107 aa, Artificial Sequence
  source: /note="Description of Artificial Sequence: Synthetic polypeptide"
DIQMTQSPSSLSASVGDRGTITCRASQDIRTYLNWYQQKPGKAPKLLIYAASSLQSGVPSRFSGSGSGTDFTLTISSLQPEDFATYYCQQSYGTPYTFGQGTKLEIK

SEQ ID NO: 10488 - protein, 108 aa, Artificial Sequence
  source: /note="Description of Artificial Sequence: Synthetic polypeptide"
DIQMTQSPSSLSASVGDRGTITCRASQDIRTYLNWYQQKPGKAPKLLIYAASSLQSGVPSRFSGSGSGTDFTLTISSLQPEDFATYYCQQSYGTPYTFGQGTKVEIKR

SEQ ID NO: 10489 - protein, 108 aa, Artificial Sequence
  source: /note="Description of Artificial Sequence: Synthetic polypeptide"
DIQMTQSPSSLSASVGDRGTITCRASQIINTYLNWYQQKPGKAPKLLIYAASSLQSGVPSRFSGSGSGTDFTLTISSLQPEDFATYYCQQSYSSPFTFGQGTKVEIKR

SEQ ID NO: 10490 - protein, 108 aa, Artificial Sequence
  source: /note="Description of Artificial Sequence: Synthetic polypeptide"
DIQMTQSPSSLSASVGDRGTITCRTSQSIRSYLNWYQQKPGKAPKLLIYAASSLQSGVPSRFSGSGSGTDFTLTISSLQPEDFATYFCQQSYSSPFTFGQGTKVEIKR

SEQ ID NO: 10491 - protein, 108 aa, Artificial Sequence
  source: /note="Description of Artificial Sequence: Synthetic polypeptide"
DIQMTQSPSSLSASVGDRGTVTCRASQNIRTYLNWYQQKPGKAPKLLIYAASSLQSGVPSRFSGSGSGTDFTLTISSLQPEDFATYYCQQSYGTPYTFGQGTKVEIKR

SEQ ID NO: 10492 - protein, 108 aa, Artificial Sequence
  source: /note="Description of Artificial Sequence: Synthetic polypeptide"
DIQMTQSPSSLSASVGDRVTITCRASQDIRNDLGWYQQKPGNAPKLLIYSTSSLQSGVPSRFSGSGSGTDFTLTISSLQPEDFATYYCLQDYNYPLTFGGGTKVEIKR

SEQ ID NO: 10493 - protein, 108 aa, Artificial Sequence
  source: /note="Description of Artificial Sequence: Synthetic polypeptide"
DIQMTQSPSSLSASVGDRVTITCRASQDISNYLAWFQQKPGKAPKSLIYAASSLQSGVPSKFSGSGSGTDFTLTISSLQPEDFATYYCHQYNSYPLTFGGGTKVEIKR

SEQ ID NO: 10494 - protein, 108 aa, Artificial Sequence
  source: /note="Description of Artificial Sequence: Synthetic polypeptide"
DIQMTQSPSSLSASVGDRVTITCRASQDITNYLAWYQQKPGKVPKLLIYTTSTLQSGVPSRFSGSGSGTDFTLTITSLQPEDVATYFCQKYNSDPFTFGPGTKVEIKR

SEQ ID NO: 10495 - protein, 108 aa, Artificial Sequence
  source: /note="Description of Artificial Sequence: Synthetic polypeptide"
DIQMTQSPSSLSASVGDRVTITCRASQGINNFLAWFQQKPGKAPKSLIYAASRLQSGVPSKFSGSGSGTDFTLTISSLQPEDFATYYCLQYNSYFRTFGQGTKVEIKR

SEQ ID NO: 10496 - protein, 108 aa, Artificial Sequence
  source: /note="Description of Artificial Sequence: Synthetic polypeptide"
DIQMTQSPSSLSASVGDRVTITCRASQGINNFLAWFQQKPGKAPKSLIYAASSLQSGVPSKFSGSGSGTDFTLTISSLQPEDFATYYCLQYSSYFRTFGQGTKVEIKR

SEQ ID NO: 10497 - protein, 108 aa, Artificial Sequence
  source: /note="Description of Artificial Sequence: Synthetic polypeptide"
DIQMTQSPSSLSASVGDRVTITCRASQGINNYLAWFQQKPGKAPKSLIYAASSLQSGVPSKFSGSGSGTDFTLTISSLQPEDFAIYYCQQYNSYPLTFGGGTKVEIKR

SEQ ID NO: 10498 - protein, 108 aa, Artificial Sequence
  source: /note="Description of Artificial Sequence: Synthetic polypeptide"
DIQMTQSPSSLSASVGDRVTITCRASQGINNYLAWFQQKPGKAPKSLIYAASSLQSGVPSKFSGSGSGTDFTLTISSLQPEDVAIYYCQQYNSYPLTFGGGTKVEIKR

SEQ ID NO: 10499 - protein, 108 aa, Artificial Sequence
  source: /note="Description of Artificial Sequence: Synthetic polypeptide"
DIQMTQSPSSLSASVGDRVTITCRASQGIRNDLDWYQQKPGKAPKRLIYTASSLQSGVPSRFSGSGSGTEFTLTISSLQPEDFATYYCLQYSNYPPTFGQGTKVEIKR

SEQ ID NO: 10500 - protein, 108 aa, Artificial Sequence
  source: /note="Description of Artificial Sequence: Synthetic polypeptide"
DIQMTQSPSSLSASVGDRVTITCRASQGIRNDLGWYHQKPGKAPKLLIYAASSLQSGVPSRFSGSGSGTEFTLTISSLQPEDFATYYCLQHNSYPLTFGRGTKVEIKR

SEQ ID NO: 10501 - protein, 108 aa, Artificial Sequence
  source: /note="Description of Artificial Sequence: Synthetic polypeptide"
DIQMTQSPSSLSASVGDRVTITCRASQGIRNDLGWYQQKPGKAPKLLIYAASSLQSGVPSRFSGSGSGTDFTLTISSLQPEDFATYYCQQDNNYPSTFGQGTKVEIKR

SEQ ID NO: 10502 - protein, 108 aa, Artificial Sequence
  source: /note="Description of Artificial Sequence: Synthetic polypeptide"
DIQMTQSPSSLSASVGDRVTITCRASQGIRNDLGWYQQKPGKAPKLLIYAASSLQSGVPSRFTGIGSGTEFTLTITSLQPEHFATYYCLQANNYPFTFGQGTKMEIKR

SEQ ID NO: 10503 - protein, 108 aa, Artificial Sequence
  source: /note="Description of Artificial Sequence: Synthetic polypeptide"
DIQMTQSPSSLSASVGDRVTITCRASQGIRNDLGWYQQKPGKAPKRLIYAASSLQSGVPSRFSGSGSGTEFTLTISSLQPEDFATYYCLQHNNYPWTFGQGTKVEIKR

SEQ ID NO: 10504 - protein, 108 aa, Artificial Sequence
  source: /note="Description of Artificial Sequence: Synthetic polypeptide"
DIQMTQSPSSLSASVGDRVTITCRASQGIRNDLGWYQQKPGKAPKRLIYAASSLQSGVPSRFSGSGSGTEFTLTISSLQPEDFATYYCLQHNSYPLTFGGGTKVEIKR

SEQ ID NO: 10505 - protein, 107 aa, Artificial Sequence
  source: /note="Description of Artificial Sequence: Synthetic polypeptide"
DIQMTQSPSSLSASVGDRVTITCRASQGIRNDLGWYQQKPGKAPKRLIYAASSLQSGVPSRFSGSGSGTEFTLTISSLQPEDFATYYCLQHNSYPWTFGQGTKVEIK

SEQ ID NO: 10506 - protein, 108 aa, Artificial Sequence
  source: /note="Description of Artificial Sequence: Synthetic polypeptide"
DIQMTQSPSSLSASVGDRVTITCRASQGIRNDLGWYQQKPGKAPKRLIYAASSLQSGVPSRFSGSGSGTEFTLTISSLQPEDFATYYCQQHNSYPLTFGQGTKVEIKR

SEQ ID NO: 10507 - protein, 108 aa, Artificial Sequence
  source: /note="Description of Artificial Sequence: Synthetic polypeptide"
DIQMTQSPSSLSASVGDRVTITCRASQGISIYLAWCQQKPGKAPKSLIYAASSLQSGVPSKFSGSGSGTEFTLTISSLQPEDFATYYCQQLNSYPLTFGRGTKLEIKR

SEQ ID NO: 10508 - protein, 108 aa, Artificial Sequence
  source: /note="Description of Artificial Sequence: Synthetic polypeptide"
DIQMTQSPSSLSASVGDRVTITCRASQGISNYLAWFQQKPGKAPKSLIYAASSLHSGVPSKFSGSGSGTDFTLTISSLQPEDFATYYCLQYNSYPLTFGGGTKVEIKR

SEQ ID NO: 10509 - protein, 108 aa, Artificial Sequence
  source: /note="Description of Artificial Sequence: Synthetic polypeptide"
DIQMTQSPSSLSASVGDRVTITCRASQGISNYLAWFQQKPGKAPKSLIYAASSLHSGVPSKFSGSGSGTDFTLTISSLQPEDFATYYCQQYDSYPLTFGGGTKVEIKR

SEQ ID NO: 10510 - protein, 108 aa, Artificial Sequence
  source: /note="Description of Artificial Sequence: Synthetic polypeptide"
DIQMTQSPSSLSASVGDRVTITCRASQGISNYLAWFQQKPGKAPKSLIYAASSLHSGVPSKFSGSGSGTDFTLTISSLQPEDFATYYCQQYNSYPLTFGGGTKLEIKR

SEQ ID NO: 10511 - protein, 108 aa, Artificial Sequence
  source: /note="Description of Artificial Sequence: Synthetic polypeptide"
DIQMTQSPSSLSASVGDRVTITCRASQGISNYLAWFQQKPGKAPKSLIYAASSLHSGVPSKFSGSGSGTDFTLTISSLQPEDFATYYCQQYNSYPLTFGGGTKVEIKR

SEQ ID NO: 10512 - protein, 107 aa, Artificial Sequence
  source: /note="Description of Artificial Sequence: Synthetic polypeptide"
DIQMTQSPSSLSASVGDRVTITCRASQGISNYLAWFQQKPGKAPKSLIYAASSLQGGVPSRFSGSGSGTDFTLTISSLQPEDFATYYCQQYNSYPLTFGGGTKVEIK

SEQ ID NO: 10513 - protein, 108 aa, Artificial Sequence
  source: /note="Description of Artificial Sequence: Synthetic polypeptide"
DIQMTQSPSSLSASVGDRVTITCRASQGISNYLAWFQQKPGKAPKSLIYAASSLQGGVPSRFSGSGSGTDFTLTISSLQPEDFATYYCQQYNSYPLTFGGGTKVEIKR

SEQ ID NO: 10514 - protein, 108 aa, Artificial Sequence
  source: /note="Description of Artificial Sequence: Synthetic polypeptide"
DIQMTQSPSSLSASVGDRVTITCRASQGISNYLAWFQQKPGKAPKSLIYAASSLQSGVPSKFSGSGSGTDFTLTISSLQPEDFATYYCQQYNSYPLTFGGGTKVEIKR

SEQ ID NO: 10515 - protein, 108 aa, Artificial Sequence
  source: /note="Description of Artificial Sequence: Synthetic polypeptide"
DIQMTQSPSSLSASVGDRVTITCRASQGISNYLAWFQQKPGKAPKSLIYGASSLQSGVPSKFSGSGSGTDFTLTISSLQPEDFATYYCQQYNSYPLTFGGGTKVEIKR

SEQ ID NO: 10516 - protein, 108 aa, Artificial Sequence
  source: /note="Description of Artificial Sequence: Synthetic polypeptide"
DIQMTQSPSSLSASVGDRVTITCRASQGISNYLAWFQQKPGKAPKYLIYAASSLHSGVPSKFSGSGSGTDFTLTISSLQPEDFATYYCQQYNSYPLTFGGGTKVEIKR

SEQ ID NO: 10517 - protein, 108 aa, Artificial Sequence
  source: /note="Description of Artificial Sequence: Synthetic polypeptide"
DIQMTQSPSSLSASVGDRVTITCRASQGISNYLAWYQQKPGKAPKLLIYAASTLQTGVPSRFTGSGSGTDFTLPINSLQPEDVATYYCQKYNRAPLTFGGGTKVEIKR

SEQ ID NO: 10518 - protein, 108 aa, Artificial Sequence
  source: /note="Description of Artificial Sequence: Synthetic polypeptide"
DIQMTQSPSSLSASVGDRVTITCRASQGISNYLAWYQQKPGKVPKLLIYAASTLQSGVPSRFSGSGSGTDFTLTISSLQPEDVATYYCQKYNSAPFTFGPGTKVEIKR

SEQ ID NO: 10519 - protein, 108 aa, Artificial Sequence
  source: /note="Description of Artificial Sequence: Synthetic polypeptide"
DIQMTQSPSSLSASVGDRVTITCRASQGISNYLAWYQQKPGKVPKLLIYAASTLQSGVPSRFSGSGSGTDFTLTISSLQPEDVATYYCQKYNSAPLTFGGGTKVEIKR

SEQ ID NO: 10520 - protein, 108 aa, Artificial Sequence
  source: /note="Description of Artificial Sequence: Synthetic polypeptide"
DIQMTQSPSSLSASVGDRVTITCRASQGISNYLGWYQQKPGKAPKPLIYAASSLQSGVPSRFSGSGSGTDFTLTITSLQPEDFATYYCLQHNSYPFTFGRGTKVEIKR

SEQ ID NO: 10521 - protein, 108 aa, Artificial Sequence
  source: /note="Description of Artificial Sequence: Synthetic polypeptide"
DIQMTQSPSSLSASVGDRVTITCRASQGISNYLGWYQQKPGKAPKRLMYAASSLQTGVPSRFSGSGSGTEFTLTISSLQPEDFATYYCLQHNSDPLTFGAGTKVEIKR

SEQ ID NO: 10522 - protein, 108 aa, Artificial Sequence
  source: /note="Description of Artificial Sequence: Synthetic polypeptide"
DIQMTQSPSSLSASVGNRVTITCRASQGIRNDLGWYHLNPRKATKRLIYAASILQSGVPSWFIGNGSGTDFTLTISSLQPEDFATYYCLQDNSYPLTFGRGTKVEIKR

SEQ ID NO: 10523 - protein, 108 aa, Artificial Sequence
  source: /note="Description of Artificial Sequence: Synthetic polypeptide"
DIQMTQSPSSLSASVGNRVTITCRASQGIRNDLGWYHQKPGKAPKHLIYAASSLQSGVPSRFTGSGSGTEFTLTITSLQPEDFATYYCLQHNSYPCTFGQGTKVEIKR

SEQ ID NO: 10524 - protein, 108 aa, Artificial Sequence
  source: /note="Description of Artificial Sequence: Synthetic polypeptide"
DIQMTQSPSSLSASVGNRVTITCRASQGIRNDLGWYHQKPGKAPKLLIYAASSLQSGVPSRFSGSGSGTDFTLTISSLQPEDFATYYCLQDYNYPRTFGQGTKVEIKR

SEQ ID NO: 10525 - protein, 108 aa, Artificial Sequence
  source: /note="Description of Artificial Sequence: Synthetic polypeptide"
DIQMTQSPSSLSASVGNRVTITCRASQGIRNDLGWYHQKPGKAPKRLIYAASTLQSGVPSRFSGSGSGTEFTLTISSLQPEDFATYYCLQHNSYPFTFGQGTKVEIKR

SEQ ID NO: 10526 - protein, 108 aa, Artificial Sequence
  source: /note="Description of Artificial Sequence: Synthetic polypeptide"
DIQMTQSPSSLSASVGNRVTITCRASQGIRNDLGWYQQKPGKAPKRLIYAASSLQSGVPSRFSGSGSGTEFTLTISSLQPEDFATYYCLQHNSYPLTFGGGTKVEIKR

SEQ ID NO: 10527 - protein, 108 aa, Artificial Sequence
  source: /note="Description of Artificial Sequence: Synthetic polypeptide"
DIQMTQSPSSLSASVGNRVTITCRASQGIRNDLGWYQQKPGKAPKRLIYAASSLQSGVPSRFSGSGSGTEFTLTISSLQPEDFATYYCLQHNSYPLTFGRGTKVEIKR

SEQ ID NO: 10528 - protein, 108 aa, Artificial Sequence
  source: /note="Description of Artificial Sequence: Synthetic polypeptide"
DIQMTQSPSSLSASVGNRVTITCRASQGIRNDLGWYQQKPGKAPKRLIYAASSLQSGVPSRFSGSGSGTEFTLTISSLQPEDFATYYCLQHNSYPWTFGQGTKVEIKR

SEQ ID NO: 10529 - protein, 108 aa, Artificial Sequence
  source: /note="Description of Artificial Sequence: Synthetic polypeptide"
DIQMTQSPSSLSASVGNRVTITCRASQGIRNDLGWYQQKPGKAPKRLIYAASSLQSGVPSRFTGSGSGTEFTLTISSLQPEDFATYYCLQHNSYPLTFGGGTKVEIKR

SEQ ID NO: 10530 - protein, 108 aa, Artificial Sequence
  source: /note="Description of Artificial Sequence: Synthetic polypeptide"
DIQMTQSPSSLSASVGNRVTITCRASQGIRSWLAWYHQKPGKAPKLLIYAASSLQSGVPSRFSGSGSGTEFTLTISSLQPDDFATYYCQQYNSYSYTFGQGTKVEIKR

SEQ ID NO: 10531 - protein, 108 aa, Artificial Sequence
  source: /note="Description of Artificial Sequence: Synthetic polypeptide"
DIQMTQSPSSLSASVGNRVTITCRASQGISNYLACYHQKPGKVPKLLIYAASTLQSGVPSRFSGSGSGTDFTLTISSLQPEDVATYYCQKYNSAPFTFGPGTKVDIKR

SEQ ID NO: 10532 - protein, 108 aa, Artificial Sequence
  source: /note="Description of Artificial Sequence: Synthetic polypeptide"
DIQMTQSPSSLSTSVGDRVTITCRASQTISSYLDWYQQKPGKAPKLLIYAASSLQSGVPSRFSGSGSGTDLTLTITSLQPENFATYYCQQTYRAPYTFGQGTKVETKR

SEQ ID NO: 10533 - protein, 108 aa, Artificial Sequence
  source: /note="Description of Artificial Sequence: Synthetic polypeptide"
DIQMTQSPSSVSASVGDRVIITCRASQGIRTWLAWYQQKPGKAPKLLIYAASSLQSGVPSRFSGSGSGTEFTLTISSLQPEDFVTYYCQQVNSFPLTFGGGTKVEIKR

SEQ ID NO: 10534 - protein, 108 aa, Artificial Sequence
  source: /note="Description of Artificial Sequence: Synthetic polypeptide"
DIQMTQSPSSVSASVGDRVTITCRASQGIRSWLAWYQQKPGKAPKLLIYAASSLQSGVPSRFSGSGSGTDFTLTISSLQPEDFAIYYCQQVNSFPLTFGGGTKVEIKR

SEQ ID NO: 10535 - protein, 108 aa, Artificial Sequence
  source: /note="Description of Artificial Sequence: Synthetic polypeptide"
DIQMTQSPSSVSASVGDRVTITCRASQGIRSWLAWYQQKPGKAPKLLIYAASSLQSGVPSRFSGSGSGTDFTLTISSLQPVDFATYYCQQVNSFPLTFGGGTKVEIKR

SEQ ID NO: 10536 - protein, 108 aa, Artificial Sequence
  source: /note="Description of Artificial Sequence: Synthetic polypeptide"
DIQMTQSPSSVSASVGDRVTITCRASQGISNYLAWFQQKPGKAPKSLIYAASSLHSGVPSKFSGSGSGTDFTLTISSLQPEDFATYYCQQYNSYPLTFGGGTKVEIKR

SEQ ID NO: 10537 - protein, 108 aa, Artificial Sequence
  source: /note="Description of Artificial Sequence: Synthetic polypeptide"
DIQMTQSPSSVSASVGDRVTITCRASQGISSWLAWYQQKPGKAPNLLIYNASSLQSGVPSRFSGSGSGTDFTLTISSLQPEDFATYYCQQANSFPLTFGGGTKVEIKR

SEQ ID NO: 10538 - protein, 108 aa, Artificial Sequence
  source: /note="Description of Artificial Sequence: Synthetic polypeptide"
DIQMTQSPSSVSASVGDRVTITCRSSQDINNWLVWYQQKPGKAPKVLIYGASRLQSGVPSRFSGSGSGTDFTLTISSLQPEDFATYYCQQANSFPLTFGGGTKLEIKR

SEQ ID NO: 10539 - protein, 107 aa, Artificial Sequence
  source: /note="Description of Artificial Sequence: Synthetic polypeptide"
DIQMTQSPSSVSASVGDRVTITCRSSQDINNWLVWYQQKPGKAPKVLIYGASRLQSGVPSRFSGSGSGTDFTLTISSLQPEDFATYYCQQANSFPLTFGGGTKVEIK

SEQ ID NO: 10540 - protein, 108 aa, Artificial Sequence
  source: /note="Description of Artificial Sequence: Synthetic polypeptide"
DIQMTQSPSSVSASVGDRVTITCRSSQDINNWLVWYQQKPGKAPKVLIYGASRLQSGVPSRFSGSGSGTDFTLTISSLQPEDFATYYCQQANSFPLTFGGGTKVEIKR

SEQ ID NO: 10541 - protein, 108 aa, Artificial Sequence
  source: /note="Description of Artificial Sequence: Synthetic polypeptide"
DIQMTQSPSSVSASVGNRVTITCRASQGISSWLAWYQQKPGKAPKLLIYAASSLQSGVPSRFSGSGSGTDFTLTISSLQPEDFATYYCQQANSFPPTFGQGTKVEIKR

SEQ ID NO: 10542 - protein, 113 aa, Llama glama
DIQMTQSPSSVTASAGEKVTINCKSSQSVLYSSNQKNYLAWYQQRLGQSPRLLIYWASTRESGVPDRFSGSGSTTDFTLTINNFQPEDAAVYYCQQGYSAPLTFGQGTKVELK

SEQ ID NO: 10543 - protein, 109 aa, Artificial Sequence
  source: /note="Description of Artificial Sequence: Synthetic polypeptide"
DIQMTQSPSTLSASVGDRVTITCRASQSISSWLAWYQQKPGKAPKLLIYKASSLESGVPSRFTGSGSGTEFTLTISSLQPDDFATYYCQQYNSYSPWTFGQGTKVEIKR

SEQ ID NO: 10544 - protein, 107 aa, Artificial Sequence
  source: /note="Description of Artificial Sequence: Synthetic polypeptide"
DIQMTQSPSTLSASVGDRVTITCRASQSISSWLAWYQQKPGKAPKLLIYKASSLKSGVPSRFSGSGSGTEFILTISSLQPDDFATYYCQQYNSYWTFGQGTKVEIKR

SEQ ID NO: 10545 - protein, 114 aa, Artificial Sequence
  source: /note="Description of Artificial Sequence: Synthetic polypeptide"
DIRMTQSPDSLAVSLGERATINCKSSQSVLSSSNNKNYLAWYQQKPGQPPKLLIYWASTRESGVPDRFSGSGSGTDFSLTISSLQAEDLAVYYCQQYYSTPLTFGGGTKVEIKR

SEQ ID NO: 10546 - protein, 108 aa, Artificial Sequence
  source: /note="Description of Artificial Sequence: Synthetic polypeptide"
DIRMTQSPSSLSASVGDRGTITCRASQNINSYLNWYQLKPGKAPKLLIFAASSLQSGVPSRFSGSGSGTDFTLTISSLQPEDFATYYCQQSYSSPFTFGQGTKVEIKR

SEQ ID NO: 10547 - protein, 109 aa, Artificial Sequence
  source: /note="Description of Artificial Sequence: Synthetic polypeptide"
DIVMTQSPDSLAVSLGERATIKCKSSQSVLYSSNNKNYLAWYQQKPGQPPNLLIYWASTRESGVPDRFSGSGSGTDFTLTISSLQAEDVAVYYCQQYFSFGQGTKVEIK

SEQ ID NO: 10548 - protein, 113 aa, Artificial Sequence
  source: /note="Description of Artificial Sequence: Synthetic polypeptide"
DIVMTQSPDSLAVSLGERATINCKSSQSVLSSSNNKNYLTWYQQKPGQPPKLLIYWASTRESGVPDRFSGSGSGTDFTLTISSLQAEDVAVYYCQQYYSTPYTFGQGTKLEIK

SEQ ID NO: 10549 - protein, 114 aa, Artificial Sequence
  source: /note="Description of Artificial Sequence: Synthetic polypeptide"
DIVMTQSPDSLAVSLGERATINCKSSQSVLYSSNNKNYLAWYQQKPGQPPKLLFYWASARESGVPDRFSGSGCGTDFTLTISSLQAEDVAVYYCHQSYNIPYTFGQGTKVEIKR

SEQ ID NO: 10550 - protein, 113 aa, Artificial Sequence
  source: /note="Description of Artificial Sequence: Synthetic polypeptide"
DIVMTQSPDSLAVSLGERATINCKSSQSVLYSSNNKNYLGWYQQKAGQPPKLLIYWASTRESGVPDRFSGSGSGTDFTLTISSLQAEDVAVYYCQQYYGIPWTFGQGTKVEIK

SEQ ID NO: 10551 - protein, 113 aa, Artificial Sequence
  source: /note="Description of Artificial Sequence: Synthetic polypeptide"
DIVMTQSPDSLAVSLGERATINCKSSQSVLYSSNNQNYLAWYQQKPGQPPKLLIYWASTRESGVPDRFSGSGSGTDFTLTISSLQAEDVAVYYCQQYYSTPYTFGQGTKLEIK

SEQ ID NO: 10552 - protein, 113 aa, Artificial Sequence
  source: /note="Description of Artificial Sequence: Synthetic polypeptide"
DIVMTQSPLSLPVTPGEPASISCRSSQSLLHSNGYNYLDWYLQKTGQSPQLLIYLGSNRASGVPDRFSGSGSGTDFTLKISRVEAEDVGIYYCMQALQALPFTFGPGTKVDIK

SEQ ID NO: 10553 - protein, 112 aa, Homo sapiens [sequence omitted]

SEQ ID NO: 10554 - protein, 113 aa, Llama glama
DIVMTQSPRSVTASVGEKVFINCKSSQSVVSESNQRSYLNWYQQRPGQSPRLLIYYASTQESGLPDRFSGSGSTTDFTLTISSVQPEDAAVYYCQQAYSAPYSFGSGTRLEIK

SEQ ID NO: 10555 - protein, 113 aa, Llama glama
DIVMTQSPSSVTASVGEKVTINCKSSQSVVSGSKQKSYLNWYQQRPGQSPRLLIYYASTQESGIPDRFSGSGSTTDFTLTISSVQPEDAAVYYCQQAYSAPYSFGSGTRLEIK

SEQ ID NO: 10556 - protein, 113 aa, Llama glama
DIVMTQSPTSVTASVGEKVTINCKSSQSVVSGSNQKSYLNWYQQRPGQSPRLLIYHASTQESGIPDRFSGSGSTTDFTLTISSVQPEDAAVYYCQQAYNNPYSFGSGTRLEIK

SEQ ID NO: 10557 - protein, 114 aa, Artificial Sequence
  source: /note="Description of Artificial Sequence: Synthetic polypeptide"
DIVMTQSPYSLAVSLGERATINCRSSQNLLYSSTNKNYLPWYQQKPGQPPKLLIYWASTRDSGVPDRFSGSGSGTDFTLTISSLQAEDVAVYYCQQYYSIYRTFGQGTKLEIKR

SEQ ID NO: 10558 - protein, 113 aa, Artificial Sequence
  source: /note="Description of Artificial Sequence: Synthetic polypeptide"
DIVMTQTPLSSPVSLGHPASISCRSSQSLKKSDGNTYLSWLQQRPGQPPRLLIYNISNRFSGVPDRFSGSGAGTDFTLKITRVEAEDVGFYYCMQTTQFPFTFGPGTKVEIKR

SEQ ID NO: 10559 - protein, 112 aa, Artificial Sequence
  source: /note="Description of Artificial Sequence: Synthetic polypeptide"
DIVMTQTPLSSPVTLGQPASISCRSSHSLVRSDGNTYLSWLQQRPGQPPRLLIYKISNRFSGVPDRFSGTGAGTDFTLKINRVEAEDVGFYYCMQATQFPFTFGPGTKVDIK

SEQ ID NO: 10560 - protein, 113 aa, Artificial Sequence
  source: /note="Description of Artificial Sequence: Synthetic polypeptide"
DIVMTQTPLSSPVTLGQPASISCRSSQSLEKSDGNTYLSWLQQRPGQPPRLLIYKISNRFSGVPDRFSGSGAGTDFTLRISRVEAEDVGIYYCVQTTQFPFTFGPGTKVEIKR

SEQ ID NO: 10561 - protein, 112 aa, Artificial Sequence
  source: /note="Description of Artificial Sequence: Synthetic polypeptide"
DIVMTQTPLSSPVTLGQPASISCRSSQSLVHSDGNTYLSWLQQRPGQPPRLLIYKISNRFSGVPDRFIGSGAGTDFTLRISRVEAEDVGVYYCMQATQFPFTFGPGTRVDIK

SEQ ID NO: 10562 - protein, 113 aa, Artificial Sequence
  source: /note="Description of Artificial Sequence: Synthetic polypeptide"
DIVMTQTPLSSPVTLGQPASISCRSSQSLVHSDGNTYLSWLQQRPGQPPRLLIYKISNRFSGVPDRFSGSGAGTDFTLKISRVEAEDVGVYYCMQATQFPQTFGQGTKVEIKR

SEQ ID NO: 10563 - protein, 112 aa, Artificial Sequence
  source: /note="Description of Artificial Sequence: Synthetic polypeptide"
DIVMTQTPLSSPVTLGQPASISCRSSQSLVKSDGNTYLSWLQQRPGQPPRLLIYKISNRFSGVPDRFSGSGAGTDFTLKISRVEAEDVGIYYCMQTTQFPFTFGPGTKVDIK

SEQ ID NO: 10564 - protein, 112 aa, Artificial Sequence
  source: /note="Description of Artificial Sequence: Synthetic polypeptide"
DIVMTQTPLSSPVTLGQPASISCRSSQSLVKSDGNTYLSWLQQRPGQPPRLLIYKISNRFSGVPDRFSGSGAGTDFTLKISRVEAEDVGVYYCMQTTQFPFTFGPGTKVDIK

SEQ ID NO: 10565 - protein, 113 aa, Artificial Sequence
  source: /note="Description of Artificial Sequence: Synthetic polypeptide"
DIVMTQTPLSSPVTLGQPASISCRSSQSLVRSDGNTYLSWLQQRPGQPPRLLIYKISNRFSGVPDRFSGSGAGTDFTLKISRVDAEDVGVYYCMQATQFPFTFGPGTKVEIKR

SEQ ID NO: 10566 - protein, 112 aa, Artificial Sequence
  source: /note="Description of Artificial Sequence: Synthetic polypeptide"
DIVMTQTPLSSPVTLGQPASISCRSSQSLVRSDGNTYLSWLQQRPGQPPRLLIYKISNRFSGVPDRFSGSGAGTDFTLKISRVEADDVGVYYCMQTTQFPFTFGPGTKVDIK

SEQ ID NO: 10567 - protein, 112 aa, Artificial Sequence
  source: /note="Description of Artificial Sequence: Synthetic polypeptide"
DIVMTQTPLSSPVTLGQPASISCRSSQSLVRSDGNTYLSWLQQRPGQPPRLLIYKISNRFSGVPDRFSGSGAGTDFTLKISRVEAEDVGIYFCMQTTQFPFTFGPGTKVDIK

SEQ ID NO: 10568 - protein, 109 aa, Artificial Sequence
  source: /note="Description of Artificial Sequence: Synthetic polypeptide"
DPVLTQTPSPVSAAVGGTVTISCQASESVESGNWLAWYQQKPGQPPKLLIYYTSTLASGVPSRFKGSGSGAHFTLTISGVQCDDAATYYCQGAFYGVNTFGGGTEVVVK

SEQ ID NO: 10569 - protein, 111 aa, Artificial Sequence
  source: /note="Description of Artificial Sequence: Synthetic polypeptide"
DPVMTQTPSSVSAAVGGTVTINCQSSQSVNQNDLSWYQQKPGQPPKRLIYYASTLASGVSSRFKGSGSGTQFTLTISDMQCDDAATYYCQGSFRVSGWYWAFGGGTEVVVK

SEQ ID NO: 10570 - protein, 113 aa, Artificial Sequence
  source: /note="Description of Artificial Sequence: Synthetic polypeptide"
DVVMTQTPLSSPVTLGQPASISCRSSQGLVRSDGNTYLSWLQQRPGQPPRLLIYKISNRFSGVPDRFSGSGAGTTFTLKINRVEVEDVGVYYCLQATQFPFTFGHGTKVEIKR

SEQ ID NO: 10571 - protein, 107 aa, Artificial Sequence
  source: /note="Description of Artificial Sequence: Synthetic polypeptide"
EIVLTQSPATLSLSPGERVTLSCRASQSVSSYLAWYQQKPGQAPRLLIYDASNRATGIPARFSGSGSGTDFTLTISSLEPEDFAVYYCQQRNIWPPTFGQGTKVEIK

SEQ ID NO: 10572 - protein, 108 aa, Llama glama
HSAVTQPSAVSVSLGQTARITCQGTNLRSSYVHWYQQMPGQAPVLVIYRDSERPSGIPERFSGSSSGGTATLAISGAQAEDEADYYCQSAHRSESAVFGGGTHLTVLG

SEQ ID NO: 10573 - protein, 111 aa, Artificial Sequence
  source: /note="Description of Artificial Sequence: Synthetic polypeptide"
IVMTQTPSSRSVPVGGTVTINCQASEIVNRNNRLAWFQQKPGQPPKLLMYLASTPASGVPSRFRGSGSGTQFTLTISDVVCDDAATYYCTAYKSSNTDGIAFGGGTEVVVK

SEQ ID NO: 10574 - protein, 129 aa, Artificial Sequence
  source: /note="Description of Artificial Sequence: Synthetic polypeptide"
MTMFSLALLLSLLLLCVSDSRAETTVTQSPASLSMAIGEKVTIRCITSTDIDDDMNWYQQKPGEPPKLLISEGNTLRPGVPSRFSSSGYGTDFVFTIENMLSEDVADYYCLQSDNLPLTFGGGTKLEIK

SEQ ID NO: 10575 - protein, 110 aa, Llama glama
NFMLTQPSAVSVSLGQTARITCQGSSFGSSYAHWYQQMPGQAPILVIYRDSERPSGIPDRFSGSNSGGTATLTISGAQAEDEADYYCQSGSSSGNAHAVFGGGTHLTVLG

SEQ ID NO: 10576 - protein, 108 aa, Artificial Sequence
  source: /note="Description of Artificial Sequence: Synthetic polypeptide"
NIKMIQSPSSLFASVGVTVTITCRASQGIRNNLVWYQQKPGKAPKLLIYDASSLRIWVPSRFSGSGWGAEFILPINSRQPEDYASYYCRQHNKYPFTFGQGTKMEIKR

SEQ ID NO: 10577 - protein, 112 aa, Llama glama
QAGLTQPPSVSGSPGKTVTISCAGTSSDVGYGNYVSWYQQLPGMAPKLLLYSVNKRASGIADRFSGSKSGNTASLTISGLQSEDEADYYCGCYDSSLSTPVFGGGTKLTVLG

SEQ ID NO: 10578 - protein, 108 aa, Llama glama
QPVLNQPSALSVSLGQTARITCQGGDFRNYYNNWYQQKPGQAPVLVIYEDSERPSGIPERFSGSSSGDTVILTVSRVQADDEADYYCQSSDSTDNAVFGGGTHLTVLG

SEQ ID NO: 10579 - protein, 113 aa, Llama glama
QTVVTQEPSLSVSPGGTVTLTCGLSSGSVTFGNYPSWYQQTPGQAPRTLIYTTNSRHSGVPSRFSGSISGNKATLTISGAQPEDEADFYCALSRVSGTYGTVFGGGTHLTVLG

SEQ ID NO: 10580 - protein, 108 aa, Artificial Sequence
  source: /note="Description of Artificial Sequence: Synthetic polypeptide"
QVLTQTASPVSAAVGGTVTISCQSSQSVENGNWLAWYQQKPGQPPKLLIYLASTLESGVPSRFKGSGSGTQFTLTISGVQCDDAATYYCQGAYSGINVFGGGTEVVVK

SEQ ID NO: 10581 - protein, 108 aa, Artificial Sequence
  source: /note="Description of Artificial Sequence: Synthetic polypeptide"
QVLTQTPSPVSAAVGGAVTINCQSSQSVENGNWLGWYQQKPGQPPKLLIYLASTLASGVPSRFTGSGSGTQFTLTISGVQCDDAATYYCQGAYSGINAFGGGTEVVVK

SEQ ID NO: 10582 - protein, 109 aa, Llama glama
SYELTQSPSVSVALRQAAKITCGGDNIASKHAHWYQQKPGQSPVLVIYKDSNRPSGIPERFSGSNSGNTATLTVSGAQAEDEADYYCQVWDSSANAAVFGGGTHLTVLG

SEQ ID NO: 10583 - protein, 109 aa, Llama glama
SYELTQSPSVSVALRQTAKITCGGNDIGSKSTQWYQQKAGQAPVLVIYADSRRPSGIPERFSGSNSGNTATLTISGAQAEDEADYYCQVWDSRADAAVFGGGTHLTVLG

SEQ ID NO: 10584 - protein, 107 aa, Llama glama
SYELTQSPSVTVALRQTAKITCGGSRIGSKSVQWYQQKPGQVPVLVIYADNRRPSRIPERFSGSNSGNTATLIISGAQAEDEADYYCQVWDSSAAVFGGGTHLTVLG

SEQ ID NO: 10585 - protein, 122 aa, Artificial Sequence
  source: /note="Description of Artificial Sequence: Synthetic polypeptide"
QVQLVQSGAEVKKPGASVKVSQKASGYTFTNYGLSWVRQAPGQGLEWMGWISANNGDTNYGQEFQGRVTMTTDTSTSTAYMELRSLRSDDTAVYYCARDSSSSWARWFFDLWGRGTLVTVSS

SEQ ID NO: 10586 - protein, 108 aa, Artificial Sequence
  source: /note="Description of Artificial Sequence: Synthetic polypeptide"
SYVLTQPPSVSVAPGKTARITCGGNIIGSKLVHWYQQKPGQAPVLVIYDDGDRPSGIPERFSGSNSGNTATLTISRVEAGDEADYYCQVWDTGSDPVVFGGGTKLTVL

SEQ ID NO: 10587 - protein, 246 aa, Artificial Sequence
  source: /note="Description of Artificial Sequence: Synthetic polypeptide"
DIQMTQSPSSLSASVGDRVTITCGASENIYGALNWYQQKPGKAPKLLIYGATNLADGVPSRFSGSGSGTDFTLTISSLQPEDFATYYCQNVLNTPLTFGQGTKVEIKRTGGGGSGGGGSGGGGSQVQLVQSGAEVKKPGASVKVSCKASGYIFSNYWIQWVRQAPGQGLEWMGEILPGSGSTEYTENFKDRVTMTRDTSTSTVYMELSSLRSEDTAVYYCARYFFGSSPNWYFDVWGQGTLVTVSS

SEQ ID NO: 10588 - protein, 448 aa, Artificial Sequence
  source: /note="Description of Artificial Sequence: Synthetic polypeptide"
QVQLVQSGAEVKKPGASVKVSCKASGYIFSNYWIQWVRQAPGQGLEWMGEILPGSGSTEYTENFKDRVTMTRDTSTSTVYMELSSLRSEDTAVYYCARYFFGSSPNWYFDVWGQGTLVTVSSASTKGPSVFPLAPCSRSTSESTAALGCLVKDYFPEPVTVSWNSGALTSGVHTFPAVLQSSGLYSLSSVVTVPSSNFGTQTYTCNVDHKPSNTKVDKTVERKCCVECPPCPAPPVAGPSVFLFPPKPKDTLMISRTPEVTCVVVDVSQEDPEVQFNWYVDGVEVHNAKTKPREEQFNSTYRVVSVLTVLHQDWLNGKEYKCKVSNKGLPSSIEKTISKAKGQPREPQVYTLPPSQEEMTKNQVSLTCLVKGFYPSDIAVEWESNGQPENNYKTTPPVLDSDGSFFLYSRLTVDKSRWQEGNVFSCSVMHEALHNHYTQKSLSLSLGK

SEQ ID NO: 10589 - protein, 214 aa, Artificial Sequence
  source: /note="Description of Artificial Sequence: Synthetic polypeptide"
DIQMTQSPSSLSASVGDRVTITCSASQDISNYLNWYQQKPGKAPKVLIYFTSSLHSGVPSRFSGSGSGTDFTLTISSLQPEDFATYYCQQYSTVPWTFGQGTKVEIKRTVAAPSVFIFPPSDEQLKSGTASVVCLLNNFYPREAKVQWKVDNALQSGNSQESVTEQDSKDSTYSLSSTLTLSKADYEKHKVYACEVTHQGLSSPVTKSFNRGEC

SEQ ID NO: 10590 - protein, 213 aa, Artificial Sequence
  source: /note="Description of Artificial Sequence: Synthetic polypeptide"
QPGLTQPPSVSVAPGQTARITCGGNNIGSKSVHWYQQKPGQAPVLVVYDDSDRPSGIPERFSGSNSGNTATLTISRVEAGDEADYYCQVWDSSSDHYVFGTGTKVTVLSSASTKGPSVFPLAPSSKSTSGGTAALGCLVKDYFPEPVTVSWNSGALTSGVHTFPAVLQSSGLYSLSSVVTVPSSSLGTQTYICNVNHKPSNTKVDKKVEPKSC

SEQ ID NO: 10591 - protein, 212 aa, Artificial Sequence
  source: /note="Description of Artificial Sequence: Synthetic polypeptide"
QPGLTQPPSVSVAPGQTARITCGGNNIGSKSVHWYQQKPGQAPVLVVYDDSDRPSGIPERFSGSNSGNTATLTISRVEAGDEADYYCQVWDSSSDHYVFGTGTKVTVLGASTKGPSVFPLAPSSKSTSGGTAALGCLVKDYFPEPVTVSWNSGALTSGVHTFPAVLQSSGLYSLSSVVTVPSSSLGTQTYICNVNHKPSNTKVDKKVEPKSC

SEQ ID NO: 10592 - protein, 212 aa, Artificial Sequence
  source: /note="Description of Artificial Sequence: Synthetic polypeptide"
QPGLTQPPSVSVAPGQTARITCGGNNIGSKSVHWYQQKPGQAPVLVVYDDSDRPSGIPERFSGSNSGNTATLTISRVEAGDEADYYCQVWDSSSDHYVFGQGTLVTVSSASTKGPSVFPLAPSSKSTSGGTAALGCLVKDYFPEPVTVSWNSGALTSGVHTFPAVLQSSGLYSLSSVVTVPSSSLGTQTYICNVNHKPSNTKVDKKVEPKSC

SEQ ID NO: 10593 - protein, 461 aa, Artificial Sequence
  source: /note="Description of Artificial Sequence: Synthetic polypeptide"
QVQLVQSGAEVKKPGASVKVSCKASGYTFTGYYMHWVRQAPGQGLEWMGWINPNSGGTNYAQKFQGRVTMTRDTSISTAYMELSRLRSDDTAVYYCARSPNPYYYDSSGYYYPGAFDIWGGGTKVTVLGQPKAAPSVTLFPPSSEELQANKATLVCLISDFYPGAVTVAWKADSSPVKAGVETTTPSKQSNNKYAASSYLSLTPEQWKSHRSYSCQVTHEGSTVEKTVAPTECSDKTHTCPPCPAPELLGGPSVFLFPPKPKDTLMISRTPEVTCVVVDVSHEDPEVKFNWYVDGVEVHNAKTKPREEQYNSTYRVVSVLTVLHQDWLNGKEYKCKVSNKALPAPIEKTISKAKGQPREPQVYTLPPCRDELTKNQVSLWCLVKGFYPSDIAVEWESNGQPENNYKTTPPVLDSDGSFFLYSKLTVDKSRWQQGNVFSCSVMHEALHNHYTQKSLSLSPGK

SEQ ID NO: 10594 - protein, 453 aa, Artificial Sequence
  source: /note="Description of Artificial Sequence: Synthetic polypeptide"
EVQLVESGGGLVQPGGSLRLSCAASGYDFTHYGMNWVRQAPGKGLEWVGWINTYTGEPTYAADFKRRFTFSLDTSKSTAYLQMNSLRAEDTAVYYCAKYPYYYGTSHWYFDVWGQGTLVTVSSASTKGPSVFPLAPSSKSTSGGTAALGCLVKDYFPEPVTVSWNSGALTSGVHTFPAVLQSSGLYSLSSVVTVPSSSLGTQTYICNVNHKPSNTKVDKKVEPKSCDKTHTCPPCPAPELLGGPSVFLFPPKPKDTLMASRTPEVTCVVVDVSHEDPEVKFNWYVDGVEVHNAKTKPREEQYNSTYRVVSVLTVLAQDWLNGKEYKCKVSNKALPAPIEKTISKAKGQPREPQVYTLPPCRDELTKNQVSLWCLVKGFYPSDIAVEWESNGQPENNYKTTPPVLDSDGSFFLYSKLTVDKSRWQQGNVFSCSVMHEALHNAYTQKSLSLSPGK

SEQ ID NO: 10595 - protein, 463 aa, Artificial Sequence
  source: /note="Description of Artificial Sequence: Synthetic polypeptide"
QVQLVQSGAEVKKPGASVKVSCKASGYTFTGYYMHWVRQAPGQGLEWMGWINPNSGGTNYAQKFQGRVTMTRDTSISTAYMELSRLRSDDTAVYYCARSPNPYYYDSSGYYYPGAFDIWGQGTMVTVSSASVAAPSVFIFPPSDEQLKSGTASVVCLLNNFYPREAKVQWKVDNALQSGNSQESVTEQDSKDSTYSLSSTLTLSKADYEKHKVYACEVTHQGLSSPVTKSFNRGECDKTHTCPPCPAPELLGGPSVFLFPPKPKDTLMASRTPEVTCVVVDVSHEDPEVKFNWYVDGVEVHNAKTKPREEQYNSTYRVVSVLTVLAQDWLNGKEYKCKVSNKALPAPIEKTISKAKGQPREPQVCTLPPSRDELTKNQVSLSCAVKGFYPSDIAVEWESNGQPENNYKTTPPVLDSDGSFFLVSKLTVDKSRWQQGNVFSCSVMHEALHNAYTQKSLSLSPGK

SEQ ID NO: 10596 - protein, 453 aa, Artificial Sequence
  source: /note="Description of Artificial Sequence: Synthetic polypeptide"
EVQLVESGGGLVQPGGSLRLSCAASGYDFTHYGMNWVRQAPGKGLEWVGWINTYTGEPTYAADFKRRFTFSLDTSKSTAYLQMNSLRAEDTAVYYCAKYPYYYGTSHWYFDVWGQGTLVTVSSASTKGPSVFPLAPSSKSTSGGTAALGCLVKDYFPEPVTVSWNSGALTSGVHTFPAVLQSSGLYSLSSVVTVPSSSLGTQTYICNVNHKPSNTKVDKKVEPKSCDKTHTCPPCPAPEAAGGPSVFLFPPKPKDTLMASRTPEVTCVVVDVSHEDPEVKFNWYVDGVEVHNAKTKPREEQYNSTYRVVSVLTVLAQDWLNGKEYKCKVSNKALGAPIEKTISKAKGQPREPQVYTLPPCRDELTKNQVSLWCLVKGFYPSDIAVEWESNGQPENNYKTTPPVLDSDGSFFLYSKLTVDKSRWQQGNVFSCSVMHEALHNAYTQKSLSLSPGK

SEQ ID NO: 10597 - protein, 463 aa, Artificial Sequence
  source: /note="Description of Artificial Sequence: Synthetic polypeptide"
QVQLVQSGAEVKKPGASVKVSCKASGYTFTGYYMHWVRQAPGQGLEWMGWINPNSGGTNYAQKFQGRVTMTRDTSISTAYMELSRLRSDDTAVYYCARSPNPYYYDSSGYYYPGAFDIWGQGTMVTVSSASVAAPSVFIFPPSDEQLKSGTASVVCLLNNFYPREAKVQWKVDNALQSGNSQESVTEQDSKDSTYSLSSTLTLSKADYEKHKVYACEVTHQGLSSPVTKSFNRGECDKTHTCPPCPAPEAAGGPSVFLFPPKPKDTLMASRTPEVTCVVVDVSHEDPEVKFNWYVDGVEVHNAKTKPREEQYNSTYRVVSVLTVLAQDWLNGKEYKCKVSNKALGAPIEKTISKAKGQPREPQVCTLPPSRDELTKNQVSLSCAVKGFYPSDIAVEWESNGQPENNYKTTPPVLDSDGSFFLVSKLTVDKSRWQQGNVFSCSVMHEALHNAYTQKSLSLSPGK

SEQ ID NO: 10598 - protein, 450 aa, Artificial Sequence
  source: /note="Description of Artificial Sequence: Synthetic polypeptide"
EVQLVESGGGLVQPGGSLRLSCAASGYDFTHYGMNWVRQAPGKGLEWVGWINTYTGEPTYAADFKRRFTFSLDTSKSTAYLQMNSLRAEDTAVYYCAKYPYYYGTSHWYFDVWGQGTLVTVSSASTKGPSVFPLAPCSRSTSESTAALGCLVKDYFPEPVTVSWNSGALTSGVHTFPAVLQSSGLYSLSSVVTVPSSSLGTKTYTCNVDHKPSNTKVDKRVESKYGPPCPPCPAPEFEGGPSVFLFPPKPKDTLMASRTPEVTCVVVDVSQEDPEVQFNWYVDGVEVHNAKTKPREEQFNSTYRVVSVLTVLAQDWLNGKEYKCKVSNKGLPSSIEKTISKAKGQPREPQVCTLPPSQEEMTKNQVSLSCAVKGFYPSDIAVEWESNGQPENNYKTTPPVLDSDGSFFLVSRLTVDKSRWQEGNVFSCSVMHEALHNAYTQKSLSLSLGK

SEQ ID NO: 10599 - protein, 460 aa, Artificial Sequence
  source: /note="Description of Artificial Sequence: Synthetic polypeptide"
QVQLVQSGAEVKKPGASVKVSCKASGYTFTGYYMHWVRQAPGQGLEWMGWINPNSGGTNYAQKFQGRVTMTRDTSISTAYMELSRLRSDDTAVYYCARSPNPYYYDSSGYYYPGAFDIWGQGTMVTVSSASVAAPSVFIFPPSDEQLKSGTASVVCLLNNFYPREAKVQWKVDNALQSGNSQESVTEQDSKDSTYSLSSTLTLSKADYEKHKVYACEVTHQGLSSPVTKSFNRGECPPCPPCPAPEFEGGPSVFLFPPKPKDTLMASRTPEVTCVVVDVSQEDPEVQFNWYVDGVEVHNAKTKPREEQFNSTYRVVSVLTVLAQDWLNGKEYKCKVSNKGLPSSIEKTISKAKGQPREPQVYTLPPCQEEMTKNQVSLWCLVKGFYPSDIAVEWESNGQPENNYKTTPPVLDSDGSFFLYSRLTVDKSRWQEGNVFSCSVMHEALHNAYTQKSLSLSLGK

SEQ ID NO: 10600 - protein, 453 aa, Artificial Sequence
  source: /note="Description of Artificial Sequence: Synthetic polypeptide"
EVQLVESGGGLVQPGGSLRLSCAASGYDFTHYGMNWVRQAPGKGLEWVGWINTYTGEPTYAADFKRRFTFSLDTSKSTAYLQMNSLRAEDTAVYYCAKYPYYYGTSHWYFDVWGQGTLVTVSSASTKGPSVFPLAPSSKSTSGGTAALGCLVKDYFPEPVTVSWNSGALTSGVHTFPAVLQSSGLYSLSSVVTVPSSSLGTQTYICNVNHKPSNTKVDKKVEPKSCDKTHTCPPCPAPELLGGPSVFLFPPKPKDTLMASRTPEVTCVVVDVSHEDPEVKFNWYVDGVEVHNAKTKPREEQYNSTYRVVSVLTVLAQDWLNGKEYKCKVSNKALPAPIEKTISKAKGQPREPQVCTLPPSRDELTKNQVSLSCAVKGFYPSDIAVEWESNGQPENNYKTTPPVLDSDGSFFLVSKLTVDKSRWQQGNVFSCSVMHEALHNAYTQKSLSLSPGK

SEQ ID NO: 10601 - protein, 705 aa, Artificial Sequence
  source: /note="Description of Artificial Sequence: Synthetic polypeptide"
SYVLTQPPSVSVAPGQTARITCGGNNIGSKSVHWYQQKPGQAPVLVVYDDSDRPSGIPERFSGSNSGNTATLTISRVEAGDEADYYCQVWDSSSDHWVFGGGTKLTVLGQPKAAPSVTLFPPSSEELQANKATLVCLISDFYPGAVTVAWKADSSPVKAGVETTTPSKQSNNKYAASSYLSLTPEQWKSHRSYSCQVTHEGSTVEKTVAPTECSGGGGSGGGGSGGGGSGGGGSGGGGSGGGGSGGQVQLVESGAEVKKPGASVKVSCKASGYTFTGYYMHWVRQAPGQGLEWMGWINPNSGGTNYAQKFQGRVTMTRDTSISTAYMELSRLRSDDTAVYYCARSPNPYYYDSSGYYYPGAFDIWGQGTMVTVSSASTKGPSVFPLAPSSKSTSGGTAALGCLVKDYFPEPVTVSWNSGALTSGVHTFPAVLQSSGLYSLSSVVTVPSSSLGTQTYICNVNHKPSNTKVDKKVEPKSCDKTHTCPPCPAPELLGGPSVFLFPPKPKDTLMASRTPEVTCVVVDVSHEDPEVKFNWYVDGVEVHNAKTKPREEQYNSTYRVVSVLTVLAQDWLNGKEYKCKVSNKALPAPIEKTISKAKGQPREPQVYTLPPCRDELTKNQVSLWCLVKGFYPSDIAVEWESNGQPENNYKTTPPVLDSDGSFFLYSKLTVDKSRWQQGNVFSCSVMHEALHNAYTQKSLSLSPGK

SEQ ID NO: 10602 - protein, 702 aa, Artificial Sequence
  source: /note="Description of Artificial Sequence: Synthetic polypeptide"
SYVLTQPPSVSVAPGQTARITCGGNNIGSKSVHWYQQKPGQAPVLVVYDDSDRPSGIPERFSGSNSGNTATLTISRVEAGDEADYYCQVWDSSSDHWVFGGGTKLTVLGQPKAAPSVTLFPPSSEELQANKATLVCLISDFYPGAVTVAWKADSSPVKAGVETTTPSKQSNNKYAASSYLSLTPEQWKSHRSYSCQVTHEGSTVEKTVAPTECSGGGGSGGGGSGGGGSGGGGSGGGGSGGGGSGGQVQLVESGAEVKKPGASVKVSCKASGYTFTGYYMHWVRQAPGQGLEWMGWINPNSGGTNYAQKFQGRVTMTRDTSISTAYMELSRLRSDDTAVYYCARSPNPYYYDSSGYYYPGAFDIWGQGTMVTVSSASTKGPSVFPLAPCSRSTSESTAALGCLVKDYFPEPVTVSWNSGALTSGVHTFPAVLQSSGLYSLSSVVTVPSSSLGTKTYTCNVDHKPSNTKVDKRVESKYGPPCPPCPAPEFEGGPSVFLFPPKPKDTLMASRTPEVTCVVVDVSQEDPEVQFNWYVDGVEVHNAKTKPREEQFNSTYRVVSVLTVLAQDWLNGKEYKCKVSNKGLPSSIEKTISKAKGQPREPQVYTLPPCQEEMTKNQVSLWCLVKGFYPSDIAVEWESNGQPENNYKTTPPVLDSDGSFFLYSRLTVDKSRWQEGNVFSCSVMHEALHNAYTQKSLSLSLGK

SEQ ID NO: 10603 - protein, 453 aa, Artificial Sequence
  source: /note="Description of Artificial Sequence: Synthetic polypeptide"
EVQLVESGGGLVQPGGSLRLSCAASGYDFTHYGMNWVRQAPGKGLEWVGWINTYTGEPTYAADFKRRFTFSLDTSKSTAYLQMNSLRAEDTAVYYCAKYPYYYGTSHWYFDVWGQGTLVTVSSASTKGPSVFPLAPSSKSTSGGTAALGCLVKDYFPEPVTVSWNSGALTSGVHTFPAVLQSSGLYSLSSVVTVPSSSLGTQTYICNVNHKPSNTKVDKKVEPKSCDKTHTCPPCPAPELLGGPSVFLFPPKPKDTLMISRTPEVTCVVVDVSHEDPEVKFNWYVDGVEVHNAKTKPREEQYNSTYRVVSVLTVLHQDWLNGKEYKCKVSNKALPAPIEKTISKAKGQPREPQVYTLPPCRDELTKNQVSLWCLVKGFYPSDIAVEWESNGQPENNYKTTPPVLDSDGSFFLYSKLTVDKSRWQQGNVFSCSVMHEALHNHYTQKSLSLSPGK

SEQ ID NO: 10604 - protein, 453 aa, Artificial Sequence
  source: /note="Description of Artificial Sequence: Synthetic polypeptide"
EVQLVESGGGLVQPGGSLRLSCAASGYDFTHYGMNWVRQAPGKGLEWVGWINTYTGEPTYAADFKRRFTFSLDTSKSTAYLQMNSLRAEDTAVYYCAKYPYYYGTSHWYFDVWGQGTLVTVSSASTKGPSVFPLAPSSKSTSGGTAALGCLVKDYFPEPVTVSWNSGALTSGVHTFPAVLQSSGLYSLSSVVTVPSSSLGTQTYICNVNHKPSNTKVDKKVEPKSCDKTHTCPPCPAPEAAGGPSVFLFPPKPKDTLMISRTPEVTCVVVDVSHEDPEVKFNWYVDGVEVHNAKTKPREEQYNSTYRVVSVLTVLHQDWLNGKEYKCKVSNKALGAPIEKTISKAKGQPREPQVYTLPPCRDELTKNQVSLWCLVKGFYPSDIAVEWESNGQPENNYKTTPPVLDSDGSFFLYSKLTVDKSRWQQGNVFSCSVMHEALHNHYTQKSLSLSPGK

SEQ ID NO: 10605 - protein, 463 aa, Artificial Sequence
  source: /note="Description of Artificial Sequence: Synthetic polypeptide"
QVQLVQSGAEVKKPGASVKVSCKASGYTFTGYYMHWVRQAPGQGLEWMGWINPNSGGTNYAQKFQGRVTMTRDTSISTAYMELSRLRSDDTAVYYCARSPNPYYYDSSGYYYPGAFDIWGQGTMVTVSSASVAAPSVFIFPPSDEQLKSGTASVVCLLNNFYPREAKVQWKVDNALQSGNSQESVTEQDSKDSTYSLSSTLTLSKADYEKHKVYACEVTHQGLSSPVTKSFNRGECDKTHTCPPCPAPEAAGGPSVFLFPPKPKDTLMISRTPEVTCVVVDVSHEDPEVKFNWYVDGVEVHNAKTKPREEQYNSTYRVVSVLTVLHQDWLNGKEYKCKVSNKALGAPIEKTISKAKGQPREPQVCTLPPSRDELTKNQVSLSCAVKGFYPSDIAVEWESNGQPENNYKTTPPVLDSDGSFFLVSKLTVDKSRWQQGNVFSCSVMHEALHNHYTQKSLSLSPGK

SEQ ID NO: 10606 - protein, 228 aa, Artificial Sequence
  source: /note="Description of Artificial Sequence: Synthetic polypeptide"
EVQLVESGGGLVQPGGSLRLSCAASGFTISDYWIHWVRQAPGKGLEWVAGITPAGGYTRYADSVKGRFTISADTSKNTAYLQMRSLRAEDTAVYYCARFVFFLPYAMDYWGQGTLVTVSSASTKGPSVFPLAPSSKSTSGGTAALGCLVKDYFPEPVTVSWNSGALTSGVHTFPAVLQSSGLYSLSSVVTVPSSSLGTQTYICNVNHKPSNTKVDKKVEPKSCDKTHT

SEQ ID NO: 10607 - protein, 228 aa, Artificial Sequence
  source: /note="Description of Artificial Sequence: Synthetic polypeptide"
EVQLVESGGGLVQPGGSLRLSCAASGFTISDYWIHWVRQAPGKGLEWVAGITPAGGYTRYADSVKGRFTISADTSKNTAYLQMRSLRAEDTAVYYCARFVFFLPYAMDYWGQGTLVTVSSASTKGPSVFPLAPSSKSTSGGTAALGCLVKDYFPEPVTVSWNSGALTSGVHTFPAVLQSSGLYSLSSVVTVPSSSLGTQTYICNVNHKPSNTKVDKKVEPKSCDKTHL

SEQ ID NO: 10608 - protein, 218 aa, Artificial Sequence
  source: /note="Description of Artificial Sequence: Synthetic polypeptide"
DIQMTQSPSSLSASVGDRVTITCRASESVDSYGNSFMHWYQQKPGKAPKLLIYRASNLESGVPSRFSGSGSGTDFTLTISSLQPEDFATYYCQQSNEDPYTFGGGTKVEIKRTVAAPSVFIFPPSDEQLKSGTASVVCLLNNFYPREAKVQWKVDNALQSGNSQESVTEQDSKDSTYSLSSTLTLSKADYEKHKVYACEVTHQGLSSPVTKSFNRGEC

SEQ ID NO: 10609 - protein, 191 aa, Homo sapiens
MNFLLSWVHWSLALLLYLHHAKWSQAAPMAEGGGQNHHEVVKFMDVYQRSYCHPIETLVDIFQEYPDEIEYIFKPSCVPLMRCGGCCNDEGLECVPTEESNITMQIMRIKPHQGQHIGEMSFLQHNKCECRPKKDRARQENPCGPCSERRKHLFVQDPQTCKCSCKNTDSRCKARQLELNERTCRCDKPRR

SEQ ID NO: 10610 - protein, 504 aa, Artificial Sequence
  source: /note="Description of Artificial Sequence: Synthetic polypeptide"
MWQIVFFTLSCDLVLAAAYNNFRKSMDSIGKKQYQVQHGSCSYTFLLPEMDNCRSSSSPYVSNAVQRDAPLEYDDSVQRLQVLENIMENNTQWLMKLENYIQDNMKKEMVEIQQNAVQNQTAVMIEIGTNLLNQTAEQTRKLTDVEAQVLNQTTRLELQLLEHSLSTNKLEKQILDQTSEINKLQDKNSFLEKKVLAMEDKHIIQLQSIKEEKDQLQVLVSKQNSIIEELEKKIVTATVNNSVLQKQQHDLMETVNNLLTMMSTSNSAKDPTVAKEEQISFRDCAEVFKSGHTTNGIYTLTFPNSTEEIKAYCDMEAGGGGWTIIQRREDGSVDFQRTWKEYKVGFGNPSGEYWLGNEFVSQLTNQQRYVLKIHLKDWEGNEAYSLYEHFYLSSEELNYRIHLKGLTGTAGKISSISQPGNDFSTKDGDNDKCICKCSQMLTGGWWFDACGPSNLNGMYYPQRQNTNKFNGIKWYYWKGSGYSLKATTMMIRPADFSGHHHHHH

SEQ ID NO: 10611 - protein, 453 aa, Artificial Sequence
  source: /note="Description of Artificial Sequence: Synthetic polypeptide"
EVQLVESGGGLVQPGGSLRLSCAASGYTFTNYGMNWVRQAPGKGLEWVGWINTYTGEPTYAADFKRRFTFSLDTSKSTAYLQMNSLRAEDTAVYYCAKYPHYYGSSHWYFDVWGQGTLVTVSSASTKGPSVFPLAPSSKSTSGGTAALGCLVKDYFPEPVTVSWNSGALTSGVHTFPAVLQSSGLYSLSSVVTVPSSSLGTQTYICNVNHKPSNTKVDKKVEPKSCDKTHTCPPCPAPELLGGPSVFLFPPKPKDTLMISRTPEVTCVVVDVSHEDPEVKFNWYVDGVEVHNAKTKPREEQYNSTYRVVSVLTVLHQDWLNGKEYKCKVSNKALPAPIEKTISKAKGQPREPQVYTLPPCRDELTKNQVSLWCLVKGFYPSDIAVEWESNGQPENNYKTTPPVLDSDGSFFLYSKLTVDKSRWQQGNVFSCSVMHEALHNHYTQKSLSLSPGK

SEQ ID NO: 10612 - protein, 463 aa, Artificial Sequence
  source: /note="Description of Artificial Sequence: Synthetic polypeptide"
QVQLVQSGAEVKKPGASVKVSCKASGYTFTGYYMHWVRQAPGQGLEWMGWINPNSGGTNYAQKFQGRVTMTRDTSISTAYMELSRLRSDDTAVYYCARSPNPYYYDSSGYYYPGAFDIWGQGTMVTVSSASVAAPSVFIFPPSDEQLKSGTASVVCLLNNFYPREAKVQWKVDNALQSGNSQESVTEQDSKDSTYSLSSTLTLSKADYEKHKVYACEVTHQGLSSPVTKSFNRGECDKTHTCPPCPAPELLGGPSVFLFPPKPKDTLMISRTPEVTCVVVDVSHEDPEVKFNWYVDGVEVHNAKTKPREEQYNSTYRVVSVLTVLHQDWLNGKEYKCKVSNKALPAPIEKTISKAKGQPREPQVCTLPPSRDELTKNQVSLSCAVKGFYPSDIAVEWESNGQPENNYKTTPPVLDSDGSFFLVSKLTVDKSRWQQGNVFSCSVMHEALHNHYTQKSLSLSPGK

SEQ ID NO: 10613 - protein, 461 aa, Artificial Sequence
  source: /note="Description of Artificial Sequence: Synthetic polypeptide"
QVQLVQSGAEVKKPGASVKVSCKASGYTFTGYYMHWVRQAPGQGLEWMGWINPNSGGTNYAQKFQGRVTMTRDTSISTAYMELSRLRSDDTAVYYCARSPNPYYYDSSGYYYPGAFDIWGQGTMVTVSGQPKAAPSVTLFPPSSEELQANKATLVCLISDFYPGAVTVAWKADSSPVKAGVETTTPSKQSNNKYAASSYLSLTPEQWKSHRSYSCQVTHEGSTVEKTVAPTECSDKTHTCPPCPAPELLGGPSVFLFPPKPKDTLMISRTPEVTCVVVDVSHEDPEVKFNWYVDGVEVHNAKTKPREEQYNSTYRVVSVLTVLHQDWLNGKEYKCKVSNKALPAPIEKTISKAKGQPREPQVCTLPPSRDELTKNQVSLSCAVKGFYPSDIAVEWESNGQPENNYKTTPPVLDSDGSFFLVSKLTVDKSRWQQGNVFSCSVMHEALHNHYTQKSLSLSPGK

SEQ ID NO: 10614 - protein, 453 aa, Artificial Sequence
  source: /note="Description of Artificial Sequence: Synthetic polypeptide"
EVQLVESGGGLVQPGGSLRLSCAASGYTFTNYGMNWVRQAPGKGLEWVGWINTYTGEPTYAADFKRRFTFSLDTSKSTAYLQMNSLRAEDTAVYYCAKYPHYYGSSHWYFDVWGQGTLVTVSSASTKGPSVFPLAPSSKSTSGGTAALGCLVKDYFPEPVTVSWNSGALTSGVHTFPAVLQSSGLYSLSSVVTVPSSSLGTQTYICNVNHKPSNTKVDKKVEPKSCDKTHTCPPCPAPELLGGPSVFLFPPKPKDTLMISRTPEVTCVVVDVSHEDPEVKFNWYVDGVEVHNAKTKPREEQYNSTYRVVSVLTVLHQDWLNGKEYKCKVSNKALPAPIEKTISKAKGQPREPQVCTLPPSRDELTKNQVSLSCAVKGFYPSDIAVEWESNGQPENNYKTTPPVLDSDGSFFLVSKLTVDKSRWQQGNVFSCSVMHEALHNHYTQKSLSLSPGK

SEQ ID NO: 10615 - protein, 463 aa, Artificial Sequence
  source: /note="Description of Artificial Sequence: Synthetic polypeptide"
QVQLVQSGAEVKKPGASVKVSCKASGYTFTGYYMHWVRQAPGQGLEWMGWINPNSGGTNYAQKFQGRVTMTRDTSISTAYMELSRLRSDDTAVYYCARSPNPYYYDSSGYYYPGAFDIWGQGTMVTVSSASVAAPSVFIFPPSDEQLKSGTASVVCLLNNFYPREAKVQWKVDNALQSGNSQESVTEQDSKDSTYSLSSTLTLSKADYEKHKVYACEVTHQGLSSPVTKSFNRGECDKTHTCPPCPAPELLGGPSVFLFPPKPKDTLMISRTPEVTCVVVDVSHEDPEVKFNWYVDGVEVHNAKTKPREEQYNSTYRVVSVLTVLHQDWLNGKEYKCKVSNKALPAPIEKTISKAKGQPREPQVYTLPPCRDELTKNQVSLWCLVKGFYPSDIAVEWESNGQPENNYKTTPPVLDSDGSFFLYSKLTVDKSRWQQGNVFSCSVMHEALHNHYTQKSLSLSPGK

SEQ ID NO: 10616 - protein, 461 aa, Artificial Sequence
  source: /note="Description of Artificial Sequence: Synthetic polypeptide"
QVQLVQSGAEVKKPGASVKVSCKASGYTFTGYYMHWVRQAPGQGLEWMGWINPNSGGTNYAQKFQGRVTMTRDTSISTAYMELSRLRSDDTAVYYCARSPNPYYYDSSGYYYPGAFDIWGQGTMVTVSGQPKAAPSVTLFPPSSEELQANKATLVCLISDFYPGAVTVAWKADSSPVKAGVETTTPSKQSNNKYAASSYLSLTPEQWKSHRSYSCQVTHEGSTVEKTVAPTECSDKTHTCPPCPAPELLGGPSVFLFPPKPKDTLMISRTPEVTCVVVDVSHEDPEVKFNWYVDGVEVHNAKTKPREEQYNSTYRVVSVLTVLHQDWLNGKEYKCKVSNKALPAPIEKTISKAKGQPREPQVYTLPPCRDELTKNQVSLWCLVKGFYPSDIAVEWESNGQPENNYKTTPPVLDSDGSFFLYSKLTVDKSRWQQGNVFSCSVMHEALHNHYTQKSLSLSPGK

SEQ ID NO: 10617 - protein, 461 aa, Artificial Sequence
  source: /note="Description of Artificial Sequence: Synthetic polypeptide"
QVQLVQSGAEVKKPGASVKVSCKASGYTFTGYYMHWVRQAPGQGLEWMGWINPNSGGTNYAQKFQGRVTMTRDTSISTAYMELSRLRSDDTAVYYCARSPNPYYYDSSGYYYPGAFDIWGGGTKVTVLGQPKAAPSVTLFPPSSEELQANKATLVCLISDFYPGAVTVAWKADSSPVKAGVETTTPSKQSNNKYAASSYLSLTPEQWKSHRSYSCQVTHEGSTVEKTVAPTECSDKTHTCPPCPAPELLGGPSVFLFPPKPKDTLMISRTPEVTCVVVDVSHEDPEVKFNWYVDGVEVHNAKTKPREEQYNSTYRVVSVLTVLHQDWLNGKEYKCKVSNKALPAPIEKTISKAKGQPREPQVCTLPPSRDELTKNQVSLSCAVKGFYPSDIAVEWESNGQPENNYKTTPPVLDSDGSFFLVSKLTVDKSRWQQGNVFSCSVMHEALHNHYTQKSLSLSPGK

SEQ ID NO: 10618 - protein, 706 aa, Artificial Sequence
  source: /note="Description of Artificial Sequence: Synthetic polypeptide"
QPGLTQPPSVSVAPGQTARITCGGNNIGSKSVHWYQQKPGQAPVLVVYDDSDRPSGIPERFSGSNSGNTATLTISRVEAGDEADYYCQVWDSSSDHYVFGTGTKVTVLRTVAAPSVFIFPPSDEQLKSGTASVVCLLNNFYPREAKVQWKVDNALQSGNSQESVTEQDSKDSTYSLSSTLTLSKADYEKHKVYACEVTHQGLSSPVTKSFNRGECGGGGSGGGGSGGGGSGGGGSGGGGSGGGGSGGQVQLVQSGAEVKKPGASVKVSCKASGYTFTGYYMHWVRQAPGQGLEWMGWINPNSGGTNYAQKFQGRVTMTRDTSISTAYMELSRLRSDDTAVYYCARSPNPYYYDSSGYYYPGAFDIWGQGTMVTVSSASTKGPSVFPLAPSSKSTSGGTAALGCLVKDYFPEPVTVSWNSGALTSGVHTFPAVLQSSGLYSLSSVVTVPSSSLGTQTYICNVNHKPSNTKVDKKVEPKSCDKTHTCPPCPAPELLGGPSVFLFPPKPKDTLMISRTPEVTCVVVDVSHEDPEVKFNWYVDGVEVHNAKTKPREEQYNSTYRVVSVLTVLHQDWLNGKEYKCKVSNKALPAPIEKTISKAKGQPREPQVYTLPPCRDELTKNQVSLWCLVKGFYPSDIAVEWESNGQPENNYKTTPPVLDSDGSFFLYSKLTVDKSRWQQGNVFSCSVMHEALHNHYTQKSLSLSPGK

SEQ ID NO: 10619 - protein, 705 aa, Artificial Sequence
  source: /note="Description of Artificial Sequence: Synthetic polypeptide"
QPGLTQPPSVSVAPGQTARITCGGNNIGSKSVHWYQQKPGQAPVLVVYDDSDRPSGIPERFSGSNSGNTATLTISRVEAGDEADYYCQVWDSSSDHYVFGTGTKVTVLGQPKAAPSVTLFPPSSEELQANKATLVCLISDFYPGAVTVAWKADSSPVKAGVETTTPSKQSNNKYAASSYLSLTPEQWKSHRSYSCQVTHEGSTVEKTVAPTECSGGGGSGGGGSGGGGSGGGGSGGGGSGGGGSGGQVQLVQSGAEVKKPGASVKVSCKASGYTFTGYYMHWVRQAPGQGLEWMGWINPNSGGTNYAQKFQGRVTMTRDTSISTAYMELSRLRSDDTAVYYCARSPNPYYYDSSGYYYPGAFDIWGQGTMVTVSSASTKGPSVFPLAPSSKSTSGGTAALGCLVKDYFPEPVTVSWNSGALTSGVHTFPAVLQSSGLYSLSSVVTVPSSSLGTQTYICNVNHKPSNTKVDKKVEPKSCDKTHTCPPCPAPELLGGPSVFLFPPKPKDTLMISRTPEVTCVVVDVSHEDPEVKFNWYVDGVEVHNAKTKPREEQYNSTYRVVSVLTVLHQDWLNGKEYKCKVSNKALPAPIEKTISKAKGQPREPQVYTLPPCRDELTKNQVSLWCLVKGFYPSDIAVEWESNGQPENNYKTTPPVLDSDGSFFLYSKLTVDKSRWQQGNVFSCSVMHEALHNHYTQKSLSLSPGK

SEQ ID NO: 10620 - protein, 705 aa, Artificial Sequence
  source: /note="Description of Artificial Sequence: Synthetic polypeptide"
QPGLTQPPSVSVAPGQTARITCGGNNIGSKSVHWYQQKPGQAPVLVVYDDSDRPSGIPERFSGSNSGNTATLTISRVEAGDEADYYCQVWDSSSDHYVFGCGTKVTVLGQPKAAPSVTLFPPSSEELQANKATLVCLISDFYPGAVTVAWKADSSPVKAGVETTTPSKQSNNKYAASSYLSLTPEQWKSHRSYSCQVTHEGSTVEKTVAPTECSGGGGSGGGGSGGGGSGGGGSGGGGSGGGGSGGQVQLVQSGAEVKKPGASVKVSCKASGYTFTGYYMHWVRQAPGQCLEWMGWINPNSGGTNYAQKFQGRVTMTRDTSISTAYMELSRLRSDDTAVYYCARSPNPYYYDSSGYYYPGAFDIWGQGTMVTVSSASTKGPSVFPLAPSSKSTSGGTAALGCLVKDYFPEPVTVSWNSGALTSGVHTFPAVLQSSGLYSLSSVVTVPSSSLGTQTYICNVNHKPSNTKVDKKVEPKSCDKTHTCPPCPAPELLGGPSVFLFPPKPKDTLMISRTPEVTCVVVDVSHEDPEVKFNWYVDGVEVHNAKTKPREEQYNSTYRVVSVLTVLHQDWLNGKEYKCKVSNKALPAPIEKTISKAKGQPREPQVYTLPPCRDELTKNQVSLWCLVKGFYPSDIAVEWESNGQPENNYKTTPPVLDSDGSFFLYSKLTVDKSRWQQGNVFSCSVMHEALHNHYTQKSLSLSPGK

SEQ ID NO: 10621 - protein, 708 aa, Artificial Sequence
  source: /note="Description of Artificial Sequence: Synthetic polypeptide"
QVQLVQSGAEVKKPGASVKVSCKASGYTFTGYYMHWVRQAPGQGLEWMGWINPNSGGTNYAQKFQGRVTMTRDTSISTAYMELSRLRSDDTAVYYCARSPNPYYYDSSGYYYPGAFDIWGQGTMVTVSSASVAAPSVFIFPPSDEQLKSGTASVVCLLNNFYPREAKVQWKVDNALQSGNSQESVTEQDSKDSTYSLSSTLTLSKADYEKHKVYACEVTHQGLSSPVTKSFNRGECGGGGSGGGGSGGGGSGGGGSGGGGSGGGGSGGQPGLTQPPSVSVAPGQTARITCGGNNIGSKSVHWYQQKPGQAPVLVVYDDSDRPSGIPERFSGSNSGNTATLTISRVEAGDEADYYCQVWDSSSDHYVFGTGTKVTVLSSASTKGPSVFPLAPSSKSTSGGTAALGCLVKDYFPEPVTVSWNSGALTSGVHTFPAVLQSSGLYSLSSVVTVPSSSLGTQTYICNVNHKPSNTKVDKKVEPKSCDKTHTCPPCPAPELLGGPSVFLFPPKPKDTLMISRTPEVTCVVVDVSHEDPEVKFNWYVDGVEVHNAKTKPREEQYNSTYRVVSVLTVLHQDWLNGKEYKCKVSNKALPAPIEKTISKAKGQPREPQVYTLPPCRDELTKNQVSLWCLVKGFYPSDIAVEWESNGQPENNYKTTPPVLDSDGSFFLYSKLTVDKSRWQQGNVFSCSVMHEALHNHYTQKSLSLSPGK

SEQ ID NO: 10622 - protein, 708 aa, Artificial Sequence
  source: /note="Description of Artificial Sequence: Synthetic polypeptide"
QPGLTQPPSVSVAPGQTARITCGGNNIGSKSVHWYQQKPGQAPVLVVYDDSDRPSGIPERFSGSNSGNTATLTISRVEAGDEADYYCQVWDSSSDHYVFGTGTKVTVLSSASTKGPSVFPLAPSSKSTSGGTAALGCLVKDYFPEPVTVSWNSGALTSGVHTFPAVLQSSGLYSLSSVVTVPSSSLGTQTYICNVNHKPSNTKVDKKVEPKSCGGGGSGGGGSGGGGSGGGGSGGGGSGGGGSGGQVQLVQSGAEVKKPGASVKVSCKASGYTFTGYYMHWVRQAPGQGLEWMGWINPNSGGTNYAQKFQGRVTMTRDTSISTAYMELSRLRSDDTAVYYCARSPNPYYYDSSGYYYPGAFDIWGQGTMVTVSSASVAAPSVFIFPPSDEQLKSGTASVVCLLNNFYPREAKVQWKVDNALQSGNSQESVTEQDSKDSTYSLSSTLTLSKADYEKHKVYACEVTHQGLSSPVTKSFNRGECDKTHTCPPCPAPELLGGPSVFLFPPKPKDTLMISRTPEVTCVVVDVSHEDPEVKFNWYVDGVEVHNAKTKPREEQYNSTYRVVSVLTVLHQDWLNGKEYKCKVSNKALPAPIEKTISKAKGQPREPQVYTLPPCRDELTKNQVSLWCLVKGFYPSDIAVEWESNGQPENNYKTTPPVLDSDGSFFLYSKLTVDKSRWQQGNVFSCSVMHEALHNHYTQKSLSLSPGK

SEQ ID NO: 10623 - protein, 705 aa, Artificial Sequence
  source: /note="Description of Artificial Sequence: Synthetic polypeptide"
QPGLTQPPSVSVAPGQTARITCGGNNIGSKSVHWYQQKPGQAPVLVVYDDSDRPSGIPERFSGSNSGNTATLTISRVEAGDEADYYCQVWDSSSDHYVFGTGTKVTVLGASTKGPSVFPLAPSSKSTSGGTAALGCLVKDYFPEPVTVSWNSGALTSGVHTFPAVLQSSGLYSLSSVVTVPSSSLGTQTYICNVNHKPSNTKVDKKVEPKSCGGGGSGGGGSGGGGSGGGGSGGGGSGGGGSGGQVQLVQSGAEVKKPGASVKVSCKASGYTFTGYYMHWVRQAPGQGLEWMGWINPNSGGTNYAQKFQGRVTMTRDTSISTAYMELSRLRSDDTAVYYCARSPNPYYYDSSGYYYPGAFDIWGQGTMVTVSGQPKAAPSVTLFPPSSEELQANKATLVCLISDFYPGAVTVAWKADSSPVKAGVETTTPSKQSNNKYAASSYLSLTPEQWKSHRSYSCQVTHEGSTVEKTVAPTECSDKTHTCPPCPAPELLGGPSVFLFPPKPKDTLMISRTPEVTCVVVDVSHEDPEVKFNWYVDGVEVHNAKTKPREEQYNSTYRVVSVLTVLHQDWLNGKEYKCKVSNKALPAPIEKTISKAKGQPREPQVYTLPPCRDELTKNQVSLWCLVKGFYPSDIAVEWESNGQPENNYKTTPPVLDSDGSFFLYSKLTVDKSRWQQGNVFSCSVMHEALHNHYTQKSLSLSPGK

SEQ ID NO: 10624 - protein, 213 aa, Artificial Sequence
  source: /note="Description of Artificial Sequence: Synthetic polypeptide"
SYVLTQPPSVSVAPGQTARITCGGNNIGSKSVHWYQQKPGQAPVLVVYDDSDRPSGIPERFSGSNSGNTATLTISRVEAGDEADYYCQVWDSSSDHWVFGGGTKLTVLSSASTKGPSVFPLAPSSKSTSGGTAALGCLVKDYFPEPVTVSWNSGALTSGVHTFPAVLQSSGLYSLSSVVTVPSSSLGTQTYICNVNHKPSNTKVDKKVEPKSC

SEQ ID NO: 10625 - protein, 213 aa, Artificial Sequence
  source: /note="Description of Artificial Sequence: Synthetic polypeptide"
SYVLTQPPSVSVAPGQTARITCGGNNIGSKSVHWYQQKPGQAPVLVVYDDSDRPSGIPERFSGSNSGNTATLTISRVEAGDEADYYCQVWDSSSDHWVFGGGTKLTVLSSASTKGPSVFPLAPCSRSTSESTAALGCLVKDYFPEPVTVSWNSGALTSGVHTFPAVLQSSGLYSLSSVVTVPSSSLGTKTYTCNVDHKPSNTKVDKRVESKYG

SEQ ID NO: 10626 - protein, 214 aa, Artificial Sequence
  source: /note="Description of Artificial Sequence: Synthetic polypeptide"
DIQMTQSPSSLSASVGDRVTITCRASQDVSTAVAWYQQKPGKAPKLLIYSASFLYSGVPSRFSGSGSGTDFTLTISSLQPEDAATYYCQQGYGAPFTFGQGTKVEIKRTVAAPSVFIFPPSDEQLKSGTASVVCLLNNFYPREAKVQWKVDNALQSGNSQESVTEQDSKDSTYSLSSTLTLSKADYEKHKVYACEVTHQGLSSPVTKSFNRGEC

SEQ ID NO: 10627 - protein, 446 aa, Artificial Sequence
  source: /note="Description of Artificial Sequence: Synthetic polypeptide"
QVQLVQSGAEVKKPGASVKVSCKASGYTFTDYSMDWVRQAPGQGLEWMGAIHLNTGYTNYNQKFKGRVTMTRDTSTSTVYMELSSLRSEDTAVYYCARGFYDGYSPMDYWGQGTTVTVSSASTKGPSVFPLAPCSRSTSESTAALGCLVKDYFPEPVTVSWNSGALTSGVHTFPAVLQSSGLYSLSSVVTVPSSNFGTQTYTCNVDHKPSNTKVDKTVERKCCVECPPCPAPPVAGPSVFLFPPKPKDTLMISRTPEVTCVVVDVSQEDPEVQFNWYVDGVEVHNAKTKPREEQFNSTYRVVSVLTVLHQDWLNGKEYKCKVSNKGLPSSIEKTISKAKGQPREPQVYTLPPSQEEMTKNQVSLTCLVKGFYPSDIAVEWESNGQPENNYKTTPPVLDSDGSFFLYSRLTVDKSRWQEGNVFSCSVMHEALHNHYTQKSLSLSLGK

SEQ ID NO: 10628 - protein, 446 aa, Artificial Sequence
  source: /note="Description of Artificial Sequence: Synthetic polypeptide"
QVQLVQSGAEVKKPGASVKVSCKASGYTFTDYSMDWVRQAPGQGLEWMGAIHLNTGYTNYNQKFKGRVTMTRDTSTSTVYMELSSLRSEDTAVYYCARGFYDGYSPMDYWGQGTTVTVSSASTKGPSVFPLAPCSRSTSESTAALGCLVKDYFPEPVTVSWNSGALTSGVHTFPAVLQSSGLYSLSSVVTVPSSNFGTQTYTCNVDHKPSNTKVDKTVERKCCVECPPCPAPPVAVPSVFLFPPKPKDTLMISRTPEVTCVVVDVSQEDPEVQFNWYVDGVEVHNAKTKPREEQFNSTYRVVSVLTVLHQDWLNGKEYKCKVSNKGLPSSIEKTISKAKGQPREPQVYTLPPSQEEMTKNQVSLTCLVKGFYPSDIAVEWESNGQPENNYKTTPPVLDSDGSFFLYSRLTVDKSRWQEGNVFSCSVMHEALHNHYTQKSLSLSLGK

SEQ ID NO: 10629 - protein, 128 aa, Artificial Sequence
  source: /note="Description of Artificial Sequence: Synthetic polypeptide"
QVQLVQSGAEVKKPGASVKVSCKASGYTFTGYYMHWVRQAPGQGLEWMGWINPNSGGTNYAQKFQGRVTMTRDTSISTAYMELSRLRSDDTAVYYCARSPNPYYYDSSGYYYPGAFDIWGQGTMVTVS

SEQ ID NO: 10630 - protein, 123 aa, Artificial Sequence [sequence omitted]

SEQ ID NO: 10631 - protein, 129 aa, Artificial Sequence
  source: /note="Description of Artificial Sequence: Synthetic polypeptide"
QVQLVQSGAEVKKPGASVKVSCKASGYTFTGYYMHWVRQAPGQGLEWMGWINPNSGGTNYAQKFQGRVTMTRDTSISTAYMELSRLRSDDTAVYYCARSPNPYYYDSSGYYYPGAFDIWGQGTMVTVSS

SEQ ID NO: 10632 - protein, 120 aa, Artificial Sequence
  source: /note="Description of Artificial Sequence: Synthetic polypeptide"
EVQLVESGGGLVQPGGSLRLSCAASGFTISDYWIHWVRQAPGKGLEWVAGITPAGGYTRYADSVKGRFTISADTSKNTAYLQMRSLRAEDTAVYYCARFVFFLPYAMDYWGQGTLVTVSS

SEQ ID NO: 10633 - protein, 120 aa, Artificial Sequence
  source: /note="Description of Artificial Sequence: Synthetic polypeptide"
EEQLVEEGGGLVQPGESLELSCAASGFEISDYWIHWVRQEPGEGLEWVAGITPAGGYEYYADSVEGRFTISADTSENTAYLQMNELRAEDTAVYYCARFVFFLPYAMDYWGQGELVTVSS

SEQ ID NO: 10634 - protein, 107 aa, Artificial Sequence
  source: /note="Description of Artificial Sequence: Synthetic polypeptide"
DIQMTQSPSSLSASVGDEVTITCRASQDVSTAVAWYQQKPGKAPKLLIYSASFLYSGVPSRFSGSGSGTDFTLTISSLQPEDAATYYCQQGYGAPFTFGQGTKVEIK

SEQ ID NO: 10635 - protein, 120 aa, Artificial Sequence
  source: /note="Description of Artificial Sequence: Synthetic polypeptide"
EVQLVESGGGLVQPGGSLRLSCAASGFTISDYWIHWVRQEPGKGLEWVAGITPAGGYEYYADSVKGRFTISADTSKNTAYLQMNSLRAEDTAVYYCARFVFFLPYAMDYWGQGTLVTVSS

SEQ ID NO: 10636 - protein, 120 aa, Artificial Sequence
  source: /note="Description of Artificial Sequence: Synthetic polypeptide"
EVQLVESGGGLVQPGGSLRLSCAASGFTISDYWIHWVRQAPGKGLEWVAGITPAGGYTYYADSVKGRFTISADTSKNTAYLQMNSLRAEDTAVYYCARFVFFLPYAMDYWGQGTLVTVSS

SEQ ID NO: 10637 - protein, 146 aa, Mus musculus
MGWSCIILFLVATATGVHSQVQLQQPGAELVKPGASVKMSCKASGYSFTSYWINWVKQRPGQGLEWIGDVHPGRGVSTYNAKFKSKATLTLDTSSSTAYMQLSSLTSEDSAVYYCSRSHGNTYWFFDVWGAGTTVTVSSATTTAPS

SEQ ID NO: 10638 - protein, 142 aa, Mus Musculus
MNFGLSLIFLVLVLKGVQCEVQLVESGGGLVKPGGSLKLSCAASGFTFSDYYMYWVRQTPEKRLEWVATISDGGSYTSYPDSVKGRFTISRDNAKNNLYLQMSSLRSEDTAMYYCARDYYGSSSYTSGFAYWGQGTLVTVSA

SEQ ID NO: 10639 - protein, 122 aa, Mus Musculus
QVQLQQPGAELVKPGASVKMSCKASGFTFSDYYINWVKQRPGQGLEWIGDISDGGSYTYNAKFKSKATLTLDTSSSTAYMQLSSLTSEDSAVYYCARDYYGSSSYTSGFAYWGAGTTVTVSS

SEQ ID NO: 10640 - protein, 122 aa, Artificial Sequence
  source: /note="Description of Artificial Sequence: Synthetic polypeptide"
QVQLVQSGAELKKPGASVKMSCKASGFTFSDYYINWVKQRPGQGLEWIGDISDGGSYTYNAKFKSRATLTLDTSISTAYMQLSSLTSEDSAVYYCARDYYGSSSYTSGFAYWGQGTTVTVSS

SEQ ID NO: 10641 - protein, 122 aa, Artificial Sequence
  source: /note="Description of Artificial Sequence: Synthetic polypeptide"
QVQLVQSGAEVKKPGASVKMSCKASGFTFSDYYINWVKQRPGQGLEWIGDISDGGSYTYNAKFKSRATLTLDTSISTAYMELSSLRSEDTAVYYCARDYYGSSSYTSGFAYWGQGTTVTVSS

SEQ ID NO: 10642 - protein, 122 aa, Artificial Sequence
  source: /note="Description of Artificial Sequence: Synthetic polypeptide"
QVQLVQSGAEVKKPGASVKVSCKASGFTFSDYYINWVRQRPGQGLEWIGDISDGGSYTYNAKFKSRATLTLDTSISTAYMELSSLRSEDTAVYYCARDYYGSSSYTSGFAYWGQGTTVTVSS

SEQ ID NO: 10643 - protein, 122 aa, Artificial Sequence
  source: /note="Description of Artificial Sequence: Synthetic polypeptide"
QVQLVQSGAEVKKPGASVKVSCKASGFTFSDYYINWVRQRPGQGLEWIGDISDGGSYTYNAKFKSRVTLTLDTSISTAYMELSSLRSEDTAVYYCARDYYGSSSYTSGFAYWGQGTTVTVSS

SEQ ID NO: 10644 - protein, 122 aa, Artificial Sequence
  source: /note="Description of Artificial Sequence: Synthetic polypeptide"
QVQLVQSGAEVKKPGASVKVSCKASGFTFSDYYINWVRQRPGQGLEWMGDISDGGSYTYNAKFKSRVTLTRDTSISTAYMELSSLRSEDTAVYYCARDYYGSSSYTSGFAYWGQGTTVTVSS

SEQ ID NO: 10645 - protein, 122 aa, Artificial Sequence
  source: /note="Description of Artificial Sequence: Synthetic polypeptide"
QVQLVQSGAEVKKPGASVKVSCKASGFTFSDYYINWVRQRPGQGLEWMGDISDGGSYTYNAKFQGRVTMTRDTSISTAYMELSSLRSEDTAVYYCARDYYGSSSYTSGFAYWGQGTTVTVSS

SEQ ID NO: 10646 - protein, 120 aa, Mus Musculus
QVQLQQPGAELVKPGASVKMSCKASGYSFTSYWINWVKQRPGQGLEWIGDVHPGRGVSTYNAKFKSKATLTLDTSSSTAYMQLSSLTSEDSAVYYCSRSHGNTYWFFDVWGAGTTVTVSS

SEQ ID NO: 10647 - protein, 120 aa, Artificial Sequence
  source: /note="Description of Artificial Sequence: Synthetic polypeptide"
QVQLVQSGAELKKPGASVKMSCKASGYSFTSYWINWVKQRPGQGLEWIGDVHPGRGVSTYNAKFKSRATLTLDTSISTAYMQLSSLTSEDSAVYYCSRSHGNTYWFFDVWGQGTTVTVSS

SEQ ID NO: 10648 - protein, 120 aa, Artificial Sequence
  source: /note="Description of Artificial Sequence: Synthetic polypeptide"
QVQLVQSGAEVKKPGASVKMSCKASGYSFTSYWINWVKQRPGQGLEWIGDVHPGRGVSTYNAKFKSRATLTLDTSISTAYMELSSLRSEDTAVYYCSRSHGNTYWFFDVWGQGTTVTVSS

SEQ ID NO: 10649 - protein, 120 aa, Artificial Sequence
  source: /note="Description of Artificial Sequence: Synthetic polypeptide"
QVQLVQSGAEVKKPGASVKVSCKASGYSFTSYWINWVRQRPGQGLEWIGDVHPGRGVSTYNAKFKSRATLTLDTSISTAYMELSSLRSEDTAVYYCSRSHGNTYWFFDVWGQGTTVTVSS

SEQ ID NO: 10650 - protein, 120 aa, Artificial Sequence
  source: /note="Description of Artificial Sequence: Synthetic polypeptide"
QVQLVQSGAEVKKPGASVKVSCKASGYSFTSYWINWVRQRPGQGLEWIGDVHPGRGVSTYNAKFKSRVTLTLDTSISTAYMELSSLRSEDTAVYYCSRSHGNTYWFFDVWGQGTTVTVSS

SEQ ID NO: 10651 - protein, 120 aa, Artificial Sequence
  source: /note="Description of Artificial Sequence: Synthetic polypeptide"
QVQLVQSGAEVKKPGASVKVSCKASGYSFTSYWINWVRQRPGQGLEWMGDVHPGRGVSTYNAKFKSRVTLTRDTSISTAYMELSSLRSEDTAVYYCSRSHGNTYWFFDVWGQGTTVTVSS

SEQ ID NO: 10652 - protein, 120 aa, Artificial Sequence
  source: /note="Description of Artificial Sequence: Synthetic polypeptide"
QVQLVQSGAEVKKPGASVKVSCKASGYSFTSYWINWVRQRPGQGLEWMGDVHPGRGVSTYNAKFQGRVTMTRDTSISTAYMELSSLRSEDTAVYYCSRSHGNTYWFFDVWGQGTTVTVSS

SEQ ID NO: 10653 - protein, 142 aa, Mus Musculus
MNFGLSLIFLVLVLKGVQCEVQLVESGGGLVKPGGSLKLSCAASGFTFSDYYMYWVRQTPEKRLEWVATISDGGSYTSYPDSVKGRFTISRDSAKNNLYLQMSSLKSEDTAMYYCARDYYGSNSYTSGFAYWGQGTLVTVSA

SEQ ID NO: 10654 - protein, 107 aa, Artificial Sequence [sequence omitted]

SEQ ID NO: 10655 - protein, 108 aa, Artificial Sequence
  source: /note="Description of Artificial Sequence: Synthetic polypeptide"
QPGLTQPPSVSVAPGQTARITCGGNNIGSKSVHWYQQKPGQAPVLVVYDDSDRPSGIPERFSGSNSGNTATLTISRVEAGDEADYYCQVWDSSSDHYVFGTGTKVTVL

SEQ ID NO: 10656 - protein, 107 aa, Artificial Sequence [sequence omitted]

SEQ ID NO: 10657 - protein, 110 aa, Artificial Sequence
  source: /note="Description of Artificial Sequence: Synthetic polypeptide"
SYVLTQPPSVSVAPGQTARITCGGNNIGSKSVHWYQQKPGQAPVLVVYDDSDRPSGIPERFSGSNSGNTATLTISRVEAGDEADYYCQVWDSSSDHWVFGGGTKLTVLGQ

SEQ ID NO: 10658 - protein, 107 aa, Artificial Sequence
  source: /note="Description of Artificial Sequence: Synthetic polypeptide"
DIQMTQSPSSLSASVGDRVTITCRASQDVSTAVAWYQQKPGKAPKLLIYSASFLYSGVPSRFSGSGSGTDFTLTISSLQPEDAATYYCQQGYGAPFTFGQGTKVEIK

SEQ ID NO: 10659 - protein, 107 aa, Artificial Sequence
  source: /note="Description of Artificial Sequence: Synthetic polypeptide"
DIQMTQSPESLSASVGDEVTITCRASQDVSTAVAWYQQKPGKAPKLLIYSASFLYSGVPSRFSGSGSGTDFTLTISSLQPEDAATYYCQQGYGAPFTFGQGTKVEIK

SEQ ID NO: 10660 - protein, 107 aa, Artificial Sequence
  source: /note="Description of Artificial Sequence: Synthetic polypeptide"
DIQMTQSPSSLSASVGDEVTITCRASQDVSTAVAWYQQKPGEAPKLLIYSASFLYSGVPSRFSGSGSGTDFTLTIESLQPEDAATYYCQQGYGAPFTFGQGTKVEIK

SEQ ID NO: 10661 - protein, 107 aa, Artificial Sequence
  source: /note="Description of Artificial Sequence: Synthetic polypeptide"
DIQMTQSPESLSASVGDEVTITCRASQDVSTAVAWYQQKPGEAPKLLIYSASFLYSGVPSRFSGSGSGTDFTLTISSLQPEDAATYYCQQGYGAPFTFGQGTKVEIK

SEQ ID NO: 10662 - protein, 107 aa, Artificial Sequence
  source: /note="Description of Artificial Sequence: Synthetic polypeptide"
DIQMTQSPSSLSASVGDRVTITCRASQDVSTAVAWYQQKPGKAPKLLIYSASFLYSGVPSRFSGSGSGTDFTLTISSLQPEDFATYYCQQGYGNPFTFGQGTKVEIK

SEQ ID NO: 10663 - protein, 107 aa, Artificial Sequence
  source: /note="Description of Artificial Sequence: Synthetic polypeptide"
DIQMTQSPSSLSASVGDRVTITCRASQDVSTAVAWYQQKPGKAPKLLIYSASFLYSGVPSRFSGSGSGTDFTLTISSLQPEDFATYYCQQGYGAPFTFGQGTKVEIK

SEQ ID NO: 10664 - protein, 107 aa, Artificial Sequence
  source: /note="Description of Artificial Sequence: Synthetic polypeptide"
DIQMTQSPSSLSASVGDRVTIDCRASQDVSTAVAWYQQKPGKAPKLLIYSASFLYSGVPSRFSGSGSGTDFTLTISSLQPEDAATYYCQQGYGAPFTFGQGTKVEIK

SEQ ID NO: 10665 - protein, 107 aa, Artificial Sequence
  source: /note="Description of Artificial Sequence: Synthetic polypeptide"
DIQMTQSPSSLSASVGDRVTITCRASQDVSTAVAWYQQKPGKAPKLLIYSASFLYSGVPSRFSGSGSGTDFTLTISSLQPEDVATYYCQQGYGNPFTFGQGTKVEIK

SEQ ID NO: 10666 - protein, 107 aa, Artificial Sequence
  source: /note="Description of Artificial Sequence: Synthetic polypeptide"
DIQMTQSPSSLSASVGDRVTITCRASQDVSTAVAWYQQKPGKAPKLLIYSASFLYSGVPSRFSGSGSGTDFTLTISSLQPEDVATYYCQQGYGAPFTFGQGTKVEIK

SEQ ID NO: 10667 - protein, 135 aa, Mus musculus
MKLPVRLLVLMFWIPASSSDVLMTQTPLSLPVSLGDQASISCRSSQSIVHSNGNTYLEWYLQKPGQSPKLLIYKVSNRFSGVPDRFSGSGSGTDFTLKISRVEAEDLGVYYCFQGSHVPFTFGSGTKLEIKRADA

SEQ ID NO: 10668 - protein, 132 aa, Mus Musculus
MDSQAQVLILLLLWVSGTCGDIVMSQSPSSLAVSTGEKVTMSCKSSQSLLNSRTRKNYLAWYQQKPGQSPKLLIYWASTRESGVPDRFTGSGSGTDFTLTISSVQAEDLAVYYCKQSYNLYTFGGGTKLEIK

SEQ ID NO: 10669 - protein, 112 aa, Mus Musculus
DVLMTQTPLSLPVSLGDQASISCRSSQSLLNSRTRKNYLEWYLQKPGQSPKLLIYWASNRFSGVPDRFSGSGSGTDFTLKISRVEAEDLGVYYCKQSYNLYTFGSGTKLEIK

SEQ ID NO: 10670 - protein, 112 aa, Artificial Sequence
  source: /note="Description of Artificial Sequence: Synthetic polypeptide"
DVLMTQSPLSLPVTLGQPASISCRSSQSLLNSRTRKNYLEWFQQKPGQSPRRLIYWASNRFSGVPDRFSGSGSGTDFTLKISRVEAEDVGVYYCKQSYNLYTFGQGTKLEIK

SEQ ID NO: 10671 - protein, 112 aa, Artificial Sequence
  source: /note="Description of Artificial Sequence: Synthetic polypeptide"
DVVMTQSPLSLPVTLGQPASISCRSSQSLLNSRTRKNYLEWFQQKPGQSPRRLIYWASNRFSGVPDRFSGSGSGTDFTLKISRVEAEDVGVYYCKQSYNLYTFGQGTKLEIK

SEQ ID NO: 10672 - protein, 112 aa, Artificial Sequence
  source: /note="Description of Artificial Sequence: Synthetic polypeptide"
DVVMTQSPLSLPVTLGQPASISCRSSQSLLNSRTRKNYLEWFQQRPGQSPRRLIYWASNRFSGVPDRFSGSGSGTDFTLKISRVEAEDVGVYYCKQSYNLYTFGQGTKLEIK

SEQ ID NO: 10673 - protein, 112 aa, Artificial Sequence
  source: /note="Description of Artificial Sequence: Synthetic polypeptide"
DVLMTQSPLSLPVTLGQPASISCRSSQSLLNSRTRKNYLEWYLQRPGQSPKLLIYWASNRFSGVPDRFSGSGSGTDFTLKISRVEAEDVGVYYCKQSYNLYTFGQGTKLEIK

SEQ ID NO: 10674 - protein, 112 aa, Artificial Sequence
  source: /note="Description of Artificial Sequence: Synthetic polypeptide"
DVLMTQSPLSLPVTLGQPASISCRSSQSLLNSRTRKNYLEWYQQRPGQSPRLLIYWASNRFSGVPDRFSGSGSGTDFTLKISRVEAEDVGVYYCKQSYNLYTFGQGTKLEIK

SEQ ID NO: 10675 - protein, 112 aa, Artificial Sequence
  source: /note="Description of Artificial Sequence: Synthetic polypeptide"
DVVMTQSPLSLPVTLGQPASISCRSSQSLLNSRTRKNYLEWYQQRPGQSPRLLIYWASNRFSGVPDRFSGSGSGTDFTLKISRVEAEDVGVYYCKQSYNLYTFGQGTKLEIK

SEQ ID NO: 10676 - protein, 112 aa, Artificial Sequence
  source: /note="Description of Artificial Sequence: Synthetic polypeptide"
DVLMTQSPLSLPVTLGQPASISCRSSQSIVHSNGNTYLEWFQQKPGQSPRRLIYKVSNRFSGVPDRFSGSGSGTDFTLKISRVEAEDVGVYYCFQGSHVPFTFGQGTKLEIK

SEQ ID NO: 10677 - protein, 112 aa, Artificial Sequence
  source: /note="Description of Artificial Sequence: Synthetic polypeptide"
DVVMTQSPLSLPVTLGQPASISCRSSQSIVHSNGNTYLEWFQQKPGQSPRRLIYKVSNRFSGVPDRFSGSGSGTDFTLKISRVEAEDVGVYYCFQGSHVPFTFGQGTKLEIK

SEQ ID NO: 10678 - protein, 112 aa, Artificial Sequence
  source: /note="Description of Artificial Sequence: Synthetic polypeptide"
DVLMTQSPLSLPVTLGQPASISCRSSQSIVHSNGNTYLEWYLQRPGQSPKLLIYKVSNRFSGVPDRFSGSGSGTDFTLKISRVEAEDVGVYYCFQGSHVPFTFGQGTKLEIK

SEQ ID NO: 10679 - protein, 112 aa, Artificial Sequence
  source: /note="Description of Artificial Sequence: Synthetic polypeptide"
DVLMTQSPLSLPVTLGQPASISCRSSQSIVHSNGNTYLEWYQQRPGQSPRLLIYKVSNRFSGVPDRFSGSGSGTDFTLKISRVEAEDVGVYYCFQGSHVPFTFGQGTKLEIK

SEQ ID NO: 10680 - protein, 112 aa, Artificial Sequence
  source: /note="Description of Artificial Sequence: Synthetic polypeptide"
DVVMTQSPLSLPVTLGQPASISCRSSQSIVHSNGNTYLEWYQQRPGQSPRLLIYKVSNRFSGVPDRFSGSGSGTDFTLKISRVEAEDVGVYYCFQGSHVPFTFGQGTKLEIK

SEQ ID NO: 10681 - protein, 132 aa, Mus Musculus
MDSQAQVLILLLLWVSGTCGDIVMSQSPSSLAVSAGEKVTMSCKSSQSLLNSRTRKNYLAWYQQKPGQSPKLLIYWASTRESGVPDRFTGSGSGTDFTLTISSVQAEDLAVYYCKQSYNLYTFGGGTKLEIK

SEQ ID NO: 10682 - protein, 131 aa, Mus Musculus
MKLPVRLLVLMFWIPASSSDVLMTQTPLSLPVSLGDQASISCRSSQSIVHSNGNTYLEWYLQKPGQSPKLLIYKVSNRFSGVPDRFSGSGSGTDFTLKISRVEAEDLGVYFCFQGSHVPLTFGAGTKLELK

SEQ ID NO: 10683 - protein, 98 aa, Artificial Sequence
  source: /note="Description of Artificial Sequence: Synthetic polypeptide"
ASTKGPSVFPLAPSSKSTSGGTAALGCLVKDYFPEPVTVSWNSGALTSGVHTFPAVLQSSGLYSLSSVVTVPSSSLGTQTYICNVNHKPSNTKVDKKV

SEQ ID NO: 10684 - protein, 110 aa, Artificial Sequence
  source: /note="Description of Artificial Sequence: Synthetic polypeptide"
APEAAGAPSVFLFPPKPKDTLMISRTPEVTCVVVDVSHEDPEVKFNWYVDGVEVHNAKTKPREEQYNSTYRVVSVLTVLHQDWLNGKEYKCKVSNKALPAPIEKTISKAK

SEQ ID NO: 10685 - protein, 107 aa, Artificial Sequence
  source: /note="Description of Artificial Sequence: Synthetic polypeptide"
GQPREPQVYTLPPSREEMTKNQVSLTCLVKGFYPSDIAVEWESNGQPENNYKTTPPVLDSDGSFFLYSKLTVDKSRWQQGNVFSCSVMHEALHNHYTQKSLSLSPGK

SEQ ID NO: 10686 - protein, 448 aa, Artificial Sequence
  source: /note="Description of Artificial Sequence: Synthetic polypeptide"
EVQLVQSGAEVKKPGASVKVSCKASGYTFTGYYMHWVRQAPGQGLEWMGWINPNSGATNFPQKFQGRVTMTRDTSITTAYMDLSRLRSDDTAVYYCARESGDDAFDIWGQGTMVTVSSASTKGPSVFPLAPSSKSTSGGTAALGCLVKDYFPEPVTVSWNSGALTSGVHTFPAVLQSSGLYSLSSVVTVPSSSLGTQTYICNVNHKPSNTKVDKKVEPKSCDKTHTCPPCPAPEAAGAPSVFLFPPKPKDTLMISRTPEVTCVVVDVSHEDPEVKFNWYVDGVEVHNAKTKPREEQYNSTYRVVSVLTVLHQDWLNGKEYKCKVSNKALPAPIEKTISKAKGQPREPQVYTLPPSREEMTKNQVSLTCLVKGFYPSDIAVEWESNGQPENNYKTTPPVLDSDGSFFLYSKLTVDKSRWQQGNVFSCSVMHEALHNHYTQKSLSLSPGK

SEQ ID NO: 10687 - protein, 448 aa, Artificial Sequence
  source: /note="Description of Artificial Sequence: Synthetic polypeptide"
EVQLVQSGAEVKKPGASVKVSCKASGYTFTGYDMHWVRQAPGQGLEWMGWINPNSGATNFPQKFQGRVTMTRDTSITTAYMDLSRLRSDDTAVYYCARESGDDAFDIWGQGTMVTVSSASTKGPSVFPLAPSSKSTSGGTAALGCLVKDYFPEPVTVSWNSGALTSGVHTFPAVLQSSGLYSLSSVVTVPSSSLGTQTYICNVNHKPSNTKVDKKVEPKSCDKTHTCPPCPAPEAAGAPSVFLFPPKPKDTLMISRTPEVTCVVVDVSHEDPEVKFNWYVDGVEVHNAKTKPREEQYNSTYRVVSVLTVLHQDWLNGKEYKCKVSNKALPAPIEKTISKAKGQPREPQVYTLPPSREEMTKNQVSLTCLVKGFYPSDIAVEWESNGQPENNYKTTPPVLDSDGSFFLYSKLTVDKSRWQQGNVFSCSVMHEALHNHYTQKSLSLSPGK

SEQ ID NO: 10688 - protein, 448 aa, Artificial Sequence
  source: /note="Description of Artificial Sequence: Synthetic polypeptide"
EVQLVQSGAEVKKPGASVKVSCKASGYTFTGYYMHWVRQAPGQGLEWMGWINPKSGATNFPQKFQGRVTMTRDTSITTAYMDLSRLRSDDTAVYYCARESGDDAFDIWGQGTMVTVSSASTKGPSVFPLAPSSKSTSGGTAALGCLVKDYFPEPVTVSWNSGALTSGVHTFPAVLQSSGLYSLSSVVTVPSSSLGTQTYICNVNHKPSNTKVDKKVEPKSCDKTHTCPPCPAPEAAGAPSVFLFPPKPKDTLMISRTPEVTCVVVDVSHEDPEVKFNWYVDGVEVHNAKTKPREEQYNSTYRVVSVLTVLHQDWLNGKEYKCKVSNKALPAPIEKTISKAKGQPREPQVYTLPPSREEMTKNQVSLTCLVKGFYPSDIAVEWESNGQPENNYKTTPPVLDSDGSFFLYSKLTVDKSRWQQGNVFSCSVMHEALHNHYTQKSLSLSPGK

SEQ ID NO: 10689 - protein, 448 aa, Artificial Sequence
  source: /note="Description of Artificial Sequence: Synthetic polypeptide"
EVQLVQSGAEVKKPGASVKVSCKASGYTFTGYYMHWVRQAPGQGLEWMGWINPRSGATNFPQKFQGRVTMTRDTSITTAYMDLSRLRSDDTAVYYCARESGDDAFDIWGQGTMVTVSSASTKGPSVFPLAPSSKSTSGGTAALGCLVKDYFPEPVTVSWNSGALTSGVHTFPAVLQSSGLYSLSSVVTVPSSSLGTQTYICNVNHKPSNTKVDKKVEPKSCDKTHTCPPCPAPEAAGAPSVFLFPPKPKDTLMISRTPEVTCVVVDVSHEDPEVKFNWYVDGVEVHNAKTKPREEQYNSTYRVVSVLTVLHQDWLNGKEYKCKVSNKALPAPIEKTISKAKGQPREPQVYTLPPSREEMTKNQVSLTCLVKGFYPSDIAVEWESNGQPENNYKTTPPVLDSDGSFFLYSKLTVDKSRWQQGNVFSCSVMHEALHNHYTQKSLSLSPGK

SEQ ID NO: 10690 - protein, 448 aa, Artificial Sequence
  source: /note="Description of Artificial Sequence: Synthetic polypeptide"
EVQLVQSGAEVKKPGASVKVSCKASGYTFTGYYMHWVRQAPGQGLEWMGAIDPKSGTTMFPQKFQGRVTMTRDTSITTAYMDLSRLRSDDTAVYYCARESGDDAFDIWGQGTMVTVSSASTKGPSVFPLAPSSKSTSGGTAALGCLVKDYFPEPVTVSWNSGALTSGVHTFPAVLQSSGLYSLSSVVTVPSSSLGTQTYICNVNHKPSNTKVDKKVEPKSCDKTHTCPPCPAPEAAGAPSVFLFPPKPKDTLMISRTPEVTCVVVDVSHEDPEVKFNWYVDGVEVHNAKTKPREEQYNSTYRVVSVLTVLHQDWLNGKEYKCKVSNKALPAPIEKTISKAKGQPREPQVYTLPPSREEMTKNQVSLTCLVKGFYPSDIAVEWESNGQPENNYKTTPPVLDSDGSFFLYSKLTVDKSRWQQGNVFSCSVMHEALHNHYTQKSLSLSPGK

SEQ ID NO: 10691 - protein, 448 aa, Artificial Sequence
  source: /note="Description of Artificial Sequence: Synthetic polypeptide"
EVQLVQSGAEVKKPGASVKVSCKASGYTFTGYYMHWVRQAPGQGLEWMGAIDPKLGITIFPQKFQGRVTMTRDTSITTAYMDLSRLRSDDTAVYYCARESGDDAFDIWGQGTMVTVSSASTKGPSVFPLAPSSKSTSGGTAALGCLVKDYFPEPVTVSWNSGALTSGVHTFPAVLQSSGLYSLSSVVTVPSSSLGTQTYICNVNHKPSNTKVDKKVEPKSCDKTHTCPPCPAPEAAGAPSVFLFPPKPKDTLMISRTPEVTCVVVDVSHEDPEVKFNWYVDGVEVHNAKTKPREEQYNSTYRVVSVLTVLHQDWLNGKEYKCKVSNKALPAPIEKTISKAKGQPREPQVYTLPPSREEMTKNQVSLTCLVKGFYPSDIAVEWESNGQPENNYKTTPPVLDSDGSFFLYSKLTVDKSRWQQGNVFSCSVMHEALHNHYTQKSLSLSPGK

SEQ ID NO: 10692 - protein, 448 aa, Artificial Sequence
  source: /note="Description of Artificial Sequence: Synthetic polypeptide"
EVQLVQSGAEVKKPGASVKVSCKASGYTFTGYYMHWVRQAPGQGLEWMGMINPKSGFTAFPQKFQGRVTMTRDTSITTAYMDLSRLRSDDTAVYYCARESGDDAFDIWGQGTMVTVSSASTKGPSVFPLAPSSKSTSGGTAALGCLVKDYFPEPVTVSWNSGALTSGVHTFPAVLQSSGLYSLSSVVTVPSSSLGTQTYICNVNHKPSNTKVDKKVEPKSCDKTHTCPPCPAPEAAGAPSVFLFPPKPKDTLMISRTPEVTCVVVDVSHEDPEVKFNWYVDGVEVHNAKTKPREEQYNSTYRVVSVLTVLHQDWLNGKEYKCKVSNKALPAPIEKTISKAKGQPREPQVYTLPPSREEMTKNQVSLTCLVKGFYPSDIAVEWESNGQPENNYKTTPPVLDSDGSFFLYSKLTVDKSRWQQGNVFSCSVMHEALHNHYTQKSLSLSPGK

SEQ ID NO: 10693 - protein, 448 aa, Artificial Sequence
  source: /note="Description of Artificial Sequence: Synthetic polypeptide"
EVQLVQSGAEVKKPGASVKVSCKASGYTFTGYYMHWVRQAPGQGLEWMGAIDPKHGFTIFPQKFQGRVTMTRDTSITTAYMDLSRLRSDDTAVYYCARESGDDAFDIWGQGTMVTVSSASTKGPSVFPLAPSSKSTSGGTAALGCLVKDYFPEPVTVSWNSGALTSGVHTFPAVLQSSGLYSLSSVVTVPSSSLGTQTYICNVNHKPSNTKVDKKVEPKSCDKTHTCPPCPAPEAAGAPSVFLFPPKPKDTLMISRTPEVTCVVVDVSHEDPEVKFNWYVDGVEVHNAKTKPREEQYNSTYRVVSVLTVLHQDWLNGKEYKCKVSNKALPAPIEKTISKAKGQPREPQVYTLPPSREEMTKNQVSLTCLVKGFYPSDIAVEWESNGQPENNYKTTPPVLDSDGSFFLYSKLTVDKSRWQQGNVFSCSVMHEALHNHYTQKSLSLSPGK

SEQ ID NO: 10694 - protein, 448 aa, Artificial Sequence
  source: /note="Description of Artificial Sequence: Synthetic polypeptide"
EVQLVQSGAEVKKPGASVKVSCKASGYTFTGYYMHWVRQAPGQGLEWMGWINPKDGDTEFPQKFQGRVTMTRDTSITTAYMDLSRLRSDDTAVYYCARESGDDAFDIWGQGTMVTVSSASTKGPSVFPLAPSSKSTSGGTAALGCLVKDYFPEPVTVSWNSGALTSGVHTFPAVLQSSGLYSLSSVVTVPSSSLGTQTYICNVNHKPSNTKVDKKVEPKSCDKTHTCPPCPAPEAAGAPSVFLFPPKPKDTLMISRTPEVTCVVVDVSHEDPEVKFNWYVDGVEVHNAKTKPREEQYNSTYRVVSVLTVLHQDWLNGKEYKCKVSNKALPAPIEKTISKAKGQPREPQVYTLPPSREEMTKNQVSLTCLVKGFYPSDIAVEWESNGQPENNYKTTPPVLDSDGSFFLYSKLTVDKSRWQQGNVFSCSVMHEALHNHYTQKSLSLSPGK

SEQ ID NO: 10695 - protein, 448 aa, Artificial Sequence
  source: /note="Description of Artificial Sequence: Synthetic polypeptide"
EVQLVQSGAEVKKPGASVKVSCKASGYTFTGYYMHWVRQAPGQGLEWMGWINPRNGITSFPQKFQGRVTMTRDTSITTAYMDLSRLRSDDTAVYYCARESGDDAFDIWGQGTMVTVSSASTKGPSVFPLAPSSKSTSGGTAALGCLVKDYFPEPVTVSWNSGALTSGVHTFPAVLQSSGLYSLSSVVTVPSSSLGTQTYICNVNHKPSNTKVDKKVEPKSCDKTHTCPPCPAPEAAGAPSVFLFPPKPKDTLMISRTPEVTCVVVDVSHEDPEVKFNWYVDGVEVHNAKTKPREEQYNSTYRVVSVLTVLHQDWLNGKEYKCKVSNKALPAPIEKTISKAKGQPREPQVYTLPPSREEMTKNQVSLTCLVKGFYPSDIAVEWESNGQPENNYKTTPPVLDSDGSFFLYSKLTVDKSRWQQGNVFSCSVMHEALHNHYTQKSLSLSPGK

SEQ ID NO: 10696 - protein, 448 aa, Artificial Sequence
  source: /note="Description of Artificial Sequence: Synthetic polypeptide"
EVQLVQSGAEVKKPGASVKVSCKASGYTFRGYAMHWVRQAPGQGLEWMGWINPRSGVTEFPQKFQGRVTMTRDTSITTAYMDLSRLRSDDTAVYYCARESGDDAFDIWGQGTMVTVSSASTKGPSVFPLAPSSKSTSGGTAALGCLVKDYFPEPVTVSWNSGALTSGVHTFPAVLQSSGLYSLSSVVTVPSSSLGTQTYICNVNHKPSNTKVDKKVEPKSCDKTHTCPPCPAPEAAGAPSVFLFPPKPKDTLMISRTPEVTCVVVDVSHEDPEVKFNWYVDGVEVHNAKTKPREEQYNSTYRVVSVLTVLHQDWLNGKEYKCKVSNKALPAPIEKTISKAKGQPREPQVYTLPPSREEMTKNQVSLTCLVKGFYPSDIAVEWESNGQPENNYKTTPPVLDSDGSFFLYSKLTVDKSRWQQGNVFSCSVMHEALHNHYTQKSLSLSPGK

SEQ ID NO: 10697 - protein, 448 aa, Artificial Sequence
  source: /note="Description of Artificial Sequence: Synthetic polypeptide"
EVQLVQSGAEVKKPGASVKVSCKASGYTFRGYAMHWVRQAPGQGLEWMGWIDPRTGLTKFPQKFQGRVTMTRDTSITTAYMDLSRLRSDDTAVYYCARESGDDAFDIWGQGTMVTVSSASTKGPSVFPLAPSSKSTSGGTAALGCLVKDYFPEPVTVSWNSGALTSGVHTFPAVLQSSGLYSLSSVVTVPSSSLGTQTYICNVNHKPSNTKVDKKVEPKSCDKTHTCPPCPAPEAAGAPSVFLFPPKPKDTLMISRTPEVTCVVVDVSHEDPEVKFNWYVDGVEVHNAKTKPREEQYNSTYRVVSVLTVLHQDWLNGKEYKCKVSNKALPAPIEKTISKAKGQPREPQVYTLPPSREEMTKNQVSLTCLVKGFYPSDIAVEWESNGQPENNYKTTPPVLDSDGSFFLYSKLTVDKSRWQQGNVFSCSVMHEALHNHYTQKSLSLSPGK

SEQ ID NO: 10698 - protein, 448 aa, Artificial Sequence
  source: /note="Description of Artificial Sequence: Synthetic polypeptide"
EVQLVQSGAEVKKPGASVKVSCKASGYTFTGYYMHWVRQAPGQGLEWMGWINPKNGDTEFPQKFQGRVTMTRDTSISTAYMDLSRLRSDDTAVYYCARESGDDAFDIWGQGTMVTVSSASTKGPSVFPLAPSSKSTSGGTAALGCLVKDYFPEPVTVSWNSGALTSGVHTFPAVLQSSGLYSLSSVVTVPSSSLGTQTYICNVNHKPSNTKVDKKVEPKSCDKTHTCPPCPAPEAAGAPSVFLFPPKPKDTLMISRTPEVTCVVVDVSHEDPEVKFNWYVDGVEVHNAKTKPREEQYNSTYRVVSVLTVLHQDWLNGKEYKCKVSNKALPAPIEKTISKAKGQPREPQVYTLPPSREEMTKNQVSLTCLVKGFYPSDIAVEWESNGQPENNYKTTPPVLDSDGSFFLYSKLTVDKSRWQQGNVFSCSVMHEALHNHYTQKSLSLSPGK

SEQ ID NO: 10699 - protein, 448 aa, Artificial Sequence
  source: /note="Description of Artificial Sequence: Synthetic polypeptide"
EVQLVQSGAEVKKPGASVKVSCKASGYTFTGYYMHWVRQAPGQGLEWMGWINPKNGDTEFPQKFQGRVTMTRDTSITTAYMELSRLRSDDTAVYYCARESGDDAFDIWGQGTMVTVSSASTKGPSVFPLAPSSKSTSGGTAALGCLVKDYFPEPVTVSWNSGALTSGVHTFPAVLQSSGLYSLSSVVTVPSSSLGTQTYICNVNHKPSNTKVDKKVEPKSCDKTHTCPPCPAPEAAGAPSVFLFPPKPKDTLMISRTPEVTCVVVDVSHEDPEVKFNWYVDGVEVHNAKTKPREEQYNSTYRVVSVLTVLHQDWLNGKEYKCKVSNKALPAPIEKTISKAKGQPREPQVYTLPPSREEMTKNQVSLTCLVKGFYPSDIAVEWESNGQPENNYKTTPPVLDSDGSFFLYSKLTVDKSRWQQGNVFSCSVMHEALHNHYTQKSLSLSPGK

SEQ ID NO: 10700 - protein, 448 aa, Artificial Sequence
  source: /note="Description of Artificial Sequence: Synthetic polypeptide"
EVQLVQSGAEVKKPGASVKVSCKASGYTFTGYYMHWVRQAPGQGLEWMGWINPKNGDTEFPQKFQGRVTMTRDTSISTAYMELSRLRSDDTAVYYCARESGDDAFDIWGQGTMVTVSSASTKGPSVFPLAPSSKSTSGGTAALGCLVKDYFPEPVTVSWNSGALTSGVHTFPAVLQSSGLYSLSSVVTVPSSSLGTQTYICNVNHKPSNTKVDKKVEPKSCDKTHTCPPCPAPEAAGAPSVFLFPPKPKDTLMISRTPEVTCVVVDVSHEDPEVKFNWYVDGVEVHNAKTKPREEQYNSTYRVVSVLTVLHQDWLNGKEYKCKVSNKALPAPIEKTISKAKGQPREPQVYTLPPSREEMTKNQVSLTCLVKGFYPSDIAVEWESNGQPENNYKTTPPVLDSDGSFFLYSKLTVDKSRWQQGNVFSCSVMHEALHNHYTQKSLSLSPGK

SEQ ID NO: 10701 - protein, 448 aa, Artificial Sequence
  source: /note="Description of Artificial Sequence: Synthetic polypeptide"
QVQLVQSGAEVKKPGASVKVSCKASGYTFTGYYMHWVRQAPGQGLEWMGWINPKNGDTEFPQKFQGRVTMTRDTSITTAYMDLSRLRSDDTAVYYCARESGDDAFDIWGQGTMVTVSSASTKGPSVFPLAPSSKSTSGGTAALGCLVKDYFPEPVTVSWNSGALTSGVHTFPAVLQSSGLYSLSSVVTVPSSSLGTQTYICNVNHKPSNTKVDKKVEPKSCDKTHTCPPCPAPEAAGAPSVFLFPPKPKDTLMISRTPEVTCVVVDVSHEDPEVKFNWYVDGVEVHNAKTKPREEQYNSTYRVVSVLTVLHQDWLNGKEYKCKVSNKALPAPIEKTISKAKGQPREPQVYTLPPSREEMTKNQVSLTCLVKGFYPSDIAVEWESNGQPENNYKTTPPVLDSDGSFFLYSKLTVDKSRWQQGNVFSCSVMHEALHNHYTQKSLSLSPGK

SEQ ID NO: 10702 - protein, 448 aa, Artificial Sequence
  source: /note="Description of Artificial Sequence: Synthetic polypeptide"
QVQLVQSGAEVKKPGASVKVSCKASGYTFTGYYMHWVRQAPGQGLEWMGWINPKNGDTEFPQKFQGRVTMTRDTSISTAYMDLSRLRSDDTAVYYCARESGDDAFDIWGQGTMVTVSSASTKGPSVFPLAPSSKSTSGGTAALGCLVKDYFPEPVTVSWNSGALTSGVHTFPAVLQSSGLYSLSSVVTVPSSSLGTQTYICNVNHKPSNTKVDKKVEPKSCDKTHTCPPCPAPEAAGAPSVFLFPPKPKDTLMISRTPEVTCVVVDVSHEDPEVKFNWYVDGVEVHNAKTKPREEQYNSTYRVVSVLTVLHQDWLNGKEYKCKVSNKALPAPIEKTISKAKGQPREPQVYTLPPSREEMTKNQVSLTCLVKGFYPSDIAVEWESNGQPENNYKTTPPVLDSDGSFFLYSKLTVDKSRWQQGNVFSCSVMHEALHNHYTQKSLSLSPGK

SEQ ID NO: 10703 - protein, 448 aa, Artificial Sequence
  source: /note="Description of Artificial Sequence: Synthetic polypeptide"
QVQLVQSGAEVKKPGASVKVSCKASGYTFTGYYMHWVRQAPGQGLEWMGWINPKNGDTEFPQKFQGRVTMTRDTSITTAYMELSRLRSDDTAVYYCARESGDDAFDIWGQGTMVTVSSASTKGPSVFPLAPSSKSTSGGTAALGCLVKDYFPEPVTVSWNSGALTSGVHTFPAVLQSSGLYSLSSVVTVPSSSLGTQTYICNVNHKPSNTKVDKKVEPKSCDKTHTCPPCPAPEAAGAPSVFLFPPKPKDTLMISRTPEVTCVVVDVSHEDPEVKFNWYVDGVEVHNAKTKPREEQYNSTYRVVSVLTVLHQDWLNGKEYKCKVSNKALPAPIEKTISKAKGQPREPQVYTLPPSREEMTKNQVSLTCLVKGFYPSDIAVEWESNGQPENNYKTTPPVLDSDGSFFLYSKLTVDKSRWQQGNVFSCSVMHEALHNHYTQKSLSLSPGK

SEQ ID NO: 10704 - protein, 448 aa, Artificial Sequence
  source: /note="Description of Artificial Sequence: Synthetic polypeptide"
QVQLVQSGAEVKKPGASVKVSCKASGYTFTGYYMHWVRQAPGQGLEWMGWINPKNGDTEFPQKFQGRVTMTRDTSISTAYMELSRLRSDDTAVYYCARESGDDAFDIWGQGTMVTVSSASTKGPSVFPLAPSSKSTSGGTAALGCLVKDYFPEPVTVSWNSGALTSGVHTFPAVLQSSGLYSLSSVVTVPSSSLGTQTYICNVNHKPSNTKVDKKVEPKSCDKTHTCPPCPAPEAAGAPSVFLFPPKPKDTLMISRTPEVTCVVVDVSHEDPEVKFNWYVDGVEVHNAKTKPREEQYNSTYRVVSVLTVLHQDWLNGKEYKCKVSNKALPAPIEKTISKAKGQPREPQVYTLPPSREEMTKNQVSLTCLVKGFYPSDIAVEWESNGQPENNYKTTPPVLDSDGSFFLYSKLTVDKSRWQQGNVFSCSVMHEALHNHYTQKSLSLSPGK

SEQ ID NO: 10705 - protein, 448 aa, Artificial Sequence
  source: /note="Description of Artificial Sequence: Synthetic polypeptide"
EVQLVQSGAEVKKPGASVKVSCKASGYTFTGYYMHWVRQAPGQGLEWMGWINPKNGDTEFPQKFQGRVTMTRDTSITTAYMDLSRLRSDDTAVYYCARESGDDAFDIWGQGTMVTVSSASTKGPSVFPLAPSSKSTSGGTAALGCLVKDYFPEPVTVSWNSGALTSGVHTFPAVLQSSGLYSLSSVVTVPSSSLGTQTYICNVNHKPSNTKVDKKVEPKSCDKTHTCPPCPAPEAAGAPSVFLFPPKPKDTLMISRTPEVTCVVVDVSHEDPEVKFNWYVDGVEVHNAKTKPREEQYNSTYRVVSVLTVLHQDWLNGKEYKCKVSNKALPAPIEKTISKAKGQPREPQVYTLPPSREEMTKNQVSLTCLVKGFYPSDIAVEWESNGQPENNYKTTPPVLDSDGSFFLYSKLTVDKSRWQQGNVFSCSVMHEALHNHYTQKSLSLSPGK

SEQ ID NO: 10706 - protein, 212 aa, Artificial Sequence
  source: /note="Description of Artificial Sequence: Synthetic polypeptide"
DIVMTQSPSSLSASVGDRVTITCRASQSISSYLNWYQQKPGKAPKLLIYAASSLQSGVPSRFSGSGSGTDFTLTISSLQPEDFATYYCQQSVGLFFGGGTKVEIKRTVAAPSVFIFPPSDEQLKSGTASVVCLLNNFYPREAKVQWKVDNALQSGNSQESVTEQDSKDSTYSLSSTLTLSKADYEKHKVYACEVTHQGLSSPVTKSFNRGEC

SEQ ID NO: 10707 - protein, 212 aa, Artificial Sequence
  source: /note="Description of Artificial Sequence: Synthetic polypeptide"
DIVMTQSPSSLSASVGDRVTITCRASQSISSYLNWYQQKPGKAPKLLIYAASSLQSGVPSRFSGSGSGTDFTLTISSLQPEDFATYYCQQSYSTSFGGGTKVEIKRTVAAPSVFIFPPSDEQLKSGTASVVCLLNNFYPREAKVQWKVDNALQSGNSQESVTEQDSKDSTYSLSSTLTLSKADYEKHKVYACEVTHQGLSSPVTKSFNRGEC

SEQ ID NO: 10708 - protein, 212 aa, Artificial Sequence
  source: /note="Description of Artificial Sequence: Synthetic polypeptide"
DIVMTQSPSSLSASVGDRVTITCRASQKISSYLNWYQQKPGKAPKLLIYAASSLQSGVPSRFSGSGSGTDFTLTISSLQPEDFATYYCQQSYSTSFGGGTKVEIKRTVAAPSVFIFPPSDEQLKSGTASVVCLLNNFYPREAKVQWKVDNALQSGNSQESVTEQDSKDSTYSLSSTLTLSKADYEKHKVYACEVTHQGLSSPVTKSFNRGEC

SEQ ID NO: 10709 - protein, 212 aa, Artificial Sequence
  source: /note="Description of Artificial Sequence: Synthetic polypeptide"
DIVMTQSPSSLSASVGDRVTITCRASQRISSYLNWYQQKPGKAPKLLIYAASSLQSGVPSRFSGSGSGTDFTLTISSLQPEDFATYYCQQSYSTSFGGGTKVEIKRTVAAPSVFIFPPSDEQLKSGTASVVCLLNNFYPREAKVQWKVDNALQSGNSQESVTEQDSKDSTYSLSSTLTLSKADYEKHKVYACEVTHQGLSSPVTKSFNRGEC

SEQ ID NO: 10710 - protein, 212 aa, Artificial Sequence
  source: /note="Description of Artificial Sequence: Synthetic polypeptide"
DIVMTQSPSSLSASVGDRVTITCRASQSISSYLNWYQQKPGKAPKLLIYAASSLQDGVPSRFSGSGSGTDFTLTISSLQPEDFATYYCQQSYSTSFGGGTKVEIKRTVAAPSVFIFPPSDEQLKSGTASVVCLLNNFYPREAKVQWKVDNALQSGNSQESVTEQDSKDSTYSLSSTLTLSKADYEKHKVYACEVTHQGLSSPVTKSFNRGEC

SEQ ID NO: 10711 - protein, 212 aa, Artificial Sequence
  source: /note="Description of Artificial Sequence: Synthetic polypeptide"
DIVMTQSPSSLSASVGDRVTITCRASQSISSYLNWYQQKPGKAPKLLIYAASSLQEGVPSRFSGSGSGTDFTLTISSLQPEDFATYYCQQSYSTSFGGGTKVEIKRTVAAPSVFIFPPSDEQLKSGTASVVCLLNNFYPREAKVQWKVDNALQSGNSQESVTEQDSKDSTYSLSSTLTLSKADYEKHKVYACEVTHQGLSSPVTKSFNRGEC

SEQ ID NO: 10712 - protein, 212 aa, Artificial Sequence
  source: /note="Description of Artificial Sequence: Synthetic polypeptide"
DIVMTQSPSSLSASVGDRVTITCRASQSISSYLNWYQQKPGKAPKLLIYAASSLQYGVPSRFSGSGSGTDFTLTISSLQPEDFATYYCQQSYSTSFGGGTKVEIKRTVAAPSVFIFPPSDEQLKSGTASVVCLLNNFYPREAKVQWKVDNALQSGNSQESVTEQDSKDSTYSLSSTLTLSKADYEKHKVYACEVTHQGLSSPVTKSFNRGEC

SEQ ID NO: 10713 - protein, 212 aa, Artificial Sequence
  source: /note="Description of Artificial Sequence: Synthetic polypeptide"
DIVMTQSPSSLSASVGDRVTITCRASQSISSYLNWYQQKPGKAPKLLIYAASSLQSGVPSRFSGSGSGTDFTLTISSLQPEDFATYYCQQSVGLSFGGGTKVEIKRTVAAPSVFIFPPSDEQLKSGTASVVCLLNNFYPREAKVQWKVDNALQSGNSQESVTEQDSKDSTYSLSSTLTLSKADYEKHKVYACEVTHQGLSSPVTKSFNRGEC

SEQ ID NO: 10714 - protein, 212 aa, Artificial Sequence
  source: /note="Description of Artificial Sequence: Synthetic polypeptide"
DIVMTQSPSSLSASVGDRVTITCRASQSISSYLNWYQQKPGKAPKLLIYAASSLQSGVPSRFSGSGSGTDFTLTISSLQPEDFATYYCQQSLELGFGGGTKVEIKRTVAAPSVFIFPPSDEQLKSGTASVVCLLNNFYPREAKVQWKVDNALQSGNSQESVTEQDSKDSTYSLSSTLTLSKADYEKHKVYACEVTHQGLSSPVTKSFNRGEC

SEQ ID NO: 10715 - protein, 212 aa, Artificial Sequence
  source: /note="Description of Artificial Sequence: Synthetic polypeptide"
DIVMTQSPSSLSASVGDRVTITCRASQSISSYLNWYQQKPGKAPKLLIYAASSLQYGVPSRFSGSGSGTDFTLTISSLQPEDFATYYCQQSLELGFGGGTKVEIKRTVAAPSVFIFPPSDEQLKSGTASVVCLLNNFYPREAKVQWKVDNALQSGNSQESVTEQDSKDSTYSLSSTLTLSKADYEKHKVYACEVTHQGLSSPVTKSFNRGEC

SEQ ID NO: 10716 - protein, 212 aa, Artificial Sequence
  source: /note="Description of Artificial Sequence: Synthetic polypeptide"
DIVMTQSPSSLSASVGDRVTITCRASQSISSYLNWYQQKPGKAPKLLIYAASSLQYGVPSRFSGSGSGTDFTLTISSLQPEDFATYYCQQSVGLSFGGGTKVEIKRTVAAPSVFIFPPSDEQLKSGTASVVCLLNNFYPREAKVQWKVDNALQSGNSQESVTEQDSKDSTYSLSSTLTLSKADYEKHKVYACEVTHQGLSSPVTKSFNRGEC

SEQ ID NO: 10717 - protein, 212 aa, Artificial Sequence
  source: /note="Description of Artificial Sequence: Synthetic polypeptide"
DIVMTQSPSSLSASVGDRVTITCRASQSISSYLNWYQQKPGKAPKLLIYAASSLQYGVPSRFSGSGSGTDFTLTISSLQPEDFATYYCQQSVGLFFGGGTKVEIKRTVAAPSVFIFPPSDEQLKSGTASVVCLLNNFYPREAKVQWKVDNALQSGNSQESVTEQDSKDSTYSLSSTLTLSKADYEKHKVYACEVTHQGLSSPVTKSFNRGEC

SEQ ID NO: 10718 - protein, 212 aa, Artificial Sequence
  source: /note="Description of Artificial Sequence: Synthetic polypeptide"
DIVMTQSPSSLSASVGDRVTITCRASQKISSYLNWYQQKPGKAPKLLIYAASSLQYGVPSRFSGSGSGTDFTLTISSLQPEDFATYYCQQSYSTSFGGGTKVEIKRTVAAPSVFIFPPSDEQLKSGTASVVCLLNNFYPREAKVQWKVDNALQSGNSQESVTEQDSKDSTYSLSSTLTLSKADYEKHKVYACEVTHQGLSSPVTKSFNRGEC

SEQ ID NO: 10719 - protein, 212 aa, Artificial Sequence
  source: /note="Description of Artificial Sequence: Synthetic polypeptide"
DIVMTQSPSSLSASVGDRVTITCRASQKISSYLNWYQQKPGKAPKLLIYAASSLQSGVPSRFSGSGSGTDFTLTISSLQPEDFATYYCQQSLELGFGGGTKVEIKRTVAAPSVFIFPPSDEQLKSGTASVVCLLNNFYPREAKVQWKVDNALQSGNSQESVTEQDSKDSTYSLSSTLTLSKADYEKHKVYACEVTHQGLSSPVTKSFNRGEC

SEQ ID NO: 10720 - protein, 212 aa, Artificial Sequence
  source: /note="Description of Artificial Sequence: Synthetic polypeptide"
DIVMTQSPSSLSASVGDRVTITCRASQKISSYLNWYQQKPGKAPKLLIYAASSLQSGVPSRFSGSGSGTDFTLTISSLQPEDFATYYCQQSVGLFFGGGTKVEIKRTVAAPSVFIFPPSDEQLKSGTASVVCLLNNFYPREAKVQWKVDNALQSGNSQESVTEQDSKDSTYSLSSTLTLSKADYEKHKVYACEVTHQGLSSPVTKSFNRGEC

SEQ ID NO: 10721 - protein, 212 aa, Artificial Sequence
  source: /note="Description of Artificial Sequence: Synthetic polypeptide"
DIVMTQSPSSLSASVGDRVTITCRASQKISSYLNWYQQKPGKAPKLLIYAASSLQYGVPSRFSGSGSGTDFTLTISSLQPEDFATYYCQQSLELGFGGGTKVEIKRTVAAPSVFIFPPSDEQLKSGTASVVCLLNNFYPREAKVQWKVDNALQSGNSQESVTEQDSKDSTYSLSSTLTLSKADYEKHKVYACEVTHQGLSSPVTKSFNRGEC

SEQ ID NO: 10722 - protein, 212 aa, Artificial Sequence
  source: /note="Description of Artificial Sequence: Synthetic polypeptide"
DIVMTQSPSSLSASVGDRVTITCRASQKISSYLNWYQQKPGKAPKLLIYAASSLQYGVPSRFSGSGSGTDFTLTISSLQPEDFATYYCQQSVGLSFGGGTKVEIKRTVAAPSVFIFPPSDEQLKSGTASVVCLLNNFYPREAKVQWKVDNALQSGNSQESVTEQDSKDSTYSLSSTLTLSKADYEKHKVYACEVTHQGLSSPVTKSFNRGEC

SEQ ID NO: 10723 - protein, 212 aa, Artificial Sequence
  source: /note="Description of Artificial Sequence: Synthetic polypeptide"
DIVMTQSPSSLSASVGDRVTITCRASQKISSYLNWYQQKPGKAPKLLIYAASSLQYGVPSRFSGSGSGTDFTLTISSLQPEDFATYYCQQSVGLFFGGGTKVEIKRTVAAPSVFIFPPSDEQLKSGTASVVCLLNNFYPREAKVQWKVDNALQSGNSQESVTEQDSKDSTYSLSSTLTLSKADYEKHKVYACEVTHQGLSSPVTKSFNRGEC

SEQ ID NO: 10724 - protein, 212 aa, Artificial Sequence
  source: /note="Description of Artificial Sequence: Synthetic polypeptide"
DIQMTQSPSSLSASVGDRVTITCRASQSISSYLNWYQQKPGKAPKLLIYAASSLQSGVPSRFSGSGSGTDFTLTISSLQPEDFATYYCQQSVGLFFGGGTKVEIKRTVAAPSVFIFPPSDEQLKSGTASVVCLLNNFYPREAKVQWKVDNALQSGNSQESVTEQDSKDSTYSLSSTLTLSKADYEKHKVYACEVTHQGLSSPVTKSFNRGEC

SEQ ID NO: 10725 - protein, 118 aa, Artificial Sequence
  source: /note="Description of Artificial Sequence: Synthetic polypeptide"
EVQLVQSGAEVKKPGASVKVSCKASGYTFTGYYMHWVRQAPGQGLEWMGWINPKNGDTEFPQKFQGRVTMTRDTSITTAYMDLSRLRSDDTAVYYCARESGDDAFDIWGQGTMVTVSS

SEQ ID NO: 10726 - protein, 118 aa, Artificial Sequence
  source: /note="Description of Artificial Sequence: Synthetic polypeptide"
EVQLVQSGAEVKKPGASVKVSCKASGYTFTGYYMHWVRQAPGQGLEWMGWINPNSGATNFPQKFQGRVTMTRDTSITTAYMDLSRLRSDDTAVYYCARESGDDAFDIWGQGTMVTVSS

SEQ ID NO: 10727 - protein, 118 aa, Artificial Sequence
  source: /note="Description of Artificial Sequence: Synthetic polypeptide"
EVQLVQSGAEVKKPGASVKVSCKASGYTFTGYDMHWVRQAPGQGLEWMGWINPNSGATNFPQKFQGRVTMTRDTSITTAYMDLSRLRSDDTAVYYCARESGDDAFDIWGQGTMVTVSS

SEQ ID NO: 10728 - protein, 118 aa, Artificial Sequence
  source: /note="Description of Artificial Sequence: Synthetic polypeptide"
EVQLVQSGAEVKKPGASVKVSCKASGYTFTGYYMHWVRQAPGQGLEWMGWINPKSGATNFPQKFQGRVTMTRDTSITTAYMDLSRLRSDDTAVYYCARESGDDAFDIWGQGTMVTVSS

SEQ ID NO: 10729 - protein, 118 aa, Artificial Sequence
  source: /note="Description of Artificial Sequence: Synthetic polypeptide"
EVQLVQSGAEVKKPGASVKVSCKASGYTFTGYYMHWVRQAPGQGLEWMGWINPRSGATNFPQKFQGRVTMTRDTSITTAYMDLSRLRSDDTAVYYCARESGDDAFDIWGQGTMVTVSS

SEQ ID NO: 10730 - protein, 118 aa, Artificial Sequence
  source: /note="Description of Artificial Sequence: Synthetic polypeptide"
EVQLVQSGAEVKKPGASVKVSCKASGYTFTGYYMHWVRQAPGQGLEWMGAIDPKSGTTMFPQKFQGRVTMTRDTSITTAYMDLSRLRSDDTAVYYCARESGDDAFDIWGQGTMVTVSS

SEQ ID NO: 10731 - protein, 118 aa, Artificial Sequence
  source: /note="Description of Artificial Sequence: Synthetic polypeptide"
EVQLVQSGAEVKKPGASVKVSCKASGYTFTGYYMHWVRQAPGQGLEWMGAIDPKLGITIFPQKFQGRVTMTRDTSITTAYMDLSRLRSDDTAVYYCARESGDDAFDIWGQGTMVTVSS

SEQ ID NO: 10732 - protein, 118 aa, Artificial Sequence
  source: /note="Description of Artificial Sequence: Synthetic polypeptide"
EVQLVQSGAEVKKPGASVKVSCKASGYTFTGYYMHWVRQAPGQGLEWMGMINPKSGFTAFPQKFQGRVTMTRDTSITTAYMDLSRLRSDDTAVYYCARESGDDAFDIWGQGTMVTVSS

SEQ ID NO: 10733 - protein, 118 aa, Artificial Sequence
  source: /note="Description of Artificial Sequence: Synthetic polypeptide"
EVQLVQSGAEVKKPGASVKVSCKASGYTFTGYYMHWVRQAPGQGLEWMGAIDPKHGFTIFPQKFQGRVTMTRDTSITTAYMDLSRLRSDDTAVYYCARESGDDAFDIWGQGTMVTVSS

SEQ ID NO: 10734 - protein, 118 aa, Artificial Sequence
  source: /note="Description of Artificial Sequence: Synthetic polypeptide"
EVQLVQSGAEVKKPGASVKVSCKASGYTFTGYYMHWVRQAPGQGLEWMGWINPKDGDTEFPQKFQGRVTMTRDTSITTAYMDLSRLRSDDTAVYYCARESGDDAFDIWGQGTMVTVSS

SEQ ID NO: 10735 - protein, 118 aa, Artificial Sequence
  source: /note="Description of Artificial Sequence: Synthetic polypeptide"
EVQLVQSGAEVKKPGASVKVSCKASGYTFTGYYMHWVRQAPGQGLEWMGWINPRNGITSFPQKFQGRVTMTRDTSITTAYMDLSRLRSDDTAVYYCARESGDDAFDIWGQGTMVTVSS

SEQ ID NO: 10736 - protein, 118 aa, Artificial Sequence
  source: /note="Description of Artificial Sequence: Synthetic polypeptide"
EVQLVQSGAEVKKPGASVKVSCKASGYTFRGYAMHWVRQAPGQGLEWMGWINPRSGVTEFPQKFQGRVTMTRDTSITTAYMDLSRLRSDDTAVYYCARESGDDAFDIWGQGTMVTVSS

SEQ ID NO: 10737 - protein, 118 aa, Artificial Sequence
  source: /note="Description of Artificial Sequence: Synthetic polypeptide"
EVQLVQSGAEVKKPGASVKVSCKASGYTFRGYAMHWVRQAPGQGLEWMGWIDPRTGLTKFPQKFQGRVTMTRDTSITTAYMDLSRLRSDDTAVYYCARESGDDAFDIWGQGTMVTVSS

SEQ ID NO: 10738 - protein, 118 aa, Artificial Sequence
  source: /note="Description of Artificial Sequence: Synthetic polypeptide"
EVQLVQSGAEVKKPGASVKVSCKASGYTFTGYYMHWVRQAPGQGLEWMGWINPKNGDTEFPQKFQGRVTMTRDTSISTAYMDLSRLRSDDTAVYYCARESGDDAFDIWGQGTMVTVSS

SEQ ID NO: 10739 - protein, 118 aa, Artificial Sequence
  source: /note="Description of Artificial Sequence: Synthetic polypeptide"
EVQLVQSGAEVKKPGASVKVSCKASGYTFTGYYMHWVRQAPGQGLEWMGWINPKNGDTEFPQKFQGRVTMTRDTSITTAYMELSRLRSDDTAVYYCARESGDDAFDIWGQGTMVTVSS

SEQ ID NO: 10740 - protein, 118 aa, Artificial Sequence
  source: /note="Description of Artificial Sequence: Synthetic polypeptide"
EVQLVQSGAEVKKPGASVKVSCKASGYTFTGYYMHWVRQAPGQGLEWMGWINPKNGDTEFPQKFQGRVTMTRDTSISTAYMELSRLRSDDTAVYYCARESGDDAFDIWGQGTMVTVSS

SEQ ID NO: 10741 - protein, 118 aa, Artificial Sequence
  source: /note="Description of Artificial Sequence: Synthetic polypeptide"
QVQLVQSGAEVKKPGASVKVSCKASGYTFTGYYMHWVRQAPGQGLEWMGWINPKNGDTEFPQKFQGRVTMTRDTSITTAYMDLSRLRSDDTAVYYCARESGDDAFDIWGQGTMVTVSS

SEQ ID NO: 10742 - protein, 118 aa, Artificial Sequence
  source: /note="Description of Artificial Sequence: Synthetic polypeptide"
QVQLVQSGAEVKKPGASVKVSCKASGYTFTGYYMHWVRQAPGQGLEWMGWINPKNGDTEFPQKFQGRVTMTRDTSISTAYMDLSRLRSDDTAVYYCARESGDDAFDIWGQGTMVTVSS

SEQ ID NO: 10743 - protein, 118 aa, Artificial Sequence
  source: /note="Description of Artificial Sequence: Synthetic polypeptide"
QVQLVQSGAEVKKPGASVKVSCKASGYTFTGYYMHWVRQAPGQGLEWMGWINPKNGDTEFPQKFQGRVTMTRDTSITTAYMELSRLRSDDTAVYYCARESGDDAFDIWGQGTMVTVSS

SEQ ID NO: 10744 - protein, 118 aa, Artificial Sequence
  source: /note="Description of Artificial Sequence: Synthetic polypeptide"
QVQLVQSGAEVKKPGASVKVSCKASGYTFTGYYMHWVRQAPGQGLEWMGWINPKNGDTEFPQKFQGRVTMTRDTSISTAYMELSRLRSDDTAVYYCARESGDDAFDIWGQGTMVTVSS

SEQ ID NO: 10745 - protein, 105 aa, Artificial Sequence
  source: /note="Description of Artificial Sequence: Synthetic polypeptide"
DIVMTQSPSSLSASVGDRVTITCRASQSISSYLNWYQQKPGKAPKLLIYAASSLQSGVPSRFSGSGSGTDFTLTISSLQPEDFATYYCQQSVGLFFGGGTKVEIK

SEQ ID NO: 10746 - protein, 105 aa, Artificial Sequence
  source: /note="Description of Artificial Sequence: Synthetic polypeptide"
DIVMTQSPSSLSASVGDRVTITCRASQSISSYLNWYQQKPGKAPKLLIYAASSLQSGVPSRFSGSGSGTDFTLTISSLQPEDFATYYCQQSYSTSFGGGTKVEIK

SEQ ID NO: 10747 - protein, 105 aa, Artificial Sequence
  source: /note="Description of Artificial Sequence: Synthetic polypeptide"
DIVMTQSPSSLSASVGDRVTITCRASQKISSYLNWYQQKPGKAPKLLIYAASSLQSGVPSRFSGSGSGTDFTLTISSLQPEDFATYYCQQSYSTSFGGGTKVEIK

SEQ ID NO: 10748 - protein, 105 aa, Artificial Sequence
  source: /note="Description of Artificial Sequence: Synthetic polypeptide"
DIVMTQSPSSLSASVGDRVTITCRASQRISSYLNWYQQKPGKAPKLLIYAASSLQSGVPSRFSGSGSGTDFTLTISSLQPEDFATYYCQQSYSTSFGGGTKVEIK

SEQ ID NO: 10749 - protein, 105 aa, Artificial Sequence
  source: /note="Description of Artificial Sequence: Synthetic polypeptide"
DIVMTQSPSSLSASVGDRVTITCRASQSISSYLNWYQQKPGKAPKLLIYAASSLQDGVPSRFSGSGSGTDFTLTISSLQPEDFATYYCQQSYSTSFGGGTKVEIK

SEQ ID NO: 10750 - protein, 105 aa, Artificial Sequence
  source: /note="Description of Artificial Sequence: Synthetic polypeptide"
DIVMTQSPSSLSASVGDRVTITCRASQSISSYLNWYQQKPGKAPKLLIYAASSLQEGVPSRFSGSGSGTDFTLTISSLQPEDFATYYCQQSYSTSFGGGTKVEIK

SEQ ID NO: 10751 - protein, 105 aa, Artificial Sequence
  source: /note="Description of Artificial Sequence: Synthetic polypeptide"
DIVMTQSPSSLSASVGDRVTITCRASQSISSYLNWYQQKPGKAPKLLIYAASSLQYGVPSRFSGSGSGTDFTLTISSLQPEDFATYYCQQSYSTSFGGGTKVEIK

SEQ ID NO: 10752 - protein, 105 aa, Artificial Sequence
  source: /note="Description of Artificial Sequence: Synthetic polypeptide"
DIVMTQSPSSLSASVGDRVTITCRASQSISSYLNWYQQKPGKAPKLLIYAASSLQSGVPSRFSGSGSGTDFTLTISSLQPEDFATYYCQQSVGLSFGGGTKVEIK

SEQ ID NO: 10753 - protein, 105 aa, Artificial Sequence
  source: /note="Description of Artificial Sequence: Synthetic polypeptide"
DIVMTQSPSSLSASVGDRVTITCRASQSISSYLNWYQQKPGKAPKLLIYAASSLQSGVPSRFSGSGSGTDFTLTISSLQPEDFATYYCQQSLELGFGGGTKVEIK

SEQ ID NO: 10754 - protein, 105 aa, Artificial Sequence
  source: /note="Description of Artificial Sequence: Synthetic polypeptide"
DIVMTQSPSSLSASVGDRVTITCRASQSISSYLNWYQQKPGKAPKLLIYAASSLQYGVPSRFSGSGSGTDFTLTISSLQPEDFATYYCQQSLELGFGGGTKVEIK

SEQ ID NO: 10755 - protein, 105 aa, Artificial Sequence
  source: /note="Description of Artificial Sequence: Synthetic polypeptide"
DIVMTQSPSSLSASVGDRVTITCRASQSISSYLNWYQQKPGKAPKLLIYAASSLQYGVPSRFSGSGSGTDFTLTISSLQPEDFATYYCQQSVGLSFGGGTKVEIK

SEQ ID NO: 10756 - protein, 105 aa, Artificial Sequence
  source: /note="Description of Artificial Sequence: Synthetic polypeptide"
DIVMTQSPSSLSASVGDRVTITCRASQSISSYLNWYQQKPGKAPKLLIYAASSLQYGVPSRFSGSGSGTDFTLTISSLQPEDFATYYCQQSVGLFFGGGTKVEIK

SEQ ID NO: 10757 - protein, 105 aa, Artificial Sequence
  source: /note="Description of Artificial Sequence: Synthetic polypeptide"
DIVMTQSPSSLSASVGDRVTITCRASQKISSYLNWYQQKPGKAPKLLIYAASSLQYGVPSRFSGSGSGTDFTLTISSLQPEDFATYYCQQSYSTSFGGGTKVEIK

SEQ ID NO: 10758 - protein, 105 aa, Artificial Sequence
  source: /note="Description of Artificial Sequence: Synthetic polypeptide"
DIVMTQSPSSLSASVGDRVTITCRASQKISSYLNWYQQKPGKAPKLLIYAASSLQSGVPSRFSGSGSGTDFTLTISSLQPEDFATYYCQQSLELGFGGGTKVEIK

SEQ ID NO: 10759 - protein, 105 aa, Artificial Sequence
  source: /note="Description of Artificial Sequence: Synthetic polypeptide"
DIVMTQSPSSLSASVGDRVTITCRASQKISSYLNWYQQKPGKAPKLLIYAASSLQSGVPSRFSGSGSGTDFTLTISSLQPEDFATYYCQQSVGLFFGGGTKVEIK

SEQ ID NO: 10760 - protein, 105 aa, Artificial Sequence
  source: /note="Description of Artificial Sequence: Synthetic polypeptide"
DIVMTQSPSSLSASVGDRVTITCRASQKISSYLNWYQQKPGKAPKLLIYAASSLQYGVPSRFSGSGSGTDFTLTISSLQPEDFATYYCQQSLELGFGGGTKVEIK

SEQ ID NO: 10761 - protein, 105 aa, Artificial Sequence
  source: /note="Description of Artificial Sequence: Synthetic polypeptide"
DIVMTQSPSSLSASVGDRVTITCRASQKISSYLNWYQQKPGKAPKLLIYAASSLQYGVPSRFSGSGSGTDFTLTISSLQPEDFATYYCQQSVGLSFGGGTKVEIK

SEQ ID NO: 10762 - protein, 105 aa, Artificial Sequence
  source: /note="Description of Artificial Sequence: Synthetic polypeptide"
DIVMTQSPSSLSASVGDRVTITCRASQKISSYLNWYQQKPGKAPKLLIYAASSLQYGVPSRFSGSGSGTDFTLTISSLQPEDFATYYCQQSVGLFFGGGTKVEIK

SEQ ID NO: 10763 - protein, 105 aa, Artificial Sequence
  source: /note="Description of Artificial Sequence: Synthetic polypeptide"
DIQMTQSPSSLSASVGDRVTITCRASQSISSYLNWYQQKPGKAPKLLIYAASSLQSGVPSRFSGSGSGTDFTLTISSLQPEDFATYYCQQSVGLFFGGGTKVEIK

SEQ ID NO: 10764 - protein, 119 aa, Artificial Sequence
  source: /note="Description of Artificial Sequence: Synthetic polypeptide"
EVLLQQSVAELVRPGASVRLSCTASGFNIKDTYIHWVRQRPEQGLEWFGWIDPANGYTKYAPNFQGKATLTTDTSSNTAYLHLSSLTSEDSAIYYCARGYYRYYSLDYWGQGTSVTVSS

SEQ ID NO: 10765 - protein, 118 aa, Artificial Sequence
  source: /note="Description of Artificial Sequence: Synthetic polypeptide"
EVQLQQSGADLVKPGASVKLSCTASGFNIKDTYIHWVKQRPEQGLEWIGRIDPANGHTEYDPKFQGRATLTTDTSSNTAYLQLFSLTSEDSAVYFCARSYYGSIFAYWGQGTLVTVSA

SEQ ID NO: 10766 - protein, 118 aa, Artificial Sequence
  source: /note="Description of Artificial Sequence: Synthetic polypeptide"
EVQLQQSGAELVKPGASVTLSCTASGFNIKDTYMHWVNQRPEQGLVWIGRIDPANGHTEYDPKFQDKATITTDTSSNTAYLHLSSLTSGDTAVYYCARSYFGSIFAYWGQGTLVTVSA

SEQ ID NO: 10767 - protein, 121 aa, Artificial Sequence
  source: /note="Description of Artificial Sequence: Synthetic polypeptide"
EVQLQQSGAELVRSGASVKLSCTTSGFNIKDYYIHWVKQRPEQGLEWIGWIDPENGDTEYAPKFQGKATMTADTSSNTAYLQLSSLTSADTAVYYCNAYYRYDDGTWFPYWGQGTLVTVSA

SEQ ID NO: 10768 - protein, 119 aa, Artificial Sequence
  source: /note="Description of Artificial Sequence: Synthetic polypeptide"
EVQLQQSGPELVKPGASVKISCKVSGYTFTDYYMNWVKQSHGKSLEWIGDINPNNGGAIYNQKFKGKATLTVDKSSSIAYMELRSLTSEDSAVYYCTSGIITEIAEDFWGQGTTLTVSS

SEQ ID NO: 10769 - protein, 126 aa, Artificial Sequence
  source: /note="Description of Artificial Sequence: Synthetic polypeptide"
EVQLVDSGGGLVQPGRSLKLSCAASGFTFSNHDMAWVRQAPTKGLEWVASITPSGGTTYYRDSVEGRFTVSRDNVKSSLHLQMDSLTSEDTATYYCARQNYYDGSYYYGLYYFDYWGQGVMVTVSS

SEQ ID NO: 10770 - protein, 447 aa, Artificial Sequence
  source: /note="Description of Artificial Sequence: Synthetic polypeptide"
QVQLQESGPGLVKPSETLSLTCTVSGYSITGGYLWNWIRQPPGKGLEWIGYISYDGTNNYKPSLKDRVTISRDTSKNQFSLKLSSVTAADTAVYYCARYGRVFFDYWGQGTLVTVSSASTKGPSVFPLAPSSKSTSGGTAALGCLVKDYFPEPVTVSWNSGALTSGVHTFPAVLQSSGLYSLSSVVTVPSSSLGTQTYICNVNHKPSNTKVDKRVEPKSCDKTHTCPPCPAPELLGGPSVFLFPPKPKDTLMISRTPEVTCVVVDVSHEDPEVKFNWYVDGVEVHNAKTKPREEQYNSTYRVVSVLTVLHQDWLNGKEYKCKVSNKALPAPIEKTISKAKGQPREPQVYTLPPSREEMTKNQVSLTCLVKGFYPSDIAVEWESNGQPENNYKTTPPVLDSDGSFFLYSKLTVDKSRWQQGNVFSCSVMHEALHNHYTQKSLSLSPGK

SEQ ID NO: 10771 - protein, 109 aa, Artificial Sequence
  source: /note="Description of Artificial Sequence: Synthetic polypeptide"
DIQLTQSPASLSASVGETVTITCRASGNIHSYLAWYQQKQGKSPQFLVDNAKTLPDGVPSRFSVSGSGTQYSLKINSLQPEDFGTYYCQHFWNTPWTFGGGTKLEIKRA

SEQ ID NO: 10772 - protein, 109 aa, Artificial Sequence
  source: /note="Description of Artificial Sequence: Synthetic polypeptide"
DIQMTQTTSSLSASLGDRVTISCRASQDISNYLNWYQQKPDGTVKLLIYYSSRLHSGVPSRFSGRGSGTDYSLTISTLEQEDIATYFCQQGKTLPLTFGAGTKLELKRA

SEQ ID NO: 10773 - protein, 219 aa, Artificial Sequence
  source: /note="Description of Artificial Sequence: Synthetic polypeptide"
DIVMTQSPLSLPVTPGEPASISCRSSQSIVHSNGNTYLQWYLQKPGQSPQLLIYKVSNRLYGVPDRFSGSGSGTDFTLKISRVEAEDVGVYYCFQGSHVPWTFGQGTKVEIKRTVAAPSVFIFPPSDEQLKSGTASVVCLLNNFYPREAKVQWKVDNALQSGNSQESVTEQDSKDSTYSLSSTLTLSKADYEKHKVYACEVTHQGLSSPVTKSFNRGEC

SEQ ID NO: 10774 - protein, 109 aa, Artificial Sequence
  source: /note="Description of Artificial Sequence: Synthetic polypeptide"
DIVMTQSQKFMSTSVGDRVSVTCKASQNVGTNVVWYQQKPGQSPKALIHSASYRYSGVPDRFKGSGSGTDFTLTITNVQSEDLAGFFCQQYKTYPYTFGGGTQLEIKRA

SEQ ID NO: 10775 - protein, 114 aa, Artificial Sequence
  source: /note="Description of Artificial Sequence: Synthetic polypeptide"
DVLMTQTPVSLPVSLGGQVSISCRSSQSLVYSDGNTYLHWYLQKPGQSPQLLIYRVSNRFSGVPDRFSGSGSGTDFTLKISRVEPEDLGLYYCLQSTHFPPTFGSGTKLEIKRA

SEQ ID NO: 10776 - protein, 108 aa, Artificial Sequence
  source: /note="Description of Artificial Sequence: Synthetic polypeptide"
QIVLTQSPAIMSASPGEKVTISCSASSSVSYLFWYQQKPGSSPKPWIFRTSYLASGVPARFSGSGSGTSFSLTISSMEAEDAATYYCHQYHTYPPTFGGGTKLEIKRA

SEQ ID NO: 10777 - protein, 108 aa, Artificial Sequence
  source: /note="Description of Artificial Sequence: Synthetic polypeptide"
QIVLTQSPAIMSASPGEKVTISCSASSSVSYLYWYQQKPGSSPKPWIFRSSHRASGVPARFSGSGSGTSYSLTISSMEAEDAATYYCHQYQSYPPTFGGGTKLEIKRA

SEQ ID NO: 10778 - protein, 204 aa, Artificial Sequence
  source: /note="Description of Artificial Sequence: Synthetic polypeptide"
ASTKGPSVFPLAPSSKSTSGGTAALGCLVKDYFPEPVTVSWNSGALTSGVHTFPAVLQSSGLYSLSSVVTVPSSSLGTQTYICNVNHKPSNTKVDKKVEPKSCDKTHTCPPCPAPELLGGPSVFLFPPKPKDTLMISRTPEVTCVVVDVSHEDPEVKFNWYVDGVEVHNAKTKPREEQYNSTYRVVSVLTVLHQDWLNGKEYKC

SEQ ID NO: 10779 - protein, 107 aa, Artificial Sequence
  source: /note="Description of Artificial Sequence: Synthetic polypeptide"
RTVAAPSVFIFPPSDEQLKSGTASVVCLLNNFYPREAKVQWKVDNALQSGNSQESVTEQDSKDSTYSLSSTLTLSKADYEKHKVYACEVTHQGLSLPVTKSFNRGEC

SEQ ID NO: 10780 - protein, 107 aa, Artificial Sequence
  source: /note="Description of Artificial Sequence: Synthetic polypeptide"
RTVAAPSVFIFPPSDEQLKSGTASVVCLLNNFYPREAKVQWKVDNAPQSGNSQESVTEQDSKDSTYSLSSTLTLSKADYEKHKVYACEVTHQGLSLPVTKSFNRGEC

SEQ ID NO: 10781 - protein, 215 aa, Artificial Sequence
  source: /note="Description of Artificial Sequence: Synthetic polypeptide"
EIVLTQSPATLSLSPGERATLSCRASQSVSSSYLHWYQQKPGQAPRLLIYSTSNLASGIPARFSGSGSGTDFTLTISRLEPEDFAVYYCHQYHRSPPTFGQGTKVEIKRTVAAPSVFIFPPSDEQLKSGTASVVCLLNNFYPREAKVQWKVDNALQSGNSQESVTEQDSKDSTYSLSSTLTLSKADYEKHKVYACEVTHQGLSSPVTKSFNRGEC

SEQ ID NO: 10782 - protein, 451 aa, Artificial Sequence
  source: /note="Description of Artificial Sequence: Synthetic polypeptide"
QVQLQESGPGLVRPSQTLSLTCTVSGFTFTDFYMNWVRQPPGRGLEWIGFIRDKAKGYTTEYNPSVKGRVTMLVDTSKNQFSLRLSSVTAADTAVYYCAREGHTAAPFDYWGQGSLVTVSSASTKGPSVFPLAPSSKSTSGGTAALGCLVKDYFPEPVTVSWNSGALTSGVHTFPAVLQSSGLYSLSSVVTVPSSSLGTQTYICNVNHKPSNTKVDKKVEPKSCDKTHTCPPCPAPELLGGPSVFLFPPKPKDTLMISRTPEVTCVVVDVSHEDPEVKFNWYVDGVEVHNAKTKPREEQYNSTYRVVSVLTVLHQDWLNGKEYKCKVSNKALPAPIEKTISKAKGQPREPQVYTLPPSRDELTKNQVSLTCLVKGFYPSDIAVEWESNGQPENNYKTTPPVLDSDGSFFLYSKLTVDKSRWQQGNVFSCSVMHEALHNHYTQKSLSLSPGK

SEQ ID NO: 10783 - protein, 451 aa, Artificial Sequence
  source: /note="Description of Artificial Sequence: Synthetic polypeptide"
EVQLVQSGAEVKKPGASVKVSCKASGYTFTSYVIHWVRQRPGQGLAWMGYINPYNDGTKYNERFKGKVTITSDRSTSTVYMELSSLRSEDTAVYLCGREGIRYYGLLGDYWGQGTLVTVSSASTKGPSVFPLAPSSKSTSGGTAALGCLVKDYFPEPVTVSWNSGALTSGVHTFPAVLQSSGLYSLSSVVTVPSSSLGTQTYICNVNHKPSNTKVDKKVEPKSCDKTHTCPPCPAPELLGGPSVFLFPPKPKDTLMISRTPEVTCVVVDVSHEDPEVKFNWYVDGVEVHNAKTKPREEQYNSTYRVVSVLTVLHQDWLNGKEYKCKVSNKALPAPIEKTISKAKGQPREPQVYTLPPSRDELTKNQVSLTCLVKGFYPSDIAVEWESNGQPENNYKTTPPVLDSDGSFFLYSKLTVDKSRWQQGNVFSCSVMHEALHNHYTQKSLSLSPGK

SEQ ID NO: 10784 - protein, 453 aa, Artificial Sequence
  source: /note="Description of Artificial Sequence: Synthetic polypeptide"
EVQLVESGGGLVQPGGSLRLSCAASGYTFTNYGMNWVRQAPGKGLEWVGWINTYTGEPTYAADFKRRFTFSLDTSKSTAYLQMNSLRAEDTAVYYCAKYPHYYGSSHWYFDVWGQGTLVTVSSASTKGPSVFPLAPSSKSTSGGTAALGCLVKDYFPEPVTVSWNSGALTSGVHTFPAVLQSSGLYSLSSVVTVPSSSLGTQTYICNVNHKPSNTKVDKKVEPKSCDKTHTCPPCPAPELLGGPSVFLFPPKPKDTLMISRTPEVTCVVVDVSHEDPEVKFNWYVDGVEVHNAKTKPREEQYNSTYRVVSVLTVLHQDWLNGKEYKCKVSNKALPAPIEKTISKAKGQPREPQVYTLPPSREEMTKNQVSLTCLVKGFYPSDIAVEWESNGQPENNYKTTPPVLDSDGSFFLYSKLTVDKSRWQQGNVFSCSVMHEALHNHYTQKSLSLSPGK

SEQ ID NO: 10785 - protein, 455 aa, Artificial Sequence
  source: /note="Description of Artificial Sequence: Synthetic polypeptide"
EVQLVESGGGLVQPGGSLRLSCAASGFTFSDYNMAWVRQAPGKGLEWVATITYEGRNTYYRDSVKGRFTISRDNAKNSLYLQMNSLRAEDTAVYYCASPPQYYEGSIYRLWFAHWGQGTLVTVSSASTKGPSVFPLAPSSKSTSGGTAALGCLVKDYFPEPVTVSWNSGALTSGVHTFPAVLQSSGLYSLSSVVTVPSSSLGTQTYICNVNHKPSNTKVDKKVEPKSCDKTHTCPPCPAPELLGGPSVFLFPPKPKDTLMISRTPEVTCVVVDVSHEDPEVKFNWYVDGVEVHNAKTKPREEQYNSTYRVVSVLTVLHQDWLNGKEYKCKVSNKALPAPIEKTISKAKGQPREPQVYTLPPSRDELTKNQVSLTCLVKGFYPSDIAVEWESNGQPENNYKTTPPVLDSDGSFFLYSKLTVDKSRWQQGNVFSCSVMHEALHNHYTQKSLSLSPGK

SEQ ID NO: 10786 - protein, 449 aa, Artificial Sequence
  source: /note="Description of Artificial Sequence: Synthetic polypeptide"
QVQLVQSGAEVKKPGETVKISCKASDYTFTYYGMNWVKQAPGQGLKWMGWIDTTTGEPTYAQKFQGRIAFSLETSASTAYLQIKSLKSEDTATYFCARRGPYNWYFDVWGQGTTVTVSSASTKGPSVFPLAPSSKSTSGGTAALGCLVKDYFPEPVTVSWNSGALTSGVHTFPAVLQSSGLYSLSSVVTVPSSSLGTQTYICNVNHKPSNTKVDKKVEPKSCDKTHTCPPCPAPELLGGPSVFLFPPKPKDTLMISRTPEVTCVVVDVSHEDPEVKFNWYVDGVEVHNAKTKPREEQYNSTYRVVSVLTVLHQDWLNGKEYKCKVSNKALPAPIEKTISKAKGQPREPQVYTLPPSRDELTKNQVSLTCLVKGFYPSDIAVEWESNGQPENNYKTTPPVLDSDGSFFLYSKLTVDKSRWQQGNVFSCSVMHEALHNHYTQKSLSLSPGK

SEQ ID NO: 10787 - protein, 445 aa, Artificial Sequence
  source: /note="Description of Artificial Sequence: Synthetic polypeptide"
QVQLVQSGAEVKKPGASVKVSCKASGYTFTDYEMHWVRQAPGQGLEWMGALDPKTGDTAYSQKFKGRVTLTADKSTSTAYMELSSLTSEDTAVYYCTRFYSYTYWGQGTLVTVSSASTKGPSVFPLAPSSKSTSGGTAALGCLVKDYFPEPVTVSWNSGALTSGVHTFPAVLQSSGLYSLSSVVTVPSSSLGTQTYICNVNHKPSNTKVDKKVEPKSCDKTHTCPPCPAPELLGGPSVFLFPPKPKDTLMISRTPEVTCVVVDVSHEDPEVKFNWYVDGVEVHNAKTKPREEQYNSTYRVVSVLTVLHQDWLNGKEYKCKVSNKALPAPIEKTISKAKGQPREPQVYTLPPSRDELTKNQVSLTCLVKGFYPSDIAVEWESNGQPENNYKTTPPVLDSDGSFFLYSKLTVDKSRWQQGNVFSCSVMHEALHNHYTQKSLSLSPGK

SEQ ID NO: 10788 - protein, 391 aa, Artificial Sequence
  source: /note="Description of Artificial Sequence: Synthetic polypeptide"
NQKFKDRFTISVDKSKNTLYLQMNSLRAEDTAVYYCARGIYFYGTTYFDYWGQGTLVTVSSASTKGPSVFPLAPSSKSTSGGTAALGCLVKDYFPEPVTVSWNSGALTSGVHTFPAVLQSSGLYSLSSVVTVPSSSLGTQTYICNVNHKPSNTKVDKKVEPKSCDKTHTCPPCPAPELLGGPSVFLFPPKPKDTLMISRTPEVTCVVVDVSHEDPEVKFNWYVDGVEVHNAKTKPREEQYNSTYRVVSVLTVLHQDWLNGKEYKCKVSNKALPAPIEKTISKAKGQPREPQVYTLPPSREEMTKNQVSLTCLVKGFYPSDIAVEWESNGQPENNYKTTPPVLDSDGSFFLYSKLTVDKSRWQQGNVFSCSVMHEALHNHYTQKSLSLSPGK

SEQ ID NO: 10789 - protein, 449 aa, Artificial Sequence
  source: /note="Description of Artificial Sequence: Synthetic polypeptide"
EVQLVESGGGLVQPGGSLRLSCAASGFDFSRYWMSWVRQAPGKGLEWIGEINPDSSTINYAPSLKDKFIISRDNAKNSLYLQMNSLRAEDTAVYYCARPDGNYWYFDVWGQGTLVTVSSASTKGPSVFPLAPSSKSTSGGTAALGCLVKDYFPEPVTVSWNSGALTSGVHTFPAVLQSSGLYSLSSVVTVPSSSLGTQTYICNVNHKPSNTKVDKKVEPKSCDKTHTCPPCPAPELLGGPSVFLFPPKPKDTLMISRTPEVTCVVVDVSHEDPEVKFNWYVDGVEVHNAKTKPREEQYNSTYRVVSVLTVLHQDWLNGKEYKCKVSNKALPAPIEKTISKAKGQPREPQVYTLPPSRDELTKNQVSLTCLVKGFYPSDIAVEWESNGQPENNYKTTPPVLDSDGSFFLYSKLTVDKSRWQQGNVFSCSVMHEALHNHYTQKSLSLSPGK

SEQ ID NO: 10790 - protein, 449 aa, Artificial Sequence
  source: /note="Description of Artificial Sequence: Synthetic polypeptide"
EVQLVESGGGLVQPGGSLRLSCAASGFTFSSYWMSWVRQAPGKGLEWVAEIRLKSDNYATHYAESVKGRFTISRDDSKNSLYLQMNSLRAEDTAVYYCTGYYADAMDYWGQGTLVTVSSASTKGPSVFPLAPSSKSTSGGTAALGCLVKDYFPEPVTVSWNSGALTSGVHTFPAVLQSSGLYSLSSVVTVPSSSLGTQTYICNVNHKPSNTKVDKKVEPKSCDKTHTCPPCPAPELLGGPSVFLFPPKPKDTLMISRTPEVTCVVVDVSHEDPEVKFNWYVDGVEVHNAKTKPREEQYNSTYRVVSVLTVLHQDWLNGKEYKCKVSNKALPAPIEKTISKAKGQPREPQVYTLPPSREEMTKNQVSLTCLVKGFYPSDIAVEWESNGQPENNYKTTPPVLDSDGSFFLYSKLTVDKSRWQQGNVFSCSVMHEALHNHYTQKSLSLSPGK

SEQ ID NO: 10791 - protein, 452 aa, Artificial Sequence
  source: /note="Description of Artificial Sequence: Synthetic polypeptide"
QVQLVQSGAEVKKPGSSVKVSCKASGGTFSYYWIEWVRQAPGQGLEWMGEILPGSGTTNPNEKFKGRVTITADESTSTAYMELSSLRSEDTAVYYCARADYYGSDYVKFDYWGQGTLVTVSSASTKGPSVFPLAPSSKSTSGGTAALGCLVKDYFPEPVTVSWNSGALTSGVHTFPAVLQSSGLYSLSSVVTVPSSSLGTQTYICNVNHKPSNTKVDKRVEPKSCDKTHTCPPCPAPELLGGPSVFLFPPKPKDTLMISRTPEVTCVVVDVSHEDPEVKFNWYVDGVEVHNAKTKPREEQYNSTYRVVSVLTVLHQDWLNGKEYKCKVSNKALPAPIEKTISKAKGQPREPQVYTLPPSREEMTKNQVSLTCLVKGFYPSDIAVEWESNGQPENNYKTTPPVLDSDGSFFLYSKLTVDKSRWQQGNVFSCSVMHEALHNHYTQKSLSLSPGK

SEQ ID NO: 10792 - protein, 446 aa, Artificial Sequence
  source: /note="Description of Artificial Sequence: Synthetic polypeptide"
EVQLVESGGGLVQPGGSLRLSCAASGFFITNNYWGWVRQAPGKGLEWVGYISYSGSTSYNPSLKSRFTISRDTSKNTFYLQMNSLRAEDTAVYYCARTGSSGYFDFWGQGTLVTVSSASTKGPSVFPLAPSSKSTSGGTAALGCLVKDYFPEPVTVSWNSGALTSGVHTFPAVLQSSGLYSLSSVVTVPSSSLGTQTYICNVNHKPSNTKVDKKVEPKSCDKTHTCPPCPAPELLGGPSVFLFPPKPKDTLMISRTPEVTCVVVDVSHEDPEVKFNWYVDGVEVHNAKTKPREEQYNSTYRVVSVLTVLHQDWLNGKEYKCKVSNKALPAPIEKTISKAKGQPREPQVYTLPPSREEMTKNQVSLTCLVKGFYPSDIAVEWESNGQPENNYKTTPPVLDSDGSFFLYSKLTVDKSRWQQGNVFSCSVMHEALHNHYTQKSLSLSPG

SEQ ID NO: 10793 - protein, 449 aa, Artificial Sequence
  source: /note="Description of Artificial Sequence: Synthetic polypeptide"
EVQLVESGGGVVQPGRSLRLSCSASGFTFSGYGLSWVRQAPGKGLEWVAMISSGGSYTYYADSVKGRFAISRDNAKNTLFLQMDSLRPEDTGVYFCARHGDDPAWFAYWGQGTPVTVSSASTKGPSVFPLAPSSKSTSGGTAALGCLVKDYFPEPVTVSWNSGALTSGVHTFPAVLQSSGLYSLSSVVTVPSSSLGTQTYICNVNHKPSNTKVDKKVEPKSCDKTHTCPPCPAPELLGGPSVFLFPPKPKDTLMISRTPEVTCVVVDVSHEDPEVKFNWYVDGVEVHNAKTKPREEQYNSTYRVVSVLTVLHQDWLNGKEYKCKVSNKALPAPIEKTISKAKGQPREPQVYTLPPSRDELTKNQVSLTCLVKGFYPSDIAVEWESNGQPENNYKTTPPVLDSDGSFFLYSKLTVDKSRWQQGNVFSCSVMHEALHNHYTQKSLSLSPGK

SEQ ID NO: 10794 - protein, 448 aa, Artificial Sequence
  source: /note="Description of Artificial Sequence: Synthetic polypeptide"
QVQLVQPGAEVKKPGTSVKLSCKASGYTFTTYWMHWVRQAPGQGLEWIGEINPTNGHTNYNQKFQGRATLTVDKSTSTAYMELSSLRSEDTAVYYCARNYVGSIFDYWGQGTLLTVSSASTKGPSVFPLAPSSKSTSGGTAALGCLVKDYFPEPVTVSWNSGALTSGVHTFPAVLQSSGLYSLSSVVTVPSSSLGTQTYICNVNHKPSNTKVDKRVEPKSCDKTHTCPPCPAPELLGGPSVFLFPPKPKDTLMISRTPEVTCVVVDVSHEDPEVKFNWYVDGVEVHNAKTKPREEQYNSTYRVVSVLTVLHQDWLNGKEYKCKVSNKALPAPIEKTISKAKGQPREPQVYTLPPSREEMTKNQVSLTCLVKGFYPSDIAVEWESNGQPENNYKTTPPVLDSDGSFFLYSKLTVDKSRWQQGNVFSCSVMHEALHNHYTQKSLSLSPGK

SEQ ID NO: 10795 - protein, 449 aa, Artificial Sequence
  source: /note="Description of Artificial Sequence: Synthetic polypeptide"
QVQLVQSGAEVKKPGSSVKVSCKASGFTFTDYKIHWVRQAPGQGLEWMGYFNPNSGYSTYAQKFQGRVTITADKSTSTAYMELSSLRSEDTAVYYCARLSPGGYYVMDAWGQGTTVTVSSASTKGPSVFPLAPSSKSTSGGTAALGCLVKDYFPEPVTVSWNSGALTSGVHTFPAVLQSSGLYSLSSVVTVPSSSLGTQTYICNVNHKPSNTKVDKKVEPKSCDKTHTCPPCPAPELLGGPSVFLFPPKPKDTLMISRTPEVTCVVVDVSHEDPEVKFNWYVDGVEVHNAKTKPREEQYNSTYRVVSVLTVLHQDWLNGKEYKCKVSNKALPAPIEKTISKAKGQPREPQVYTLPPSRDELTKNQVSLTCLVKGFYPSDIAVEWESNGQPENNYKTTPPVLDSDGSFFLYSKLTVDKSRWQQGNVFSCSVMHEALHNHYTQKSLSLSPG

SEQ ID NO: 10796 - protein, 449 aa, Artificial Sequence
  source: /note="Description of Artificial Sequence: Synthetic polypeptide"
EVQLVESGGGLVKPGGSLKLSCAASGFKFSRYAMSWVRQAPGKRLEWVATISSGGSYIYYPDSVKGRFTISRDNVKNTLYLQMSSLRSEDTAMYYCARRDYDLDYFDSWGQGTLVTVSSASTKGPSVFPLAPSSKSTSGGTAALGCLVKDYFPEPVTVSWNSGALTSGVHTFPAVLQSSGLYSLSSVVTVPSSSLGTQTYICNVNHKPSNTKVDKKVEPKSCDKTHTCPPCPAPELLGGPSVFLFPPKPKDTLMISRTPEVTCVVVDVSHEDPEVKFNWYVDGVEVHNAKTKPREEQYNSTYRVVSVLTVLHQDWLNGKEYKCKVSNKALPAPIEKTISKAKGQPREPQVYTLPPSRDELTKNQVSLTCLVKGFYPSDIAVEWESNGQPENNYKTTPPVLDSDGSFFLYSKLTVDKSRWQQGNVFSCSVMHEALHNHYTQKSLSLSPGK

SEQ ID NO: 10797 - protein, 450 aa, Artificial Sequence
  source: /note="Description of Artificial Sequence: Synthetic polypeptide"
EVQLVESGGGLVQPGGSLRLSCAASGFSFSDFAMSWVRQAPGKGLEWVATIGRVAFHTYYPDSMKGRFTISRDNSKNTLYLQMNSLRAEDTAVYYCARHRGFDVGHFDFWGQGTLVTVSSASTKGPSVFPLAPSSKSTSGGTAALGCLVKDYFPEPVTVSWNSGALTSGVHTFPAVLQSSGLYSLSSVVTVPSSSLGTQTYICNVNHKPSNTKVDKKVEPKSCDKTHTCPPCPAPELLGGPSVFLFPPKPKDTLMISRTPEVTCVVVDVSHEDPEVKFNWYVDGVEVHNAKTKPREEQYNSTYRVVSVLTVLHQDWLNGKEYKCKVSNKALPAPIEKTISKAKGQPREPQVYTLPPSREEMTKNQVSLTCLVKGFYPSDIAVEWESNGQPENNYKTTPPVLDSDGSFFLYSKLTVDKSRWQQGNVFSCSVMHEALHNHYTQKSLSLSPGK

SEQ ID NO: 10798 - protein, 453 aa, Artificial Sequence
  source: /note="Description of Artificial Sequence: Synthetic polypeptide"
QVQLVQSGAEVMKPGSSVKVSCKASGYTFSWYWLEWVRQAPGHGLEWMGEIDPGTFTTNYNEKFKARVTFTADTSTSTAYMELSSLRSEDTAVYYCARFSHFSGSNYDYFDYWGQGTLVTVSSASTKGPSVFPLAPSSKSTSGGTAALGCLVKDYFPEPVTVSWNSGALTSGVHTFPAVLQSSGLYSLSSVVTVPSSSLGTQTYICNVNHKPSNTKVDKKVEPKSCDKTHTCPPCPAPELLGGPSVFLFPPKPKDTLMISRTPEVTCVVVDVSHEDPEVKFNWYVDGVEVHNAKTKPREEQYNSTYRVVSVLTVLHQDWLNGKEYKCKVSNKALPAPIEKTISKAKGQPREPQVYTLPPSRDELTKNQVSLTCLVKGFYPSDIAVEWESNGQPENNYKTTPPVLDSDGSFFLYSKLTVDKSRWQQGNVFSCSVMHEALHNHYTQKSLSLSPGK

SEQ ID NO: 10799 - protein, 448 aa, Artificial Sequence
  source: /note="Description of Artificial Sequence: Synthetic polypeptide"
QVQLVQSGAEVKKPGASVKVSCKASGYTFSTMYMSWVRQAPGQGLEWMGRIDPANEHTNYAQKFQGRVTMTRDTSISTAYMELSRLTSDDTAVYYCARSYYYYNMDYWGQGTLVTVSSASTKGPSVFPLAPSSKSTSGGTAALGCLVKDYFPEPVTVSWNSGALTSGVHTFPAVLQSSGLYSLSSVVTVPSSSLGTQTYICNVNHKPSNTKVDKRVEPKSCDKTHTCPPCPAPEAAGGPSVFLFPPKPKDTLMISRTPEVTCVVVDVSHEDPEVKFNWYVDGVEVHNAKTKPREEQYNSTYRVVSVLTVLHQDWLNGKEYKCKVSNKALPAPIEKTISKAKGQPREPQVYTLPPSREEMTKNQVSLTCLVKGFYPSDIAVEWESNGQPENNYKTTPPVLDSDGSFFLYSKLTVDKSRWQQGNVFSCSVMHEALHNHYTQKSLSLSPGK

SEQ ID NO: 10800 - protein, 448 aa, Artificial Sequence
  source: /note="Description of Artificial Sequence: Synthetic polypeptide"
QVQLVESGGGVVQPGRSLRLSCAASGFTFSSFGMHWVRQAPGKGLEWVAYISSGSFTIYYADSVKGRFTISRDNSKNTLYLQMNSLRAEDTAVYYCARMRKGYAMDYWGQGTLVTVSSASTKGPSVFPLAPSSKSTSGGTAALGCLVKDYFPEPVTVSWNSGALTSGVHTFPAVLQSSGLYSLSSVVTVPSSSLGTQTYICNVNHKPSNTKVDKKVEPKSCDKTHTCPPCPAPELLGGPSVFLFPPKPKDTLMISRTPEVTCVVVDVSHEDPEVKFNWYVDGVEVHNAKTKPREEQYNSTYRVVSVLTVLHQDWLNGKEYKCKVSNKALPAPIEKTISKAKGQPREPQVYTLPPSRDELTKNQVSLTCLVKGFYPSDIAVEWESNGQPENNYKTTPPVLDSDGSFFLYSKLTVDKSRWQQGNVFSCSVMHEALHNHYTQKSLSLSPGK

SEQ ID NO: 10801 - protein, 449 aa, Artificial Sequence
  source: /note="Description of Artificial Sequence: Synthetic polypeptide"
EVQLVESGGDLVQPGRSLRLSCAASGFIFSNYGMSWVRQAPGKGLEWVATISSASTYSYYPDSVKGRFTISRDNAKNSLYLQMNSLRVEDTALYYCGRHSDGNFAFGYWGQGTLVTVSSASTKGPSVFPLAPSSKSTSGGTAALGCLVKDYFPEPVTVSWNSGALTSGVHTFPAVLQSSGLYSLSSVVTVPSSSLGTQTYICNVNHKPSNTKVDKKVEPKSCDKTHTCPPCPAPELLGGPSVFLFPPKPKDTLMISRTPEVTCVVVDVSHEDPEVKFNWYVDGVEVHNAKTKPREEQYNSTYRVVSVLTVLHQDWLNGKEYKCKVSNKALPAPIEKTISKAKGQPREPQVYTLPPSRDELTKNQVSLTCLVKGFYPSDIAVEWESNGQPENNYKTTPPVLDSDGSFFLYSKLTVDKSRWQQGNVFSCSVMHEALHNHYTQKSLSLSPGK

SEQ ID NO: 10802 - protein, 450 aa, Artificial Sequence
  source: /note="Description of Artificial Sequence: Synthetic polypeptide"
QVTLRESGPALVKPTQTLTLTCTFSGFSLSTAGMSVGWIRQPPGKALEWLADIWWDDKKHYNPSLKDRLTISKDTSKNQVVLKVTNMDPADTATYYCARDMIFNFYFDVWGQGTTVTVSSASTKGPSVFPLAPSSKSTSGGTAALGCLVKDYFPEPVTVSWNSGALTSGVHTFPAVLQSSGLYSLSSVVTVPSSSLGTQTYICNVNHKPSNTKVDKRVEPKSCDKTHTCPPCPAPELLGGPSVFLFPPKPKDTLMISRTPEVTCVVVDVSHEDPEVKFNWYVDGVEVHNAKTKPREEQYNSTYRVVSVLTVLHQDWLNGKEYKCKVSNKALPAPIEKTISKAKGQPREPQVYTLPPSREEMTKNQVSLTCLVKGFYPSDIAVEWESNGQPENNYKTTPPVLDSDGSFFLYSKLTVDKSRWQQGNVFSCSVMHEALHNHYTQKSLSLSPGK

SEQ ID NO: 10803 - protein, 449 aa, Artificial Sequence
  source: /note="Description of Artificial Sequence: Synthetic polypeptide"
QVQLVQSGAEVKKPGSSVKVSCKASGYAFSYSWINWVRQAPGQGLEWMGRIFPGDGDTDYNGKFKGRVTITADKSTSTAYMELSSLRSEDTAVYYCARNVFDGYWLVYWGQGTLVTVSSASTKGPSVFPLAPSSKSTSGGTAALGCLVKDYFPEPVTVSWNSGALTSGVHTFPAVLQSSGLYSLSSVVTVPSSSLGTQTYICNVNHKPSNTKVDKKVEPKSCDKTHTCPPCPAPELLGGPSVFLFPPKPKDTLMISRTPEVTCVVVDVSHEDPEVKFNWYVDGVEVHNAKTKPREEQYNSTYRVVSVLTVLHQDWLNGKEYKCKVSNKALPAPIEKTISKAKGQPREPQVYTLPPSRDELTKNQVSLTCLVKGFYPSDIAVEWESNGQPENNYKTTPPVLDSDGSFFLYSKLTVDKSRWQQGNVFSCSVMHEALHNHYTQKSLSLSPGK

SEQ ID NO: 10804 - protein, 450 aa, Artificial Sequence
  source: /note="Description of Artificial Sequence: Synthetic polypeptide"
EVQLVQSGAEVKKPGESLKISCKGSGRTFTSYNMHWVRQMPGKGLEWMGAIYPLTGDTSYNQKSKLQVTISADKSISTAYLQWSSLKASDTAMYYCARSTYVGGDWQFDVWGKGTTVTVSSASTKGPSVFPLAPSSKSTSGGTAALGCLVKDYFPEPVTVSWNSGALTSGVHTFPAVLQSSGLYSLSSVVTVPSSSLGTQTYICNVNHKPSNTKVDKKVEPKSCDKTHTCPPCPAPELLGGPSVFLFPPKIKDTLMISRTPEVTCVVVDVSHEDPEVKFNWYVDGVEVHNAKTKPREEQYNSTYRVVSVLTVLHQDWLNGKEYKCKVSNKALPAPIEKTISKQKGQPREPQVYTLPPSRDELTKNQVSLTCLVKGFYPSDIAVEWESNGQPENNYKTTPPVLDSDGSFFLYSKLTVDKSRWQQGNVFSCSVMHEALHNHYTQKSLSLSPG

SEQ ID NO: 10805 - protein, 451 aa, Artificial Sequence
  source: /note="Description of Artificial Sequence: Synthetic polypeptide"
EVQLVESGGGLVQPGGSLRLSCAVSGYSITSGYSWNWIRQAPGKGLEWVASITYDGSTNYNPSVKGRITISRDDSKNTFYLQMNSLRAEDTAVYYCARGSHYFGHWHFAVWGQGTLVTVSSASTKGPSVFPLAPSSKSTSGGTAALGCLVKDYFPEPVTVSWNSGALTSGVHTFPAVLQSSGLYSLSSVVTVPSSSLGTQTYICNVNHKPSNTKVDKKVEPKSCDKTHTCPPCPAPELLGGPSVFLFPPKPKDTLMISRTPEVTCVVVDVSHEDPEVKFNWYVDGVEVHNAKTKPREEQYNSTYRVVSVLTVLHQDWLNGKEYKCKVSNKALPAPIEKTISKAKGQPREPQVYTLPPSREEMTKNQVSLTCLVKGFYPSDIAVEWESNGQPENNYKTTPPVLDSDGSFFLYSKLTVDKSRWQQGNVFSCSVMHEALHNHYTQKSLSLSPGK

SEQ ID NO: 10806 - protein, 453 aa, Artificial Sequence
  source: /note="Description of Artificial Sequence: Synthetic polypeptide"
EVQLVESGGGLVQPGGSLRLSCAASGYTFIDYYMNWVRQAPGKGLEWVGDINLDNSGTHYNQKFKGRFTISRDKSKNTAYLQMNSLRAEDTAVYYCAREGVYHDYDDYAMDYWGQGTLVTVSSASTKGPSVFPLAPSSKSTSGGTAALGCLVKDYFPEPVTVSWNSGALTSGVHTFPAVLQSSGLYSLSSVVTVPSSSLGTQTYICNVNHKPSNTKVDKKVEPKSCDKTHTCPPCPAPELLGGPSVFLFPPKPKDTLMISRTPEVTCVVVDVSHEDPEVKFNWYVDGVEVHNAKTKPREEQYNSTYRVVSVLTVLHQDWLNGKEYKCKVSNKALPAPIEKTISKAKGQPREPQVYTLPPSREEMTKNQVSLTCLVKGFYPSDIAVEWESNGQPENNYKTTPPVLDSDGSFFLYSKLTVDKSRWQQGNVFSCSVMHEALHNHYTQKSLSLSPGK

SEQ ID NO: 10807 - protein, 447 aa, Artificial Sequence
  source: /note="Description of Artificial Sequence: Synthetic polypeptide"
EVQLVESGGGLVQPGGSLRLSCAASGYTFTSYVIHWVRQAPGKGLEWVGYNNPYNAGTNYNEKFKGRFTISSDKSKNTAYLQMNSLRAEDTAVYYCSRPTMLPWFAYWGQGTLVTVSSASTKGPSVFPLAPSSKSTSGGTAALGCLVKDYFPEPVTVSWNSGALTSGVHTFPAVLQSSGLYSLSSVVTVPSSSLGTQTYICNVNHKPSNTKVDKKVEPKSCDKTHTCPPCPAPELLGGPSVFLFPPKPKDTLMISRTPEVTCVVVDVSHEDPEVKFNWYVDGVEVHNAKTKPREEQYNSTYRVVSVLTVLHQDWLNGKEYKCKVSNKALPAPIEKTISKAKGQPREPQVYTLPPSREEMTKNQVSLTCLVKGFYPSDIAVEWESNGQPENNYKTTPPVLDSDGSFFLYSKLTVDKSRWQQGNVFSCSVMHEALHNHYTQKSLSLSPG

SEQ ID NO: 10808 - protein, 452 aa, Artificial Sequence
  source: /note="Description of Artificial Sequence: Synthetic polypeptide"
EVQLVESGGGLVQPGGSLRLSCAASGFTFSDYTMLWVRQAPGKGLEWVAIIKSGGSYSYYPDSVKGRFTISRDNAKNSLYLQMNSLRAEDTAVYYCARDGDYGSSYGAMDYWGQGTLVTVSSASTKGPSVFPLAPSSKSTSGGTAALGCLVKDYFPEPVTVSWNSGALTSGVHTFPAVLQSSGLYSLSSVVTVPSSSLGTQTYICNVNHKPSNTKVDKKVEPKSCDKTHTCPPCPAPEAAGGPSVFLFPPKPKDTLMISRTPEVTCVVVDVSHEDPEVKFNWYVDGVEVHNAKTKPREEQYNSTYRVVSVLTVLHQDWLNGKEYKCKVSNKALPAPIEKTISKAKGQPREPQVYTLPPSRDELTKNQVSLTCLVKGFYPSDIAVEWESNGQPENNYKTTPPVLDSDGSFFLYSKLTVDKSRWQQGNVFSCSVMHEALHNHYTQKSLSLSPGK

SEQ ID NO: 10809 - protein, 226 aa, Artificial Sequence
  source: /note="Description of Artificial Sequence: Synthetic polypeptide"
EVQLVESGGGLVQPGGSLRLSCAASGFTFTDYTMDWVRQAPGKGLEWVADVNPNSGGSIYNQRFKGRFTLSVDRSKNTLYLQMNSLRAEDTAVYYCARNLGPSFYFDYWGQGTLVTVSSASTKGPSVFPLAPSSKSTSGGTAALGCLVKDYFPEPVTVSWNSGALTSGVHTFPAVLQSSGLYSLSSVVTVPSSSLGTQTYICNVNHKPSNTKVDKKVEPKSCDKTH

SEQ ID NO: 10810 - protein, 447 aa, Artificial Sequence
  source: /note="Description of Artificial Sequence: Synthetic polypeptide"
QVQLVQSGSELKKPGASVKISCKASGYTFTNYGMNWVRQAPGQGLQWMGWINTDSGESTYAEEFKGRFVFSLDTSVNTAYLQITSLTAEDTGMYFCVRVGYDALDYWGQGTLVTVSSASTKGPSVFPLAPSSKSTSGGTAALGCLVKDYFPEPVTVSWNSGALTSGVHTFPAVLQSSGLYSLSSVVTVPSSSLGTQTYICNVNHKPSNTKVDKRVEPKSCDKTHTCPPCPAPELLGGPSVFLFPPKPKDTLMISRTPEVTCVVVDVSHEDPEVKFNWYVDGVEVHNAKTKPREEQYNSTYRVVSVLTVLHQDWLNGKEYKCKVSNKALPAPIEKTISKAKGQPREPQVYTLPPSREEMTKNQVSLTCLVKGFYPSDIAVEWESNGQPENNYKTTPPVLDSDGSFFLYSKLTVDKSRWQQGNVFSCSVMHEALHNHYTQKSLSLSPGK

SEQ ID NO: 10811 - protein, 447 aa, Artificial Sequence
  source: /note="Description of Artificial Sequence: Synthetic polypeptide"
EVQLVESGGGLVQPGGSLRLSCAASGFTFSDYGIAWVRQAPGKGLEWVAFISDLAYTIYYADTVTGRFTISRDNSKNTLYLQMNSLRAEDTAVYYCARDNWDAMDYWGQGTLVTVSSASTKGPSVFPLAPSSKSTSGGTAALGCLVKDYFPEPVTVSWNSGALTSGVHTFPAVLQSSGLYSLSSVVTVPSSSLGTQTYICNVNHKPSNTKVDKKVEPKSCDKTHTCPPCPAPELLGGPSVFLFPPKPKDTLMISRTPEVTCVVVDVSHEDPEVKFNWYVDGVEVHNAKTKPREEQYNSTYRVVSVLTVLHQDWLNGKEYKCKVSNKALPAPIEKTISKAKGQPREPQVYTLPPSREEMTKNQVSLTCLVKGFYPSDIAVEWESNGQPENNYKTTPPVLDSDGSFFLYSKLTVDKSRWQQGNVFSCSVMHEALHNHYTQKSLSLSPGK

SEQ ID NO: 10812 - protein, 447 aa, Artificial Sequence
  source: /note="Description of Artificial Sequence: Synthetic polypeptide"
EVQLVESGGGLVQPGGSLRLSCATSGYTFTEYIIHWVRQAPGKGLEWVASINPDYDITNYNQRFKGRFTISLDKSKRTAYLQMNSLRAEDTAVYYCASWISDFFDYWGQGTLVTVSSASTKGPSVFPLAPSSKSTSGGTAALGCLVKDYFPEPVTVSWNSGALTSGVHTFPAVLQSSGLYSLSSVVTVPSSSLGTQTYICNVNHKPSNTKVDKKVEPKSCDKTHTCPPCPAPELLGGPSVFLFPPKPKDTLMISRTPEVTCVVVDVSHEDPEVKFNWYVDGVEVHNAKTKPREEQYNSTYRVVSVLTVLHQDWLNGKEYKCKVSNKALPAPIEKTISKAKGQPREPQVYTLPPSREEMTKNQVSLTCLVKGFYPSDIAVEWESNGQPENNYKTTPPVLDSDGSFFLYSKLTVDKSRWQQGNVFSCSVMHEALHNHYTQKSLSLSPGK

SEQ ID NO: 10813 - protein, 446 aa, Artificial Sequence
  source: /note="Description of Artificial Sequence: Synthetic polypeptide"
EVQLVESGGGLVQPGGSLRLSCAASGYSITNDYAWNWVRQAPGKGLEWVGYISYSGYTTYNPSLKSRFTISRDTSKNTLYLQMNSLRAEDTAVYYCARWTSGLDYWGQGTLVTVSSASTKGPSVFPLAPSSKSTSGGTAALGCLVKDYFPEPVTVSWNSGALTSGVHTFPAVLQSSGLYSLSSVVTVPSSSLGTQTYICNVNHKPSNTKVDKKVEPKSCDKTHTCPPCPAPELLGGPSVFLFPPKPKDTLMISRTPEVTCVVVDVSHEDPEVKFNWYVDGVEVHNAKTKPREEQYNSTYRVVSVLTVLHQDWLNGKEYKCKVSNKALPAPIEKTISKAKGQPREPQVYTLPPSREEMTKNQVSLTCLVKGFYPSDIAVEWESNGQPENNYKTTPPVLDSDGSFFLYSKLTVDKSRWQQGNVFSCSVMHEALHNHYTQKSLSLSPGK

SEQ ID NO: 10814 - protein, 448 aa, Artificial Sequence
  source: /note="Description of Artificial Sequence: Synthetic polypeptide"
QVQLVQSGAEVKKPGASVKVSCKASGYTFTNSWIGWFRQAPGQGLEWIGDIYPGGGYTNYNEIFKGKATMTADTSTNTAYMELSSLRSEDTAVYYCSRGIPGYAMDYWGQGTLVTVSSASTKGPSVFPLAPSSKSTSGGTAALGCLVKDYFPEPVTVSWNSGALTSGVHTFPAVLQSSGLYSLSSVVTVPSSSLGTQTYICNVNHKPSNTKVDKKVEPKSCDKTHTCPPCPAPELLGGPSVFLFPPKPKDTLMISRTPEVTCVVVDVSHEDPEVKFNWYVDGVEVHNAKTKPREEQYNSTYRVVSVLTVLHQDWLNGKEYKCKVSNKALPAPIEKTISKAKGQPREPQVYTLPPSRDELTKNQVSLTCLVKGFYPSDIAVEWESNGQPENNYKTTPPVLDSDGSFFLYSKLTVDKSRWQQGNVFSCSVMHEALHNHYTQKSLSLSPGK

SEQ ID NO: 10815 - protein, 449 aa, Artificial Sequence
  source: /note="Description of Artificial Sequence: Synthetic polypeptide"
QVQLVQSGGGVVQPGRSLRLSCKASGYTFTRYTMHWVRQAPGKGLEWIGYINPSRGYTNYNQKVKDRFTISRDNSKNTAFLQMDSLRPEDTGVYFCARYYDDHYCLDYWGQGTPVTVSSASTKGPSVFPLAPSSKSTSGGTAALGCLVKDYFPEPVTVSWNSGALTSGVHTFPAVLQSSGLYSLSSVVTVPSSSLGTQTYICNVNHKPSNTKVDKKVEPKSCDKTHTCPPCPAPEAAGGPSVFLFPPKPKDTLMISRTPEVTCVVVDVSHEDPEVKFNWYVDGVEVHNAKTKPREEQYNSTYRVVSVLTVLHQDWLNGKEYKCKVSNKALPAPIEKTISKAKGQPREPQVYTLPPSRDELTKNQVSLTCLVKGFYPSDIAVEWESNGQPENNYKTTPPVLDSDGSFFLYSKLTVDKSRWQQGNVFSCSVMHEALHNHYTQKSLSLSPGK

SEQ ID NO: 10816 - protein, 446 aa, Artificial Sequence
  source: /note="Description of Artificial Sequence: Synthetic polypeptide"
QVQLVQSGAEVKKPGASVKVSCKASGYIFITYWMTWVRQAPGQGLEWMGQIFPASGSADYNEKFEGRVTMTTDTSTSTAYMELRSLRSDDTAVYYCARGGGGFAYWGQGTLVTVSSASTKGPSVFPLAPSSKSTSGGTAALGCLVKDYFPEPVTVSWNSGALTSGVHTFPAVLQSSGLYSLSSVVTVPSSSLGTQTYICNVNHKPSNTKVDKKVEPKSCDKTHTCPPCPAPELLGGPSVFLFPPKPKDTLMISRTPEVTCVVVDVSHEDPEVKFNWYVDGVEVHNAKTKPREEQYNSTYRVVSVLTVLHQDWLNGKEYKCKVSNKALPAPIEKTISKAKGQPREPQVYTLPPSRDELTKNQVSLTCLVKGFYPSDIAVEWESNGQPENNYKTTPPVLDSDGSFFLYSKLTVDKSRWQQGNVFSCSVMHEALHNHYTQKSLSLSPGK

SEQ ID NO: 10817 - protein, 449 aa, Artificial Sequence
  source: /note="Description of Artificial Sequence: Synthetic polypeptide"
QVQLQESGPGLVRPSQTLSLTCTVSGYSITSDHAWSWVRQPPGRGLEWIGYISYSGITTYNPSLKSRVTMLRDTSKNQFSLRLSSVTAADTAVYYCARSLARTTAMDYWGQGSLVTVSSASTKGPSVFPLAPSSKSTSGGTAALGCLVKDYFPEPVTVSWNSGALTSGVHTFPAVLQSSGLYSLSSVVTVPSSSLGTQTYICNVNHKPSNTKVDKKVEPKSCDKTHTCPPCPAPELLGGPSVFLFPPKPKDTLMISRTPEVTCVVVDVSHEDPEVKFNWYVDGVEVHNAKTKPREEQYNSTYRVVSVLTVLHQDWLNGKEYKCKVSNKALPAPIEKTISKAKGQPREPQVYTLPPSREEMTKNQVSLTCLVKGFYPSDIAVEWESNGQPENNYKTTPPVLDSDGSFFLYSKLTVDKSRWQQGNVFSCSVMHEALHNHYTQKSLSLSPGK

SEQ ID NO: 10818 - protein, 450 aa, Artificial Sequence
  source: /note="Description of Artificial Sequence: Synthetic polypeptide"
EVQLVESGGGLVQPGGSLRLSCAASGFNIKDTYIHWVRQAPGKGLEWVARIYPTNGYTRYADSVKGRFTISADTSKNTAYLQMNSLRAEDTAVYYCSRWGGDGFYAMDYWGQGTLVTVSSASTKGPSVFPLAPSSKSTSGGTAALGCLVKDYFPEPVTVSWNSGALTSGVHTFPAVLQSSGLYSLSSVVTVPSSSLGTQTYICNVNHKPSNTKVDKKVEPKSCDKTHTCPPCPAPELLGGPSVFLFPPKPKDTLMISRTPEVTCVVVDVSHEDPEVKFNWYVDGVEVHNAKTKPREEQYNSTYRVVSVLTVLHQDWLNGKEYKCKVSNKALPAPIEKTISKAKGQPREPQVYTLPPSREEMTKNQVSLTCLVKGFYPSDIAVEWESNGQPENNYKTTPPVLDSDGSFFLYSKLTVDKSRWQQGNVFSCSVMHEALHNHYTQKSLSLSPGK

SEQ ID NO: 10819 - protein, 454 aa, Artificial Sequence
  source: /note="Description of Artificial Sequence: Synthetic polypeptide"
EEQLVESGGGLVKPGGSLRLSCAASGFSFSDCRMYWLRQAPGKGLEWIGVISVKSENYGANYAESVRGRFTISRDDSKNTVYLQMNSLKTEDTAVYYCSASYYRYDVGAWFAYWGQGTLVTVSSASTKGPSVFPLAPSSKSTSGGTAALGCLVKDYFPEPVTVSWNSGALTSGVHTFPAVLQSSGLYSLSSVVTVPSSSLGTQTYICNVNHKPSNTKVDKKVEPKSCDKTHTCPPCPAPELLGGPSVFLFPPKPKDTLMISRTPEVTCVVVDVSHEDPEVKFNWYVDGVEVHNAKTKPREEQYNSTYRVVSVLTVLHQDWLNGKEYKCKVSNKALPAPIEKTISKAKGQPREPQVYTLPPSRDELTKNQVSLTCLVKGFYPSDIAVEWESNGQPENNYKTTPPVLDSDGSFFLYSKLTVDKSRWQQGNVFSCSVMHEALHNHYTQKSLSLSPGK

SEQ ID NO: 10820 - protein, 451 aa, Artificial Sequence
  source: /note="Description of Artificial Sequence: Synthetic polypeptide"
QVQLVQSGAEVKKPGASVKVSCKGSGYTFTSYWMHWVRQAPGQRLEWIGEIDPSESNTNYNQKFKGRVTLTVDISASTAYMELSSLRSEDTAVYYCARGGYDGWDYAIDYWGQGTLVTVSSASTKGPSVFPLAPSSKSTSGGTAALGCLVKDYFPEPVTVSWNSGALTSGVHTFPAVLQSSGLYSLSSVVTVPSSSLGTQTYICNVNHKPSNTKVDKKVEPKSCDKTHTCPPCPAPELAGAPSVFLFPPKPKDTLMISRTPEVTCVVVDVSHEDPEVKFNWYVDGVEVHNAKTKPREEQYNSTYRVVSVLTVLHQDWLNGKEYKCKVSNKALPAPIEKTISKAKGQPREPQVYTLPPSRDELTKNQVSLTCLVKGFYPSDIAVEWESNGQPENNYKTTPPVLDSDGSFFLYSKLTVDKSRWQQGNVFSCSVMHEALHNHYTQKSLSLSPGK

SEQ ID NO: 10821 - protein, 448 aa, Artificial Sequence
  source: /note="Description of Artificial Sequence: Synthetic polypeptide"
QVQLVQSGAEVKKPGASVKVSCKASGYTFTNYGMNWVRQAPGQGLKWMGWINTYTGEPTYADAFKGRVTMTRDTSISTAYMELSRLRSDDTAVYYCARDYGDYGMDYWGQGTTVTVSSASTKGPSVFPLAPSSKSTSGGTAALGCLVKDYFPEPVTVSWNSGALTSGVHTFPAVLQSSGLYSLSSVVTVPSSSLGTQTYICNVNHKPSNTKVDKKVEPKSCDKTHTCPPCPAPELLGGPSVFLFPPKPKDTLMISRTPEVTCVVVDVSHEDPEVKFNWYVDGVEVHNAKTKPREEQYNSTYRVVSVLTVLHQDWLNGKEYKCKVSNKALPAPIEKTISKAKGQPREPQVYTLPPSRDELTKNQVSLTCLVKGFYPSDIAVEWESNGQPENNYKTTPPVLDSDGSFFLYSKLTVDKSRWQQGNVFSCSVMHEALHNHYTQKSLSLSPGK

SEQ ID NO: 10822 - protein, 449 aa, Artificial Sequence
  source: /note="Description of Artificial Sequence: Synthetic polypeptide"
QVQLQQSGAEVKKPGASVKVSCEASGYTFPSYVLHWVKQAPGQGLEWIGYINPYNDGTQYNEKFKGKATLTRDTSINTAYMELSRLRSDDTAVYYCARGFGGSYGFAYWGQGTLVTVSSASTKGPSVFPLAPSSKSTSGGTAALGCLVKDYFPEPVTVSWNSGALTSGVHTFPAVLQSSGLYSLSSVVTVPSSSLGTQTYICNVNHKPSNTKVDKRVEPKSCDKTHTCPPCPAPELLGGPSVFLFPPKPKDTLMISRTPEVTCVVVDVSHEDPEVKFNWYVDGVEVHNAKTKPREEQYNSTYRVVSVLTVLHQDWLNGKEYKCKVSNKALPAPIEKTISKAKGQPREPQVYTLPPSREEMTKNQVSLTCLVKGFYPSDIAVEWESNGQPENNYKTTPPVLDSDGSFFLYSKLTVDKSRWQQGNVFSCSVMHEALHNHYTQKSLSLSPGK

SEQ ID NO: 10823 - protein, 448 aa, Artificial Sequence
  source: /note="Description of Artificial Sequence: Synthetic polypeptide"
EVQLVESGGGLVQPGGSLRLSCAASGFTFISYAMSWVRQAPGKGLEWVASISSGGNTYYPDSVKGRFTISRDNAKNSLYLQMNSLRAEDTAVYYCARLDGYYFGFAYWGQGTLVTVSSASTKGPSVFPLAPSSKSTSGGTAALGCLVKDYFPEPVTVSWNSGALTSGVHTFPAVLQSSGLYSLSSVVTVPSSSLGTQTYICNVNHKPSNTKVDKKVEPKSCDKTHTCPPCPAPEALGAPSVFLFPPKPKDTLMISRTPEVTCVVVDVSHEDPEVKFNWYVDGVEVHNAKTKPREEQYNSTYRVVSVLTVLHQDWLNGKEYKCKVSNKALPAPIEKTISKAKGQPREPQVYTLPPSREEMTKNQVSLTCLVKGFYPSDIAVEWESNGQPENNYKTTPPVLDSDGSFFLYSKLTVDKSRWQQGNVFSCSVMHEALHNHYTQKSLSLSPGK

SEQ ID NO: 10824 - protein, 444 aa, Artificial Sequence
  source: /note="Description of Artificial Sequence: Synthetic polypeptide"
EVQLVESGGGLVQPGGSLRLSCAASGYSFTGYYIHWVRQAPGKGLEWVARVIPNAGGTSYNQKFKGRFTLSVDNSKNTAYLQMNSLRAEDTAVYYCAREGIYWWGQGTLVTVSSASTKGPSVFPLAPSSKSTSGGTAALGCLVKDYFPEPVTVSWNSGALTSGVHTFPAVLQSSGLYSLSSVVTVPSSSLGTQTYICNVNHKPSNTKVDKKVEPKSCDKTHTCPPCPAPELLGGPSVFLFPPKPKDTLMISRTPEVTCVVVDVSHEDPEVKFNWYVDGVEVHNAKTKPREEQYNSTYRVVSVLTVLHQDWLNGKEYKCKVSNKALPAPIEKTISKAKGQPREPQVYTLPPSREEMTKNQVSLTCLVKGFYPSDIAVEWESNGQPENNYKTTPPVLDSDGSFFLYSKLTVDKSRWQQGNVFSCSVMHEALHNHYTQKSLSLSPGK

SEQ ID NO: 10825 - protein, 446 aa, Artificial Sequence
  source: /note="Description of Artificial Sequence: Synthetic polypeptide"
QVQLVQSGAEVKKPGSSVKVSCKASGYTFTSYRMHWVRQAPGQGLEWIGYINPSTGYTEYNQKFKDKATITADESTNTAYMELSSLRSEDTAVYYCARGGGVFDYWGQGTLVTVSSASTKGPSVFPLAPSSKSTSGGTAALGCLVKDYFPEPVTVSWNSGALTSGVHTFPAVLQSSGLYSLSSVVTVPSSSLGTQTYICNVNHKPSNTKVDKKVEPKSCDKTHTCPPCPAPELLGGPSVFLFPPKPKDTLMISRTPEVTCVVVDVSHEDPEVKFNWYVDGVEVHNAKTKPREEQYNSTYRVVSVLTVLHQDWLNGKEYKCKVSNKALPAPIEKTISKAKGQPREPQVYTLPPSRDELTKNQVSLTCLVKGFYPSDIAVEWESNGQPENNYKTTPPVLDSDGSFFLYSKLTVDKSRWQQGNVFSCSVMHEALHNHYTQKSLSLSPGK

SEQ ID NO: 10826 - protein, 447 aa, Artificial Sequence
  source: /note="Description of Artificial Sequence: Synthetic polypeptide"
QVQLVESGGGVVQPGRSLRLSCAASGFTFSSYDMSWVRQAPGKGLEWVAKVSSGGGSTYYLDTVQGRFTISRDNSKNTLYLQMNSLRAEDTAVYYCARHLHGSFASWGQGTTVTVSSASTKGPSVFPLAPSSKSTSGGTAALGCLVKDYFPEPVTVSWNSGALTSGVHTFPAVLQSSGLYSLSSVVTVPSSSLGTQTYICNVNHKPSNTKVDKRVEPKSCDKTHTCPPCPAPELLGGPSVFLFPPKPKDTLMISRTPEVTCVVVDVSHEDPEVKFNWYVDGVEVHNAKTKPREEQYNSTYRVVSVLTVLHQDWLNGKEYKCKVSNKALPAPIEKTISKAKGQPREPQVYTLPPSREEMTKNQVSLTCLVKGFYPSDIAVEWESNGQPENNYKTTPPVLDSDGSFFLYSKLTVDKSRWQQGNVFSCSVMHEALHNHYTQKSLSLSPGK

SEQ ID NO: 10827 - protein, 450 aa, Artificial Sequence
  source: /note="Description of Artificial Sequence: Synthetic polypeptide"
QVQLQQSGSELKKPGASVKVSCKASGYTFTNYGVNWIKQAPGQGLQWMGWINPNTGEPTFDDDFKGRFAFSLDTSVSTAYLQISSLKADDTAVYFCSRSRGKNEAWFAYWGQGTLVTVSSASTKGPSVFPLAPSSKSTSGGTAALGCLVKDYFPEPVTVSWNSGALTSGVHTFPAVLQSSGLYSLSSVVTVPSSSLGTQTYICNVNHKPSNTKVDKRVEPKSCDKTHTCPPCPAPELLGGPSVFLFPPKPKDTLMISRTPEVTCVVVDVSHEDPEVKFNWYVDGVEVHNAKTKPREEQYNSTYRVVSVLTVLHQDWLNGKEYKCKVSNKALPAPIEKTISKAKGQPREPQVYTLPPSREEMTKNQVSLTCLVKGFYPSDIAVEWESNGQPENNYKTTPPVLDSDGSFFLYSKLTVDKSRWQQGNVFSCSVMHEALHNHYTQKSLSLSPGK

SEQ ID NO: 10828 - protein, 443 aa, Artificial Sequence
  source: /note="Description of Artificial Sequence: Synthetic polypeptide"
QVQLVQSGAEVKKPGASVKVSCKASGYTFTSYWMHWVRQAPGQGLEWIGNINPSNGGTNYNEKFKSKATMTRDTSTSTAYMELSSLRSEDTAVYYCELMQGYWGQGTLVTVSSASTKGPSVFPLAPSSKSTSGGTAALGCLVKDYFPEPVTVSWNSGALTSGVHTFPAVLQSSGLYSLSSVVTVPSSSLGTQTYICNVNHKPSNTKVDKKVEPKSCDKTHTCPPCPAPELAGAPSVFLFPPKPKDTLMISRTPEVTCVVVDVSHEDPEVKFNWYVDGVEVHNAKTKPREEQYNSTYRVVSVLTVLHQDWLNGKEYKCKVSNKALPAPIEKTISKAKGQPREPQVYTLPPSRDELTKNQVSLTCLVKGFYPSDIAVEWESNGQPENNYKTTPPVLDSDGSFFLYSKLTVDKSRWQQGNVFSCSVMHEALHNHYTQKSLSLSPGK

SEQ ID NO: 10829 - protein, 450 aa, Artificial Sequence
  source: /note="Description of Artificial Sequence: Synthetic polypeptide"
EVQLVESGGGLVQPGGSLRLSCAASGYEFSRSWMNWVRQAPGKGLEWVGRIYPGDGDTNYSGKFKGRFTISADTSKNTAYLQMNSLRAEDTAVYYCARDGSSWDWYFDVWGQGTLVTVSSASTKGPSVFPLAPSSKSTSGGTAALGCLVKDYFPEPVTVSWNSGALTSGVHTFPAVLQSSGLYSLSSVVTVPSSSLGTQTYICNVNHKPSNTKVDKKVEPKSCDKTHTCPPCPAPELLGGPSVFLFPPKPKDTLMISRTPEVTCVVVDVSHEDPEVKFNWYVDGVEVHNAKTKPREEQYNSTYRVVSVLTVLHQDWLNGKEYKCKVSNKALPAPIEKTISKAKGQPREPQVYTLPPSREEMTKNQVSLTCLVKGFYPSDIAVEWESNGQPENNYKTTPPVLDSDGSFFLYSKLTVDKSRWQQGNVFSCSVMHEALHNHYTQKSLSLSPGK

SEQ ID NO: 10830 - protein, 447 aa, Artificial Sequence
  source: /note="Description of Artificial Sequence: Synthetic polypeptide"
EVQLVESGGGLVQPGGSLRLSCAASGYTFSSYWIEWVRQAPGKGLEWIGEILPGGGDTNYNEIFKGRATFSADTSKNTAYLQMNSLRAEDTAVYYCTRRVPIRLDYWGQGTLVTVSSASTKGPSVFPLAPSSKSTSGGTAALGCLVKDYFPEPVTVSWNSGALTSGVHTFPAVLQSSGLYSLSSVVTVPSSSLGTQTYICNVNHKPSNTKVDKKVEPKSCDKTHTCPPCPAPELLGGPSVFLFPPKPKDTLMISRTPEVTCVVVDVSHEDPEVKFNWYVDGVEVHNAKTKPREEQYNSTYRVVSVLTVLHQDWLNGKEYKCKVSNKALPAPIEKTISKAKGQPREPQVYTLPPSREEMTKNQVSLTCLVKGFYPSDIAVEWESNGQPENNYKTTPPVLDSDGSFFLYSKLTVDKSRWQQGNVFSCSVMHEALHNHYTQKSLSLSPGK

SEQ ID NO: 10831 - protein, 449 aa, Artificial Sequence
  source: /note="Description of Artificial Sequence: Synthetic polypeptide"
EVQLVESGGGLVQPGGSLRLSCAASGFTFSSYVMSWVRQAPGKGLEWVATISSGGSYTYYPDSVKGRFTISRDNAKNTLYLQMNSLRAEDTAVYYCARRGDSMITTDYWGQGTLVTVSSASTKGPSVFPLAPSSKSTSGGTAALGCLVKDYFPEPVTVSWNSGALTSGVHTFPAVLQSSGLYSLSSVVTVPSSSLGTQTYICNVNHKPSNTKVDKRVEPKSCDKTHTCPPCPAPELLGGPSVFLFPPKPKDTLMISRTPEVTCVVVDVSHEDPEVKFNWYVDGVEVHNAKTKPREEQYNSTYRVVSVLTVLHQDWLNGKEYKCKVSNKALPAPIEKTISKAKGQPREPQVYTLPPSREEMTKNQVSLTCLVKGFYPSDIAVEWESNGQPENNYKTTPPVLDSDGSFFLYSKLTVDKSRWQQGNVFSCSVMHEALHNHYTQKSLSLSPGK

SEQ ID NO: 10832 - protein, 451 aa, Artificial Sequence
  source: /note="Description of Artificial Sequence: Synthetic polypeptide"
QVQLQQSGAEVKKPGSSVKVSCKASGYTFTSYNMHWVKQAPGQGLEWIGAIYPGNGDTSYNQKFKGKATLTADESTNTAYMELSSLRSEDTAFYYCARSTYYGGDWYFDVWGQGTTVTVSSASTKGPSVFPLAPSSKSTSGGTAALGCLVKDYFPEPVTVSWNSGALTSGVHTFPAVLQSSGLYSLSSVVTVPSSSLGTQTYICNVNHKPSNTKVDKRVEPKSCDKTHTCPPCPAPELLGGPSVFLFPPKPKDTLMISRTPEVTCVVVDVSHEDPEVKFNWYVDGVEVHNAKTKPREEQYNSTYRVVSVLTVLHQDWLNGKEYKCKVSNKALPAPIEKTISKAKGQPREPQVYTLPPSREEMTKNQVSLTCLVKGFYPSDIAVEWESNGQPENNYKTTPPVLDSDGSFFLYSKLTVDKSRWQQGNVFSCSVMHEALHNHYTQKSLSLSPGK

SEQ ID NO: 10833 - protein, 447 aa, Artificial Sequence
  source: /note="Description of Artificial Sequence: Synthetic polypeptide"
QVQLQQSGGELAKPGASVKVSCKASGYTFSSFWMHWVRQAPGQGLEWIGYINPRSGYTEYNEIFRDKATMTTDTSTSTAYMELSSLRSEDTAVYYCASFLGRGAMDYWGQGTTVTVSSASTKGPSVFPLAPCSRSTSESTAALGCLVKDYFPEPVTVSWNSGALTSGVHTFPAVLQSSGLYSLSSVVTVPSSNFGTQTYTCNVDHKPSNTKVDKTVEPKSSDKTHTCPPCPAPPVAGPSVFLFPPKPKDTLMISRTPEVTCVVVDVSHEDPEVQFNWYVDGVEVHNAKTKPREEQAQSTFRVVSVLTVVHQDWLNGKEYKCKVSNKGLPAPIEKTISKTKGQPREPQVYTLPPSREEMTKNQVSLTCLVKGFYPSDIAVEWESNGQPENNYKTTPPMLDSDGSFFLYSKLTVDKSRWQQGNVFSCSVMHEALHNHYTQKSLSLSPGK

SEQ ID NO: 10834 - protein, 444 aa, Artificial Sequence
  source: /note="Description of Artificial Sequence: Synthetic polypeptide"
QVQLVQSGAEVKKPGASVKISCKASGYSFTAYYIHWVKQAPGQGLEWIGYISSYNGATNYNQKFKGRVTFTTDTSTSTAYMELRSLRSDDTAVYYCARDYDYDVGMDYWGQGTLVTVSSASTKGPSVFPLAPCSRSTSESTAALGCLVKDYFPEPVTVSWNSGALTSGVHTFPAVLQSSGLYSLSSVVTVPSSNFGTQTYTCNVDHKPSNTKVDKTVERKCCVECPPCPAPPVAGPSVFLFPPKPKDTLMISRTPEVTCVVVDVSHEDPEVQFNWYVDGVEVHNAKTKPREEQFNSTFRVVSVLTVVHQDWLNGKEYKCKVSNKGLPAPIEKTISKTKGQPREPQVYTLPPSREEMTKNQVSLTCLVKGFYPSDIAVEWESNGQPENNYKTTPPMLDSDGSFFLYSKLTVDKSRWQQGNVFSCSVMHEALHNHYTQKSLSLSPG

SEQ ID NO: 10835 - protein, 445 aa, Artificial Sequence
  source: /note="Description of Artificial Sequence: Synthetic polypeptide"
QVQLQESGPGLVKPSQTLSLTCSFSGFSLSTSGMGVGWIRQPSGKGLEWLAHIWWDGDESYNPSLKSRLTISKDTSKNQVSLKITSVTAADTAVYFCARNRYDPPWFVDWGQGTLVTVSSASTKGPSVFPLAPCSRSTSESTAALGCLVKDYFPEPVTVSWNSGALTSGVHTFPAVLQSSGLYSLSSVVTVTSSNFGTQTYTCNVDHKPSNTKVDKTVERKCCVECPPCPAPPVAGPSVFLFPPKPKDTLMISRTPEVTCVVVDVSHEDPEVQFNWYVDGMEVHNAKTKPREEQFNSTFRVVSVLTVVHQDWLNGKEYKCKVSNKGLPAPIEKTISKTKGQPREPQVYTLPPSREEMTKNQVSLTCLVKGFYPSDIAVEWESNGQPENNYKTTPPMLDSDGSFFLYSKLTVDKSRWQQGNVFSCSVMHEALHNHYTQKSLSLSPG

SEQ ID NO: 10836 - protein, 442 aa, Artificial Sequence
  source: /note="Description of Artificial Sequence: Synthetic polypeptide"
QVQLVQSGAEVKKPGASVKVSCKASGYYTEAYYIHWVRQAPGQGLEWMGRIDPATGNTKYAPRLQDRVTMTRDTSTSTVYMELSSLRSEDTAVYYCASLYSLPVYWGQGTTVTVSSASTKGPSVFPLAPCSRSTSESTAALGCLVKDYFPEPVTVSWNSGALTSGVHTFPAVLQSSGLYSLSSVVTVPSSNFGTQTYTCNVDHKPSNTKVDKTVERKCCVECPPCPAPPVAGPSVFLFPPKPKDTLMISRTPEVTCVVVDVSHEDPEVQFNWYVDGVEVHNAKTKPREEQFNSTFRVVSVLTVVHQDWLNGKEYKCKVSNKGLPSSIEKTISKTKGQPREPQVYTLPPSREEMTKNQVSLTCLVKGFYPSDIAVEWESNGQPENNYKTTPPMLDSDGSFFLYSKLTVDKSRWQQGNVFSCSVMHEALHNHYTQKSLSLSPGK

SEQ ID NO: 10837 - protein, 444 aa, Artificial Sequence
  source: /note="Description of Artificial Sequence: Synthetic polypeptide"
QVQLVQSGAEVKKPGASVKVSCKASGYTFTSYYMHWVRQAPGQGLEWMGEIHPSGGRTNYNEKFKSRVTMTRDTSTSTVYMELSSLRSEDTAVYYCARERPLYASDLWGQGTTVTVSSASTKGPSVFPLAPCSRSTSESTAALGCLVKDYFPEPVTVSWNSGALTSGVHTFPAVLQSSGLYSLSSVVTVPSSNFGTQTYTCNVDHKPSNTKVDKTVERKCCVECPPCPAPPVAGPSVFLFPPKPKDTLMISRTPEVTCVVVDVSHEDPEVQFNWYVDGVEVHNAKTKPREEQFNSTFRVVSVLTVVHQDWLNGKEYKCKVSNKGLPSSIEKTISKTKGQPREPQVYTLPPSREEMTKNQVSLTCLVKGFYPSDIAVEWESNGQPENNYKTTPPMLDSDGSFFLYSKLTVDKSRWQQGNVFSCSVMHEALHNHYTQKSLSLSPGK

SEQ ID NO: 10838 - protein, 449 aa, Artificial Sequence
  source: /note="Description of Artificial Sequence: Synthetic polypeptide"
EVQLVQSGAEVKKPGASVKVSCKASGYTFTDYNMHWVRQAPGQGLEWMGEINPNSGGAGYNQKFKGRVTMTTDTSTSTAYMELRSLRSDDTAVYYCARLGYDDIYDDWYFDVWGQGTTVTVSSASTKGPSVFPLAPCSRSTSESTAALGCLVKDYFPEPVTVSWNSGALTSGVHTFPAVLQSSGLYSLSSVVTVPSSNFGTQTYTCNVDHKPSNTKVDKTVERKCCVECPPCPAPPVAGPSVFLFPPKPKDTLMISRTPEVTCVVVDVSHEDPEVQFNWYVDGVEVHNAKTKPREEQFNSTFRVVSVLTVVHQDWLNGKEYKCKVSNKGLPAPIEKTISKTKGQPREPQVYTLPPSREEMTKNQVSLTCLVKGFYPSDIAVEWESNGQPENNYKTTPPMLDSDGSFFLYSKLTVDKSRWQQGNVFSCSVMHEALHNHYTQKSLSLSPGK

SEQ ID NO: 10839 - protein, 447 aa, Artificial Sequence
  source: /note="Description of Artificial Sequence: Synthetic polypeptide"
QVQLQESGPGLVKPSETLSLTCTVSGFSLIGYDLNWIRQPPGKGLEWIGIIWGDGTTDYNSAVKSRVTISKDTSKNQFSLKLSSVTAADTAVYYCARGGYWYATSYYFDYWGQGTLVTVSSASTKGPSVFPLAPCSRSTSESTAALGCLVKDYFPEPVTVSWNSGALTSGVHTFPAVLQSSGLYSLSSVVTVPSSNFGTQTYTCNVDHKPSNTKVDKTVERKCCVECPPCPAPPVAGPSVFLFPPKPKDTLMISRTPEVTCVVVDVSHEDPEVQFNWYVDGVEVHNAKTKPREEQFNSTFRVVSVLTVVHQDWLNGKEYKCKVSNKGLPSSIEKTISKTKGQPREPQVYTLPPSREEMTKNQVSLTCLVKGFYPSDIAVEWESNGQPENNYKTTPPMLDSDGSFFLYSKLTVDKSRWQQGNVFSCSVMHEALHNHYTQKSLSLSPGK

SEQ ID NO: 10840 - protein, 444 aa, Artificial Sequence
  source: /note="Description of Artificial Sequence: Synthetic polypeptide"
QVQLVQSGAEVKKPGASVKVSCKVSGFPIKDTFQHWVRQAPGKGLEWMGWSDPEIGDTEYASKFQGRVTMTEDTSTDTAYMELSSLRSEDTAVYYCATGDTTYKFDFWGQGTTVTVSSASTKGPSVFPLAPCSRSTSESTAALGCLVKDYFPEPVTVSWNSGALTSGVHTFPAVLQSSGLYSLSSVVTVPSSSLGTKTYTCNVDHKPSNTKVDKRVESKYGPPCPPCPAPEFLGGPSVFLFPPKPKDTLMISRTPEVTCVVVDVSQEDPEVQFNWYVDGVEVHNAKTKPREEQFNSTYRVVSVLTVLHQDWLNGKEYKCKVSNKGLPSSIEKTISKAKGQPREPQVYTLPPSQEEMTKNQVSLTCLVKGFYPSDIAVEWESNGQPENNYKTTPPVLDSDGSFFLYSRLTVDKSRWQEGNVFSCSVMHEALHNHYTQKSLSLSLG

SEQ ID NO: 10841 - protein, 448 aa, Artificial Sequence
  source: /note="Description of Artificial Sequence: Synthetic polypeptide"
EVQLVESGGGLVKPGGSLRLSCAASGFTFSNYAMSWVRQTPEKRLEWVATISRSGSYSYFPDSVQGRFTISRDNAKNSLYLQMNSLRAEDTAVYYCARLGGYDEGDAMDSWGQGTTVTVSSASTKGPSVFPLAPCSRSTSESTAALGCLVKDYFPEPVTVSWNSGALTSGVHTFPAVLQSSGLYSLSSVVTVPSSSLGTKTYTCNVDHKPSNTKVDKRVESKYGPPCPPCPAPEFLGGPSVFLFPPKPKDTLMISRTPEVTCVVVDVSQEDPEVQFNWYVDGVEVHNAKTKPREEQFNSTYRVVSVLTVLHQDWLNGKEYKCKVSNKGLPSSIEKTISKAKGQPREPQVYTLPPSQEEMTKNQVSLTCLVKGFYPSDIAVEWESNGQPENNYKTTPPVLDSDGSFFLYSRLTVDKSRWQEGNVFSCSVMHEALHNHYTQKSLSLSLGK

SEQ ID NO: 10842 - protein, 449 aa, Artificial Sequence
  source: /note="Description of Artificial Sequence: Synthetic polypeptide"
QVQLQQSGPEVVKPGASVKMSCKASGYTFTSYVIHWVRQKPGQGLDWIGYINPYNDGTDYDEKFKGKATLTSDTSTSTAYMELSSLRSEDTAVYYCAREKDNYATGAWFAYWGQGTLVTVSSASTKGPSVFPLAPCSRSTSESTAALGCLVKDYFPEPVTVSWNSGALTSGVHTFPAVLQSSGLYSLSSVVTVPSSSLGTKTYTCNVDHKPSNTKVDKRVESKYGPPCPSCPAPEFLGGPSVFLFPPKPKDTLMISRTPEVTCVVVDVSQEDPEVQFNWYVDGVEVHNAKTKPREEQFNSTYRVVSVLTVLHQDWLNGKEYKCKVSNKGLPSSIEKTISKAKGQPREPQVYTLPPSQEEMTKNQVSLTCLVKGFYPSDIAVEWESNGQPENNYKTTPPVLDSDGSFFLYSRLTVDKSRWQEGNVFSCSVMHEALHNHYTQKSLSLSLGK

SEQ ID NO: 10843 - protein, 445 aa, Artificial Sequence
  source: /note="Description of Artificial Sequence: Synthetic polypeptide"
QVQLVQSGAEVKKPGSSVKVSCKASGYSFTDYHIHWVRQAPGQGLEWMGVINPMYGTTDYNQRFKGRVTITADESTSTAYMELSSLRSEDTAVYYCARYDYFTGTGVYWGQGTLVTVSSASTKGPSVFPLAPCSRSTSESTAALGCLVKDYFPEPVTVSWNSGALTSGVHTFPAVLQSSGLYSLSSVVTVPSSSLGTKTYTCNVDHKPSNTKVDKRVESKYGPPCPPCPAPEFLGGPSVFLFPPKPKDTLMISRTPEVTCVVVDVSQEDPEVQFNWYVDGVEVHNAKTKPREEQFNSTYRVVSVLTVLHQDWLNGKEYKCKVSNKGLPSSIEKTISKAKGQPREPQVYTLPPSQEEMTKNQVSLTCLVKGFYPSDIAVEWESNGQPENNYKTTPPVLDSDGSFFLYSRLTVDKSRWQEGNVFSCSVMHEALHNHYTQKSLSLSLG

SEQ ID NO: 10844 - protein, 445 aa, Artificial Sequence
  source: /note="Description of Artificial Sequence: Synthetic polypeptide"
QVTLRESGPALVKPTQTLTLTCTVSGFSLSAYSVNWIRQPPGKALEWLAMIWGDGKIVYNSALKSRLTISKDTSKNQVVLTMTNMDPVDTATYYCAGDGYYPYAMDNWGQGSLVTVSSASTKGPSVFPLAPCSRSTSESTAALGCLVKDYFPEPVTVSWNSGALTSGVHTFPAVLQSSGLYSLSSVVTVPSSSLGTKTYTCNVDHKPSNTKVDKRVESKYGPPCPPCPAPEFLGGPSVFLFPPKPKDTLMISRTPEVTCVVVDVSQEDPEVQFNWYVDGVEVHNAKTKPREEQFNSTYRVVSVLTVLHQDWLNGKEYKCKVSNKGLPSSIEKTISKAKGQPREPQVYTLPPSQEEMTKNQVSLTCLVKGFYPSDIAVEWESNGQPENNYKTTPPVLDSDGSFFLYSRLTVDKSRWQEGNVFSCSVMHEALHNHYTQKSLSLSLGK

SEQ ID NO: 10845 - protein, 447 aa, Artificial Sequence
  source: /note="Description of Artificial Sequence: Synthetic polypeptide"
EVQLVESGGGLVQPGGSLRLSCAASGFNFNDYFMNWVRQAPGKGLEWVAQMRNKNYQYGTYYAESLEGRFTISRDDSKNSLYLQMNSLKTEDTAVYYCARESYYGFTSYWGQGTLVTVSSASTKGPSVFPLAPCSRSTSESTAALGCLVKDYFPEPVTVSWNSGALTSGVHTFPAVLQSSGLYSLSSVVTVPSSSLGTKTYTCNVDHKPSNTKVDKRVESKYGPPCPPCPAPEFLGGPSVFLFPPKPKDTLMISRTPEVTCVVVDVSQEDPEVQFNWYVDGVEVHNAKTKPREEQFNSTYRVVSVLTVLHQDWLNGKEYKCKVSNKGLPSSIEKTISKAKGQPREPQVYTLPPSQEEMTKNQVSLTCLVKGFYPSDIAVEWESNGQPENNYKTTPPVLDSDGSFFLYSRLTVDKSRWQEGNVFSCSVMHEALHNHYTQKSLSLSLGK

SEQ ID NO: 10846 - protein, 447 aa, Artificial Sequence
  source: /note="Description of Artificial Sequence: Synthetic polypeptide"
QVQLVQSGVEVKKPGASVKVSCKASGYTFTNYYMYWVRQAPGQGLEWMGGINPSNGGTNFNEKFKNRVTLTTDSSTTTAYMELKSLQFDDTAVYYCARRDYRFDMGFDYWGQGTTVTVSSASTKGPSVFPLAPCSRSTSESTAALGCLVKDYFPEPVTVSWNSGALTSGVHTFPAVLQSSGLYSLSSVVTVPSSSLGTKTYTCNVDHKPSNTKVDKRVESKYGPPCPPCPAPEFLGGPSVFLFPPKPKDTLMISRTPEVTCVVVDVSQEDPEVQFNWYVDGVEVHNAKTKPREEQFNSTYRVVSVLTVLHQDWLNGKEYKCKVSNKGLPSSIEKTISKAKGQPREPQVYTLPPSQEEMTKNQVSLTCLVKGFYPSDIAVEWESNGQPENNYKTTPPVLDSDGSFFLYSRLTVDKSRWQEGNVFSCSVMHEALHNHYTQKSLSLSLGK

SEQ ID NO: 10847 - protein, 443 aa, Artificial Sequence
  source: /note="Description of Artificial Sequence: Synthetic polypeptide"
QVQLVQSGAEVKKPGASVKVSCKASGYAFTYYLIEWVRQAPGQGLEWIGVINPGSGGTNYNEKFKGRATITADKSTSTAYMELSSLRSEDTAVYFCARNWMNFDYWGQGTTVTVSSASTKGPSVFPLAPCSRSTSESTAALGCLVKDYFPEPVTVSWNSGALTSGVHTFPAVLQSSGLYSLSSVVTVPSSSLGTKTYTCNVDHKPSNTKVDKRVESKYGPPCPPCPAPEFLGGPSVFLFPPKPKDTLMISRTPEVTCVVVDVSQEDPEVQFNWYVDGVEVHNAKTKPREEQFNSTYRVVSVLTVLHQDWLNGKEYKCKVSNKGLPSSIEKTISKAKGQPREPQVYTLPPSQEEMTKNQVSLTCLVKGFYPSDIAVEWESNGQPENNYKTTPPVLDSDGSFFLYSRLTVDKSRWQEGNVFSCSVMHEALHNHYTQKSLSLSLGK

SEQ ID NO: 10848 - protein, 451 aa, Artificial Sequence
  source: /note="Description of Artificial Sequence: Synthetic polypeptide"
EVQLVESGGGLVQPGGSLRLSCAAAGFTFSSYSMNWVRQAPGKGLEWVSYISSRSRTIYYADSVKGRFTISRDNAKNSLYLQMNSLRDEDTAVYYCARDYGGQPPYYYYYGMDVWGQGTTVTVSSASTKGPSVFPLAPCSRSTSESTAALGCLVKDYFPEPVTVSWNSGALTSGVHTFPAVLQSSGLYSLSSVVTVPSSSLGTKTYTCNVDHKPSNTKVDKRVESKYGPPCPPCPAPEFLGGPSVFLFPPKPKDTLMISRTPEVTCVVVDVSQEDPEVQFNWYVDGVEVHNAKTKPREEQFNSTYRVVSVLTVLHQDWLNGKEYKCKVSNKGLPSSIEKTISKAKGQPREPQVYTLPPSQEEMTKNQVSLTCLVKGFYPSDIAVEWESNGQPENNYKTTPPVLDSDGSFFLYSRLTVDKSRWQEGNVFSCSVMHEALHNHYTQKSLSLSLG

SEQ ID NO: 10849 - protein, 446 aa, Artificial Sequence
  source: /note="Description of Artificial Sequence: Synthetic polypeptide"
QVQLQESGPGLVKPSETLSLTCTVSGFSLTNYGIHWIRQPPGKGLEWLGVIWARGFTNYNSALMSRLTISKDNSKNQVSLKLSSVTAADTAVYYCARANDGVYYAMDYWGQGTLVTVSSASTKGPSVFPLAPCSRSTSESTAALGCLVKDYFPEPVTVSWNSGALTSGVHTFPAVLQSSGLYSLSSVVTVPSSSLGTKTYTCNVDHKPSNTKVDKRVESKYGPPCPSCPAPEFLGGPSVFLFPPKPKDTLMISRTPEVTCVVVDVSQEDPEVQFNWYVDGVEVHNAKTKPREEQFNSTYRVVSVLTVLHQDWLNGKEYKCKVSNKGLPSSIEKTISKAKGQPREPQVYTLPPSQEEMTKNQVSLTCLVKGFYPSDIAVEWESNGQPENNYKTTPPVLDSDGSFFLYSRLTVDKSRWQEGNVFSCSVMHEALHNHYTQKSLSLSLGK

SEQ ID NO: 10850 - protein, 442 aa, Artificial Sequence
  source: /note="Description of Artificial Sequence: Synthetic polypeptide"
QVQLQQSGSELKKPGASVKISCKASGYSFTDYIILWVRQNPGKGLEWIGHIDPYYGSSNYNLKFKGRVTITADQSTTTAYMELSSLRSEDTAVYYCGRSKRDYFDYWGQGTTLTVSSASTKGPSVFPLAPCSRSTSESTAALGCLVKDYFPEPVTVSWNSGALTSGVHTFPAVLQSSGLYSLSSVVTVPSSNFGTQTYTCNVDHKPSNTKVDKTVERKCCVECPPCPAPPVAGPSVFLFPPKPKDTLMISRTPEVTCVVVDVSQEDPEVQFNWYVDGVEVHNAKTKPREEQFNSTYRVVSVLTVLHQDWLNGKEYKCKVSNKGLPSSIEKTISKAKGQPREPQVYTLPPSQEEMTKNQVSLTCLVKGFYPSDIAVEWESNGQPENNYKTTPPVLDSDGSFFLYSRLTVDKSRWQEGNVFSCSVMHEALHNHYTQKSLSLSLG

SEQ ID NO: 10851 - protein, 117 aa, Artificial Sequence
  source: /note="Description of Artificial Sequence: Synthetic polypeptide"
EVQLQQSGAELVRPGVSVKISCKASGYEFSYYWMNWVKQRPGQGLEWIGQIYPGDGETKYNGKFKGKATLTADKSSNTAYMQLSSLTSEDSAVYFCARSHGNYLPYWGQGTLVTVSA

SEQ ID NO: 10852 - protein, 117 aa, Artificial Sequence
  source: /note="Description of Artificial Sequence: Synthetic polypeptide"
QVQLQQSGAELVRPGSSVKISCKASGYEFSYYWMNWVKQRPGQGLQWIGQIYPGDGDTNYNGKFKGKATLTADKSSSTAYMHLTSLTSEDSAVYFCARSGGNPFAFWGQGTLVTVSA

SEQ ID NO: 10853 - protein, 117 aa, Artificial Sequence
  source: /note="Description of Artificial Sequence: Synthetic polypeptide"
EVQLQQSGAELVRPGSSVKISCKASGYAFSYYWMNWVKQRPGQGLEWIGQIYPGDGDTNYSGRFKGKATLTADKSSSTAYIQLSSLTSEDSAVYFCARSHGNYFPYWGQGTLVTVSA

SEQ ID NO: 10854 - protein, 117 aa, Artificial Sequence
  source: /note="Description of Artificial Sequence: Synthetic polypeptide"
EVQLQQSGAELVRPGSSVKISCKASGYAFSYYWMNWVKQRPGQGLEWIGQIYPGDGDTNYNGKFKGKATLTADKSSSTAYMQLSSLTSEDSAVYFCARSHGSYFAYWGQGTLVTVSA

SEQ ID NO: 10855 - protein, 117 aa, Artificial Sequence
  source: /note="Description of Artificial Sequence: Synthetic polypeptide"
EVQLQQSGAELVRPGSSVKISCKASGFAFSNYWMNWVKQRPGQGLEWIGQIYPGDGDTNFNGKFKGRAILTADISSNTAYMQLSSLTSEDSAVYFCARSHGNYFPYWGQGTLVTVSA

SEQ ID NO: 10856 - protein, 117 aa, Artificial Sequence
  source: /note="Description of Artificial Sequence: Synthetic polypeptide"
EVQLQQSGAELVRPGSSVKISCKASGYAFSYYWMNWVKQRPGQGLEWIGQIYPGDGDTNYNGKFKGKATLTADKSSSTAYMQLSSLTSEDSAVYFCARSHGNYFAYWGQGTLVTVSA

SEQ ID NO: 10857 - protein, 108 aa, Artificial Sequence
  source: /note="Description of Artificial Sequence: Synthetic polypeptide"
DIVLTQSPAIMSASLGERVTMTCTASSSVSSSYLHWYQQKPGSSPKLWIYSTSNLASGVPARFSGSGSGTSYSLTISSMEAEDAATYYCHQHHRSPPTFGAGTKLELK

SEQ ID NO: 10858 - protein, 117 aa, Artificial Sequence
  source: /note="Description of Artificial Sequence: Synthetic polypeptide"
EVQLQQSGAELVRPGSSVKISCKASGYVFGNYWMNWVKQRPGQGLEWIGQIYPGDGDTNYNGKFKGKATLTADKSSSTAYMQLSSLTSEDSAVYFCARSHGNYFPYWGQGTLVTVSA

SEQ ID NO: 10859 - protein, 117 aa, Artificial Sequence
  source: /note="Description of Artificial Sequence: Synthetic polypeptide"
EVQLQQSGAELVRPGSSVKISCKASGYAFRDYWMNWVKQRPGQGLEWIGQIYPGDGATNYIGKFKGKATLTADKSSSTAYMQLSSLTSEDSAVYFCARSHGNYFPYWGHGTLVTVSA

SEQ ID NO: 10860 - protein, 117 aa, Artificial Sequence
  source: /note="Description of Artificial Sequence: Synthetic polypeptide"
EVQLQQSGAELVRPGSSVKISCKASGYAFSYYWMNWVKQRPGQGLEWIGQIYPGDGDTNYNGKFKGKATLTADKSSSTAYMQLSSLTSEDSAVYFCARSHGNYFPYWGQGTLVTVSA

SEQ ID NO: 10861 - protein, 117 aa, Artificial Sequence
  source: /note="Description of Artificial Sequence: Synthetic polypeptide"
EVQLQQFGAELVRPGSSVKISCKASGYAFSYYWMNWVKQRPGQGLEWIGQIYPGDGDTNYNGKFKGKATLTADKSSSTAYMQLSSLTSEDSAVYFCARSHGNYFAYWGQGTLVTVSA

SEQ ID NO: 10862 - protein, 117 aa, Artificial Sequence
  source: /note="Description of Artificial Sequence: Synthetic polypeptide"
EVQLQQSGAELVRPGSSVKISCKASGYAFSNYWMNWVKQRPGQGLEWIGQIYPGDGDTNFNGKFKGRAILTADISSNTAYMQLSSLTSEDSAVYFCARSHGNYFPYWGQGTLVTVSA

SEQ ID NO: 10863 - protein, 117 aa, Artificial Sequence
  source: /note="Description of Artificial Sequence: Synthetic polypeptide"
EVKLVESGGGLVQPGGSLKLSCAASGFTFSSYTMSWVRQTPEKRLEWVAYISNGGGSTYYPDTVKGRFTISRDNAKNTLYLQMSSLKSEDTAMYYCARHRDGNYDYWGQGTTVTVSS

SEQ ID NO: 10864 - protein, 117 aa, Artificial Sequence
  source: /note="Description of Artificial Sequence: Synthetic polypeptide"
GVQLQQSGAELVRPGSSVKISCKASGFAFSYYWMNWVKQRPGQGLEWIGQIYPGDGDTNFNGKFKGRAILTADISSNTAYMQLSSLTSEDSAVYFCARSHGNYFPYWGRGTLVTVSA

SEQ ID NO: 10865 - protein, 121 aa, Artificial Sequence
  source: /note="Description of Artificial Sequence: Synthetic polypeptide"
EVQLQQSGAELMKPGASVKISCKATGYTFSSYWIEWVKQRPGHGLEWIGEILPGSGSTNYNEKFKGKATFTADTSSNTAYMQLSSLTSEDSAVYYCARGAWLLSYWYFDVWGAGTSVTVSS

SEQ ID NO: 10866 - protein, 117 aa, Artificial Sequence
  source: /note="Description of Artificial Sequence: Synthetic polypeptide"
EVQLQQSGAELLRPGSSVKISCKASGYEFSYYWMNWVKQRPGQGLEWIGQIYPGDGETKYNGKFKGKATLTADKSSSTAYMQLSSLTSEDSAVYFCARSHGNYLPYWGQGTLVTVSA

SEQ ID NO: 10867 - protein, 117 aa, Artificial Sequence
  source: /note="Description of Artificial Sequence: Synthetic polypeptide"
EVQLQQSGAELLRPGSSVKISCKASGYEFSYYWMNWVKQRPGQGLEWIGQIYPGDGETKYNGKFKGKATLTADKSSSTAYMQFSSLTSEDSAVYFCARSHGNHLAYWGQGTLVTVSA

SEQ ID NO: 10868 - protein, 117 aa, Artificial Sequence
  source: /note="Description of Artificial Sequence: Synthetic polypeptide"
EVQLQQSGAELLRPGSSVKISCKASGYEFSYYWMNWVKQRPGQGLEWIGQIYPGDGETKYNGKFKGKATLTADKSSNTAYMQLSSLTSEDSAVYFCTRSHGNYLPYWGQGTLVTVSA

SEQ ID NO: 10869 - protein, 117 aa, Artificial Sequence
  source: /note="Description of Artificial Sequence: Synthetic polypeptide"
EVQLQQSGPELMKPGASVKISCKASGYEFSYYWMNWVKQRPGQGLEWIGQIYPGDGETKYNGKFKGKATLTADKSSSTAYMQLSSLTSEDSAVYFCARSHGNYLPSWGQGTLVTVSA

SEQ ID NO: 10870 - protein, 117 aa, Artificial Sequence
  source: /note="Description of Artificial Sequence: Synthetic polypeptide"
EVQLQQSGAELLRPGSSVKISCKASGYEFSYYWMNWVKQRPGQGLEWIGQIYPGDGETKYNGKFKGKATLTADKSSSTAYMQLSSLTSEDSAVYFCARSHGNYIPYWGQGTLVTVSA

SEQ ID NO: 10871 - protein, 117 aa, Artificial Sequence
  source: /note="Description of Artificial Sequence: Synthetic polypeptide"
EVQLQQSGAELLRPGSSVKISCKASGYEFNYYWMNWVKQRPGQGLEWIGQIYPGDGETKYNGKFKGKATLTADKSSSTAYMQLSSLTSEDSAVYFCARSHGNYLPYWGQGTLVTVSA

SEQ ID NO: 10872 - protein, 117 aa, Artificial Sequence
  source: /note="Description of Artificial Sequence: Synthetic polypeptide"
EVQLQQSGAELLRPGSSVKISCKASGYEFSYYWMNWVKQRPGQGLEWIGQIYPGDGETKYNGKFKGKATLTADKSSSTAYMQLSSLTSEDSAVYFCARSHGNYLAYWGQGTLVTVSA

SEQ ID NO: 10873 - protein, 117 aa, Artificial Sequence
  source: /note="Description of Artificial Sequence: Synthetic polypeptide"
EVQLQQSGPELVKPGSSVKISCKASGYEFSYYWMNWVKQRPGQGLEWIGQIYPGDGETKYNGKFKGKATLTADKSSSTAYMQLSSLTSEDSAVYFCARSHGNHLPYWGQGTLVTVSA

SEQ ID NO: 10874 - protein, 117 aa, Artificial Sequence
  source: /note="Description of Artificial Sequence: Synthetic polypeptide"
EVQLQQSGAELLRPGSSVKISCKASGYEFSYYWMNWVKQRPGQGLEWIGQIYPGDGETKYNGKFKGKATLTADKSSNTAYMQLSSLTSEDSAVYFCARSHGNYLPYWGQGTLVTVSA

SEQ ID NO: 10875 - protein, 117 aa, Artificial Sequence
  source: /note="Description of Artificial Sequence: Synthetic polypeptide"
QVQLVQSGAEVKKPGSSVKVSCKASGGTFSYYWMNWVRQAPGQGLEWMGQIYPGDGETKYAQKFQGRVTITADKSTSTAYMELSSLRSEDTAVYYCARSHGNYLPYWGQGTLVTVSS

SEQ ID NO: 10876 - protein, 117 aa, Artificial Sequence
  source: /note="Description of Artificial Sequence: Synthetic polypeptide"
QVQLVQSGAEVKKPGSSVKVSCKASGYEFSYYWMNWVRQAPGQGLEWMGQIYPGDGETKYAQKFQGRVTITADKSTSTAYMELSSLRSEDTAVYYCARSHGNYLPYWGQGTLVTVSS

SEQ ID NO: 10877 - protein, 117 aa, Artificial Sequence
  source: /note="Description of Artificial Sequence: Synthetic polypeptide"
QVQLVQSGAEVKKPGSSVKVSCKASGYEFSYYWMNWVRQAPGQGLEWMGQIYPGDGETKYNGKFQGRVTITADKSTSTAYMELSSLRSEDTAVYYCARSHGNYLPYWGQGTLVTVSS

SEQ ID NO: 10878 - protein, 107 aa, Artificial Sequence
  source: /note="Description of Artificial Sequence: Synthetic polypeptide"
DIQMTQTSSSLSASLGDRVTFSCRASQDISNYLNWYQQKPDGTVKLLIYYTSRLHSGVTSRFRGSGSGTDYSLTISNLEQEDVATYFCQQGHTLPWSFGGGTKLEIK

SEQ ID NO: 10879 - protein, 108 aa, Artificial Sequence
  source: /note="Description of Artificial Sequence: Synthetic polypeptide"
DIVLNQSPAIMSASLGERVTMTCTASSSVSSSYLHWYQQKPGSSPKLWIYSTSNLASGVPARFSGSGSGTSYSLTISSMEAEDAATYYCHQYHRSPLTFGAGTKLEIK

SEQ ID NO: 10880 - protein, 111 aa, Artificial Sequence
  source: /note="Description of Artificial Sequence: Synthetic polypeptide"
DIELAQSPASLAVSLGQRATISCRASESVDSYGNSFMHWYQQKPGQPPKLLIYLASNLESGVPARFSGSGSRADFTLTIDPVEADDAATYYCLQYASSPPTFGAGTKLEIK

SEQ ID NO: 10881 - protein, 108 aa, Artificial Sequence
  source: /note="Description of Artificial Sequence: Synthetic polypeptide"
QIVLTQSPAIMSASLGERVTMTCTASSSVSSSYLHWYQQKPGSSPKLWIYSTSNLASGVPARFSGSGSGTSYSLTISSMEAEDAATYYCHQYHRSPLTFGAGTKLELK

SEQ ID NO: 10882 - protein, 108 aa, Artificial Sequence
  source: /note="Description of Artificial Sequence: Synthetic polypeptide"
QIVLTQSPAIMSASLGERVTMTCTASSSVSSSYLHWYQQKPGSSPKLWIYSTSNLASGVPARFSGSGSGTSYSLTISSMEAEDAATYYCHQYHRSPLAFGAGTKLELK

SEQ ID NO: 10883 - protein, 117 aa, Artificial Sequence
  source: /note="Description of Artificial Sequence: Synthetic polypeptide"
EVQLQQSGAELVRPGSSVKISCKASGYAFSYYWMNWVKQRPGQGLEWIGQIYPGDGDTNYNGKFKGKATLTVDKSSSTAYMQLSSLTSEDSAVYFCARSHGNYFAYWGQGTLVTVSA

SEQ ID NO: 10884 - protein, 108 aa, Artificial Sequence
  source: /note="Description of Artificial Sequence: Synthetic polypeptide"
QIVLTQSPAIMSASLGERVTMTCTASSSVSSSYLHWYQQKPGSSPKLWIYSTSNLASGVPARFSGSGSGTSYSLTISSMEAEDAATYYCQQWSSYPLTFGAGTKLELK

SEQ ID NO: 10885 - protein, 108 aa, Artificial Sequence
  source: /note="Description of Artificial Sequence: Synthetic polypeptide"
DIVMTQSPAIMSASLGERVTMTCTASSSISSSYLHWYQQKPGSSPKLWIYSTSNLASGVPARFSGSGSGTSYSLTISSMEAEDAATYYCHQYHRSPLAFGAGTKLELK

SEQ ID NO: 10886 - protein, 117 aa, Artificial Sequence
  source: /note="Description of Artificial Sequence: Synthetic polypeptide"
EVQLQQSGAELVRPGSSVKISCKASGYAFSYYWMNWVKQRPGQGLEWIGQIYPGDGDTNYNGKVKGKATLTADKSSSTAYMQLSSLTSEDSAVYFCARSHGNYFAYWGQGTLVTVSA

SEQ ID NO: 10887 - protein, 108 aa, Artificial Sequence
  source: /note="Description of Artificial Sequence: Synthetic polypeptide"
DIVMTQSPAIMSASLGERVTMTCTASSSVSSSYLHWYQQKPGSSPKLWIYSTSNLASGVPARFSGSGSGTSYSLTISSMEAEDAATYYCQQWSSNPLTFGAGTKLELK

SEQ ID NO: 10888 - protein, 108 aa, Artificial Sequence
  source: /note="Description of Artificial Sequence: Synthetic polypeptide"
DIVITQSPAIVSASLGERVTMTCTASSSVSSSYLHWYQQKPGSSPKLWIYSTSNLASGVPARFSGSGSGTSYSLTISSMEAEDAATYYCQQWSSYPLTFGAGTKLEIK

SEQ ID NO: 10889 - protein, 108 aa, Artificial Sequence
  source: /note="Description of Artificial Sequence: Synthetic polypeptide"
DIVMTQSPAIMSASLGERVTMTCTASSSVSSSYLHWYQQKPGSSPKLWIYGTSNLASGVPVRFSGSGSGTSYSLTISSMEAEDAATYYCQQWSSYPLTFGAGTKLELK

SEQ ID NO: 10890 - protein, 108 aa, Artificial Sequence
  source: /note="Description of Artificial Sequence: Synthetic polypeptide"
DIVLTQSPAIMSASLGERVTMTCTASSSVSSSYLHWYQQKPGSSPKLWIYSTSNLASGVPARFSGSGSGTSYSLTISSMEAEDAATYYCQQWSSYPLTFGAGTKLELK

SEQ ID NO: 10891 - protein, 108 aa, Artificial Sequence
  source: /note="Description of Artificial Sequence: Synthetic polypeptide"
DIVLTQSPAIMSASLGERVTMTCTASSSVSSSYLHWYQQKPGSSPKLWIYSTSNLASGVPARFSGSGSGTSYSLTISSMEAEDAATYYCQQWSSNPLTFGAGTKLELK

SEQ ID NO: 10892 - protein, 108 aa, Artificial Sequence
  source: /note="Description of Artificial Sequence: Synthetic polypeptide"
DIVLTQSPTTMAASPGEKITITCSASSSISSNYLHWYQQKPGFSPKLLIYRTSTLASGVPARFSGSGSGTSYSLTISSMEAEDAATYYCHQYHRSPHTFGSGTKLEIK

SEQ ID NO: 10893 - protein, 112 aa, Artificial Sequence
  source: /note="Description of Artificial Sequence: Synthetic polypeptide"
DIVITQDELSNPVTSGESVSISCRSSKSLLYKDGKTYLNWFLQRPGQSPQLLIYLMSTRASGVSDRFSGSGSGTDFTLEISKVKAEDVGVYYCQQLVEYPLTFGAGTKLEIK

SEQ ID NO: 10894 - protein, 108 aa, Artificial Sequence
  source: /note="Description of Artificial Sequence: Synthetic polypeptide"
DIVLTQSPAIMSASLGERVTMTCTASSNVSSSYLHWYQQKPGSSPKLWIYSTSNLASGVPARFSGSGSGTSYSLTISSMEAEDAATYYCHQYHRSPPTFGAGTKLELK

SEQ ID NO: 10895 - protein, 107 aa, Artificial Sequence
  source: /note="Description of Artificial Sequence: Synthetic polypeptide"
DIQMMQSTSSLSASLGDRVTISCSASQGISNYLNWYQQKPDGTVKLLIYYTSSLHSGVPSRFSGSGSGTQFSLKINSLQPEDFGSYYCQHHYGTPYTFGGGTKLELK

SEQ ID NO: 10896 - protein, 108 aa, Artificial Sequence
  source: /note="Description of Artificial Sequence: Synthetic polypeptide"
DIVLNQSPAIMSASPGEKVTITCTASSSVSSSYLHWYQQKPGSSPKLWIYSTSNLASGVPARFSGSGSGTSYSLTISSMEAEDAATYYCQQYHTYPPTFGSGTKLEIK

SEQ ID NO: 10897 - protein, 108 aa, Artificial Sequence
  source: /note="Description of Artificial Sequence: Synthetic polypeptide"
DIVLSQSPAIMSASLGERVTMTCTASSSVSSSYLHWYQQKPGSSPKLWVYSTSNLASGVPARFSGSGSGTSYSLTISSMEAEDAATYYCHQYHRSPPTFGGGTKLEIK

SEQ ID NO: 10898 - protein, 108 aa, Artificial Sequence
  source: /note="Description of Artificial Sequence: Synthetic polypeptide"
DIVLSQSPAIMSASPGERVTMTCTASSSVSSSYLHWYQQKPGSSPKLWIYSTSNLASGVPARFSGSGSGTSYSLTISSMEAEDAATYYCHQYHRSPPTFGGGTKLELK

SEQ ID NO: 10899 - protein, 108 aa, Artificial Sequence
  source: /note="Description of Artificial Sequence: Synthetic polypeptide"
DIVLSQSPAIMSASLGERVTMTCTASSSVSSSYLHWYQQKPGSSPKLWIYSTSNLASGVPARFSGSGSGTSYSLTISSMEAEDAATYYCHQYHRSPPTFGGGTKLELK

SEQ ID NO: 10900 - protein, 111 aa, Artificial Sequence
  source: /note="Description of Artificial Sequence: Synthetic polypeptide"
DIELTQSPASLAVSLGQRATISCRASESVDSYGNSFMHWYQQKPGQPPKLLIYLASNLESGVPARFSGSGSRTDFTLTIDPVEADDAATYYCQQNNEDPPTFGGGTKLEIK

SEQ ID NO: 10901 - protein, 111 aa, Artificial Sequence
  source: /note="Description of Artificial Sequence: Synthetic polypeptide"
DIVLTQSPASLAVSLGQRATISCRASESVDSYGNSFMHWYQQKPGQPPKLLIYLASNLEPGVPARFSGSGSRTDFTLTIDPVEADDAATYYCQQNNEDPPTFGGGTKLELK

SEQ ID NO: 10902 - protein, 110 aa, Artificial Sequence
  source: /note="Description of Artificial Sequence: Synthetic polypeptide"
DIVLTQSPASLAVSLGQRATISCRASQSVSTSRYSYMHWYQQKPGQPPKLLIKYASNLESGVPARFSGSGSGTDFTLNIHPVEEEDIATYYCQHSWEIPTFGSGTKLELK

SEQ ID NO: 10903 - protein, 108 aa, Artificial Sequence
  source: /note="Description of Artificial Sequence: Synthetic polypeptide"
DIVLNQSPAIMSASLGERVTMTCTASSSVSSSYLHWYQQKPGSSPKLWIYSTSNLASGVPARFSGSGSGTSYSLTISSMEAEDAATYYCHQYHRSPPTFGGGTKLELK

SEQ ID NO: 10904 - protein, 108 aa, Artificial Sequence
  source: /note="Description of Artificial Sequence: Synthetic polypeptide"
DIVMTQSPAIMSASLGERVTMTCTASSSVSSSYLHWYQQKPGSSPKLWIYSTSNLASGVPARFSGSGSGTSYSLTISSMEAEDAATYYCHQYHRSPPTFGGGTKLELK

SEQ ID NO: 10905 - protein, 108 aa, Artificial Sequence
  source: /note="Description of Artificial Sequence: Synthetic polypeptide"
DIVLTQSPAIMSASLGERVTLTCTASSSVSSSYLHWYQQKPGSSPKLWIYSTSNLASGVPARFSGSGSGTSYSLTISSMEAEDAATYYCHQYHRSPPTFGGGTKLEIK

SEQ ID NO: 10906 - protein, 108 aa, Artificial Sequence
  source: /note="Description of Artificial Sequence: Synthetic polypeptide"
GILMTQSPAIMSASLGERVTMTCTASSSISSNYLHWYQQKPGFSPKLLIYRTSNLASGVPARFSGSGSGTSYSLTISSMEAEDAATYYCHQFHRSPPTFGGGTKLELK

SEQ ID NO: 10907 - protein, 108 aa, Artificial Sequence
  source: /note="Description of Artificial Sequence: Synthetic polypeptide"
DIELTQSPAIMSASLGERVTMTCTASSSVSSSYLHWYQQKPGSSPKLWIYSTSNLASGVPARFSGSGSGTSYSLTISSMEAEDAATYFCQQWSSFPLTFGGGTKLELK

SEQ ID NO: 10908 - protein, 108 aa, Artificial Sequence
  source: /note="Description of Artificial Sequence: Synthetic polypeptide"
DIVLNQSPAIMSASLGERVTMTCTASSSVSSSYLHWYQQKPGSSPKLWIYSTSNLASGVPARFSGSGSGTSYSLTISSMEAEDAATYYCHQHHRSPPTFGGGTKLEIK

SEQ ID NO: 10909 - protein, 111 aa, Artificial Sequence
  source: /note="Description of Artificial Sequence: Synthetic polypeptide"
DIVLTQSPASLAVSLGQRATISCRASKSVSTSGYSYMHWFQQKPGQPPKLLIKYASNLESGVPARFSGSGSGTDFTLNIHPVEEEDAATYYCQHGWELPFTFGSGTKLELK

SEQ ID NO: 10910 - protein, 108 aa, Artificial Sequence
  source: /note="Description of Artificial Sequence: Synthetic polypeptide"
DIVMTQSPAIMSASLGERVTLTCTASSSVSSSYLHWYQQKPGSSPKLWIYSTSNLASGVPARFSGSGSGTSYSLTISSMEAEDAATYYCHQYHRSPPTFGGGTKLELK

SEQ ID NO: 10911 - protein, 111 aa, Artificial Sequence
  source: /note="Description of Artificial Sequence: Synthetic polypeptide"
DIVMTQSPASLAVSLGQRATISCRASESVDSYGNSFMHWYQQKAGQPPKLLIYLASNLESGVPARFSGSGSRTDFTLTIDPVEADDAATYYCQQHYSTPPTFGGGTKLEIK

SEQ ID NO: 10912 - protein, 108 aa, Artificial Sequence
  source: /note="Description of Artificial Sequence: Synthetic polypeptide"
DIVITQSPAIMSASLGERVTMTCTASSSVSSSYLHWYQQKPGSSPKLWIYSTSNLASGVPARFSGSGSGTSYSLTISSMEAEDAAIYYCQQWNYPPITFGSGTKLEIK

SEQ ID NO: 10913 - protein, 108 aa, Artificial Sequence
  source: /note="Description of Artificial Sequence: Synthetic polypeptide"
DIVMTQSPAIMSASPGEKVTITCSASSSISSNYLHWYQQKPGFSPKLLIYRTSNLASGVPARFSGSGSGTSYSLTIGTMEAEDVATYYCQQGSSIPFTFGSGTKLEIK

SEQ ID NO: 10914 - protein, 107 aa, Artificial Sequence
  source: /note="Description of Artificial Sequence: Synthetic polypeptide"
DIVLNQSPAIMSASLGERVTMTCTASSSVSSSYLHWYQQKPGSSPKLWIYSTSNLASGVPARFSGSGSGTSYSLTISSMEAEDAATYYCHQYHRSHTFGGGTKLEIK

SEQ ID NO: 10915 - protein, 108 aa, Artificial Sequence
  source: /note="Description of Artificial Sequence: Synthetic polypeptide"
EIVLTQSPATLSLSPGERATLSCRASQSVSSSYLHWYQQKPGQAPRLLIYSTSNLASGIPARFSGSGSGTDFTLTISRLEPEDFAVYYCHQYHRSPPTFGQGTKVEIK

SEQ ID NO: 10916 - protein, 117 aa, Artificial Sequence
  source: /note="Description of Artificial Sequence: Synthetic polypeptide"
EVQLQQSGAELLRPGSSVKISCKASGYEFSYYWMNWVKQRPGQGLEWIGQIYPGDGDTNFNGKFKGKATLTADKSSSTAYMQLSSLTSEDSAVYFCARSHGNHLAYWGQGTLVTVSA

SEQ ID NO: 10917 - protein, 108 aa, Artificial Sequence
  source: /note="Description of Artificial Sequence: Synthetic polypeptide"
DIQMTQSPSSLSAAVGDRVTITCQASQDIVNYLNWYQQKPGKAPKLLIYVASNLETGVPSRFSGSGSGTDFSLTISSLQPEDVATYYCQQYDNLPLTFGGGTKVEIKR

SEQ ID NO: 10918 - protein, 119 aa, Homo sapiens
QVQLQESGPGLVKPSETLSLTCTVSGGSISSSYWSWIRQPPGQGLEWIWVYLLQRKHLLQPLPQESSHHINRHVQDPVLPEPDLCERCGHGRVLLCERWHTRSHRYGRLGPRDHGHRLL

SEQ ID NO: 10919 - protein, 114 aa, Homo sapiens
EVQLVQSGGDIVQSGGSLRLSCAASGFVFSSNWMHWVRQRPGKGLEWISLINVDGRTTKYADSVKGRFTISRDNAKKTVYLQMDSLRAEDTAVYYCVKVEGLNWGPGTLVTVSS

SEQ ID NO: 10920 - protein, 123 aa, Homo sapiens
EVQLVESGAEVKKPGASVTLSCKASGYTFTAYYIHWVRQAREQGLEWMGVINPSTGTTFYAQNFPDRVSVTRDTSTSTVFMELHNLKSEDTAVYYCARAISEHGSGSYSPYYWGQGTLVTVSS

SEQ ID NO: 10921 - protein, 121 aa, Homo sapiens
EVQLVESGAEVKEPGSSVRVSCKTSGGSFNRHVITWVRQAPGQGLEWMGEIIPFFGTPKYAPKFQGRVTIIADASTSTFFLDVKSLTSEDTALYFCWIVVVSVVQRREDFWGQGILVTVSS

SEQ ID NO: 10922 - protein, 125 aa, Homo sapiens
EVQLVESGGGLVQPGGSLRLSCAVSGFTFDTFAMSWVRQAPGKGLEWVSAITASSSKTYYADSVKGRFTISRDNSRNTVYLRLSSLRADDTAVYFCARPKGAHSGLYIESAFDLWGPGTMVTVSS

SEQ ID NO: 10923 - protein, 130 aa, Homo sapiens
EVQLVESGGGVVQAGGSLRLSCVASGLTFSSYGMHWVRQAPGKGLEWVAVISYDGRSKFYADSVKGRFTISRDNSKNTLYLQMNSLRAEDAAVYYCANARVRDACSGTRCDKFGFYMDVWGKGTTVTVSS

SEQ ID NO: 10924 - protein, 127 aa, Homo sapiens
EVQLVESGGGLVKPGGSLRLSCAASGLPFSKAWMSWVRQAPGKGLEWVGRIKSQADGGAIDYATSVNGRFTITRDDSKNTLYLQMTSLKTEDTAVYYCTPGIILRFLEGTLRWNGRLGPRDHGHRLL

SEQ ID NO: 10925 - protein, 107 aa, Homo sapiens
EIVLTQSPSSLSASVGDTVTITCRSSQNISNYLSWFQHKPGKAPRILVYAASTLQTGVPSRFSGRGSGTIFTLSITSLQSEDYATYYCQQNDKIPRTFGQGTKVEIK

SEQ ID NO: 10926 - protein, 108 aa, Homo sapiens
SYVLTQPPSVSVSPGQTARITCSGDALPKKYAYWYQQKSGQAPVLVIYEDIKRPSGIPERFSGSSSGTMATLTISGAQVEDEGDYYCYSADRSGNRWAFGGGTKLTVL

SEQ ID NO: 10927 - protein, 107 aa, Homo sapiens
SYVLTQPPSVSVSLGQMAAITCSGEALPKKYGYWYQQKPGQVPVLLIYRDVERPSGVPDRFSGSSSGTMVTLTISGVQAEDEADYYCLSADSSGTWVFGGGTKLTVL

SEQ ID NO: 10928 - protein, 735 aa, Artificial Sequence
  source: /note="Description of Artificial Sequence: Synthetic polypeptide"
MAADGYLPDWLEDTLSEGIRQWWKLKPGPPPPKPAERHKDDSRGLVLPGYKYLGPFNGLDKGEPVNEADAAALEHDKAYDRQLDSGDNPYLKYNHADAEFQERLKEDTSFGGNLARAVFQAKKRVLEPLGLVEEPVKTAPGKKRPVEHSPAEPDSSSGTGKSGQQPARKRLNFGQTGDADSVPDPQPLGQPPAAPSGLGTNTMASGSGAPMADNNEGADGVGNSSGNWHCDSTWMGDRVITTSTRTWALPTYNNHLYKQISSQSGASNDNHYFGYSTPWGYFDFNRFHCHFSPRDWQRLINNNWGFRPKRLNFKLFNIQVKEVTQNDGTTTIANNLTSTVQVFTDSEYQLPYVLGSAHQGCLPPFPADVFMVPQYGYLTLNNGSQAVGRSSFYCLEYFPSQMLRTGNNFTFSYTFEDVPFHSSYAHSQSLDRLMNPLIDQYLYYLSRTNTPSGTTTQSRLQFSQAGASDIRDQSRNWLPRPCYRQQRVSKTAADNNNSDYSWTGATKYHLNGRDSLVNPGTAMASHKDDEEKYFPQSGVLIFGKQDSGKTNVDIEKVMITDEEEIRTTNPVATEQYGSVSTNLQSGNTQAATSDVNTQGVLPGMVRQDRDVYLQGPIWAKIPHTDGHFHPSPLMGGFGLKHPPPQILIKNTPVPANPSTTFSAAKFASFITQYSTGQVSVEIEWEPQKENSKRWNPEIQYTSNYNKSVNVDFTVDTNGVYSEPRPIGTRYLTRNL

SEQ ID NO: 10929 - protein, 735 aa, Artificial Sequence
  source: /note="Description of Artificial Sequence: Synthetic polypeptide"
MAADGYLPDWLEDTLSEGIRQWWKLKPGPPPPKPAERHKDDSRGLVLPGYKYLGPFNGLDKGEPVNEADAAALEHDKAYDRQLDSGDNPYLKYNHADAEFQERLKEDTSFGGNLARAVFQAKKRVLEPLGLVEEPVKTAPGKKRPVEHSPAEPDSSSGTGKSGQQPARKRLNFGQTGDADSVPDPQPLGQPPAAPSGLGTNTMASGSGAPMADNNEGADGVGNSSGNWHCDSTWMGDRVITTSTRTWALPTYNNHLYKQISSQSGASNDNHYFGYSTPWGYFDFNGFHCHFSPRDWQRLINNNWGFRPKRLNFKLFNIQVKEVTQNDGTTTIANNLTSTVQVFTDSEYQLPYVLGSAHQGCLPPFPADVFMVPQYGYLTLNNGSQAVGRSSFYCLEYFPSQMLRTGNNFTFSYTFEDVPFHSSYAHSQSLDRLMNPLIDQYLYYLSRTNTPSGTTTQSRLQFSQAGASDIRDQSRNWLPGPCYRQQRVSKTAADNNNSDYSWTGATKYHLNGRDSLVNPGTAMASHKDDEEKYFPQSGVLIFGKQDSGKTNVDIEKVMITDEEEIRTTNPVATEQYGSVSTNLQSGDTQAATSDVNTQGVLPGMARQDRDVYLQGPIWAKIPHTDGHFHPSPLMGGFGLKHPPPQILIKNTPVPANPSTTFSAAKFASFITQYSTGQVSVEIEWEPQKENSKRWNPEIQYTSNYNKSVNVDFTVDTNGVYSEPRPIGTRYLTRNL

SEQ ID NO: 10930 - protein, 735 aa, Artificial Sequence
  source: /note="Description of Artificial Sequence: Synthetic polypeptide"
MAADGYLPDWLEDTLSEGIRQWWKLKPGPPPPKPAERHKDDSRGLVLPGYKYLGPFNGLDKGEPVNEADAAALEHDKAYDRQLDSGDNPYLKYNRADAEFQERLKEDTSFGGNLARAVFQAKKRVLEPLGLVEEPVKTAPGKKRPVEHSPAEPDSSSGTGKSGQQPARKRLNFGQTGDADSVPDPQPLGQPPAAPSGLGTNTMASGSGAPMADNNEGADGVGNSSGNWHCDSTWMGDRVITTSTRTWALPTYNNHLYKQISSQSGASNDNHYFGYSTPWGYFDFNRFHCHFSPRDWQRLINNNWGFRPKRLNFKLFNIQVKEVTQNDGTTTIANNLTSTVQVFTDSEYQLPYVLGSAHQGCLPPFPADVFMVPQYGYLTLNNGSQAVGRSSFYCLEYFPSQMLRTGNNFTFSYTFEDVPFHSSYAHSQSLDRLMNPLIDQYLYYLSRTNTPSGTTTQSRLQFSQAGASDIRDQSRNWLPGPCYRQQRVSKTAADNNNSDYSWTGATKYHLNGRDSLVNPGTAMASHKDDEEKYFPQSGVLIFGKQDSGKTNVDIEKVMITDEEEIRTTNPVATEQYGSVSTNLQSGNTQAATSDVNTQGVLPGMVRQDRDVYLQGPIWAKIPHTDGHFHPSPLMGGFGLKHPPPQILIKNTPVPANPSTTFSAAKFASFITQYSTGQVSVEIEWEPQKENSKRWNPEIQYTSNYNKSVNVDFTVDTNGVYSEPRPIGTRYLTRNL

SEQ ID NO: 10931 - protein, 735 aa, Artificial Sequence
  source: /note="Description of Artificial Sequence: Synthetic polypeptide"
MAADGYLPDWLEDTLSEGIRQWWKLKPGPPPPKPAERHKDDSRGLVLPGYKYLGPFNGLDKGEPVNEADAAALEHDKAYDRQLDSGDNPYLKYNHADAEFQERLKEDTSFGGNLARAVFQAKKRVLEPLGLVEEPVKTAPGKKRPVEHSPAEPDSSSGTGKSGQQPARKRLNFGQTGDADSVPDPQPLGQPPAAPSGLGTNTMASGSGAPMADNNEGADGVGNSSGNWHCDSTWMGDRVITTSTRTWALPTYNNHLYKQISSQSGASNDNHYFGYSTPWGYFDFNRFHCHFSPRDWQRLINNNWGFRPKRLNFKLFNIQVKEVTQNDGTTTIANNLTSTVQVFTDSEYQLPYVLGSAHQGCLPPFPADVFMVPQYGYLTLNNGSQAVGRSSFYCLEYFPSQMLRTGNNFTFSYTFEDVPFHSSYAHSQSLDRLMNPLIDQYLYYLSRTNTPSGTTTQSRLQFSQAGASDIRDQSRNWLPGPCYRQQRVSKTAADNNNSDYSWTGATKYHLNGRDSLVNPGTAMASHKDDEEKYFPQSGVLIFGKQDSGKTNVDIEKVMITDEEEVRTTNPVATEQYGSVSTNLQSGNTQAATSDVNTQGVLPGMVRQDRDVYLQGPIWAKIPHTDGHFHPSPLMGGFGLKHPPPQILIKNTPVPANPSTTFSAAKFASFITQYSTGQVSVEIEWEPQKENSKRWNPEIQYTSNYNKSVNVDFTVDTNGVYSEPRPIGTRYLTRNL

SEQ ID NO: 10932 - protein, 735 aa, Artificial Sequence
  source: /note="Description of Artificial Sequence: Synthetic polypeptide"
MAADGYLPDWLEDTLSEGIRQWWKLKPGPPPPKPAERHKDDSRGLVLPGYKYLGPFNGLDKGEPVNEADAAALEHDKAYDRQLDSGDNPYLKYNHADAEFQERLKEDTSFGGNLARAVFQAKKRVLEPLGLVEEPVKTAPGKKRPVEHSPAGPDSSSGTGKSGQQPARKRLNFGQTGDADSVPDPQPLGQPPAAPSGLGTNTMASGSGAPMADNNEGADGVGNSSGNWHCDSTWMGDRVITTSTRTWALPTYNNHLYKQISSQSGASNDNHYFGYSTPWGYFDFNRFHCHFSPRDWQRLINNNWGFRPKRLNFELFNIQVKEVTQNDGTTTIANNLTSTVQVFTDSEYQLPYVLGSAHQGCLPPFPADVFMVPQYGYLTLNNGSQAVGRSSFYCLEYFPSQMLRTGNNFTFSYTFEDVPFHSSYAHSQSLDRLMNPLIDQYLYYLSRTNTPSGTTTQSRLQFSQAGASDIRDQSRNWLPGPCYRQQRVSKTAADNNNSDYSWTGATKYHLNGRDSLVNPGTAMASHKDDEEKYFPQSGVLIFGKQDSGKTNVDIEKVMITDEEEIRTTNPVATEQYGSVSTNLQSGNTQAATSDVNTQGVLPGMVWQDRDVYLQGPIWAKIPHTDGHFHPSPLMGGFGLKHPPPQILIKSTPVPANPSTTFSAAKFASFITQYSTGQVSVEIEWELQKENSKRWNPEIQYTSNYNKSVNVDFTVDTNGVYSEPRPIGTRYLTRNL

SEQ ID NO: 10933 - protein, 735 aa, Artificial Sequence
  source: /note="Description of Artificial Sequence: Synthetic polypeptide"
MAADGYLPDWLEDTLSEGIRQWWKLKPGPPPPKPAERHKDDSRGLVLPGYKYLGPFNGLDKGEPVNEADAAALEHDKAYDRQLDSGDNPYLKYNHADAEFQERLKEDTSFGGNLARAVFQAKKRVLEPLGLVEEPVKTAPGKKRPVEHSPAGPDSSSGTGKSGQQPARKRLNFGQTGDADSVPDPQPLGQPPAAPSGLGTNTMASGSGAPMADNNEGADGVGNSSGNWHCDSTWMGDRVITTSTRTWALPTYNNHLYKQISSQSGASNDNHYFGYSTPWGYFDFNRFHCYFSPRDWQRLINNNWGFRPKRLNFELFNIQVKEVTQNDGTTTIANNLTSTVQVFTDSEYQLPYVLGSAHQGCLPPFPADVFMVPQYGYLTLNNGSQAVGRSSFYCLEYFPSQMLRTGNNFTFSYTFEDVPFHSSYAHSQSLDRLMNPLIDQYLYYLSRTNTPSGTTTQSRLQFSQAGASDIRDQSRNWLPGPCYRQQRVSKTAADNNNSDYSWTGATKYHLNGRDSLVNPGTAMASHKDDEEKYFPQSGVLIFGKQDSGKTNVDIEKVMITDEEEIRTTNPVATEQYGSVSTNLQSGNTQAATSDVNTQGVLPGMVWQDRDVYLQGPIWAKIPHTDGHFHPSPLMGGFGLKHPPPQILIKSTPVPANPSTTFSAAKFASFITQYSTGQVSVEIEWELQKENSKRWNPEIQYTSNYNKSVNVDFTVDTNGVYSEPRPIGTRYLTRNL

SEQ ID NO: 10934 - protein, 734 aa, Artificial Sequence
  source: /note="Description of Artificial Sequence: Synthetic polypeptide"
MAADGYLPDWLEDTLSEGIRQWWKLKPGPPPPKPAERHKDDSRGLVLPGYKYLGPFNGLDKGEPVNEADAAALEHDKAYDRQLDSGDNPYLKYNHADAEFQERLKEDTSFGGNLARAVFQAKKRVLEPLGLVEEPVKTAPGKKRPVEHSPAEPDSSSGTGKSGQQPARKRLNFGQTGDADSVPDPQPLGQPPAAPSGLGTNTMASGSGAPMADNNEGADGVGNSSGNWHCDSTWMGDRVITTSTRTWALPTYNNHLYKQISSQSGASNDNHYFGYSTPWGYFDFNRFHCHFSPRDWQRLINNNWGFRPKRLNFKLFNIQVKEVTQNDGTTTIANNLTSTVQVFTDSEYQLPYVLGSAHQGCLPPFPADVFMVPQYGYLTLNNGSQAVGRSSFYCLEYFPSQMLRTGNNFTFSYTFEDVPFHSSYAHSQSLDRLMNPLIDQYLYYLSRTNTPSGTTTQSRLQFSQAGASDIRDQSRNWLPGPCYRQQRVSKTAADNNSDYSWTGATKYHLNGRDSLVNPGTAMASHKDDEEKYFPQSGVLIFGKQDSGKTNVDIEKVMITDEEEIRTTNPVATEQYGSVSTNLQSGNTQAATSDVNTQGVLPGMVRQDRDVYLQGPIWAKIPHTDGHFHPSPLMGGFGLKHPPPQILIKNTPVPANPSTTFSAAKFASFITQYSTGQVSVEIEWEPQKENSKRWNPEIQYTSNYNKSVNVDFTVDTNGVYSEPRPIGTRYLTRNL

SEQ ID NO: 10935 - protein, 735 aa, Artificial Sequence
  source: /note="Description of Artificial Sequence: Synthetic polypeptide"
MAADGYLPDWLEDTLSEGIRQWWKLKPGPPPPKPAERHKDDSRGLVLPGYKCLGPFNGLDKGEPVNEADAAALEHDKAYDRQLDSGDNPYLKYNHADAEFQERLKEDTSFGGNLARAVFQAKKRVLEPLGLVEEPVKTAPGKKRPVEHSPAESDSSSGTGKSGQQPARKRLNFGQTGDADSVPDPQPLGQPPAAPSGLGTNTMASGSGAPMADNNEGADGVGNSSGNWHCDSTWMGDRVITTSTRTWALPTYNNHLYKQISSQSGASNDNHYFGYSTPWGYFDFNRFHCHFSPRDWQRLINNNWGFRPKRLNFKLFNIQVKEVTQNDGTTTIANNLTSTVQVFTDSEYQLPYVLGSAHQGCLPPFPADVFMVPQYGYLTLNNGSQAVGRSSFYCLEYFPSQMLRTGNNFTFSYTFEDVPFHSSYAHSQSLDRLMNPLIDQYLYYLSRTNTPSGTTTQSRLQFSQAGASDIRDQSRNWLPGPCYRQQRVSKTAADNNNSDYSWTGATKYHLNGRDSLVNPGTAMASHKDDEEKYFPQSGVLIFGKQDSGKTNVDIEKVMITDEEEIRTTNPVATEQYGSVSTNLQSGNTQAATSDVNTQGVLPGMVWQDRDVYLQGPIWAKIPHTDGHFHPSPLMGGFGLKHPPPQILIKNTPVPANPSTTFSAAKFASFITQYSTGQVSVEIEWELQKENSKRWNPEIQYTSNYNKSVNVDFTVDTNGVYSEPRPIGTRYLTRNL

SEQ ID NO: 10936 - protein, 735 aa, Artificial Sequence
  source: /note="Description of Artificial Sequence: Synthetic polypeptide"
MAADGYLPDWLEDILSEGIRQWWKLKPGPPPPKPAERHKDDSRGLVLPGYKYLGPFNGLDKGEPVNEADAAALEHDKAYDRQLDSGDNPYLKYNHADAEFQERLKEDTSFGGNLGRAVFQAKKRVLEPLGLVEEPVKTAPGKKRPVEQSPAEPDSSSGTGKAGNQPARKRLNFGQTGDADSVPDPQPLGQPPAAPSGLGTNTMASGSGAPMADNNEGADGVGNSSGNWHCDSTWMGDRVITTSTRTWALPTYNNHLYKQISSQSGASNDNHYFGYSTPWGYFDFNRFHCHFSPRDWQRLINNNWGFRPKRLNFKLFNIQVKEVTQNDGTTTIANNLTSTVQVFTDSEYQLPYVLGSAHQGCLPPFPADVFMVPQYGYLTLNNGSQAVGRSSFYCLEYFPSQMLRTGNNFTFSYTFEDVPFHSSYAHSQSLDRLMNPLIDQYLYYLSRTNTPSGTTTQSRLQFSQAGASDIRDQSRNWLPGPCYRQQRVSKTAADNNNSDYSWTGATKYHLNGRDSLVNPGTAMASHKDDEEKYFPQSGVLIFGKQDSGKTNVDIEKVMITDEEEIRTTNPVATEQYGSVSTNLQSGNTQAATSDVNTQGVLPGMVRQDRDVYLQGPIWAKIPHTDGHFHPSPLMGGFGLKHPPPQILIKNTPVPANPSTTFSAAKFASFITQYSTGQVSVEIEWEPQKENSKRWNPEIQYTSNYNKSVNVDFTVDTNGVYSEPRPIGTRYLTRNL

SEQ ID NO: 10937 - protein, 735 aa, Artificial Sequence
  source: /note="Description of Artificial Sequence: Synthetic polypeptide"
MAADGYLPDWLEDTLSEGIRQWWKLKPGPPPPKPAERHKDDSRGLVLPGYKYLGPFNGLDKGEPVNEADAAALEHDKAYDRQLDSGDNPYLKYNHADAEFQERLKEDTSFGGNLARAVFQAKKRVLEPLGLVEEPVKTAPGKKRPVEHSPAEPDSSSGTGKSGQQPARKRLNFGQTGDADSVPDPQPLGQPPAAPSGLGTNTMASGSGAPMADNNEGADGVGNSSGNWHCDSTWMGDRVITTSTRTWALPTYNNHLYKQISSQSGASNDNHYFGYSTPWGYFDFNRFHCHFSPRDWQRLINNNWGFRPKRLNFKLFNIQVKEVTQNDGTTTIANNLTSTVQVFTDSEYQLPYVLGSAHQGCLPPFPADVFMVPQYGYLTLNNGSQAVGRSSFYCLEYFPSQMLRTGNNFTFSYTFEDVPFHSSYAHSQSLDRLMNPLIDQYLYYLSRTNTPSGTTTQSRLQFSQAGASDIRDQSRNWLPGPCYRQQRVSKTAADNNNSDYSWTGATKYHLNGRDSLVNPGTAMASHKDDEEKYFPQSGVLIFGKQDSGKTNVDIEKVMITDEEEIRTTNPVATEQYGSVSTNLQSGNTQAATSDVNTQGVLPGMVRQDRDVYLQGPIWAKIPHTDGHFHPSPLMGGFGLKHPPPQILIKNTPVPANPSTTFSAAKFASFITQYSTGQVSVEIEWEPQKENSKRWNPEIQYTSNYNKSVNVDFTVDTNGVYSEPRPIGTRCLTRNL

SEQ ID NO: 10938 - protein, 735 aa, Artificial Sequence
  source: /note="Description of Artificial Sequence: Synthetic polypeptide"
MAADGYLPDWLEDTLSEGIRQWWKLKPGPPPPKPAERHKDDSRGLVLPGYKYLGPFNGLDKGEPVNEADAAALEHDKAYDRQLDSGDNPYLKYNHADAEFQERLKEDTSFGGNLARAVFQAKKRVLEPLGLVEEPVKTAPGKKRPVEHSPAEPDSSSGTGKSGQQPARKRLNFGQTGDADSVPDPQPLGQPPAAPSGLGTNTMASGSGAPMADNNEGADGVGNSSGNWHCDSTWMGDRVITTSTRTWALPTYNNHLYKQISSQSGASNDNHYFGYSTPWGYFDFNRFHCHFSPRDWQRLINNNWGFRPKRLNFKLFNIQVKEVTQNDGTTTIANNLTSTVQVFTDSEYQLPYVLGSAHQGCLPPFPADVFMVPQYGYLTLNNGSQAVGRSSFYCLEYFPSQMLRTGNNFTFSYTFEDVPFHSSYAHSQSLDRLMNPLIDQYLYYLSRTNTPSGTTTQSRLQFSQAGASDIRDQSRNWLPGPCYRQQRVSKTAADNNNSDYSWTGATKYHLNGRDSLVNPGTAMASHKDDEEKYFPQSGVLIFGKQDSGKTNVDIEKVMITDEEEIRTTNPVATEQYGSVSTNLQSGNTQAATSDVNTQGVLPGMVRQGRDVYLQGPIWAKIPHTDGHFHPSPLMGGFGLKHPPPQILIKNTPVPANPSTTFSAAKFASFITQYSTGQVSVEIEWEPQKENSKRWNPEIQYTSNYNKSVNVDFTVDTNGVYSEPRPIGTRYLTRNL

SEQ ID NO: 10939 - protein, 735 aa, Artificial Sequence
  source: /note="Description of Artificial Sequence: Synthetic polypeptide"
MAADGYLPDWLEDTLSEGIRQWWKLKPGPPPPKPAERHKDDSRGLVLPGYKYLGPFNGLDKGEPVNEADAAALEHDKAYDRQLDSGDNPYLKYNHADAEFQERLKEDTSFGGNLARAVFQAKKRVLEPLGLVEEPVKTAPGKKRPVEHSPAEPDSSSGTGKSGQQPARKRLNFGQTGDADSVPDPQPLGQPPAAPSGLGTNTMASGSGAPMADNNEGADGVGNSSGNWHCDSTWMGDRVITTSTRTWALPTYNNHLYKQISSQSGASNDNHYFGYSTPWGYFDFNRFHCHFSPRDWQRLINNNWGFRPKRLNFKLFNIQVKEVTQNDGTTTIANNLTSTVQVFTDSEYQLPYVLGSAHQGCLPPFPADVFMVPQYGYLTLNNGSQAVGRSSFYCLEYFPSQMLRTGNNFTFSYTFEDVPFHSSYAHSQSLDRLMNPLIDQYLYYLSRTNTPSGTTTQSRLQFSQAGASDIRDQSRNWLPGPCYRQQRVSKTAADNNNSDYSWTGATKYHLNGRDSLVNPGTAMASHKDDEEKYFPQSGVLIFGKQDSGKTNVDIEKVMITDEGEIRTTNPVATEQYGSVSTNLQSGNTQAATSDVNTQGVLPGMVRQDRDVYLQGPIWAKIPHTDGHFHPSPLMGGFGLKHPPPQILIKNTPVPANPSTTFSAAKFASFITQYSTGQVSVEIEWEPQKENSKRWNPEIQYTSNYNKSVNVDFTVDTNGVYSEPRPIGTRYLTRNL

SEQ ID NO: 10940 - protein, 735 aa, Artificial Sequence
  source: /note="Description of Artificial Sequence: Synthetic polypeptide"
MAADGYLPDWLEDTLSEGIRQWWKLKPGPPPPKPAERHKDDSRGLVLPGYKYLGPFNGLDKGEPVNEADAAALEHDKAYDRQLDSGDNPYLKYNHADAEFQERLKEDTSFGGNLARAVFQAKKRVLEPLGLVEEPVKTAPGKKRPVEHSPAEPDSSSGTGKSGQQPARKRLNFGQTGDADSVPDPQPLGQPPAAPSGLGTNTMASGSGAPMADNNEGADGVGNSSGNWHCDSTWMGDRVITTSTRTWALPTYNNHLYKQISSQSGASNDNHYFGYSTPWGYFDFNRFHCHFSPRDWQRLINNNWGFRPKRLNFELFNIQVKEVTQNDGTTTIANNLTSTVQVFTDSEYQLPYVLGSAHQGCLPPFPADVFMVPQYGYLTLNNGSQAVGRSSFYCLEYFPSQMLRTGNNFTFSYTFEDVPFHSSYAHSQSLDRLMNPLIDQYLYYLSRTNTPSGTTTQSRLQFSQAGASDIRDQSRNWLPGPCYRQQRVSKTAADNNNSDYSWTGATKYHLNGRDSLVNPGTAMASHKDDEEKYFPQSGVLIFGKQDSGKTNVDIEKVMITDEEEIRTTNPVATEQYGSVSTNLQSGNTQAATSDVNTQGVLPGMVWQDRDVYLQGPIWAKIPHTDGHFHPSPLMGGFGLKHPPPQILIKSTPVPANPSTTFSAAKFASFITQYSTGQVSVEIEWELQKENSKRWNPEIQYTSNYNKSVNVDFTVDTNGVYSEPRPIGTRYLTRNL

SEQ ID NO: 10941 - protein, 735 aa, Artificial Sequence
  source: /note="Description of Artificial Sequence: Synthetic polypeptide"
MAADGYLPDWLEDILSEGIRQWWKLKPGPPPPKPAERHKDDSRGLVLPGYKYLGPFNGLDKGEPVNEADAAALEHDKAYDRQLDSGDNPYLKYNHADAEFQERLKEDTSFGGNLGRAVFQAKKRVLEPLGLVEEPVKTAPGKKRPVEQSPAEPDSSSGTGKAGNQPARKRLNFGQTGDADSVPDPQPLGQPPAAPSGLGSTTMATGSGAPMADNNEGADGVGNSSGNWHCDSTWMGDRVITTSTRTWALPTYNNHLYKQISSQSGASNDNHYFGYSTPWGYFDFNRFHCHFSPRDWQRLINNNWGFRPKRLNFKLFNIQVKEVTQNDGTTTIANNLTSTVQVFTDSEYQLPYVLGSAHQGCLPPFPADVFMVPQYGYLTLNNGSQAVGRSSFYCLEYFPSQMLRTGNNFTFSYTFEDVPFHSSYAHSQSLDRLMNPLIDQYLYYLSRTNTPSGTTTQSRLQFSQAGASDIRDQSRNWLPGPCYRQQRVSKTAADNNNSDYSWTGATKYHLNGRDSLVNPGTAMASHKDDEEKYFPQSGVLIFGKQDSGKTNVDIEKVMITDEEEIRTTNPVATEQYGSVSTNLQSGNTQAATSDVNTQGVLPGMVRQDRDVYLQGPIWAKIPHTDGHFHPSPLMGGFGLKHPPPQILIKNTPVPANPSTTFSAAKFASFITQYSTGQVSVEIEWEPQKENSKRWNPEIQYTSNYNKSVNVDFTVDTNGVYSEPRPIGTRYLTRNL

SEQ ID NO: 10942 - protein, 735 aa, Artificial Sequence
  source: /note="Description of Artificial Sequence: Synthetic polypeptide"
MAADGYLPDWLEDTLSEGIRQWWKLKPGPPPPKPAERHKDDSRGLVLPGYKYLGPFNGLDKGEPVNEADAAALEHDKAYDRQLDSGDNPYLKYNHADAEFQERLKEDTSFGGNLARAVFQAKKRVLEPLGLVEEPVKTAPGKKRPVEHSPAEPDSSSGTGKSGQQPARKRLNFGQTGDADSVPDPQPLGQPPAAPSGLGTNTMASGSGAPMADNNEGADGVGNSSGNWHCDSTWMGDRVITTSTRTWALPTYNNHLYKQISSQSGASNDNHYFGYSTPWGYFDFNRFHCHFSPRDWQRLINNNWGFRPKRLNFKLFNIQVKEVTQNDGTTTIANNLTSTVQVFTDSEYQLPYVLGSAHQGCLPPFPADVFMVPQYGYLTLNNGSQAVGRSSFYCLEYFPSQMLRTGNNFTFSYTFEDVPFHSSYAHSQSLDRLMNPLIDQYLYYLSRTNTPSGTTTQSRLQFSQAGASDIRDQSRNWLPGPCYRQQRVSKTAADNNNSDYSWTGATKYHLNGRDSLVNPGTAMASHKDDEEKYFPQSGVLIFGKQDSGKTNVDIEKVMITDEEEIRTTNPVATEQYGSVSTNLQSGNTQAATSDVNTQGVLPGMVRQDRDVYLQGPIWAKIPHTDGHFHPSPLMGGFGLKHPPPQILIKNTPVPANPSTTFSAAKFASFITQYSTGQVSVEIEWEPQKENSKRWNPEIQYTSNYNKSVNVDFTVDTNGVYSEPRPIGTRYLTRNL

SEQ ID NO: 10943 - protein, 735 aa, Artificial Sequence
  source: /note="Description of Artificial Sequence: Synthetic polypeptide"
MAADGYLPDWLEDTLSEGIRQWWKLKPGPPPPKPAERHKDDSRGLVLPGYKYLGPFNGLDKGEPVNEADAAALEHDKAYDRQLDSGDNPYLKYNHADAEFQERLKEDTSFGGNLARAVFQAKKRVLEPLGLVEEPVKTAPGKKRPVEHSPAEPDSSSGTGKSGQQPARKRLNFGQTGDADSVPDPQPLGQPPAAPSGLGTNTMASGSGAPMADNNEGADGVGNSSGNWHCDSTWMGDRVITTSTRTWALPTYNNHLYKQISSQSGASNDNHYFGYSTPWGYFDFNRFHCHFSPRDWQRLINNNWGFRPKRLNFKLFNIQVKEVTQNDGTTTIANNLTSTVQVFTDSEYQLPYVLGSAHQGCLPPFPADVFMVPQYGYLTQNNGSQAVGRSSFYCLEYFPSQMLRTGNNFTFSYTFEDVPFHSSYAHSQSLDRLMNPLIDQYLYYLSRTNTPSGTTTQSRLQFSQAGASDIRDQSRNWLPGPCYRQQRVSKTAADNNNSDYSWTGATKYHLNGRDSLVNPGTAMASHKDDEEKYFPQSGVLIFGKQDSGKTNVDIEKVMITDEEEIRTTNPVATEQYGSVSTNLQSGNTQAATSDVNTQGVLPGMVRQDRDVYLQGPIWAKIPHTDGHFHPSPLMGGFGLKHPPPQILIKNTPVPANPSTTFSAAKFASFITQYSTGQVSVEIEWEPQKENSKRWNPEIQYTSNYNKSVNVDFTVDTNGVYSEPRPIGTRYLTRNL

SEQ ID NO: 10944 - protein, 735 aa, Artificial Sequence
  source: /note="Description of Artificial Sequence: Synthetic polypeptide"
MAADGYLPDWLEDTLSEGIRQWWKLKPGPPPPKPAERHKDDSRGLVLPGYKYLGPFNGLDKGEPVNEADAAALEHDKAYDRQLDSGDNPYLKYNRADAEFQERLKEDTSFGGNLARAVFQAKKRVLEPLGLVEEPVKTAPGKKRPVEHSPAGPDSSSGTGKSGQQPARKRLNFGQTGDADSVPDPQPLGQPPAAPSGLGTNTMASGSGAPMADNNEGADGVGNSSGNWHCDSTWMGDRVITTSTRTWALPTYNNHLYKQISSQSGASNDNHYFGYSTPWGYFDFNRFHCHFSPRDWQRLINNNWGFRPKRLNFELFNIQVKEVTQNDGTTTIANNLTSTVQVFTDSEYQLPYVLGSAHQGCLPPFPADVFMVPQYGYPTLNNGSQAVGRSSFYCLEYFPSQMLRTGNNFTFSYTFEDVPFHSSYAHSQSLDRLMNPLIDQYLYYLSRTNTPSGTTTQSRLQFSQAGASDIRDQSRNWLPGPCYRQQRVSKTAADNNNSDYSWTGATKYHLNGRDSLVNPGTAMASHKDDEEKYFPQSGVLIFGKQDSGKTNVDIEKVMITDEEEIRTTNPVATEQYGSVSTNLQSGNTQAATSDVNTQGVLPGMVWQDRDVYLQGPIWAKIPHTDGHFHPSPLMGGFGLKHPPPQILIKSTPVPANPSTTFSAAKFASFITQYSTGQVSVEIEWELQKENSKRWNPEIQYTSNYNKSVNVDFTVDTNGVYSEPRPIGTRYLTRNL

SEQ ID NO: 10945 - protein, 735 aa, Artificial Sequence
  source: /note="Description of Artificial Sequence: Synthetic polypeptide"
MAADGYLPDWLEDTLSEGIRQWWKLKPGPPPPKPAERHKDDSRGLVLPGYKYLGPFNGLDKGEPVNEADAAALEHDKAYDRQLDSGDNPYLKYNHADAEFQERLKEDTSFGGNLARAVFQAKKRVLEPLGLVEEPVKTAPGKKRPVEHSPAEPDSSSGTGKSGQQPARKRLNFGQTGDADSVPDPQPLGQPPAAPSGLGTNTMASGSGAPMADNNEGADGVGNSSGNWHCDSTWMGDRVITTSTRTWALPTYNNHLYKQISSQSGASNDNHYFGYSTPWGYFDFNGFHCHFSPRDWQRLINNNWGFRPKRLNFKLFNIQVKEVTQNDGTTTIANNLTSTVQVFTDSEYQLPYVLGSAHQGCLPPFPADVFMVPQYGYLTLNNGSQAVGRSSFYCLEYFPSQMLRTGNNFTFSYTFEDVPFHSSYAHSQSLDRLMNPLIDQYLYYLSRTNTPSGTTTQSRLQFSQAGASDIRDQSRNWLPGPCYRQQRVSKTAADNNNSDYSWTGATKYHLNGRDSLVNPGTAMASHKDDEEKYFPQSGVLIFGKQDSGKTNVDIEKVMITDEEEIRTTNPVATEQYGSVSTNLQSGNTQAATSDVNTQGVLPGMVRQDRDVYLQGPIWAKIPHTDGHFHPSPLMGGFGLKHPPPQILIKNTPVPANPSTTFSAAKFASFITQYSTGQVSVEIEWEPQKENSKRWNPEIQYTSNYNKSVNVDFTVDTNGVYSEPRPIGTRYLTRNL

SEQ ID NO: 10946 - protein, 735 aa, Artificial Sequence
  source: /note="Description of Artificial Sequence: Synthetic polypeptide"
MAADGYLPDWLEDTLSEGIRQWWKLKPGPPPPKPAERHKDDSRGLVLPGYKYLGPFNGLDKGEPVNEADAAALEHDKAYDRQLDSGDNPYLKYNHADAEFQERLKEDTSFGGNLARAVFQAKKRVLEPPGLVEEPVKTAPGKKRPVEHSPAEPDSSSGTGKSGQQPARKRLNFGQTGDADSVPDPQPLGQPPAAPSGLGTNTMASGSGAPMADNNEGADGVGNSSGNWHCDSTWMGDRVITTSTRTWALPTYNNHLYKQISSQSGASNDNHYFGYSTPWGYFDFNRFHCHFSPRDWQRLINNNWGFRPKRLNFKLFNIQVKEVTQNDGTTTIANNLTSTVQVFTDSEYQLPYVLGSAHQGCLPPFPADVFMVPQYGYLTLNNGSQAVGRSSFYCLEYFPSQMLRTGNNFTFSYTFEDVPFHSSYAHSQSLDRLMNPLIDQYLYYLSRTNTPSGTTTQSRLQFSQAGASDIRDQSRNWLPGPCYRQQRVSKTAADNNNSDYSWTGATKYHLNGRDSLVNPGTAMASHKDDEEKYFPQSGVLIFGKQDSGKTNVDIEKVMITDEGEIRTTNPVATEQYGSVSTNLQSGNTQAATSDVNTQGVLPGMVRQDRDVYLQGPIWAKIPHTDGHFHPSPLMGGFGLKHPPPQILIKNTPVPANPSTTFSAAKFASFITQYSTGQVSVEIEWEPQKENSKRWNPEIQYTSNYSKSVNVDFTVDTNGVYSEPRPIGTRYLTRNL

SEQ ID NO: 10947 - protein, 735 aa, Artificial Sequence
  source: /note="Description of Artificial Sequence: Synthetic polypeptide"
MAADGYLPDWLEDILSEGIRQWWKLKPGPPPPKPAERHKDDSRGLVLPGYKYLGPFNGLDKGEPVNEADAAALEHDKAYDRQLDSGDNPYLKYNHADAEFQERLKEDTSFGGNLGRAVFQAKKRVLEPLGLVEEPVKTAPGKKRPVEQSPAEPDSSSGTGKAGNQPARKRLNFGQTGDADSVPDPQPLGQPPAAPSGLGSTTMATGSGAPMADNNEGADGVGNSSGNWHCDSQWLGDRVITTSTRTWALPTYNNHLYKQISSQSGASNDNHYFGYSTPWGYFDFNRFHCHFSPRDWQRLINNNWGFRPKRLNFKLFNIQVKEVTQNDGTTTIANNLTSTVQVFTDSEYQLPYVLGSAHQGCLPPFPADVFMVPQYGYLTLNNGSQAVGRSSFYCLEYFPSQMLRTGNNFTFSYTFEDVPFHSSYAHSQSLDRLMNPLIDQYLYYLSRTNTPSGTTTQSRLQFSQAGASDIRDQSRNWLPGPCYRQQRVSKTAADNNNSDYSWTGATKYHLNGRDSLVNPGTAMASHKDDEEKYFPQSGVLIFGKQDSGKTNVDIEKVMITDEEEIRTTNPVATEQYGSVSTNLQSGNTQAATSDVNTQGVLPGMVRQDRDVYLQGPIWAKIPHTDGHFHPSPLMGGFGLKHPPPQILIKNTPVPANPSTTFSAAKFASFITQYSTGQVSVEIEWEPQKENSKRWNPEIQYTSNYNKSVNVDFTVDTNGVYSEPRPIGTRYLTRNL

SEQ ID NO: 10948 - protein, 735 aa, Artificial Sequence
  source: /note="Description of Artificial Sequence: Synthetic polypeptide"
MAADGYLPDWLEDTLSEGIRQWWKLKPGPPPPKPAERHKDDSRGLVLPGYKYLGPFNGLDKGEPVNEADAAALEHDKAYDRQLDSGDNPYLKYNHADAEFQERLKEDTSFGGNLARAVFQAKKRVLEPLGLVEEPVKTAPGKKRPVEHSPAEPDSSSGTGKSGQQPARKRLNFGQTGDADSVPDPQPLGQPPAAPSGLGTNTMASGSGAPMADNNEGADGVGNSSGNWHCDSTWMGDRVITTSTRTWALPTYNNHLYKQISSQSGASNDNHYFGYSTPWGYFDFNRFHCHFSPRDWQRLINNNWGFRPKRLNFKLFNIQVKEVTQNDGTTTIANNLTSTVQVFTDSEYQLPYVLGSAHQGCLPPFPADVFMVPQYGYLTLNNGSQAVGRSSFYCLEYFPSQMLRTGNNFTFSYTFEDVPFHSSYAHSQSLDRLMNPLIDQYLYYLSRTNTPSGTTTQSRLQFSQAGASDIRDQSRNWLPGPCYRQQRVSKTAADNNNSDYSWTGATKYHLNGRDSLVNPGTAMASHKDDEEKYFPQSGVLIFGKQDSGKTNVDIEKVMITDEEEIRTTNPVATEQYGSVSTNLQSGNTQAATSDVNTQGVLPGTVRQDRDVYLQGPIWAKIPHTDGHFHPSPLMGGFGLKHPPPQILIKNTPVPANPSTTFSAAKFASFITQYSTGQVSVEIEWEPQKENSKRWNPEIQYTSNYNKSVNVDFTVDTNGVYSEPRPIGTRYLTRNL

SEQ ID NO: 10949 - protein, 735 aa, Artificial Sequence
  source: /note="Description of Artificial Sequence: Synthetic polypeptide"
MAADGYLPDWLEDILSEGIRQWWKLKPGPPPPKPAERHKDDSRGLVLPGYKYLGPFNGLDKGEPVNEADAAALEHDKAYDRQLDSGDNPYLKYNHADAEFQERLKEDTSFGGNLGRAVFQAKKRVLEPLGLVEEPVKTAPGKKRPVEHSPAEPDSSSGTGKSGQQPARKRLNFGQTGDADSVPDPQPLGQPPAAPSGLGTNTMASGSGAPMADNNEGADGVGNSSGNWHCDSTWMGDRVITTSTRTWALPTYNNHLYKQISSQSGASNDNHYFGYSTPWGYFDFNRFHCHFSPRDWQRLINNNWGFRPKRLNFKLFNIQVKEVTQNDGTTTIANNLTSTVQVFTDSEYQLPYVLGSAHQGCLPPFPADVFMVPQYGYLTLNNGSQAVGRSSFYCLEYFPSQMLRTGNNFTFSYTFEDVPFHSSYAHSQSLDRLMNPLIDQYLYYLSRTNTPSGTTTQSRLQFSQAGASDIRDQSRNWLPGPCYRQQRVSKTAADNNNSDYSWTGATKYHLNGRDSLVNPGTAMASHKDDEEKYFPQSGVLIFGKQDSGKTNVDIEKVMITDEEEIRTTNPVATEQYGSVSTNLQSGNTQAATSDVNTQGVLPGMVRQDRDVYLQGPIWAKIPHTDGHFHPSPLMGGFGLKHPPPQILIKNTPVPANPSTTFSAAKFASFITQYSTGQVSVEIEWEPQKENSKRWNPEIQYTSNYNKSVNVDFTVDTNGVYSEPRPIGTRYLTRNL

SEQ ID NO: 10950 - protein, 735 aa, Artificial Sequence
  source: /note="Description of Artificial Sequence: Synthetic polypeptide"
MAADGYLPDWLEDTLSEGIRQWWKLKPGPPPPKPAERHKDDSRGLVLPGYKYLGPFNGLDKGEPVNEADAAALEHDKAYDRQLDSGDNPYLKYNHADAEFQERLKEDTSFGGNLARAVFQAKKRVLEPLGLVEEPVKTAPGKKRPVEHSPAESDSSSGTGKSGQQPARKRLNFGQTGDADSVPDPQPLGQPPAAPSGLGTNTMASGSGAPMADNNEGADGVGNSSGNWHCDSTWMGDRVITTSTRTWALPTYNNHLYKQISSQSGASNDNHYFGYSTPWGYFDFNRFHCHFSPRDWQRLINNNWGFRPKRLNFKLFNIQVKEVTQNDGTTTIANNLTSTVQVFTDSEYQLPYVLGSAHQGCLPPFPADVFMVPQYGYLTLNNGSQAVGRSSFYCLEYFPSQMLRTGNNFTFSYTFEDVPFHSSYAHSQSLDRLMNPLIDQYLYYLSRTNTPSGTTTQSRLQFSQAGASDIRDQSRNWLPGPCYRQQRVSKTAADNNNSDYSWTGATKYHLNGRDSLVNPGTAMASHKDDEEKYFPQSGVLIFGKQDSGKTNVDIEKVMITDEEEIRTTNPVATEQYGSVSTNLQSGNTQAATSDVNTQGVLPGMVWQDRDVYLQGPIWAKIPHTDGHFHPSPLMGGFGLKHPPPQILIKNTPVPANPSTTFSAAKFASFITQYSTGQVSVEIEWELQKENSKRWNPEIQYTSNYNKSVNVDFTVDTNGVYSEPRPIGTRYLTRNL

SEQ ID NO: 10951 - protein, 735 aa, Artificial Sequence
  source: /note="Description of Artificial Sequence: Synthetic polypeptide"
MAADGYLPDWLEDTLSEGIRQWWKLKPGPPPPKPAERHKDDSRGLVLPGYKYLGPFNGLDKGEPVNEADAAALEHDKAYDRQLDSGDNPYLKYNHADAEFQERLKEDTSFGGNLARAVFQAKKRVLEPLGLVEEPVKTAPGKKRPVEHSPAEPDSSSGTGKSGQQPARKRLNFGQTGDADSVPDPQPLGQPPAAPSGLGTNTMASGSGAPMADNNEGADGVGNSSGNWHCDSTWMGDRVITTSTRTWALPTYNNHLYKQISSQSGASNDNHYFGYSTPWGYFDFNRFHCHFSPRDWQRLINNNWGFRPKRLNFKLFNIQVKEVTQNDGTTTIANNLTSTVQVFTDSEYQLPYVLGSAHQGCLPPFPADVFMVPQYGYLTLNNGSQAVGRSSFYCLEYFPSQMLRTGNNFTFSYTFEDVPFHSSYAHSQSLDRLMNPLIDQYLYYLSRTNTPSGTTTQSRLQFSQAGASDIRDQSRNWLPGPCYRQQRVSKTAADNNNSDYSWTGATKYHLNGRDSLVNPGTAMASHKDDEEKYFPQSGVLIFRKQDSGKTNVDIEKVMITDEEEIRTTNPVATEQYGSVSTNLQSGNTQAATSDVNTQGVLPGMVRQDRDVYLQGPIWAKIPHTDGHFHPSPLMGGFGLKHPPPQILIKNTPVPANPSTTFSAAKFASFITQYSTGQVSVEIEWEPQKENSKRWNPEIQYTSNYNKSVNVDFTVDTNGVYSEPRPIGTRYLTRNL

SEQ ID NO: 10952 - protein, 735 aa, Artificial Sequence
  source: /note="Description of Artificial Sequence: Synthetic polypeptide"
MAADGYLPDWLEDTLSEGIRQWWKLKPGPPPPKPAERHQDDSRGLVLPGYKYLGPFNGLDKGEPVNEADAAALEHDKAYDRQLDSGDNPYLKYNHADAEFQERLKEDTSFGGNLGRAVFQAKKRVLEPLGLVEEPVKTAPGKKRPVEHSPAEPDSSSGTGKAGQQPARKRLNFGQTGDADSVPDPQPLGQPPAAPSGLGTNTTATGSGAPMADNNEGADGVGNSSGNWHCDSTWMGDRVITTSTRTWALPTYNNHLYKQISSQSGASNDNHYFGYSTPWGYFDFNRFHCHFSPRDWQRLINNNWGFRPKRLNFKLFNIQVKEVTQNDGTTTIANNLTSTVQVFADSEYQLPYVLGSAHQGCLPPFPADVFMVPQYGYLTLNNGSQAVGRSSFYCLEYFPSQMLRTGNNFTFSYTFEDVPFHSSYAHSQSLDRLMNPLIDQYLYYLSKTNAPSGTTTMSRLQFSQAGASDIRDQSRNWLPGPCYRQQRVSKTAADNNNSDYSWTGATKYHLNGRDSLVNPGPAMASHKDDEEKYFPQSGVLIFGKQDSGKTNVDIEKVMITDEEEIRTTNPVATEQYGSVSTNLQSGNTQAATTDVNTQGVLPGMVWQDRDVYLQGPIWAKIPHTDGHFHPSPLMGGFGLKHPPPQILIKNTPVPANPSTTFSAAKFASFITQYSTGQVSVEIEWELQKENSKRWNPEIQYTSNYNKSVNVDFTVDTNGVYSEPRPIGTRYLTRNL

SEQ ID NO: 10953 - protein, 735 aa, Artificial Sequence
  source: /note="Description of Artificial Sequence: Synthetic polypeptide"
MAADGYLPDWLEDTLSEGIRQWWKLKPGPPPPKPAERHQDDSRGLVLPGYKYLGPFNGLDKGEPVNEADAAALEHDKAYDRQLDSGDNPYLKYNHADAEFQERLKEDTSFGGNLGRAVFQAKKRVLEPLGLVEEPVKTAPGKKRPVEHSPAEPDSSSGTGKAGQQPARKRLNFGQTGDADSVPDPQPLGQPPAAPSGLGTNTMATGSGAPMADNNEGADGVGNSSGNWHCDSTWMGDRVITTSTRTWALPTYNNHLYKQISSQSGASNDNHYFGYSTPWGYFDFNRFHCHFSPRDWQRLINNNWGFRPKRLNFKLFNIQVKEVTQNDGTTTIANNLTSTVQVFTDSEYQLPYVLGSAHQGCLPPFPADVFMVPQYGYLTLNNGSQAVGRSSFYCLEYFPSQMLRTGNNFTFSYTFEDVPFHSSYAHSQSLDRLMNPLIDQYLYYLSKTNAPSGTTTMSRLQFSQAGASDIRDQSRNWLPGPCYRQQRVSKTAADNNNSDYSWTGATKYHPNGRDSLVNPGPAMASHKDDEEKYFPQSGVLIFGKQDSGKTNVDIEKVMITDEEEIRTTNPVATEQYGSVSTNLQSGNTQAATTDVNTQGVLPGMVWQDRDVYLHGPIWAKIPHTDGHFHPSPLMGGFGLKHPPPQILIKNTPVPANPSTTFSAAKFASFITQYSTGQVSVEIEWELQKENSKRWNPEIQYTSNYNKSVNVDFTVDTNGVYSEPRPIGTRYLTRNL

SEQ ID NO: 10954 - protein, 735 aa, Artificial Sequence
  source: /note="Description of Artificial Sequence: Synthetic polypeptide"
MAADGYLPDWLEDTLSEGIRQWWKLKPGPPPPKPAERHQDDSRGLVLPGYKYLGPFNGLDKGEPVNEADAAALEHDKAYDRQLDSGDNPYLKYNHADAEFQERLKEDTSFGGNLGRAVFQAKKRVLEPLGLVEEPVKTAPGKKRPVEHSPAEPDSSSGTGKAGQQPARKRLNFGQTGDADSVPDPQPLGQPPAAPSGLGTNTMATGSGAPMADNNEGADGVGNSSGNWHCDSTWMGDRAITTSTRTWALPTYNNHLYKQISSQSGASNDNHYFGYSTPWGYFDFNRFHCHFSPRDWQRLINNNWGFRPKRLNFKLFNIQVKEVTQNDGTTTIANNLTSTVQVFTDSEYQLPYVLGSAHQGCLPPFPADVFMVPQYGYLTLNNGSQAVGRSSFYCLEYFPSQMLRTGNNFTFSYTFEDVPFHSSYAHSQSLDRLMNPLIDQYLYYLSKTNAPSGTTTMSRLQFSQAGASDIRDQSRNWLPGPCYRQQRVSKTAADNNNSDYSWTGATKYHLNGRDSLVNPGPAMASHKDDEEKYFPQSGVLIFGKQDSGKTNVDIEKVMITDEEEIRTTNPVATEQYGSVSTNLQSGNTQAATTDVNTQGVLPGMVWQDRDVYLQGPIWAKIPHTDGHFHPSPLMGGFGLKHPPPQILIKNTPVPANPSTTFSAAKLASFITQYSTGQVSVEIEWELQKENSKRWNPEIQYTSNYNKSVNVDFTVDTNGVYSEPRPIGTRYLTRNL

SEQ ID NO: 10955 - protein, 735 aa, Artificial Sequence
  source: /note="Description of Artificial Sequence: Synthetic polypeptide"
MAADGYLPDWLEDTLSEGIRQWWKLKPGPPPPKPAERHQDDSRGLVLPGYKYLGPFNGLDKGEPVNEADAAALEHDKAYDRQLDSGDNPYLKYNHADAEFQERLKEDTSFGGNLGRAVFQAKKRVLEPLGLVEEPVKTAPGKKRPVEHSPAEPDSSSGTGKAGQQPARKRLNFGQTGDADSVPDPQPPGQPPAAPSGLGTNTMATGSGAPMADNNEGADGVGNSSGNWHCDSTWMGDRVITTSTRTWALPTYNNHLYKQISSQSGASNDNHYFGYSTPWGYFDFNRFHCHFSPRDWQRLINNNWGFRPKRLNFKLFNIQVKEVTQNDGTTTIANNLTSTVQVFTDSEYQLPYVLGSAHQGCLPPFPADVFMVPQYGYLTLNNGSQAVGRSSFYCLEYFPSQMLRTGNNFTFSYTFEDVPFHSSYAHSQSLDRLMNPLIDQYLYYLSKTNAPSGTTTMSRLQFSQAGASDIRDQSRNWLPGPCYRQQRVSKTAADNNNSDYSWTGATKYHLNGRDSLVNPGPAMASHKDDEEKYFPQSGVLIFGKQDSGKTNVDIEKVMITDEEEVRTTNPVATEQYGSVSTNLQSGNTQAATTDVNTQGVLPGMVWQDRDVYLQGPIWAKIPHTDGHFHPSPLMGGFGLKHPPPQILIKNTPVPANPSTTFSAAKFASFITQYSTGQVSVEIEWELQKENSKRWNPEIQYTSNYNKSVNVDFTVDTNGVYSEPRPIGTGYLTRNL

SEQ ID NO: 10956 - protein, 735 aa, Artificial Sequence
  source: /note="Description of Artificial Sequence: Synthetic polypeptide"
MAADGYLPDWLEDTLSEGIRQWWKLKPGPPPPKPAERHQDDSRGLVLPGYKYLGPFNGLDKGEPVNEADAAALEHDKAYDRQLDSGDNPYLKYNHADAEFQERLKEDTSFGGNLGRAVFQAKKRVLEPLGLVEEPVKTAPGKKRPVEHSPAEPDSSSGTGKAGQQPARKRLNFGQTGDADSVPDPQPLGQPPAAPSGLGTNTVATGSGAPMADNNEGADGVGNSSGNWHCDSTWMGDRVITTSTRTWALPTYNNHLYKQISSQSGASNDNHYFGYSTPWGYFDFNRFHCHFSPRDWQRLINNNWRFRPKRLNFKLFNIQVKEVTQNDGTTTIADNLTSTVQVFTDSEYQLPYVLGSAHQGCLPPFPADVFMVPQYGYLTLNNGSQAVGRSSFYCLEYFPSQMLRTGNNFTFSYTFEDVPLHSSYAHSQSLDRLMNPLIDQYLYYLSKTNAPSGTTTMSRLQFSQAGASDIRDQSRNWLPGPCYRQQRVSKTAADNNNSDYSWTGATKYHLNGRDSLVNPGPAMASHKDDEEKYFPQSGVLIFGKQDSGKTNVDIEKVMITDEEEIRTTNPVATEQYGSVSTNLQSGNTQAATTDVNTQGVLPGMVWQDRDVYLQGPIWAKIPHTDGHFHPSPLMGGFGLKHPPPQILIKNTPVPANPSTTFSAAKLASFITQYSTGQVSVEIEWELQKENSKRWNPEIQYTSNYNKSVNVDFTADTNGVYSEPRPIGTRYLTRNL

SEQ ID NO: 10957 - protein, 735 aa, Artificial Sequence
  source: /note="Description of Artificial Sequence: Synthetic polypeptide"
MAADGYLPDWLEDTLSEGIRQWWKLKPGPPPPKPAERHQDDSRGLVLPGYKYLGPFNGLDKGEPVNEADAAALEHDKAYDRQLDSGDNPYLKYNHADAEFQERLKEDTSFGGNLGRAVFQAKKRVLEPLGLVEEPVKTAPGKKRPVEHSPAEPDSSSGTGKAGQQPARKRSNFGQTGDADSVPDPQPLGQPPAAPSGLGTNTMATGSGAPMADNNEGADGVGNSSGNWHCDSTWMGDRVITTSTRTWALPTYNNHLYKQISSQSGASNDNHYFGYSTPWGYFDFNRFHCHFSPRDWQRLINNNWGFRPKRLNFKLFNIQVKEVAQNDGTTTIANNLTSTVQVFTDSEYQLPYVLGSAHQGCLPPFPADVFMVPQYGYLTLNNGSQAVGRSSFYCLEYFPSQMLRTGNNFTFSYTFEDVPFHSSYAHSQSLDRLMNPLIDQYLYYLSKTNAPSGTTTMSRLQFSQAGASDIRDQSRNWLPGPCYRQQRVSKTAADNNNSDYSWTGATKYHLNGRDSLVNPGPAMASHKDDEEKYFPQSGVLIFGKQDSGKTNVDIKKVMITDEEEIRTTNPVATEQYGSVSTNLQSGNTQAATTDVNTQGVLPGMVWQDRDVYLQGPIWAKIPHTDGHFHPSPLMGGFGLKHPPPQILIKNTPVPANPSTTFSAAKFASFITQYSTGQVSVEIEWELQKENSKRWNPEIQYTSNYNKSVNVDFTVDTNGVYSEPRPIGTRYLTRNL

SEQ ID NO: 10958 - protein, 734 aa, Artificial Sequence
  source: /note="Description of Artificial Sequence: Synthetic polypeptide"
MAADGYLPDWLEDTLSEGIRQWWKLKPGPPPPKPAERHQDDSRGLVLPGYKYLGPFNGLDKGEPVNEADAAALEHDKAYDRQLDSGDNPYLKYNHADAEFQERLKEDTSFGGNLGRAVFQAKKRVLEPLGLVEEPVKTAPGKKRPVEHSPAEPDSSSGTGKAGQQPARKRLNFGQTGDADSVPDPQPLGQPPAAPSGLGTNTMATGSGAPMADNNEGADGVGNSSGNWHCDSTWMGDRVITTSTRTWALPTYNNHLYKQISSQSGASNDNHYFGYSTPWGYFDFNRFHCHFSPRDWQRLINNWGFRPKRLNFKLFNIQVKEVTQNDGTTTIANNLTSTVQVFTDSEYQLPYVLGSAHQGCLPPFPADVFMVPQYGYLTLNNGSQAVGRSSFYCLEYFPSQMLRTGNNFTFSYTFEDVPFHSSYAHSQSLDRLMNPLIDQYLYYLSKTNAPSGTTTMSRLQFSQAGASDIRDQSRNWLPGPCYRQQRVSKTAADNNNSDYSWTGATKYHLNGRDSLVNPGPAMASHKDDEEKYFPQSGVLIFGKQDSGKTNVDIEKVMITDEEEIRTTNPVATEQYGSVSTNLQSGNTQAATTDVNTQGVLPGMVWQDRDVYLQGPIWAKIPHTDGHFHPSPLMGGFGLKHPPPQILIKNTPVPANPSTTFSAAKFASFITQYSTGQVSVEIEWELQKENSKRWNPEIQYTSNYNKSVNVDFTVDTNGVYSEPRPIGTRYLTRNL

SEQ ID NO: 10959 - protein, 735 aa, Artificial Sequence
  source: /note="Description of Artificial Sequence: Synthetic polypeptide"
MAADGYLPDWLEDTLSEGIRQWWKLKPGPPPPKPAERHQDDSRGLVLPGYKYLGPFNGLDKGEPVNEADAAALEHDKAYDRQLDSGDNPYLKYNHADAEFQERLKEDTSFGGNLGRAVFQAKKRVLEPLGLVEEPVKTAPGKKRPVEHSPAEPDSSSGTGKAGQQPARKRLNFGQTGDADSVPDPQPLGQPPAAPSGLGTNTMATGSGAPMADNNEGADGVGNSSGNWHCDSTWMGDRVITTSTRTWALPTYNNHLYKQISSQSGASNDNHYFGYSTPWGYFDFNRFHCHFSPRDWQRLINNNWGFRPKRLNFKLFNIQVKEVTQNDGTTTIANNLTSTVQVFTDSEYQLPYVLGSAHQGCLPPFPADVFMVPQYGYLTLNNGSQAVGRSSFYCLEYFPSQMLRTGNNFTFSYTFEDVPFHSSYAHSQSLDRLMNPLIDQYLYYLSKTNAPSGTTTMSRLQFSQAGASDIRDQSRNWLPGPCYRQQRVSKTAADNNNSDYSWTGATKYHLNGRDSLVNPGPAMASHKDDEEKYFPQSGVLIFGKQDSGKTNVDIEKVMITDEEEIRTTNPVATEQYGSVSTNLQSGNTQAATTDVNTQGVLPGMVWQDRDVYLQGPIWAKIPHTDGHFHPSPLMGGFGLKHPPPQILIKNTPVPANPSTTFSAAKFASFITQYSTGQVSVEIEWELQKENSKRWNPEIQYTSNYNKSVNVDFTVDTNGVYSEPRPIDTRYLTRNL

SEQ ID NO: 10960 - protein, 735 aa, Artificial Sequence
  source: /note="Description of Artificial Sequence: Synthetic polypeptide"
MAADGYLPDWLEDTLSEGIRQWWKLKPGPPPPKPAERHQDDSRGLVLPGYKYLGPFNGLDKGEPVNEADAAALEHDKAYDRQLDSGDNPYLKYNHADAEFQERLKEDTSFGGNLGRAVFQAKKRVLEPLGLVEEPVKTAPGKKRPVEHSPAEPDSSSGTGKAGQQPARKRLNFGQTGDADSVPDPQPLGQPPAAPSGLGTNTMATGSGAPMADNNEGADGVGNSSGNWHCDSTWMGDRVITTSTRTWALPTYNNHLYKQISSQSGASNDNHYFGYSTPWGYFDFNRFHCHFSPRDWQRLINNNWGFRPKRLNFKLFNIQVKEVTQNDGTTTIANNLTSTVQVFTDSEYQLPYVLGSAHQGCLPPFPADVFMVPQYGYLTLNNGSQAVGRSSFYCLEYFPSQMLRTGNNFTFSYTFEDVPFHSSYAHSQSLDRLMNPLINQYLYYLSKTNAPSGTTTMSRLQFSQAGASDIRDQSRNWLPGPCYRQQRVSKTAADNNNSDYSWTGATKYHLNGRDSLVNPGPAMASHKDDEEKYFPQSGVLIFGKQDSGKTNVDIEKVMITDEEEIRTTNPVATEQYGSVSTNLQSGNTQAATTDVNTQGVLPGMVWQDRDVYLQGPIWAKIPHTDGHFHPSPLMGGFGLKHPPPQILIKNTPVPANPSTTFSAAKFASFITQYSTGQVSVEIEWELQKENSKRWNPEIQYTSNYNKSVNVDFTVDTNGVYSEPRPIGTRYLTRNL

SEQ ID NO: 10961 - protein, 735 aa, Artificial Sequence
  source: /note="Description of Artificial Sequence: Synthetic polypeptide"
MAADGYLPDWLEDTLSEGIRQWWKLKPGPPPPKPAERHQDDSRGLVLPGYKYLGPFNGLDKGEPVNEADAAALEHDKAYDRQLDSGDNPYLKYNHADAEFQERLKEDTSFGGNLGRAVFQAKKRVLEPLGLVEEPVKMAPGKKRPVEHSPAEPDSSSGTGKAGQQPARKRLNFGQTGDADSVPDPQPLGQPPAAPSGLGTNTTATGSGAPMADNNEGADGVGNSSGNWHCDSTWMGDRVITTSTRTWALPTYNNHLYKQISSQSGASNDNHYFGYSTPWGYFDFNRFHCHFSPRDWQRLINNNWGFRPKRLNFKLFNIQVKEVTQNDGTTTIANNLTSTVQVFTDSEYQLPYVLGSAHQGCLPPFPADVFMVPQYGYLTLNNGSQAVGRSSFYCLEYFPSQMLRTGNNFTFSYTFEDVPFHSSYAHSQSLDRLMNPLIDQYLYYLSKTNAPSGTTTMSRLQFSQAGASDIRDQSRNWLPGPCYRQQRVSKTAADNNNSDYSWTGATKYHLNGRDSLVNPGPAMASHKDDEEKYFPQSGVLIFGKQDSGKTNVDIEKVMITDEEEIRTTNPVATEQYGSVSTNLQSGNTQAATTDVNTQGVLPGMVWQDRDVYLQGPIWAKIPHTDGHFHPSPLMGGFGLKHPPPQILIKNTPVPANPSTTFSAAKFASFITQYSTGQVSVEIEWELQKENSKRWNPEIQYTSNYNKSVNVDFTVDTNGVYSEPRPIGTRYLTRNL

SEQ ID NO: 10962 - protein, 735 aa, Artificial Sequence
  source: /note="Description of Artificial Sequence: Synthetic polypeptide"
MAADGYLPDWLEDTLSEGIRQWWKLKPGPPPPKPAERHQDDSRGLVLPGYKYLGPFNGLDKGEPVNEADAAALEHDKAYDRQLDSGDNPYLKYNHADAEFQERLKEDTSFGGNLGRAVFQAKKRVLEPLGLVEEPVKTAPGKKRPVEHSPAEPDSSSGTGKAGQQPARKRLNFGQTGDADSVPDPQPLGQPPAAPSGLGTNTMATGSGAPMADNNEGADGVGNSSGNWHCDSTWMGDRVITTSTRTWALPTYNNHLYKQISSQSGASNDNHYFGYSTPWGYFDFNRFHCHFSPRDWQRLINNNWGFRPKRLNFKLFNIQVKEVTQNDGTTTIANNLTSTVQVFTDSEYQLPYVLGSAHQGCLPPFPADVFMVPQYGYLTLNNGSQAVGRSSFYCLEYFPSQMLRTGNNFTFSYTFEDVPFHSSYAHSQSLDRLMNPLIDQYLYYLSKTNAPSGTTTMSRLQFSQAGASDIRDQSRNWLPGPCYRQQRVSKTAADNNNSDYSWTGATKYHLNGRDSLVNPGPAMASHKDDEEKYFPQSGVLIFGKQDSGKTNVDIEKVMITDEEEIRTTNPMATEQYGSVSTNLQSGNTQAATTDVNTQGVLPGMVWQDRDVYLQGPIWAKIPHTDGHFHPSPLMGGFGLKHPPPQILIKNTPVPANPSTTFSAAKFASFITQYSTGQVSVEIEWELQKENSKRWNPEIQYTSNYNKSVNVDFTVDTNGVYSEPRPIGTRYLTRNL

SEQ ID NO: 10963 - protein, 735 aa, Artificial Sequence
  source: /note="Description of Artificial Sequence: Synthetic polypeptide"
MAADGYLPDWLEDTLSEGIRQWWKLKPGPPPPKPAERHQDDSRGLVLPGYKYLGPFNGLDKGEPVNEADAAALEHDKAYDRQLDSGDNPYLKYNHADAEFQERLKEDTSFGGNLGRAVFQAKKRVLEPLGLVEEPVKTAPGKKRPVEHSPAEPDSSSGTGKAGQQPARKRLNFGQTGDADSVPDPQPLGQPPAAPSGLGTNTMATGSGAPMADNNEGADGVGNSSGNWHCDSTWMGDRVITTSTRTWALPTYNNHLYKQISSQSGASNDNHYFGYSTPWGYFDFNRFHCHFSPRDWQRLINNNWGFRPKRLNFKLFNIQVKEVTQNDGTTTIANNLTSTVQVFTDSEYQLPYVLGSAHQGCLPPFPADVSMVPQYGYLTLNNGSQAVGRSSFYCLEYFPSQMLRTGNNFTFSYTFEDVPFHSSYAHSQSLDRLMNPLIDQYLYYLSKTNAPSGTTTMSRLQFSQAGASDIRDQSRNWLPGPCYRQQRVSKTAADNNNSDYSWTGATKYHLNGRDSLVNPGPAMASHKDDEEKYFPQSGVLIFGKQDSGKTNVDIEKVMITDEEEIRTTNPVATEQYGSVSTNLQSGNTQAATTDVNTQGVLPGMVWQDRDVYLQGPIWAKIPHTDGHFHPSPLMGGFGLKHPPPQILIKNTPVPANPSTTFSAAKLASFITQYSTGQVSVEIEWELQKENSKRWNPEIQYTSNYNKSVNVDFTVDTNGVYSEPRPIGTRYLTRNL

SEQ ID NO: 10964 - protein, 735 aa, Artificial Sequence
  source: /note="Description of Artificial Sequence: Synthetic polypeptide"
MAADGYLPDWPEDTLSEGIRQWWKLKPGPPPPKPAERHQDDSRGLVLPGYKYLGPFNGLDKGEPVNEADAAALEHDKAYDRQLDSGDNPYLKYNHADAEFQERLKEDTSFGGNLGRAVFQAKKRVLEPLGLVEEPVKTAPGKKRPVEHSPAEPDSSSGTGKAGQQPARKRLNFGQTGDADSVPDPQPLGQPPAAPSGLGTNTMATGSGAPMADNNEGADGVGNSSGNWHCDSTWMGDRVITTSTRTWALPTYNNHLYKQISSQSGASNDNHYFGYSTPWGYFDFNRFHCHFSPRDWQRLINNNWGFRPKRLNFKLFNIQVKEVTQNDGTTTIANNLTSTVQVFTDSEYQLPYVLGSAHQGCLPPFPADVFMVPQYGYLTLNNGSQAVGRSSFYCLEYFPSQMLRTGNNFTFSYTFEDVPFHSSYAHSQSLDRLMNPLIDQYLYYLSKTNAPSGTTTMSRLQFSQAGASDIRDQSRNWLPGPCYRQQRVSKTAADNNNSDYSWTGATKYHLNGRDSLVNPGPAMASHKDDEEKYFPQSGVLIFGKQDSGKTNVDIEKVMITDEEEIRTTNPVATEQYGSVSTNLQSGNTQAATTDVNTQGVLPGMVWQDRDVYLQGPIWAKIPHTDGHFHPSPLMGGFGLKHPPPQILIKNTPVPANPSTTFSAAKFASFITQYSTGQVSVEIEWELQKENSKRWNPEIQYTSNYNKSVNVDFTVDTNGVYSEPRPIGTRYLTRNL

SEQ ID NO: 10965 - protein, 735 aa, Artificial Sequence
  source: /note="Description of Artificial Sequence: Synthetic polypeptide"
MAADGYLPDWLEDTLSEGIRQWWKLKPGPPPPKPAERHQDDSRGLVLPGYKYLGPFNGLDKGEPVNEADAAALEHDKAYDRQLDSGDNPYLKYNHADAEFQERLKEDTSFGGNLGRAVFQAKKRVLEPLGLVEEPVKTAPGKKRPVEHSPAEPDSSSGTGKAGQQPARKRLNFGQTGDADSVPDPQPLGQPPAAPSGLGTNTMATGSGAPMADNNEGADGVGNSSGNWHCDSTWMGDRVITTSTRTWALPTYNNHLYKQISSQSGASNDNHYFGYSTPWGYFDFNRFHCHFSPRDWQRLINNNWGFRPKRLNFKLFNIQVKEVTQNDGTTTIANNLTSTVQVFTDSEYQLPYVLGSAHQGCLPPFPADVFMVPQYGYLTLNNGSQAVGRSSFYCLEYFPSQMLRTGNNFTFSYTFEDVPFHSSYAHSQSLDRLMNPLIDQYLYYLSKTNAPSGTTTMSRLQFSQAGASDIRDQSRNWLPGPCYRQQRVSKTAADNNNSDYSWTGATKYHLNGRDSLVNPGPAMASHKDDEEKFFPQSGVLIFGKQDSGKTNVDIEKVMITDEEEIRTTNPVATEQYGSVSTNLQSGNTQAATTDVNTQGVLPGMVWQDRDVYLQGPIWAKIPHTDGHFHPSPLMGGFGLKHPPPQILIKNTPVPANPSTTFSAAKFASFITQYSTGQVSVEIEWELQKENSKRWNPEIQYTSNYNKSVNVDFTVDTNGVYSEPRPIGTRYLTRNL

SEQ ID NO: 10966 - protein, 735 aa, Artificial Sequence
  source: /note="Description of Artificial Sequence: Synthetic polypeptide"
MAADGYLPDWLEDTLSEGIRQWWKLKPGPPPPKPAERHQDDSRGLVLPGYKYLGPFNGLDKGEPVNEADAAALEHDKAYDRQLDSGDNPYLKYNHADAEFQERLKEDTSFGGNLGRAVFQAKKRVLEPLGLVEEPVKTAPGKKRPVEHSPAEPDSSSGIGKAGQQPARKRLNFGQTGDADSVPDPQPLGQPPAAPSGLGTNTMATGSGAPMADNNEGADGVGNSSGNWHCDSTWMGDRVITTSTRTWALPTYNNHLYKQISSQSGASNDNHYFGYSTPWGYFDFNRFHCHFSPRDWQRLINNNWGFRPKRLNFKLFNIQVKEVTQNDGTTTIANNLTSTVQVFTDSEYQLPYVLGSAHQGCLPPFPADVFMVPQYGYLTLNNGSQAVGRSSFYCLEYFPSQMLRTGNNFTFSYTFEDVPFHSSYAHSQSLDRLMNPLIDQYLYYLSKTNAPSGTTTMSRLQFSQAGASDIRDQSRNWLPGPCYRQQRVSKTAADNNNSDYSWTGATKYHLNGRDSLVNPGPAMASHKDDEEKYFPQSGVLIFGKQDSGKTNVDIEKVMITDEEEIRTTNPVATEQYGSVSTNLQSGNTQAATTDVNTQGVLPGMVWQDRDVYLQGPIWAKIPHTDGHFHPSPLMGGFGLKHPPPQILIKNTPVPANPSTTFSAAKFASFITQYSTGQVSVEIEWELQKENSKRWNPEIQYTSNYNKSVNVDFTVDTNGVYSEPRPIGTRYLTRNL

SEQ ID NO: 10967 - protein, 735 aa, Artificial Sequence
  source: /note="Description of Artificial Sequence: Synthetic polypeptide"
MAADGYLPDWLEDTLSEGIRQWWKLKPGPPPPKPAERHQDDSRGLVLPGYKYLGPFNGLDKGEPVNEADAAALEHDKAYDRQLDSGDNPYLKYNHADAEFQERLKEDTSFGGNLGRAVFQAKKRVLEPLGLVEEPVKTAPGKKRPVEHSPAEPDSSSGTGKAGQQPARKRLNFGQTGDADSVPDPQPLGQPPAAPSGLGTNTMATGSGAPMADNNEGADGVGNSSGNWHCDSTWMGDRVITTSTRTWALPTYNNHLYKQISSQSGASNDNHYFGYSTPWGYFDFNRFHCHFSPRDWQRLINNNWRFRPKRLNFKLFNIQVKEVTQNDGTTTIANNLTSTVQVFTDSEYQLPYVLGSAHQGCLPPFPADVFMVPQYGYLTLNNGSQAVGRSSFYCLEYFPSQMLRTGNNFTFSYTFEDVPFHSSYAHSQSLDRLMNPLIDQYLYYLSKTNAPSGTTTMSRLQFSQAGASDIRDQSRNWLPGPCYRQQRVSKTAADNNNSDYSWTGATKYHLNGRDSLVNPGPAMASHKDDEEKYFPQSGVLIFGKQDSGKTNVDIEKVMITDEEEIRTTNPVATEQYGSVSTNLQSGNTQAATTDVNTQGVLPGMVWQDRDVYLQGPIWAKIPHTDGHFHPSPLMGGFGLKHPPPQILIKNTPVPANPSTTFSAAKLASFITQYSTGQVSVEIEWELQKENSKRWNPEIQYTSNYNKSVNVDFTVDTNGVYSEPRPIGTRYLTRNL

SEQ ID NO: 10968 - protein, 735 aa, Artificial Sequence
  source: /note="Description of Artificial Sequence: Synthetic polypeptide"
MAADGYLPDWLEDTLSEGIRQWWKLKPGPPPPKPAERHQDDSRGLVLPGYKYLGPFNGLDKGEPVNEADAAALEHDKAYDRQLDSGDNPYLKYNHADAEFQERLKEDTSFGGNLGRAVFQAKKRVLEPLGLVEEPVKTAPGKKRPVEHSPAEPDSSSGTGKAGQQPARKRLNFGQTGDADSVPDPQPLGQPPAAPSGLGTNTMATGSGAPMADNNEGADGVGNSSGNWHCDSTWMGDRVITTSTRTWALPTYNNHLYKQISSQSGASNDNHYFGYSTPWGYFDFNRFHCHFSPRDWQRLINNNWGFRPKRLNFKLFNIQVKEVTQNDGTTTIANNLTSTVQVFTDSEYQLPYVLGSAHQGCLPPFPADVFMVPQYGYLTLNNGSQAVGRSSFYCLEYFPSQMLRTGNNFTFSYTFEDVPFHSSYAHSQSLDRLMNPLIDQYLYYLSKTNAPSGTTTMSRLQFSQAGASDIRDQSRNWLPGPCYRQQRVSKTAADNNNSDYSWTGATKYHLNGRDSLVNPGPAMASHKDDEEKYFPQSGVLIFGKQDSGKTNVDIEKVMITDEEEIRTTNPVATEQYGSVSTNLQSGNTQAATTDVNTQGVLPGMVWQDRDVYLQGPIWAKIPHTDGHFHPSPLMGGFGLKHPPPQILIKNTPVPANPSTTFSAAKFASFITQYSTGQVSVEIEWELQKENSKRWNPEIQYTSNYNKSVNVDFTVDTNGVYSEPRPIGTRYLARNL

SEQ ID NO: 10969 - protein, 735 aa, Artificial Sequence
  source: /note="Description of Artificial Sequence: Synthetic polypeptide"
MAADGYLPDWLEDTLSEGIRQWWKLKPGPPPPKPAERHQDDSRGLVLPGYKYLGPFNGLDKGEPVNEADAAALEHDKAYDRQLDSGDNPYLKYNHADAEFQERLKEDTSFGGNLGRAVFQAKKRVLEPLGLVEEPVKTAPGKKRPVEHSPAEPDSSSGTGKAGQQPARKRLNFGQTGDADSVPDPQPLGQPPAAPSGLGTNTMATGSGAPMADNNEGADGVGNSSGNWHCDSTWMGDRVITTSTRTWALPTYNNHLYKQISSQSGASNDDHYFGYSTPWGYFDFNRFHCHFSPRDWQRLINNNWGFRPKRLNFKLFNIQVKEVTQNDGTTTIANNLTSTVQVFTDSEYQLPYVLGSAHQGCLPPFPADVFMVPQYGYLTLNNGSQAVGRSSFYCLEYFPSQMLRTGNNFTFSYTFEDVPFHSSYAHSQSLDRLMNPLIDQYLYYLSKTNAPSGTTTMSRLQFSQAGASDIRDQSRNWLPGPCYRQQRVSKTAADNNNSDYSWTGATKYHLNGRDSLVNPGPAMASHKDDEEKYFPQSGVLIFGKQDSGKTNVDIEKVMITDEEEIRTTNPVATEQYGSVSTNLQSGNTQAATTDVNTQGVLPGMVWQDRDVYLQGPIWAKIPHTDGHFHPSPLMGGFGLKHPPPQILIKNTPVPANPSTTFSAAKFASFITQYSTGQVSVEIEWELQKENSKRWNPEIQYTSNYNKSVNVDFTVDTNGVYSEPRPIGTRYLTRNL

SEQ ID NO: 10970 - protein, 735 aa, Artificial Sequence
  source: /note="Description of Artificial Sequence: Synthetic polypeptide"
MAADGYLPDWLEDTLSEGIRQWWKLKPGPPPPKPAERHQDDSRGLVLPGYKYLGPFNGLDKGEPVNEADAAALEHDKAYDRQLDSGDNPYLKYNHADAEFQERLKEDTSFGGNLGRAVFQAKKGVLEPLGLVEEPVKTAPGKKRPVEHSPAEPDSSSGTGKAGQQPARKRLNFGQTGDADSVPDPQPLGQPPAAPSGLGTNTMATGSGAPMADNNEGADGVGNSSGNWHCDSTWMGDRVITTSTRTWALPTYNNHLYKQISSQSGASNDNHYFGYSTPWGYFDFNRFHCHFSPRDWQRLINNNWGFRPKRLNFKLFNIQVKEVTQNDGTTTIANNLTSTVQVFTDSEYQLPYVLGSAHQGCLPPFPADVFMVPQYGYLTLNNGSQAVGRSSFYCLEYFPSQMLRTGNNFTFSYTFEDVPFHSSYAHSQSLDRLMNPLIDQYLYYLSKTNAPSGTTTMSRLQFSQAGASDIRDQSRNWLPGPCYRQQRVSKTAADNNNSDYSWTGATKYHLNGRDSLVNPGPAMASHKDDEEKYFPQSGVLIFGKQDSGKTNVDIEKVMITDEEEIRTTNPVATEQYGSVSTNLQSGNTQAATTDVNTQGVLPGMVWQDRDVYLQGPIWAKIPHTDGHFHPSPLMGGFGLKHPPPQILIKNTPVPANPSTTFSAAKLASFITQYSTGQVSVEIEWELQKENSKRWNPEIQYTSNYNKSVNVDFTVDTNGVYSEPRPIGTRYLTRNL

SEQ ID NO: 10971 - protein, 735 aa, Artificial Sequence
  source: /note="Description of Artificial Sequence: Synthetic polypeptide"
MAADGYLPDWLEDTLSEGIRQWWKLKPGPPPPKPAERHQDDSRGLVLPGYKYLGPFNGLDKGEPVNEADAAALEHDKAYDRQLDSGDNPYLKYNHADAEFQERLKEDTSFGGNLGRAVFQAKKRVLEPLGLVEEPVKTAPGKKRPVEHSPAEPDSPSGTGKAGQQPARKRLNFGQTGDADSVPDPQPLGQPPAAPSGLGTNTMATGSGAPMADNNEGADGVGNSSGNWHCDSTWMGDRVITTSTRTWALPTYNNHLYKQISSQSGASNDNHYFGYSTPWGYFDFNRFHCHFSPRDWQRLINNNWGFRPKRLNFKLFNIQVKEVTQNDGTTTIANNLTSTVQVFTDSEYQLPYVLGSAHQGCLPPFPADVFMVPQYGYLTLNNGSQAVGRSSFYCLEYFPSQMLRTGNNFTFSYTFEDVPFHSSYAHSQSLDRLMNPLIDQYLYYLSKTNAPSGTTTMSRLQFSQAGASDIRDQSRNWLPGPCYRQQRVSKTAADNNNSDYSWTGATKYHLNGRDSLVNPGPAMASHKDDEEKYFPQSGVLIFGKQDSGKTNVDIEKVMITDEEEIRTTNPVATEQYGSVSTNLQSGNTQAATTDVNTQGVLPGMVWQDRDVYLQGPIWAKIPHTDGHFHPSPLMGGFGLKHPPPQILIKNTPVPANPSTTFSAAKFASFITQYSTGQVSVEIEWELQKENSKRWNPEIQYTSNYNKSVNVDFTVDTNGVYSEPRPIGTRYLTRNL

SEQ ID NO: 10972 - protein, 735 aa, Artificial Sequence
  source: /note="Description of Artificial Sequence: Synthetic polypeptide"
MAADGYLPDWLEDTLSEGIRQWWKLKPGPPPPKPAERHQDDSRGLVLPGYKYLGPFNGLDKGEPVNEADAAALEHDKAYDRQLDSGDNPYLKYNHADAEFQERLKEDTSFGGNLGRAVFQAKKRVLEPLGLVEEPVKTAPGKKRPVEHSPAEPDSSSGTGKAGQQPARKRLNFGQTGDADSVPDPQPLGQPPAAPSGLGTNTMATGSGAPMADNNEGADGVGNSSGNWHCDSTWMGDRVITTSTRTWALPTYNNHPYKQISSQSGASNDNHYFGYSTPWGYFDFNRFHCHFSPRDWQRLINNNWGFRPKRLNFKLFNIQVKEVTQNDGTTTIANNLTSTVQVFTDSEYQLPYVLGSAHQGCLPPFPADVFMVPQYGYLTLNNGSQAVGRSSFYCLEYFPSQMLRTGNNFTFSYTFEDVPFHSSYAHSQSLDRLMNPLIDQYLYYLSKTNAPSGTTTMSRLQFSQAGASDIRDQSRNWLPGPCYRQQRVSKTAADNNNSDYSWTGATKYHLNGRDSLVNPGPAMASHKDDEEKYFPQSGVLIFGKQDSGKTNVDIEKVMITDEEEIRTTNPVATEQYGSVSTNLQSGNTQAATTDVNTQGVLPGMVWQDRDVYLQGPIWAKIPHTDGHFHPSPLMGGFGLKHPPPQILIKNTPVPANPSTTFSAAKFASFITQYSTGQVSVEIEWELQKENSKRWNPEIQYTSNYNKSVNVDFTVDTNGVYSEPRPIGTRYLTRNL

SEQ ID NO: 10973 - protein, 735 aa, Artificial Sequence
  source: /note="Description of Artificial Sequence: Synthetic polypeptide"
MAADGYLPDWLEDTLSEGIRQWWKLKPGPPPPKPAERHQDDSRGLVLPGYKYLGPFNGLDKGEPVSEADVAALEHDKAYDRQLDSGDNPYLKYNHADAEFQERLKEDTSFGGNLGRAVFQAKKRVLEPLGLVEEPVKTAPGKKRPVEHSPAEPDSSSGTGKAGQQPARKRLNFGQTGDADSVPDPQPLGQPPAAPSGLGTNTMATGSGAPMADNNEGADGVGNSSGNWHCDSTWMGDRVITTSTRTWALPTYNNHLYKQISSQSGASNDNHYFGYSTPWGYFDFNRFHCHFSPRDWQRLINNNWGFRPKRLNFKLFNIQVKEVTQNDGTTTIANNLTSTVQVFTDSEYQLPYVLGSAHQGCLPPFPADVFMVPQYGYLTLNNGSQAVGRSSFYCLEYFPSQMLRTGNNFTFSYTFEDVPFHSSYAHSQSLDRLMNPLIDQYLYYLSKTNAPSGTTTMSRLQFSQAGASDIRDQSRNWLPGPCYRQQRVSKTAADNNNSDYSWTGATKYHLNGRDSLVNPGPAMASHKDDEEKYFPQSGVLIFGKQDSGKTNVDIEKVMITDEEEIRTTNPVATEQYGSVSTNLQSGNTQAATTDVNTQGVLPGMVWQDRDVYLQGPIWAKIPHTDGHFHPSPLMGGFGLKHPPPQILIKNTPVPANPSTTFSAAKFASFITQYSTGQVSVEIEWELQKENSKRWNPEIQYTSNYNKSVNVDFTVDTNGVYSEPRPIGTRYLTRNL

SEQ ID NO: 10974 - protein, 735 aa, Artificial Sequence
  source: /note="Description of Artificial Sequence: Synthetic polypeptide"
MAADGYLPDWLEDTLSEGIRQWWKLKPGPPPPKPAERHQDDSRGLVLPGYKYLGPFNGLDKGEPVNEADAAALEHDKAYDRQLDSGDNPYLKYNHADAEFQERLKEDTSFGGNLGRAVFQAKKRVLEPLGLVEEPVKTAPGKKRPVEHSPAEPDSSSGTGKAGQQPARKRLNFGQTGDADSVPDPQPLGQPPAAPSGLGTNTMATGSGAPMADNNEGADGVGNSSGNWHCDSTWMGDRVITTSTRTWALPTYNNHLYKQISSQSGASNDNHYFGYSTPWGYFDFNRFHCHFSPRDWQRLINNNWGFRPKRLNFKLFNIQVKEVTQNDGTTTIANNLTSTVQVFTDSEYQLPYVLGSAHQGCLPPFPADVFMVPQYGYLTLNNGSQAVGRSSFYCLEYFPSQMLRTGNNFTFSYTFEDVPFHSSYAHSQSLDRLMNPLIDQYLYYLSKTNAPSGTTTMSRLQFSQAGASDIRDQSRNWLPGPCYRQQRVSKTAADNNNSDYSWTGATKYHLNGRDSLVNPGPAMASHKDDEEKYFPQSGVLIFGKQDSGKINVDIEKVMITDEEEIRTTNPVATEQYGSVSTNLQSGNTQAATTDVNTQGVLPGMVWQDRDVYLQGPIWAKIPHTDGHFHPSPLMGGFGLKHPPPQILIKNTPVPANPSTTFSAAKFASFITQYSTGQVSVEIEWELQKENSKRWNPEIQYTSNYNKSVNVDFTVDTNGVYSEPRPIGTRYLTRNL

SEQ ID NO: 10975 - protein, 735 aa, Artificial Sequence
  source: /note="Description of Artificial Sequence: Synthetic polypeptide"
MAADGYLPDWLEDTLSEGIRQWWKLKPGPPPLKPAERHQDDSRGLVLPGYKYLGPFNGLDKGEPVNEADAAALEHDKAYDRQLDSGDNPYLKYNHADAEFQERLKEDTSFGGNLGRAVFQAKKRVLEPLGLVEEPVKTAPGKKRPVEHSPAEPDSSSGTGKAGQQPARKRLNFGQTGDADSVPDPQPLGQPPAAPSGLGTNTMATGSGAPMADNNEGADGVGNSSGNWHCDSTWMGDRVITTSTRTWALPTYNNHLYKQISSQSGASNDNHYFGYSTPWGYFDFNRFHCHFSPRDWQRLINNNWGFRPKRLNFKLFNIQVKEVTQNDGTTTIANNLTSTVQVFTDSEYQLPYVLGSAHQGCLPPFPADVFMVPQYGYLTLNNGSQAVGRSSFYCLEYFPSQMLRTGNNFTFSYTFEDVPFHSSYAHSQSLDRLMNPLIDQYLYYLSKTNAPSGTTTMSRLQFSQAGASDIRDQSRSWLPGPCYRQQRVSKTAADNNNSDYSWTGATKYHLNGRDSLVNPGPAMASHKDDEEKYFPQSGVLIFGKQDSGKTNVDIEKVMITDEEEIRTTNPVATEQYGSVSTNLQSGNTQAATTDVNTQGVLPGMVWQDRDVYLQGPIWAKIPHTDGHFHPSPLMGGFGLKHPPPQILIKNTPVPANPSTTFSAAKFASFITQYSTGQVSVEIEWELQKENSKRWNPEIQYTSNYNKSVNVDFTVDTNGVYSEPRPIGTRYLTRNL

SEQ ID NO: 10976 - protein, 735 aa, Artificial Sequence
  source: /note="Description of Artificial Sequence: Synthetic polypeptide"
MAADGYLPDWLEDTLSEGIRQWWKLKPGPPPPKPAERHQDDSRGLVLPGYKYLGPFNGLDKGEPVNEADAAALEHDKAYDRQLDSGDNPYLKYNHADAEFQERLKEDTSFGGNLGRAVFQAKKRVLEPLGLVEEPVKTAPGKKRPVEHSPAEPDSSSGTGKAGQQPARKRLNFGQTGDADSVPDPQPLGQPPAAPSGLGTNTMATGSGAPMADNNEGADGVGNSSGNWHCDSTWMGDRVITTSTRTWALPTYNNHLYKQISSQSGASNDNHYFGYSTPWGYFDFNRFHCHFSPRDWQRLINNNWGFRPKRLNFKLFNIQVKEVTQNDGTTTIANNLTSTVQVFTDSEYQLPYVLGSAHQGCLPPFPADVFMVPQYGYLTLNNGSQAVGRSSFYCLEYFPSQMLRTGNNFTFSYTFEDVPFHSSYAHSQSLDRLMNPLIDQYLYYLSKTNAPSGTTTMSRLQFSQAGASDIRDQSRNWLPGPCYRQQRVSKTAADNNNSDYSWTGATKYHLNGRDSLVNPGPAMASHKDDEEKYFPQSGVLIFGKQDSGKTNVDIEKVMITDEEEIGTTNPVATEQYGSVSTNLQSGNTQAATTDVNTQGVLPGMVWQDRDVYLQGPIWAKIPHTDGHFHPSPLMGGFGLKHPPPQILIKNTPVPANPSTTFSAAKFASFITQYSTGQVSVEIEWELQKENSKRWNPEIQYTSNYNKSVNVDFTVDTNGVYSEPRPIGTRYLTRNL

SEQ ID NO: 10977 - protein, 735 aa, Artificial Sequence
  source: /note="Description of Artificial Sequence: Synthetic polypeptide"
MAADGYLPDWLEDTLSEGIRQWWKLKPGPPPPKPAERHQDDSRGLVLPGYKYLGPFNGLDKGEPVNEADAAALEHDKAYDRQLDSGDNPYLKYNHADAEFQERLKEDTSFGGNLGRAVFQAKKRVLEPLGLVEEPVKTAPGKKRPVEHSPAEPDSSSGTGKAGQQPARKRLNFGQTGDADSVPDPQPLGQPPAAPSGLGTNTMATGSGAPMADNNEGADGVGNSSGNWHCDSTWMGDRVITTSTRTWALPTYNNHLYKQISSQSGASNDNHYFGYSTPWGYFDFNRFHCHFSPRDWQRLINNNWGFRPKRLNFKLFNIQVKEVTQNDGTTTIANNLTSTVQVFTDSEYRLPYVLGSAHQGCLPPFPADVFMVPQYGYLTLNNGSQAVGRSSFYCLEYFPSQMLRTGNNFTFSYTFEDVPFHSSYAHSQSLDRLMNPLIDQYLYYLSKTNAPSGTTTMSRLQFSQAGASDIRDQSRNWLPGPCYRQQRVSKTAADNNNSDYSWTGATKYHLNGRDSLVNPGPAMASHKDDEEKYFPQSGVLIFGKQDSGKTNVDIEKVMITDEEEIRTTNPVATEQYGSVSTNLQSGNTQAATTDVNTQGVLPGMVWQDRDVYLQGPIWAKIPHTDGHFHPSPLMGGFGLKHPPPQILIKNTPVPANPSTTFSAAKFASFITQYSTGQVSVEIEWELQKENSKRWNPEIQYTSNYNKSVNVDFTVDTNGVYSEPRPIGTRYLTRNL

SEQ ID NO: 10978 - protein, 735 aa, Artificial Sequence
  source: /note="Description of Artificial Sequence: Synthetic polypeptide"
MAADGYLPDWLEDTLSEGIRQWWKLKPGPPPPKPAERHQDDSRGLVLPGYKYLGPFNGLDKGEPVNEADAAALEHDKAYDRQLDSGDNPYLKYNHADAEFQERLKEDTSFGGNLGRAVFQAKKRVLEPLGLVEEPVKTAPGKKRPVEHSPAEPDSSSGTGKAGQQPARKRLNFGQTGDADSVPDPQPLGQPPAAPSGLGTNTMATGSGAPMADNNEGADGVGNSSGNWHCDSTWMGDRVITTSTRTWALPTYNNHLYKQISSQSGASNDNHYFGYSTPWGYFDFNRFHCHFSPRDWQRLINNNWGFRPKRLNFKLFNIQVKEVTQNDGTTTIANNLTSTVQVFTDSEYQLPYVLGSAHQGCLPPFPADVFMVPQYGYLTLNNGSQAVGRSSFYCLEYFPSQMLRTGNNFTFSYTFEDVPFHSSYAHSQSLDRLMNPLIDQYLYYLSKTNAPSGTTTMSRLQFSQAGASDIRDQSRNWLPGPCYRQQRVSKTAADNNNSDYSWTGATKYHLNGRDSLVNPGPAMASHKDDEEKYFPQSGVLIFGKQDSGKTNVDIEKVMITDEEEIRTTNPVATEQYGSVSTNLQSGNTQAATTDVNTQGVLPGMVWQDRDVYLQGPIWAKIPHTDGHFHPSPLMGGFGLKHPPPQILIKNTPVPANPSTTFSAAKFASFITQYSTGQVSVEIEWELQKENSKRWNPKIQYTSNYNKSVNVDFTVDTNGVYSEPRPIGTRYLTRNL

SEQ ID NO: 10979 - protein, 735 aa, Artificial Sequence
  source: /note="Description of Artificial Sequence: Synthetic polypeptide"
MAADGYLPDWLEDTLSEGIRQWWKLKPGPPPPKPAERHQDDSRGLVLPGYKYLGPFNGLDKGEPVNEADAAALEHDKAYDRQLDSGDNPYLKYNHADAESQERLKEDTSFGGNLGRAVFQAKKRVLEPLGLVEEPVKTAPGKKRPVEHSPAEPDSSSGTGKAGQQPARKRLNFGQTGDADSVPDPQPLGQPPAAPSGLGTNTMATGSGAPMADNNEGADGVGNSSGNWHCDSTWMGDRVITTSTRTWALPTYNNHLYKQISSQSGASNDNHYFGYSTPWGYFDFNRFHCHFSPRDWQRLINNNWGFRPKRLNFKLFNIQVKEVTQNDGTTTIANNLTSTVQVFTDSEYQLPYVLGSAHQGCLPPFPADVFMVPQYGYLTLNNGSQAVGRSSFYCLEYFPSQMLRTGNNFTFSYTFEDVPFHSSYAHSQSLDRLMNPLIDQYLYYLSKTNAPSGTTTMSRLQFSQAGASDIRDQSRNWLPGPCYRQQRVSKTAADNNNSDYSWTGATKYHLNGRDSLVNPGPAMASHKDDEEKYFPQSGVLIFGKQDSGKTNVDIEKVMITDEEEIRTTNPVATEQYGSVSTNLQSGNTQAATTDVNTQGVLPGMVWQDRDVYLQGPIWAKIPHTDGHFHPSPLMGGFGLKHPPPQILIKNTPVPANPSTTFSAAKFASFITQYSTGQVSVEIEWELQKENSKRWNPEIQYTSNYNKSVNVDFTVDTNGVYSEPRPIGTRYLTRNL

SEQ ID NO: 10980 - protein, 735 aa, Artificial Sequence
  source: /note="Description of Artificial Sequence: Synthetic polypeptide"
MAADGYLPDWLEDTLSEGIRQWWKLKPGPPPPKPAERHQDDSRGLVLPGYKYLGPFNGLDKGEPVNEADAAALEHDKAYDRQLDSGDNPYLKYNHADAEFQERLKEDTSFGGNLGRAVFQAKKRVLEPLGLVEEPVKTAPGKKRPVEHSPAEPDSSSGTGKAGQQPARKRLNFGQTGDADSVPDPQPLGQPPAAPSGLGTNTMATGSGAPTADNNEGADGVGNSSGNWHCDSTWMGDRVITTSTRTWALPTYNNHLYKQISSQSGASNDNHYFGYSTPWGYFDFNRFHCHFSPRDWQRLINNNWGFRPKRLNFKLFNIQVKEVTQNDGTTTIANNLTSTVQVFTDSEYQLPYVLGSAHQGCLPPFPADVFMVPQYGYLTLNNGSQAVGRSSFYCLEYFPSQMLRTGNNFTFSYTFEDVPFHSSYAHSQSLDRLMNPLIDQYLYYLSKTNAPSGTTTMSRLQFSQAGASDIRDQSRNWLPGPCYRQQRVSKTAADNNNSDYSWTGATKYHLNGRDSLVNPGPAMASHKDDEEKYFPQSGVLIFGKQDSGKTNVDIEKVMITDEEEIRTTNPVATEQYGSVSTNLQSGNTQAATTDVNTQGVLPGMVWQDRDVYLQGPIWAKIPHTDGHFHPSPLMGGFGLKHPPPQILIKNTPVPANPSTTFSAAKFASFITQYSTGQVSVEIEWELQKENSKRWNPEIQYTSNYNKSVNVDFTVDTNGVYSEPRPIGTRYLTRNL

SEQ ID NO: 10981 - protein, 735 aa, Artificial Sequence
  source: /note="Description of Artificial Sequence: Synthetic polypeptide"
MAADGYLPDWLEDTLSEGIRQWWKLKPGPPPPKPAERHQDDSRGLVLPGYKYLGPFNGLDKGEPVNEADAAALEHDKAYDRQLDSGDNPYLKYNHADAEFQERLKEDTSFGGNLGRAVFQAKKRVLEPLGLVEEPVKTAPGKKRPVEHSPAEPDASSGTGKAGQQPARKRLNFGQTGDADSVPDPQPLGQPPAAPSGLGTNTMATGSGAPMADNNEGADGVGNSSGNWHCDSTWMGDRVITTSTRTWALPTYNNHLYKQISSQSGASNDNHYFGYSTPWGYFDFNRFHCHFSPRDWQRLINNNWGFRPKRLNFKLFNIQVKEVTQNDGTTTIANNLTSTVQVFTDSEYQLPYVLGSAHQGCLPPFPADVFMVPQYGYLTLNNGSQAVGRSSFYCPEYFPSQMLRTGNNFTFSYTFEDVPFHSSYAHSQSLDRLMNPLIDQYLYYLSKTNAPSGTTTMSRLQFSQAGASDIRDQSRNWLPGPCYRQQRVSKTAADNNNSDYSWTGATKYHLNGRDSLVNPGPAMASHKDDEEKYFPQSGVLIFGKQDSGKTNVDIEKVMITDEEEIRTTNPVATEQYGSVSTNLQSGNTQAATTDVNTQGVLPGMVWQDRDVYLQGPIWAKIPHTDGHFHPSPLMGGFGLKHPPPQILIKNTPVPANPSTTFSAAKFASFITQYSTGQVSVEIEWELQKENSKRWNPEIQYTSNYNKSVNVDFTVDTNGVYSEPRPIGTRYLTRNL

SEQ ID NO: 10982 - protein, 735 aa, Artificial Sequence
  source: /note="Description of Artificial Sequence: Synthetic polypeptide"
MAADGYLPDWLEDTLSEGIRQWWKLKPGPPPPKPAERHQDDSRGLVLPGYKYLGPFNGLDKGEPVNEADAAALEHDKAYDRQLDSGDNPYLKYNHADAEFQERLKEDTSFGGNLGRAVFQAKKRVLEPLGLVEEPVKTAPGKKRPVEHSPAEPDSSSGTGKAGQQPARKRLNFGQTGDADSVPDPQPLGQPPAAPSGLGTNTMATGSGAPMADNNEGADGVGNSSGNWHCDSTWMGDRVITTSTRTWALPTYNNHLYKQISSQSGASNDNHYFGYSTPWGYFDFNRFHCHFSPRDWQRLINNNWGLRPKRLNFKLFNIQVKEVTQNDGTTTIANNLTSTVQVFTDSEYQLPYVLGSAHQGCLPPFPADVFMVPQYGYLTLNNGSQAVGRSSFYCLEYFPSQMLRTGNNFTFSYTFEDVPFHSSYAHSQSLDRLMNPLIDQYLYYLSKTNAPSGTTTMSRLQFSQAGASDIRDQSRNWLPGPCYRQQRVSKTAADNNNSDYSWTGATKYHLNGRDSLVNPGPAMASHKDDEEKYFPQSGVLIFGKQDSGKTNVDIEKVMITDEEEIRTTNPVATEQYGSVSTNLQSGNTQAATTDVNTQGVLPGMVWQDRDVYLQGPIWAKIPHTDGHFHPSPLMGGFGLKHPPPQILIKNTPVPANPSTTFSAAKFASFITQYSTGQVSVEIEWELQKENSKRWNPEIQYTSNYNKSVNVDFTVDTNGVYSEPRPIGTRYLTRNL

SEQ ID NO: 10983 - protein, 735 aa, Artificial Sequence
  source: /note="Description of Artificial Sequence: Synthetic polypeptide"
MAADGYLPDWLEDTLSEGIRQWWKLKPGPPPPKPAERHQDDSRGLVLPGYKYLGPFNGLDKGEPVNEADAAALEHDKAYDRQLDSGDNPYLKYNHADAEFQERLKEDTSFGGNLGRAVFQAKKRVLEPLGLVEEPVKTAPGKKRPVEHFPAEPDSSSGTGKAGQQPARKRLNFGQTGDADSVPDPQPLGQPPAAPSGLGTNTMATGSGAPMADNNEGADGVGNSSGNWHCDSTWMGDRVITTSTRTWALPTYNNHLYKQISSQSGASNDNHYFGYSTPWGYFDFNRFHCHFSPRDWQRLINNNWGFRPKRLNFKLFNIQVKEVTQNDGTTTIANNLTSTVQVFTDSEYQLPYVLGSAHQGCLPPFPADVFMVPQYGYLTLNNGSQAVGRSSFYCLEYFPSQMLRTGNNFTFSYTFEDVPFHSSYAHSQSLDRLMNPLIDQYLYYLSKTNAPSGTTTMSRLQFSQAGASDIRDQSRNWLPGPCYRQQRVSKTAADNNNSDYSWTGATKYHLNGRDSLVNPGPAMASHKDDEEKYFPQSGVLIFGKQDSGKTNVDIEKVMITDEEEIRTTNPVATEQYGSVSTNLQSGNTQAATTDVNTQGVLPGMVWQDRDVYLQGPIWAKIPHTDGHFHPSPLMGGFGLKHPPPQILIKNTPVPANPSTTFSAAKFASFITQYSTGQVSVEIEWELQKENSKRWNPEIQYTSNYNKSVNVDFTVDTNGVYSEPRPIGTRYLTRNL

SEQ ID NO: 10984 - protein, 735 aa, Artificial Sequence
  source: /note="Description of Artificial Sequence: Synthetic polypeptide"
MAADGYLPDWLKDTLSEGIRQWWKLKPGPPPPKPAERHQDDSRGLVLPGYKYLGPFNGLDKGEPVNEADAAALEHDKAYDRQLDSGDNPYLKYNHADAEFQERLKEDTSFGGNLGRAVFQAKKRVLEPLGLVEEPVKTAPGKKRPVEHSPAEPDSSSGTGKAGQQPARKRLNFGQTGDADSVPDPQPLGQPPAAPSGLGTNTMATGSGAPMADNNEGADGVGNSSGNWHCDSTWMGDRVITTSTRTWALPTYNNHLYKQISSQSGASNDNHYFGYSTPWGYFDFNRFHCHFSPRDWQRLINNNWGFRPKRLNFKLFNIQVKEVTQNDGTTTIANNLTSTVQVFTDSEYQLPYVLGSAHQGCLPPFPADVFMVPQYGYLTLNNGSQAVGRSSFYCLEYFPSQMLRTGNNFTFSYTFEDVPFHSSYAHSQSLDRLMNPLIDQYLYYLSKTNAPSGTTTMSRLQFSQAGASDIRDQSRNWLPGPCYRQQRVSKTAADNNNSDYSWTGATKYHLNGRDSLVNPGPAMASHKDDEEKYFPQSGVLIFGKQDSGKTNVDIEKVMITDEEEIRTTNPVATEQYGSVSTNLQSGNTQAATTDVNTQGVLPGMVWQDRDVYLQGPIWAKIPHTDGHFHPSPLMGGFGLKHPPPQILIKNTPVPANPSTTFSAAKFASFITQYSTGQVSVEIEWELQKENSKRWNPEIQYTSNYNKSVNVDFTVDTNGVYSEPRPIGTRYLTRNL

SEQ ID NO: 10985 - protein, 735 aa, Artificial Sequence
  source: /note="Description of Artificial Sequence: Synthetic polypeptide"
MAADGYLPDWLEDTLSEGIRQWWKLKPGPPPPKPAERHQDDSRGLVLPGYKYLGPFNGLDKGEPVNEADVAALEHDKAYDRQLDSGDNPYLKYNHADAEFQERLKEDTSFGGNLGRAVFQAKRRVLEPLGLVEEPVKTAPGKKRPVEHSPAEPDSSSGTGKAGQQPARKRLNFGQTGDADSVPDPQPLGQPPAAPSGLGTNTMATGSGAPMADNNEGADGVGNSSGNWHCDSTWMGDRVITTSTRTWALPTYNNHLYKQISSQSGASNDNHYFGYSTPWGYFDFNRFHCHFSPRDWQRLINNNWGFRPKRLNFKLFNIQVKEVTQNDGTTTIANNLTSTVQVFTDSEYQLPYVLGSAHQGCLPPFPADVFMVPQYGYLTLNNGSQAVGRSSFYCLEYFPSQMLRTGNNFTFSYTFEDVPFHSSYAHSQSLDRLMNPLIDQYLYYLSKTNAPSGTTTMSRLQFSQAGASDIRDQSRNWLPGPCYRQQRVSKTAADNNNSDYSWTGATKYHLNGRDSLVNPGPAMASHKDDEEKYFPQSGVLIFGKQDSGKTNVDIEKVMITDEEEIRTTNPVATEQYGSVSTNLQSGNTQAATTDVNTQGVLPGMVWQDRDVYLQGPIWAKIPHTDGHFHPSPLMGGFGLKHPPPQILIKNTPVPANPSTTFSAAKFASFITQYSTGQVSVEIEWELQKENSKRWNPEIQYTSNYNKSVNVDFTVDTNGVYSEPRPIGTRYLTRNL

SEQ ID NO: 10986 - protein, 735 aa, Artificial Sequence
  source: /note="Description of Artificial Sequence: Synthetic polypeptide"
MAADGYLPDWLEDTLSEGIRQWWKLKPGPPPPKPAERHQDDSRGLVLPGYKYLGPFNGLDKGEPVNEADAAALEHDKAYDRQLDSGDNPYLKYNHADAEFQERLKEDTSFGGNLGRAVFQAKKRVLEPLGLVEEPVKTAPGKKRPVEHSPAEPDSSSGTGKAGQQPARKRLNFGQTGDADSVPDPQPLGQPPAAPSGLGTNTMATGSGAPMADNNEGADGVGNSSGNWHCDSTWMGDRVITTSTRTWALPTYNNHLYKQISSQSGASNDNHYFGYSTPWGYFDFNRFHCHFSPRDWQRLINNNWGFRPKRLNFKLFNIQVKEVTQNDGTTTIANNLTSTVQVFTDSEYQLPYVLGSAHQGCLPPFPADVFMVPQYGYLTLNNGSQAVGRSSFYCLEYFPSQMLRTGNNFTFSYTFEDVPFHSSYAHSQSLDRLMNPLIDQYLYYLSKTNALSGTTTMSRLQFSQAGASDIRDQSRNWLPGPCYRQQRVSKTAADNNNSDYSWTGATKYHLNGRDSLVNPGPAMASHKDDEEKYFPQSEVLIFGKQDSGKTNVDIEKVMITDEEEIRTTNPVATEQYGSVSTNLQSGNTQAATTDVNTQGVLPGMVWQDRDVYLQGPIWAKIPHTDGHFHPSPLMGGFGLKHPPPQILIKNTPVPANPSTTFSAAKLASFITQYSTGQVSVEIEWELQKENSKRWNPEIQYTSNYNKSVNVDFTVDTNGVYSEPRPIGTRYLTRNL

SEQ ID NO: 10987 - protein, 735 aa, Artificial Sequence
  source: /note="Description of Artificial Sequence: Synthetic polypeptide"
MAADGYLPDWLEDTLSEGIRQWWKLKPGPPPPKPAERHQDDSRGLVLPGYKYLGPFNGLDKGEPVNEADAAALEHDKAYDRQLDSGDNPYLKYNHADAEFQERLKEDTSFGGNLGRAVFQAKKRVLEPLGLVEEPVKTAPGKKRPVEHSPAEPDSSSGTGKAGQQPARKRLNFGQTGDADSVPDPQPLGQPPAAPSGLGTNTMATGSGAPMADNNEGADGVGNSSGNWHCDSTWMGDRVITTSTRTWALPTYNNHLYKQISSQSGASNDNHYFGYSTPWGYFDFNRFHCHFSPRDWQRLINNNWGFRPKRLNFKLFNIQVKEVTQNDGTTTIANNLTSTVQVFTDSEYQLPYALGSAHQGCLPPFPADVFMVPQYGYLTLNNGSQAVGRSSFYCLEYFPSQMLRTGNNFTFSYTFEDVPFHSSYAHSQSLDRLMNPLIDQYLYYLSKTNAPSGTTTMSRLQFSQAGASDIRDQSRNWLPGPCYRQQRVSKTAADNNNSDYSWTGATKYHLNGRDSLVNPGPAMASHKDDEEKYFPQSGVLIFGKQDSGKTNVDIEKVMITDEEEIRTTNPVATEQYGSVSTNLQSGNTQAATTDVNTQGVLPGMVWQDRDVYLQGPIWAKIPHTDGHFHPSPLMGGFGLKHPPPQILIKNTPVPANPSTTFSAAKFASFITQYSTGQVSVEIEWELQKENSKRWNPEIQYTSNYNKSVNVDFTVDTNGVYSEPRPIGTRYLTRNL

SEQ ID NO: 10988 - protein, 735 aa, Artificial Sequence
  source: /note="Description of Artificial Sequence: Synthetic polypeptide"
MAADGYLPDWLEDTLSEGIRQWWKLKPGPPPPKPAERHQDDSRGLVLPGYKYLGPFNGLDKGEPVNEADAAALEHDKAYDRQLDSGDNPYLKYNHADAEFQERLKEDTSFGGNLGRAVFQAKKRVLEPLGLVEEPVKTAPGKKRPVEHSPAEPDSSSGTGKAGQQPARKRLNFGQTGDADSVPDPQPLGQPPAAPSGLGTNTMATGSGAPMADNNEGADGVGNSSGNWHCDSTWMGDRVITTSTRTWALPTYNNHLYKQISSQSGASNDNHYFGYSTPWGYFDFSRFHCHFSPRDWQRLINNNWGFRPKRLNFKLFNIQVKEVTQNDGTTTIANNLTSTVQVFTDSEYQLPYVLGSAHQGCLPPFPADVFMVPQYGYLTLNNGSQAVGRSSFYCLEYFPSQMLRTGNNFTFSYTFEDVPFHSSYAHSQSLDRLMNPLIDQYLYYLSKTNAPSGTTTMSRLQFSQAGASDIRDQSRNWLPGPCYRQQRVSKTAADNNNSDYSWTGATKYHLNGRDSLVNPGPAMASHKDDEEKYFPQSGVLIFGKQDSGKTNVDIEKVMITDEEEIRTTNPVATEQYGSVSTNLQSGNTQAATTDVNTQGVLPGMVWQDRDVYLQGPIWAKIPHTDGHFHPSPLMGGFGLKHPPPQILIKNTPVPANPSTTFSAAKFASFITQYSTGQVSVEIEWELQKENSKRWNPEIQYTSNYNKSVNVDFTVDTNGVYSEPRPIGTRYLTRNL

SEQ ID NO: 10989 - protein, 735 aa, Artificial Sequence
  source: /note="Description of Artificial Sequence: Synthetic polypeptide"
MAADGYLPDWLEDTLSEGIRQWWKLKPGPPPPKPAERHQDDSRGLVLPGYKYLGPFNGLDKGEPVNEADAAALEHDKAYDRQLDSGDNPYLKYNHADAEFQERLKEDTSFGGNLGRAVFQAKKRVLEPLGLVEEPVKTAPGKKRPVEHSPAEPDSSSGTGKAGQQPARKRLNFGQTGDADSVPDPQPLGQPPAAPSGLGTNTMATGSGAPMADNNEGADGVGNSSGNWHCDSTWMGDRVITTSTRTWALPTYNNHLYKQISSQSGASNDNHYVGYSTPWGYFDFNRFHCHFSPRDWQRLINNNWGFRPKRLNFKLFNIQVKEVTQNDGTTTIANNLTSTVQVFTDSEYQLPYVLGSAHQGCLPPFPADVFMVPQYGYLTLNNGSQAVGRSSFYCLEYFPSQMLRTGNNFTFSYTFEDVPFHSSYAHSQSLDRLMNPLIDQYLYYLSKTNAPSGTTTMSRLQFSQAGASDIRDQSRNWLPGPCYRQQRVSKTAADNNNSDYSWTGATKYHLNGRDSLVNPGPAMASHKDDEEKYFPQSGVLIFGKQDSGKTNVDIEKVMITDEEEIRTTNPVATEQYGSVSTNLQSGNTQAATTDVNTQGVLPGMVWQDRDVYLQGPIWAKIPHTDGHFHPSPLMGGFGLKHPPPQILIKNTPVPANPSTTFSAAKFASFITQYSTGQVSVEIEWELQKENSKRWNPEIQYTSNYNKSVNVDFTVDTNGVYSEPRPIGTRYLTRNL

SEQ ID NO: 10990 - protein, 735 aa, Artificial Sequence
  source: /note="Description of Artificial Sequence: Synthetic polypeptide"
MAADGYLPDWLEDTLSEGIRQWWKLKPGPPPPKPAERHQDDSRGLVLPGYKYLGPFNGLDKGEPVNEADAAALEHDKAYDRQLDSGDNPYLKYNHADAEFQERLKEDTSFGGNLGRAVFQAKKRVLEPLGLVEEPVKTAPGKKRPVEHSPAEPDSSSGTGKAGQQPARKRLNFGQTGDADSVPDPQPLGQPPAAPSGLGTNTMATGSGAPMADNNEGADGVGNSSGNWHCDSTWMGDRVITTSTRTWALPTYNNHLYKQISSQSGASNDNHYFGYSTPWGHFDFNRFHCHFSPRDWQRLINNNWGFRPKRLNFKLFNIQVKEVTQNDGTTTIANNLTSTVQVFTDSEYQLPYVLGSAHQGCLPPFPADVFMVPQYGYLTLNNGSQAVGRSSFYCLEYFPSQMLRTGNNFTFSYTFEDVPFHSSYAHSQSLDRLMNPLIDQYLYYLSKTNAPSGTTTMSRLQFSQAGASDIRDQSRNWLPGPCYRQQRVSKTAADNNNSDYSWTGATKYHLNGRDSLVNPGPAMASHKDDEEKYFPQSGVLIFGKQDSGKTNVDIEKVMITDEEEIRTTNPVATEQYGSVSTNLQSGNTQAATTDVNTQGVLPGMVWQDRDVYLQGPIWAKIPHTDGHFHPSPLMGGFGLKHPPPQILIKNTPVPANPSTTFSAAKFASFITQYSTGQVSVEIEWELQKENSKRWNPEIQYTSNYNKSVNVDFTVDTNGVYSEPRPIGTRYLTRNL

SEQ ID NO: 10991 - protein, 735 aa, Artificial Sequence
  source: /note="Description of Artificial Sequence: Synthetic polypeptide"
MAADGYLPDWLEDTLSEGIRQWWKLKPGPPPPKPAERHQDDSRGLVLPGYKYLGPFNGLDKGEPVNEADVAALEHDKAYDRQLDSGDNPYLKYNHADAEFQERLKEDTSFGGNLGRAVFQAKKRVLEPLGLVEEPVKTAPGKKRPVEHSPAEPDSSSGTGKAGQQPARKRLNFGQTGDADSVPDPQPLGQPPAAPSGLGTNTMATGSGAPMADNNEGADGVGNSSGNWHCDSTWMGDRVITTSTRTWALPTYNNHLYKQISSQSGASNDNHYFGYSTPWGYFDFNRFHCHFSPRDWQRLINNDWGFRPKRLNFKLFNIQVKEVTQNDGTTTIANNLTSTVQVFTDSEYQLPYVLGSAHQGCLPPFPADVFMVPQYGYLTLNNGSQAVGRSSFYCLEYFPSQMLRTGNNFTFSYTFEDVPFHSSYAHSQSLDRLMNPLIDQYLYYLSKTNAPSGTTTMSRLQFSQAGASDIRDQSRNWLPGPCYRQQRVSKTAADNNNSDYSWTGATKYHLNGRDSLVNPGPAMASHKDDEEKYFPQSGVLIFGKQDSGKTNVDIEKVMITDEEEIRTTNPVATEQYGSVSTNLQSGNTQAATTDVNTQGVLPGMVWQDRDVYLQGPIWAKIPHTDGHFHPSPLMGGFGLKHPPPQILIKNTPVPANPSTTFSAAKFASFITQYSTGQVSVEIEWELQKENSKRWNPEIQYTSNYNKSVNVDFTVDTNGVYSEPRPIGTRYLTRNL

SEQ ID NO: 10992 - protein, 735 aa, Artificial Sequence
  source: /note="Description of Artificial Sequence: Synthetic polypeptide"
MAADGYLPDWLEDTLSEGIRQWWKLKPGPPPPKPAERHQDDSRGLVLPGYKYLGPFNGLDKGEPVNEADAAALEHDKAYDRQLDSGDNPYLKYNHADAEFQERLKEDTSFGGNLGRAVFQAKKRVLEPLGLVEEPVKTAPGKKRPVEHSPAEPDSSSGTGKAGQQPARKRLNFGQTGDADSVPDPQPLGQPPAAPSGLGTNTMATGSGAPMADNNEGADGVGNSSGNWHCDSTWMGDRVITTSTRTWALPTYNNHLYKQISSQSGASNDNHYFGYSTPWGYFDFNRFHCHFSPRDWQRLINNNWGFRPKRLNFKLFNIQVKEVTQNDGTTTIANNLTSTVQVFTDSEYQLPYVLGSAHQGCLPPFPADVFMVPQYGYLTLNNGSQAVGRSSFYCLEYFPSQMLRTGNNFTFSYTFEDVPFHSSYAHSQSLDRLMNPLIDQYLYYLSKTNAPSGTTTMSRLQFSQAGASDIRDQSRNWLPGPCYRQQRVSKTAADNNNSDYSWTGATKYHLNGRDSLVNPGPAMASHKDDEEKYFPQSGVLIFGKQDSEKTNVDIEKVMITDEEEIRTTNPVATEQYGSVSTNLQSGNTQAATTDVNTQGVLPGMVWQDRDVYLQGPIWAKIPHTDGHFHPSPLMGGFGLKHPPPQILIKNTPVPANPSTTFSAAKFASFITQYSTGQVSVEIEWELQKENSKRWNPEIQYTSNYNKSVNVDFTVDTNGVYSEPRPIGTRYLTRNL

SEQ ID NO: 10993 - protein, 735 aa, Artificial Sequence
  source: /note="Description of Artificial Sequence: Synthetic polypeptide"
MAADGYLPDWLEDTLSEGIRQWWKLKPGPPPPKPAERHQDDSRGLVLPGYKYLGPFNGLDKGEPVNEADAAALEHDKAYDRQLDSGDNPYLKYNHADAEFQERLKEDTSFGGNLGRAVFQAKKRVLEPLGLVEEPVKTAPGKKRPVEHSPAEPDSSSGTGKAGQQPARKRLNFGQTGDADSVPDPQPLGQPPAAPSGLGTNTMATGSGAPMADNNEGADGVGNSSGNWHCDSTWMGDRVITTSTRTWALPTYNNHLYKQISSQSGASNDNHYFGYSTPWGYFDFNRFHCHFSPRDWQRLINNNWGFRPKRLNFKLFNIQVKEVTQNDGTTTIANNLTSTVQVFTDSEYQLPYVLGSAHQGCLPPFPADVFMVPQYGYLTLNNGSQAVGRSSFYCLEYFPSQMLRTGNNFTFSYTFEDVPFHSSYAHSQSLDRLMNPLIDQYLYYLSKTNAPSGTTTMSRLQFSQAGASDIRDQSRNWLPGPCYRQQRVSKTAADNNNSDYSWTGATKYHLNGRDSLVNPGPAMASHKDDEEKYFPQSGVLIFGKQDSGKTNVDIEKVMITDEEEIRTTNPVATEQYGSVSTNLQSGNTQAATTDVNTQGVLPGMVWQDRDVYLQGPIWAKIPHTDGHFHPSPLMGGFGLKHPPPQILIKNTPVPANPSTTFSAAKFASFITQYSTGQVSVEIEWELQKENSKRWNPEIQYTSNYNKSVNVDFTVDTNGVYSEPRPIGTRYLTRNL

SEQ ID NO: 10994 - protein, 735 aa, Artificial Sequence
  source: /note="Description of Artificial Sequence: Synthetic polypeptide"
MAADGYLPDWLEDTLSEGIRQWWKLKPGPPPPKPAERHQDDSRGLVLPGYKYLGPFNGLDKGEPVNEADVAALEHDKAYDRQLDSGDNPYLKYNHADAEFQERLKEDTSFGGNLGRAVFQAKKRVLEPLGLVEEPVKTAPGKKRPVEHSPAEPDSSSGTGKAGQQPARKRLNFGQTGDADSVPDPQPLGQPPAAPSGLGTNTMATGSGAPMADNNEGADGVGNSSGNWHCDSTWMGDRVITTSTRTWALPTYNNHLYKQISSQSGASNDNHYFGYSTPWGYFDFNRFHCHFSPRDWQRLINNNWGFRPKRLNFKLFNIQVKEVTQNDGTTTIANNLTSTVQVFTDSEYQLPYVLGSAHQGCLPPFPADVFMVPQYGYLTLNNGSQAVGRSSFYCLEYFPSQMLRTGNNFTFSYTFEDVPFHSSYAHSQSLDRLMNPLIDQYLYYLSKTNAPSGTTTMSRLQFSQAGASDIRDQSRNWLPGPCYRQQRVSKTAADNNNSDYSWTGATKYHLNGRDSLVNPGPAMASHKDDEEKYFPQSGVLIFGKQDSGKTNVDIEKVMITDEEEIRTTNPVATEQYGSVSTNLQSGNTQAATTDVNTQGVLPGMVWQDRDVYLQGPIWAKIPHTDGHFHPSPLMGGFGLKHPPPQILIKNTPVPANPSTTFSAAKFASFITQYSTGQVSVEIEWELQKENSKRWNPEIQYTSNYNKSVNVDFTVDTNGVYSEPRPIGTRYLTRNL

SEQ ID NO: 10995 - protein, 735 aa, Artificial Sequence
  source: /note="Description of Artificial Sequence: Synthetic polypeptide"
MAADGYLPDWLEDTLSEGIRQWWKLKPGPPPPKPAERHQDDSRGLVLPGYKYLGPFNGLDKGEPVNEADAAALEHDKAYDRQLDSGDNPYLKYNHADAEFQERLKEDTSFGGNLGRAVFQAKKRVLEPLGLVEEPVKTAPGKKRPVEHSPAEPDSSSGTGKAGQQPARKRLNFGQTGDADSVPDPQPLGQPPAAPSGLGTNTMATGSGAPMADNNEGADGVGNSSGNWHCDSTWMGDRVITTSTRTWALPTYNNHLYKQISSQSGASNDNHYFGYSTPWGYFDFNRFHCHFSPRDWQRLINNNWGFRPKRLNFKLFNIQVKEVTQNDGTTTIANNLTSTVQVFTDSEYQLPYVLGSAHQGCLPPFPADVFMVPQYGYLTLNNGSQAVGRSSFYCLEYFPSQMLRTGNNFTFSYTFEDVPFHSSYAHSQSLDRLMNPLIDQYLYYLSKTNAPSGTTTMSRLQFSQAGASDIRDQSRNWLPGPCYRQQRVSKTAADNNNSDYPWTGATKYHLNGRDSLVNPGPAMASHKDDEEKYFPQSGVLIFGKQDSGKTNVDIEKVMITDEEEIRTTNPVATEQYGSVSTNLQSGNTQAATTDVNTQGVLPGMVWQDRDVYLQGPIWAKIPHTDGHFHPSPLMGGFGLKHPPPQILIKNTPVPANPSTTFSAAKFASFITQYSTGQVSVEIEWELQKENSKRWNPEIQYTSNYNKSVNVDFTVDTNGVYSEPRPIGTRYLTRNL

SEQ ID NO: 10996 - protein, 735 aa, Artificial Sequence
  source: /note="Description of Artificial Sequence: Synthetic polypeptide"
MAADGYLPDWLEDTLSEGIRQWWKLKPGPPPPKPAERHQDDSRGLVLPGYKYLGPFNGLDKGEPVNEADAAALEHDKAYDRQLDSGDNPYLKYNHADAEFQERLKEDTSFGGNLGRAVFQAKKRVLEPLGLVEEPVKTAPGKKRPVEHSPAEPDSSSGTGKAGQQPARKRLNFGQTGDADSVPDPQPLGQPPAAPSGLGTNTMATGSGAPMADNNEGADGVGNSSGNWHCDSTWMGDRVITTSTRTWALPTYNNHLYKQISSQSGASNDNHYFGYSTPWGYFDFNRFHCHFSPRDWQRLINNNWGFRPKRLNFKLFNIQVKEVTQNDGTTTIANNLTSTVQVFTDSEYQLPYVLGSAHQGCLPPFPADVFMVPQYGYLTLNNGSQAVGRSSFYCLEYFPSQMLRTGNNFTFSYTFEDVPFHSSYAHSQSLDRLMNPLIDQYLYYLSKTNAPSGTTTMSRLQFSQAGASDIRDQSRNWLPGPCYRQQRVSKTAADNNNSDYSWTGATKYHLNGRDSLVNPGPAMASHKDDEEKYFPQSGVLIFGKQDSGKTNVDIEKVMITDEEEIRTTNPVATEQYGSVSTNLQSGNTQAATTDVNTQGALPGMVWQDRDVYLQGPIWAKIPHTDGHFHPSPLMGGFGLKHPPPQILIKNTPVPANPSTTFSAAKFASFITQYSTGQVSVEIEWELQKENSKRWNPEIQYTSNYNKSVNVDFTVDTNGVYSEPRPIGTRYLTRNL

SEQ ID NO: 10997 - protein, 735 aa, Artificial Sequence
  source: /note="Description of Artificial Sequence: Synthetic polypeptide"
MAADGYLPDWLEDTLSEGIRQWWKLKPGPPPPKPAERHQDDSRGLVLPGYKYLGPFNGLDKGEPVNEADAAALEHDKAYDRQLDSGDNPYLKYNHADAEFQERLKEDTSFGGNLGRAVFQAKKRVLEPLGLVEEPVKTAPGKKRPVEHSPAEPDSSSGTGKAGQQPARKRLNFGQTGDADSVPDPQPLGQPPAAPSGLGTNTMATGSGAPMADNNEGADGVGNSSGNWHCDSTWMGDRVITTSTRTWALPTYNNHLYKQISSQSGASNDNHYFGYSTPWGYFDFNRFHCHFSPRDWQRLINNNWGFRPKRLNFKLFNIQVKEVTQNDGTTTIANNLTSTVQVFTDSEYQLPYVLGSAHQGCLPPFPADVFMVPQYGYLTLNNGSQAVGRSSFYCLEYFPSQMLRTGNNFTFSYTFEDVPFHSSYAHSQSLDRLMNPLIDQYLYYLSKTNAPSGTTTMSRLQFSQAGASDIRDQSRNWLPGPCYRQQRVSKTAADNNNSDYSWTGATKYHLNGRDSLVNPGPAMASHKDDEEKYFPQSGVLIFGKQDSGKTNVDIEKVMITDEEEIRTTNPVATEQYGSVSTNLQSGNTQAATTDVNTQGVLPGMVWQDRDVYLQGPIWAKIPHTDGHFHPSPLMGGFGLKHPPPQILIKNTPVPANPSTTFSAAKLASFITQYSTGQVSVEVEWELQKENSKRWNPEIQYTSNYNKSVNVDFTVDTNGVYSEPRPIGTRYLTRNL

SEQ ID NO: 10998 - protein, 735 aa, Artificial Sequence
  source: /note="Description of Artificial Sequence: Synthetic polypeptide"
MAADGYLPDWLEDTLSEGIRQWWKLKPGPPPPKPAERHQDDSRGLVLPGYKYLGPFNGLDKGEPVNEADVAALEHDKAYDRQLDSGDNPYLKYNHADAEFQERLKEDTSFGGNLGRAVFQAKKRVLEPLGLVEEPVKTAPGKKRPVEHSPAEPDSSSGTGKAGQQPARKRLNFGQTGDADSVPDPQPLGQPPAAPSGLGTNTMATGSGAPMADNNEGADGVGNSSGNWHCDSTWMGDRVITTSTRTWALPTYNNHLYKQISSQSGASNDNHYFGYSTPWGYFDFNRFHCHFSPRDWQRLINNNWGFRPKRLNFKLFNIQVKEVTQNDGTTTIANNLTSTVQVFTDSEYQLPYVLGSAHQGCLPPFPADVFMVPQYGYLTLNSGSQAVGRSSFYCLEYFPSQMLRTGNNFTFSYTFEDVPFHSSYAHSQSLDRLMNPLIDQYLYYLSKTNAPSGTTTMSRLQFSQAGASDIRDQSRNWLPGPCYRQQRVSKTAADNNNSDYSWTGATKYHLNGRDSLVNPGPAMASHKDDEEKYFPQSGVLIFGKQDSGKTNVDIEKVMITDEEEIRTTNPVATEQYGSVSTNLQSGNTQAATTDVNTQGVLPGMVWQDRDVYLQGPIWAKIPHTDGHFHPSPLMGGFGLKHPPPQILIKNTPVPANPSTTFSAAKFASFITQYSTGQVSVEIEWELQKENSKRWNPEIQYTSNYNKSVNVDFTVDTNGVYSEPRPIGTRYLTRNL

SEQ ID NO: 10999 - protein, 735 aa, Artificial Sequence
  source: /note="Description of Artificial Sequence: Synthetic polypeptide"
MAADGYLPDWLEDTLSEGIRQWWKLKPGPPPPKPAERHQDDSRGLVLPGYKYLGPFNGLDKGEPVNEADVAALEHDKAYDRQLDSGDNPYLKYNHADAEFQERLKEDTSFGGNLGRAVFQAKKRVLEPLGLVEEPVKTAPGKKRPVEHSPAEPDSSSGTGKAGQQPARKRLNFGQTGGADSVPDPQPLGQPPAAPSGLGTNTMATGSGAPMADNNEGADGVGNSSGNWHCDSTWMGDRVITTSTRTWALPTYNNHLYKQISSQSGASNDNHYFGYSTPWGYFDFNRFHCHFSPRDWQRLINNNWGFRPKRLNFKLFNIQVKEVTQNDGTTTIANNLTSTVQVFTDSEYQLPYVLGSAHQGCLPPFPADVFMVPQYGYLTLNNGSQAVGRSSFYCLEYFPSQMLRTGNNFTFSYTFEDVPFHSSYAHSQSLDRLMNPLIDQYLYYLSKTNAPSGTTTMSRLQFSQAGASDIRDQSRNWLPGPCYRQQRVSKTAADNNNSDYSWTGATKYHLNGRDSLVNPGPAMASHKDDEEKYFPQSGVLIFGKQDSGKTNVDIEKVMITDEEEIRTTNPVATEQYGSVSTNLQSGNTQAATTDVNTQGVLPGMVWQDRDVYLQGPIWAKIPHTDGHFHPSPLMGGFGLKHPPPQILIKNTPVPANPSTTFSAAKFASFITQYSTGQVSVEIEWELQKENSKRWNPEIQYTSNYNKSVNVDFTVDTNGVYSEPRPIGTRYLTRNL

SEQ ID NO: 11000 - protein, 735 aa, Artificial Sequence
  source: /note="Description of Artificial Sequence: Synthetic polypeptide"
MAADGYLPDWLEDTLSEGIRQWWKLKPGPPPPKPAERHQDDSRGLVLPGYKYLGPFNGLDKGEPVNEADAAALEHDKAYDRQLDSGDNPYLKYNHADAEFQERLKEDTSFGGNLGRAVFQAKKRVLEPLGLVEEPVKTAPGKKRPVEHSPAEPDSSSGTGKAGQQPARKRLNFGQTGDADSVPDPQPLGQPPAAPSGLGTNTMATGSGAPMADNNEGADGVGNSSGNWHCDSTWMGDRVITTSTRTWALPTYNNHLYKQISSQSGASNDNHYFGYSTPWGYFDFNRFHCHFSPRDWQRLINNNWGFRPKRLNFKLFNIQVKEVTQNDGTTTIANNLTSTVQVFTDSEYQLPYALGSAHQGCLPPFPADVFMVPQYGYLTLNNGSQAVGRSSFYCLEYFPSQMLRTGNNFTFSYTFEDVPFHSSYAHSQSLDRLMNPLIDQYLYYLSKTNAPSGTTTMSRLQFSQAGASDIRDQSRNWLPGPCYRQQRVSKTAADNNNSDYSWTGATKYHLNGRDSLVNPGPAMASHKDDEEKYFPQSGVLIFGKQDSGKTNVDIEKVMITDEEEIRTTNPVATEQYGSVSTNLQSGNTQAATTDVNTQGVLPGMVWQDRDVYLQGPIWAKIPHTDGHFHPSPLMGGFGLKHPPPQILIKNTPVPANPSTTFSAAKFASFITQYSTGQVSVEIEWELQKEDSKRWNPEIQYTSNYNKSVNVDFTVDTNGVYSEPRPIGTRYLTRNL

SEQ ID NO: 11001 - protein, 735 aa, Artificial Sequence
  source: /note="Description of Artificial Sequence: Synthetic polypeptide"
MAADGYLPDWLEDTLSEGIRQWWKLKPGPPPPKPAERHQDDSRGLVLPGYKYLGPFNGLDKGEPVNEADAAALEHDKAYDRQLDSGDNPYLKYNHADAEFQERLKEDTSFGGNLGRAVFQAKKRVLEPLGLVEEPVKTAPGKKRPVEHSPAEPDSSSGTGKAGQQPARKRLNFGQTGDADSVPDPQPLGQPPAAPSGLGTNTMATGSGAPMADNNEGADGVGNSSGNWHCDSTWMGDRVITTSTRTWALPTYNNHLYKQISSQSGASNDNHYFGYSTPWGYFDFNRFHCHFSPRDWQRLINNNWGFRPKRLNFKLFNIQVKEVTQNDGTTTIANNLTSTVQVFTDSEYQLPYVLGSAHQGCLPPFPADVFMVPQYGYLTLNNGSQAVGRSSFYCLEYFPSQMLRTGNNFTFSYTFEDVPFHSSYAHSQSLDRLMNPLIDQYLYYLSKTNAPSGTTTMSRLQFSQAGASDIRDQSRNWLPGPCYRQQRVSKTAADNNNSDYSWTGATKYHLNGRDSLVNPGPAMASHKDDEEKYFPQSGVLIFGKQDSGKTNVDIEKVMITDEEEIRTTNPVATEQYGSVSTNLQSGNTQAATTDVNTQGVLPGMVWQDRDVYLQGPIWAKIPHTDGHFHPSPLMGGFGLKHPPPQILIKNTPVPANPSTTSSAAKFASFITQYSTGQVSVEIEWELQKENSKRWNPEIQYTSNYNKSVNVDFTVDTNGVYSEPRPIGTRYLTRNL

SEQ ID NO: 11002 - protein, 735 aa, Artificial Sequence
  source: /note="Description of Artificial Sequence: Synthetic polypeptide"
MAADGYLPDWLEDTLSEGIRQWWKLKPGPPPLKPAERHQDDSRGLVLPGYKYLGPFNGLDKGEPVNEADAAALEHDKAYDRQLDSGDNPYLKYNHADAEFQERLKEDTSFGGNLGRAVFQAKKRVLEPLGLVEEPVKTAPGKKRPVEHSPAEPDSSSGTGKAGQQPARKRLNFGQTGDADSVPDPQPLGQPPAAPSGLGTNTMATGSGAPMADNNEGADGVGNSSGNWHCDSTWMGDRVITTSTRTWALPTYNNHLYKQISSQSGASNDNHYFGYSTPWGYFDFNRFHCHFSPRDWQRLINNNWGFRPKRLNFKLFNIQVKEVTQNDGTTTIANNLTSTVQVFTDSEYQLPYVLGSAHQGCLPPFPADVFMVPQYGYLTLNNGSQAVGRSSFYCLEYFPSQMLRTGNNFTFSYTFEDVPFHSSYAHSQSLDRLMNPLIDQYLYYLSKTNAPSGTTTMSRLQFSQAGASDIRDQSRNWLPGPCYRQQRVSKTAADNNNSDYSWTGATKYHLNGRDSLVNPGPAMASHKDDEEKYFPQSGVLIFGKQDSGKTNVDIEKVMITDEEEIRTTNPVATEQYGSVSTNLQSGNTQAATTDVNTQGVLPGMVWQDRDVYLQGPIWAKIPHTDGHFHPSPLMGGFGLKHPPPPILIKNTPVPANPSTTFSAAKFASFITQYSTGQVSVEIEWELQKENSKRWNPEIQYTSNYNKSVNVDFTVDTNGVYSEPRPIGTRYLTRNL

SEQ ID NO: 11003 - protein, 735 aa, Artificial Sequence
  source: /note="Description of Artificial Sequence: Synthetic polypeptide"
MAADGYLPDWLEDTLSEGIRQWWKLKPGPPPPKPAERHQDDSRGLVLPGYKYLGPFNGLDKGEPVNEADAAALEHDKAYDRQLDSGDNPYLKYNHADAEFQERLKEDTSFGGNLGRAVFQAKKRVLEPLGLVEEPVKTAPGKKRPVEHSPAEPDSSSGTGKAGQQPARKRLNFGQTGDADSVPDPQPLGQPPAAPSGLGTNTMATGSGAPMADNNEGADGVGNSSGNWHCDSTWMGDRVITTSTRTWALPTYNNHLYKQISSQSGASNDNHYFGYSTPWGYFDFNRFHCHFSPRDWQRLINNNWGFRPKRLNFKLFNIQVKEVTQNDGTTTIANNLTSTVQVFTDSEYQLPYVLGSAHQGCLPPFPADVFMVPQYGYLTLNNGSQAVGRSSFYCLEYFPSQMLRTGNNFTFSYTFEDVPFHSSYAHSQSLDRLMNPLIDQYLYYLSKTNAPSGTTTMSRLQFSQAGASDIRDQSRNWLPGPCYRQQRVSKTAADNNNSDYSWTGATKYHLNGRDSLVNPGPAMASHKDDEEKYFPQSGVLIFGKQDSGKTNVDIEKVMITDEEEIRATNPVATEQYGSVSTNLQSGNTQAATTDVNTQGVLPGMVWQDRDVYLQGPIWAKIPHTDGHFHPSPLMGGFGLKHPPPQILIKNTPVPANPSTTFSAAKFASFITQYSTGQVSVEIEWELQKENSKRWNPEIQYTSNYNKSVNVDFTVDTNGVYSEPRPIGTRYLTRNL

SEQ ID NO: 11004 - protein, 735 aa, Artificial Sequence
  source: /note="Description of Artificial Sequence: Synthetic polypeptide"
MAADGYLPDWLEDTLSEGIRQWWKLKPGPPPPKPAERHQDDSRGLVLPGYKYLGPFNGLDKGEPVNEADAAALEHDKAYDRQLDSGDNPYLKYNHADAEFQERLKEDTSFGGNLGRAVFQAKKRVLEPLGLVEEPVKTAPGKKRPVEHSPAEPDSSSGTGKAGQQPARKRLNFGQTGDADSVPDPQPLGQPPAAPSGLGTNTMATGSGAPMADNNEGADGVGNSSGNWHCDSTWMGDRVITTSTRTWALPTYNNHLYKQISSQSGASNDNHYFGYSTPWGYFDFNRFHCHFSPRDWQRLISNNWGFRPKRLNFKLFNIQVKEVTQNDGTTTIANNLTSTVQVFTDSEYQLPYVLGSAHQGCLPPFPADVFMVPQYGYLTLNNGSQAVGRSSFYCLEYFPSQMLRTGNNFTFSYTFEDVPFHSSYAHSQSLDRLMNPLIDQYLYYLSKTNAPSGTTTMSRLQFSQAGASDIRDQSRNWLPGPCYRQQRVSKTAADNNNSDYSWTGATKYHLNGRDSLVNPGPAMASHKDDEEKYFPQSGVLIFGKQDSGKTNVDIEKVMITDEEEIRTTNPVATEQYGSVSTNLQSGNTQAATTDVNTQGVLPGMVWQDRDVYLQGPIWAKIPHTDGHFHPSPLMGGFGLKHPPPQILIKNTPVPANPSTTFSAAKFASFITQYSTGQVSVEIEWEPQKENSKRWNPEIQYTSNYNKSVNVDFTVDTNGVYSEPRPIGTRYLTRNL

SEQ ID NO: 11005 - protein, 735 aa, Artificial Sequence
  source: /note="Description of Artificial Sequence: Synthetic polypeptide"
MAADGYLPDWLEDTLSEGIRQWWKLKPGPPPPKPAERHQDDSRGLVLPGYKYLGPFNGLDKGEPVNEADAAALEHDKAYDRQLDSGDNPYLKYNHADAEFQERLKEDTSFGGNLGRAVFQAKKGVLEPLGLVEEPVKTAPGKKRPVEHSPAEPDSSSGTGKAGQQPARKRLNFGQTGDADSVPDPQPLGQPPAAPSGLGTNTMATGSGAPMADNNEGADGVGNSSGNWHCDSTWMGDRVITTSTRTWALPTYNNHLYKQISSQSGASNDNHYFGYSTPWGYFDFNRFHCHFSPRDWQRLINNNWGFRPKRLNFKLFNIQVKEVTQNDGTTTIANNLTSTVQVFTDSEYQLPYVLGSAHQGCLPPFPADVFMVPQYGYLTLNNGSQAVGRSSFYCLEYFPSQMLRTGNNFTFSYTFEDVPFHSSYAHSQSLDRLMNPLIDQYLYYLSKTNAPSGTTTMSRLQFSQAGASDIRDQSRNWLPGPCYRQQRVSKTAADNNNSDYSWTGATKYHLNGRDSLVNPGPAMASHKDDEEKYFPQSGVLIFGKQDSGKTNVDIEKVMITDEEEIRTTNPVATEQYGSVSTNLQSGNTQAATTDVNTQGVLPGMVWQDRDVYLQGPIWAKIPHTDGHFHPSPLMGGFGLKHPPPQILIKNTPVPANPSTTFSAAKFASFITQYSTGQVSVEIEWELQKENSKRWNPEIQYTSNYNKSVNVDFTVDTNGVYSEPRPIGTRYLTRNL

SEQ ID NO: 11006 - protein, 735 aa, Artificial Sequence
  source: /note="Description of Artificial Sequence: Synthetic polypeptide"
MAADGYLPDWLEDTLSEGIRQWWKLKPGPPPPKPAERHQDDSRGLVLPGYKYLGPFNGLDKGEPVNEADAAALEHDKAYDRQLDSGDNPYLKYNHADAEFQERLKEDTSFGGNLGRAVFQAKKRVLEPLGLVEEPVKTAPGKKRPVEHSPAEPDSSSGTGKAGQQPARKRLNFGQTGDADSVPDPQPLGQPPAAPSGLGTNTMATGSGAPMADNNEGADGVGNSSGNWHCDSTWMGDRVITTSTRTWALPTYNNHLYKQISSQSGASNDNHYFGYSTPWGYFDFNRFHCHFSPRDWQRLINNNWGFRPKRLNFKLFNIQVKEVTQNDGTTTIANNLTSTVQVFTDSEYQLPYVLGSAHQGCLPPFPADVFMVPQYGYLTLNNGSQAVGRSSFYCLEYFPSQMLRTGNNFTFSYTFEDVPFHSSYAHSQSLDRLMNPLIDQYLYYLSRTNAPSGTTTMSRLQFSQAGASDIRDQSRNWLPGPCYRQQRVSKTAADNNNSDYSWTGATKYHLNGRDSLVNPGPAMASHKDDEEKYFPQSGVLIFGKQDSGKTNVDIEKVMITDEEEIRTTNPVATEQYGSVSTNLQSGNTQAATTDVNTQGVLPGMVWQDRDVYLQGPIWAKIPHTDGHFHPSPLMGGFGLKHPPPQILIKNTPVPANPSTTFSAAKFASFITQYSTGQVSVEIEWELQKENSKRWNPEIQYTSNYNKSVNVDFTVDTNGVYSEPRPIGTRYLTRNL

SEQ ID NO: 11007 - protein, 735 aa, Artificial Sequence
  source: /note="Description of Artificial Sequence: Synthetic polypeptide"
MAADGYLPDWLEDTLSEGIRQWWKLKPGPPPPKPAERHQDDSRGLVLPGYKYLGPFNGLDKGEPVNEADAAALEHDKAYDRQLDSGDNPYLKYNHADAEFQERLKEDTSFGGNLGRAVFQAKKRVLEPLGLVEEPVKTAPGKKRPVEHSPAEPDSSSGTGKAGQQPARKRLNFGQTGDADSVPDPQPLGQPPAAPSGLGTNTMATGSGAPMADNNEGADGVGNSSGNWHCDSTWMGDRVITTSTRTWALPTYNNHLYKQISSQSGASNDNHYFGYSTPWGYFDFNRFHCHFSPRDWQRLINNNWGFRPKRLNFKLFNIQVKEVTQNDGTTTIANNLTSTVQVFTDSEYQLPYVLGSAHQGCLPPFPADVFMVPQYGYLTLNNGSQAVGRSSFYCLEYFPSQMLRTGNNFTFSYTFEDVPFHSSYAHSQSLDRLMNPLIDQYLYYLSKTNAPSGTTTMSRLQFSQAGASDIRDQSRNWLPGPCYRQQRVSKTAADNNNSDYSWTGATKYHLNGRDSLVNPGPAMASHKDDEEKYFPQSGVLIFGKQDSGKTNVDIEKVMITDEEEIRTTNPVATEQYGSVSTNLQSGNTQAATTDVNTQGVLPGMVWQDRDVYLQGPIWAKIPHTDGHFHPSPLMGGFGLKHPPPQILIKNTPVPANPSTTFSAAKFASFITQYSTGQVSVEIEWELQKENSKRWNPEIQYTSNYNKSVNVDLTVDTNGVYSEPRPIGTRYLTRNL

SEQ ID NO: 11008 - protein, 735 aa, Artificial Sequence
  source: /note="Description of Artificial Sequence: Synthetic polypeptide"
MAADGYLPDWLEDTLSEGIRQWWKLKPGPPPLKPAERHQDDSRGLVLPGYKYLGPFNGLDKGEPVNEADAAALEHDKAYDRQLDSGDNPYLKYNHADAEFQERLKEDTSFGGNLGRAVFQAKKRVLEPLGLVEEPVKTAPGKKRPVEHSPAEPDSSSGTGKAGQQPARKRLNFGQTGDADSVPDPQPLGQPPAAPSGLGTNTMAAGSGAPMADNNEGADGVGNSSGNWHCDSTWMGDRVITTSTRTWALPTYNNHLYKQISSQSGASNDNHYFGYSTPWGYFDFNRFHCHFSPRDWQRLINNNWGFRPKRLNFKLFNIQVKEVTQNDGTTTIANNLTSTVQVFTDSEYQLPYVLGSAHQGCLPPFPADVFMVPQYGYLTLNNGSQAVGRSSFYCLEYFPSQMLRTGNNFTFSYTFEDVPFHSSYAHSQSLDRLMNPLIDQYLYYLSKTNAPSGTTTMSRLQFSQAGASDIRDQSRNWLPGPCYRQQRVSKTAADNNNSDYSWTGATKYHLNGRDSLVNPGPAMASHKDDEEKYFPQSGVLIFGKQDSGKTNVDIEKVMITDEEEIRTTNPVATEQYGSVSTNLQSGNTQAATTDVNTQGVLPGMVWQDRDVYLQGPIWAKIPHTDGHFHPSPLMGGFGLKHPPPQILIKNTPVPANPSTTFSAAKFASFITQYSTGQVSVEIEWELQKENSKRWNPEIQYTSNYNKSVNVDFTVDTNGVYSEPRPIGTRYLTRNL

SEQ ID NO: 11009 - protein, 735 aa, Artificial Sequence
  source: /note="Description of Artificial Sequence: Synthetic polypeptide"
MAADGYLPDWLEDTLSEGIRQWWKLKPGPPPPKPAERHQDDSRGLVLPGYKYLGPFNGLDKGEPVNEADAAALEHDKAYDRQLDSGDNPYLKYNHADAEFQERLKEDTSFGGNLGRAVFQAKKRVLEPLGLVEEPVKTAPGKKRPVEHSPAEPDSSSGTGKAGQQPARKRLNFGQTGDADSVPDPQPLGQPPAAPSGLGTNTMATGSGAPMADNNEGADGVGNSSGNWHCDSTWMGDRVITTSTRTWALPTYNNHLYKQISSQSGASNDNHYFGYSTPWGYFDFNRFHCHFSPRDWQRLINNNWGFRPKRLNFKLFNIQVKEVTQNDGTTTIANNLTSTVQVFTDSEYQLPYVLGSAHQGCLPPFPADVFMVPQYGYLTLNNGSQAVGRSSFYCLEYFPSQMLRTGNNFTFSYTFEDVPFHSSYAHSQSLDRLMNPLIDQYLYYLSKTNAPSGTTTMSRLQFSQAGASDIRDQSRNWLPGPCYRQQRVSKTAADNNNSDYSWTGATKYHLNGRDSLVNPGPAMASHKDDEEKYFPQSGVLIFGKQDSGKTNVDIEKVMITDEEEIRTTNPVATEQYGSVSTNLQSGDTQAATTDVNTQGVLPGMVWQDRDVYLQGPIWAKIPHTDGHFHPSPLMGGFGLKHPPPQILIKNTPVPANPSTTFSAAKFASFITQYSTGQVSVEIEWELQKENSKRWNPEIQYTSNYNKSVNVDFTVDTNGVYSEPRPIGTRYLTRNL

SEQ ID NO: 11010 - protein, 735 aa, Artificial Sequence
  source: /note="Description of Artificial Sequence: Synthetic polypeptide"
MAADGYLPDWLEDTLSEGIRQWWKLKPGPPPPKPAERHQDDSRGLVLPGYKYLGPFNGLDKGEPVNEADAAALEHDKAYDRQLDSGGNPYLKYNHADAEFQERLKEDTSFGGNLGRAVFQAKKRVLEPLGLVEEPVKTAPGKKRPVEHSPAEPDSSSGTGKAGQQPARKRLNFGQTGDADSVPDPQPLGQPPAAPSGLGTNTMATGSGAPMADNNEGADGVGNSSGNWHCDSTWMGDRVITTSTRTWALPTYNNHLYKQISSQSGASNDNHYFGYSTPWGYFDFNRFHCHFSPRDWQRLINNNWGFRPKRLNFKLFNIQVKEVTQNDGTTTIANNLTSTVQVFTDSEYQLPYVLGSAHQGCLPPFPADVFMVPQYGYLTLNNGSQAVGRSSFYCLEYFPSQMLRTGNNFTFSYTFEDVPFHSSYAHSQSLDRLMNPLIDQYLYYLSKTNAPSGTTTMSRLQFSQAGASDIRDQSRNWLPGPCYRQQRVSKTAADNNNSDYSWTGATKYHLNGRDSLVNPGPAMASHKDDEEKYFPQSGVLIFGKQDSGKTNVDIEKVMITDEEEIRTTNPVATEQYGSVSTNLQSGNTQAATTDVNTQGVLPGMVWQDRDVYLQGPIWAKIPHTDGHFHPSPLMGGFGLKHPPPQILIKNTPVPANPSTTFSAAKFASFITQYSTGQVSVEIEWELQKENSKRWNPEIQYTSNYNKSVNVDFTVDTNGVYSEPRPIGTRYLTRNL

SEQ ID NO: 11011 - protein, 735 aa, Artificial Sequence
  source: /note="Description of Artificial Sequence: Synthetic polypeptide"
MAADGYLPDWLEDTLSEGIRQWWKLKPGPPPPKPAERHQDDSRGLVLPGYKYLGPFNGLDKGEPVNEADAAALEHDKAYDRQLDSGDNPYLKYNHADAEFQERLKEDTSFGGNLGRAVFQAKKRVLEPLGLVEEPVKTAPGKKRPVEHSPAEPDSSSGTGKAGQQPARKRLNFGQTGDADSVPDPQPLGQPPAAPSGLGTNTMATGSGAPMADNNEGADGVGNSSGNWHCDSTWMGDRVITTSTRTWALPTYNNHLYKQISSQSGASNDNHYFGYSTPWGYFDFNRFHCHFSPRDWQRLINNNWGFRPKRLNFKLFNIQVKEVTQNDGTTTIANNLTSTVQVFTDSEYQLPYVLGSAHQGCLPPFPADVFMVPQYGYLTLNNGSQAVGRSSFYCLEYFPSQMLRTGNNFTFSYTFEDVPFHSSYAHSQSLDRLMNPLIDQYLYYLSKTNAPSGTTTMSRLQFSQAGASDIRDQSRNWLPGPCYRQQRVSKTAADNNNSDYSWTGATKYHLNGRDSLVNPGPAMASHKDDEEKYFPQSGVLIFGKQDSGKTNVDIEKVMITDEEEIRTTNPVATEQYGSVSTNLQSGNTQAATTDVNTQGVLPGMVWQDRDVYLQGPIWAKIPHTDGHFHPSPLMGGFGLKHPPPQILIKNTPVPANPSTTFSAAKLASFITQYSTGQVSVEIEWELQKENSKRWNPEIQYTSNYNKSVNVDFTVDTNGVYSEPRPIGTRYLTRNL

SEQ ID NO: 11012 - protein, 735 aa, Artificial Sequence
  source: /note="Description of Artificial Sequence: Synthetic polypeptide"
MAADGYLPDWLEDTLSEGIRQWWKLKPGPPPPKPAERHQDDSRGLVLPGYKYLGPFNGLDKGEPVNEADAAALEHDKAYDRQLDSGDNPYLKYNHADAEFQERLKEDTSFGGNLGRAVFQAKKRVLEPLGLVEEPVKTAPGKKRPVEHSPAEPDSSSGTGKAGQQPARKRLNFGQTGDADSVPDPQPLGQPPAAPSGLGTNTMATGSGAPMADNNEGADGVGNSSGNWHCDSTWMGDRVITTSTRTWALPTYNNHLYKQISSQSGASNDNHYFGYSTPWGYFDFNRFHCHFSPRDWQRLINNNWGFRPKRLNFKLFNIQVKEVTQSDGTTTIANNLTSTVQVFTDSEYQLPYVLGSAHQGCLPPFPADVFMVPQYGYLTLNNGSQAVGRSSFYCLEYFPSQMLRTGNNFTFSYTFEDVPFHSSYAHSQSLDRLMNPLIDQYLYYLSKTNAPSGTTTMSRLQFSQAGASDIRDQSRNWLPGPCYRQQRVSKTAADNNNSDYSWTGATKYHLNGRDSLVNPGPAMASHKDDEEKYFPQSGILIFGKQDSGKTNVDIEKVMITDEEEIRTTNPVATEQYGSVSTNLQSGNTQAATTDVNTQGVLPGMVWQDRDVYLQGPIWAKIPHTDGHFHPSPLMGGFGLKHPPPQILIKNTPVPANPSTTFSAAKFASFITQYPTGQVSVEIEWELQKENSKRWNPEIQYTSNYNKSVNVDFTVDTNGVYSEPRPIGTRYLTRNL

SEQ ID NO: 11013 - protein, 735 aa, Artificial Sequence
  source: /note="Description of Artificial Sequence: Synthetic polypeptide"
MAADGYLPDWLEDTLSEGIRQWWKLKPGPPPPKPAERHQDDSRGLVLPGYKYLGPFNGLDKGEPVNEADAAALEHDKAYDRQLDSGDNPYLKYNHADAEFQERLKEDTSFGGNLGRAVFQAKKRVLEPLGLVEEPVKTAPGKKRPVEHSPAEPDASSGTGKAGQQPARKRLNFGQTGDADSVPDPQPLGQPPAAPSGLGTNTMATGSGAPMADNNEGADGVGNSSGNWHCDSTWMGDRVITTSTRTWALPTYNNHLYKQISSQSGASNDNHYFGYSTPWGYFDFNRFHCHFSPRDWQRLINNNWGFRPKRLNFKLFNIQVKEVTQNDGTTTIANNLTSTVQVFTDSEYQLPYVLGSAHQGCLPPFPADVFMVPQYGYLTLNNGSQAVGRSSFYCLEYFPSQMLRTGNNFTFSYTFEDVPFHSSYAHSQSLDRLMNPLIDQYLYYLSKTNAPSGTTTMSRLQFSQAGASDIRDQSRNWLPGPCYRQQRVSKTAADNNNSDYSWTGATKYHLNGRDSLVNPGPAMASHKDDEEKYFPQSGVLIFGKQDSGKTNVDIEKVMITDEEEIRTTNPVATEQYGSVSTNLQSGNTQAATTDVNTQGVLPGMVWQDRDVYLQGPIWAKIPHTDGHFHPSPLMGGFGLKHPPPQILIKNTPVPANPSTTFSAAKFASFITQYSTGQVSVEIEWELQKENSKRWNPEIQYTSNYNKSVNVDFTVDTNGVYSEPRPIGTRYLTRNL

SEQ ID NO: 11014 - protein, 735 aa, Artificial Sequence
  source: /note="Description of Artificial Sequence: Synthetic polypeptide"
MAADGYLPDWLEDTLSEGIRQWWKLKPGPPPPKPAERHQDDSRGLVLPGYKYLGPFNGLDKGGPVNEADAAALEHDKAYDRQLDSGDNPYLKYNHADAEFQERLKEDTSFGGNLGRAVFQAKKRVLEPLGLVEEPVKTAPGKKRPVEHSPAEPDSSSGTGKAGQQPARKRLNFGQTGDADSVPDPQPLGQPPAAPSGLGTNTMATGSGAPMADNNEGADGVGNSSGNWHCDSTWMGDRVITTSTRTWALPTYNNHLYKQISSQSGASNDNHYFGYSTPWGYFDFNRFHCHFSPRDWQRLINNNWGFRPKRLNFKLFNIQVKEVTQNDGTTTIANNLTSTVQVFTDSEYQLPYVLGSAHQGCLPPFPADVFMVPQYGYLTLNNGSQAVGRSSFYCLEYFPSQMLRTGNNFTFSYTFEDVPFHSSYAHSQSLDRLMNPLIDQYLYYLSKTNAPSGTTTMSRLQFSQAGASDIRDQSRNWLPGPCYRQQRVSKTAADNNNSDYSWTGATKYHLNGRDSLVNPGPAMASHKDDEEKYFPQSGVLIFGKQDSGKTNVDIEKVMITDEEEIRTTNPVATEQYGSVSTNLQSGNTQAATTDVNTQGVLPGMVWQDRDVYLQGPIWAKIPHTDGHFHPSPLMGGFGLKHPPPQILIKNTPVPANPSTTFSAAKFASFITQYSTGQVSVEIEWELQKENSKRWNPEIQYTSNYNKSVNVDFTVDTNGVYSEPRPIGTRYLTRNL

SEQ ID NO: 11015 - protein, 735 aa, Artificial Sequence
  source: /note="Description of Artificial Sequence: Synthetic polypeptide"
MAADGYLPDWLEDTLSEGIRQWWKLKPGPPPPKPAERHQDDSRGLVLPGYKYLGPFNGLDKGEPVNEADAAALEHDKAYDRQLDSGDNPYLKHNHADAEFQERLKEDTSFGGNLGRAVFQAKKRVLEPLGLVEEPVKTAPGKKRPVEHSPAEPDSSSGTGKAGQQPARKRLNFGQTGDADSVPDPQPLGQPPAAPSGLGTNTMATGSGAPMADNNEGADGVGNSSGNWHCDSTWMGDRVITTSTRTWALPTYNNHLYKQISSQSGASNDNHYFGYSTPWGYFDFNRFHCHFSPRDWQRLINNNWGFRPKRLNFKLFNIQVKEVTQNDGTTTIANNLTSTVQVFTDSEYQLPYVLGSAHQGCLPPFPADVFMVPQYGYLTLNNGSQAVGRSSFYCLEYFPSQMLRTGNNFTFSYTFEDVPFHSSYAHSQSLDRLMNPLIDQYLYYLSKTNAPSGTTTMSRLQFSQAGASDIRDQSRNWLPGPCYRQQRVSKTAADNNNSDYSWTGATKYHLNGRDSLVNPGPAMASHKDDEEKYFPQSGVLIFGKQDSGKTNVDIEKVMITDEEEIRTTNPVATEQYGSVSTNLQSGNTQAATTDVNTQGVLPGMVWQDRDVYLQGPIWAKIPHTDGHFHPSPLMGGFGLKHPPPQILIKNTPVPANPSTTFSAAKFASFITQYSTGQVSVEIEWELQKENSKRWNPEIQYTSNYNKSVNVDFTVDTNGVYSEPRPIGTRYLTRNL

SEQ ID NO: 11016 - protein, 735 aa, Artificial Sequence
  source: /note="Description of Artificial Sequence: Synthetic polypeptide"
MAADGYLPDWLEDTLSEGIRQWWKLKPGPPPPKPAERHQDDSRGLVLPGYKYLGPFNGLDKGEPVNEADAAALEHDKAYDRQLDSGDNPYLKYNHADAEFQERLKEDTSFGGNLGRAVFQAKKRVLEPLGLVEEPVKTAPGKKRPVEHSPAEPDSSSGTGKAGQQPARKRLNFGQTGDADSVPDPQPLGQPPAAPSGLGTNTMATGSGAPMADNNEGADGVGNSSGNWHCDSTWMGDRVITTSTRTWALPTYNNHLYKQISSQSGASNDNHYFGYSTPWGYFDFNRFHCHFSPRDWQRLINNNWGFRPKRLNFKLFNIQVKEVTQNDGTTTIANNLTSTVQVFTDSEYQLPYVLGSAHQGCLPPFPAGVFMVPQYGYLTLNNGSQAVGRSSFYCLEYFPSQMLRTGNNFTFSYTFEDVPFHSSYAHSQSLDRLMNPLIDQYLYYLSKTNAPSGTTTMSRLQFSQAGASDIRDQSRNWLPGPCYRQQRVSKTAADNNNSDYSWTGATKYHLNGRDSLVNPGPAMASHKDDEEKYFPQSGVLIFGKQDSGKTNVDIEKVMITDEEEIRTTNPVATEQYGSVSTNLQSGNTQAATTDVNTQGVLPGMVWQDRDVYLQGPIWAKIPHTDGHFHPSPLMGGFGLKHPPPQILIKNTPVPANPSTTFSAAKFASFITQYSTGQVSVEIEWELQKENSKRWNPEIQYTSNYNKSVNVDFTVDTNGVYSEPRPIGTRYLTRNL

SEQ ID NO: 11017 - protein, 735 aa, Artificial Sequence
  source: /note="Description of Artificial Sequence: Synthetic polypeptide"
MAADGYLPDWLEDTLSEGIRQWWKLKPGPPPPKPAERHQDDSRGLVLPGYKYLGPFNGLDKGEPVNEADAAALEHDKAYDRQLDSGDNPYLKYNHADAEFQERLKEDTSFGGNLGRAVFQAKKRVLEPLGLVEEPVKTAPGKKRPVEHSPAEPDSSSGTGKAGQQPARKRLNFGQTGDADSVPDPQPLGQPPAAPSGLGTNTTATGSGAPMADNNEGADGVGNSSGNWHCDSTWMGDRVITTSTRTWALPTYNNHLYKQISSQSGASNDNHYFGYSTPWGYFDFNRFHCHFSPRDWQRLINNNWGFRPKRLNFKLFNIQVKEVTQNDGTTTIANNLTSTVQVFTDSEYQLPYVLGSAHQGCLPPFPADVFMVPQYGYLTLNNGSQAVGRSSFYCLEYFPSQMLRTGNNFTFSYTFEDVPFHSSYAHSQSLDRLMNPLIDQYLYYLSKTNAPSGTTTMSRLQFSQAGASDIRDQSRNWLPGPCYRQQRVSKTAADNNNSDYSWTGATKYHLNGRDSLVNPGPAMASHKDDEEKYFPQSGVLIFGKQDSGKTNVDIEKVMITDEEEIRTTNPVATEQYGSVSTNLQSGNTQAATTDVNTQGVLPGMVWQDRDVYLQGPIWAKIPHTDGHFHPSPLMGGFGLKHPPPQILIKNTPVPANPSTTFSAAKFASFITQYSTGQVSVEIEWELQKENSKRWNPEIQYTSNYNKSVNVDFTVDTNGVYSEPRPIGTRYLTRNL

SEQ ID NO: 11018 - protein, 735 aa, Artificial Sequence
  source: /note="Description of Artificial Sequence: Synthetic polypeptide"
MAADGYLPDWLEDTLSEGIRQWWKLKPGPPPPKPAERHQDDSRGLVLPGYKYLGPFNGLDKGEPVNEADAAALEHDKAYDRQLDSGDNPYLKYNHADAEFQERLKEDTSFGGNLGRAVFQAKKRVLEPLGLVEEPVKTAPGKKRPVEHSPAEPDSSSGTGKAGQQPARKRLNFGQTGDADSVPDPQPLGQPPAAPSGLGTNTMATGSGAPMADNNEGADGVGNSSGNWHCDSTWMGDRVITTSTRTWALPTYNNHLYKQISSQSGASNDNHYFGYSTPWGYFDFNRFHCHFSPRDWQRLIINNWGFRPKRLNFKLFNIQVKEVTQNDGTTTIANNLTSTVQVFTDSEYQLPYVLGSAHQGCLPPFPADVFMVPQYGYLTLNNGSQAVGRSSFYCLEYFPSQMLRTGNNFTFSYTFEDVPFHSSYAHSQSLDRLMNPLIDQYLYYLSKTNAPSGTTTMSRLQFSQAGASDIRDQSRNWLPGPCYRQQRVSKTAADNNNSDYSWTGATKYHLNGRDSLVNPGPAMASHKDDEEKYFPQSGVLIFGKQDSGKTNVDIEKVMITDEEEIRTTNPVATEQYGSVSTNLQSGNTQAATTDVNTQGVLPGMVWQDRDVYLQGPIWAKIPHTDGHFHPSPLMGGFGLKHPPPQILIKNTPVPANPSTTFSAAKFASFITQYSTGQVSVEIEWELQKENSKRWNPEIQYTSNYNKSVNVDFTVDTNGVYSEPRPIGTRYLTRNL

SEQ ID NO: 11019 - protein, 735 aa, Artificial Sequence
  source: /note="Description of Artificial Sequence: Synthetic polypeptide"
MAADGYLPDWLEDTLSEGIRQWWKLKPGPPPPKPAERHQDDSRGLVLPGYKYLGPFNGLDKGEPVNEADAAALEHDKAYDRQLDSGDNPYLKYNHADAEFQERLKEDTSFGGNLGRAVFQAKKRVLEPLGLVEEPVKTAPGKKRPVEHSPAEPDSSSGTGKAGQQPARKRLNFGQTGDADSVPDPQPLGQPPAAPSGLGTNTMATGSGAPMADNNEGADGVGNSSGNWHCDSTWMGDRVITTSTRTWALPTYNNHLYKQISSQSGASNDNHYFGYSTPWGYFDFNRFHCHFSPRDWQRLINNNWGFRPKRLNFKLFNIQVKEVTQNDGTTTIANNLTSTVQVFTDSEYQLPYVLGSAHQGCLPPFPADVFMVPQYGYLTLNNGSQAVGRSSFYCLEYFPSQMLRTGNNFTFSYTFEDVPFHSSYAHSQSLDRLMNPLIDQYLYYLSKTNAPSGTTTMSRLQFSQAGASDIRDQSRNWLPGPCYRQQRVSKTAADNNNSDYSWTGATKYHLNGRDSLVNPGPAMASHKDDEEKYFPQSGVLIFGKQDSGKTNVDIEKVMITDEEEIRTTNPVATEQYGSVSTNLQSGNTQAATTDVNTQGVLPGMVWQDRDVYQQGPIWAKIPHTDGHFHPSPLMGGFGLKHPPPQILIKNTPVPANPSTTFSAAKLASFITQYSTGQVSVEVEWELQKENSKRWNPEIQYTSNYNKSVNVDFTVDTNGVYSEPRPIGTRYLTRNL

SEQ ID NO: 11020 - protein, 735 aa, Artificial Sequence
  source: /note="Description of Artificial Sequence: Synthetic polypeptide"
MAADGYLPDWLEDTLSEGIRQWWKLKPGPPPPKPAERHQDDSRGLVLPGYKYLGPFNGLDKGEPVNEADAAALEHDKAYDRQLDSGDNPYLKYNHADAEFQERLKEDTSFGGNLGRAVFQAKKRVLEPLGLVEEPVKTAPGKKRPVEHSPAEPDSSSGTGKAGQQPARKRLNFGQTGDADSVPDPQPLGQPPAAPSGLGTNTMATGSGAPMADSNEGADGVGNSSGNWHCDSTWMGDRVITTSTRTWALPTYNNHLYKQISSQSGASNDNHYFGYSTPWGYFDFNRFHCHFSPRDWQRLINNNWGFRPKRLNFKLFNIQVKEVTQNDGTTTIANNLTSTVQVFTDSEYQLPYVLGSAHQGCLPPFPADVFMVPQYGYLTLNNGSQAVGRSSFYCLEYFPSQMLRTGNNFTFSYTFEDVPFHSSYAHSQSLDRLMNPLIDQYLYYLSKTNAPSGTTTMSRLQFSQAGASDIRDQSRNWLPGPCYRQQRVSKTAADNNNSDYSWTGATKYHLNGRDSLVNPGPAMASHKDDEEKYFPQSGVLIFGKQDSGKTNVDIEKVMITDEEEIRTTNPVATEQYGSVSTNLQSGNTQAATTDVNTQGVLPGMVWQDRDVYLQGPIWAKIPHTDGHFHPSPLMGGFGLKHPPPQILIKNTPVPANPSTTFSAAKFASFITQYSTGQVSVEIEWELQKENSKRWNPEIQYTSNYNKSVNVDFTVDTNGVYSEPRPIGTRYLTRNL

SEQ ID NO: 11021 - protein, 735 aa, Artificial Sequence
  source: /note="Description of Artificial Sequence: Synthetic polypeptide"
MAADGYLPDWLEDTLSEGIRQWWKLKPGPPPPKPAERHQDDSRGLVLPGYKYLGPFNGLDKGEPVNEADAAALEHDKAYDRQLDSGDNPYLKYNHADAEFQERLKEDTSFGGNLGRAVFQAKKRVLEPLGLVEEPVKTAPGKKRPVEHSPAEPDSSSGTGKAGQQPARKRLNFGQTGDADSVPDPQPLGQPPAAPSGLGTNTMATGSGAPMADNNEGADGVGNSSGNWHCDSTWMGDRVITTSTRTWALPTYNNHLYKQISSQSGASNDNHYFGYSTPWGYFDFNRFHCHFSPRDWQRLINNNWGFRPKRLNFKLFNIQVKEVTQNDGTTTIANNLTSTVQVFTDSEYQLPYVLGSAHQGCLPPFPADVSMVPQYGYLTLNNGSQAVGRSSFYCLEYFPSQMLRTGNNFTFSYTFEDVPFHSSYAHSQSLDRLMNPLIDQYLYYLSKTNAPSGTTTMSRLQFSQAGASDIRDQSRNWLPGPCYRQQRVSKTAADNNNSDYSWTGATKYHLNGRDSLVNPGPAMASHKDDEEKYFPQSGVLIFGKQDSGKTNVDIEKVMITDEEEIRTTNPVATEQYGSVSTNLQSGNTQAATTDVNTQGVLPGMVWQDRDVYLQGPIWAKIPHTDGHFHPSPLMGGFGLKHPPPQILIKNTPVPANPSTTFSAAKFASFITQYSTGQVSVEIEWELQKENSKRWNPEIQYTSNYNKSVNVDFTVDTNGVYSEPRPIGTRYLTRNL

SEQ ID NO: 11022 - protein, 735 aa, Artificial Sequence
  source: /note="Description of Artificial Sequence: Synthetic polypeptide"
MAADGYLPDWLEDTLSEGIRQWWKLKPGPPPPKPAERHQDDSRGLVLPGYKYLGPFNGLDKGEPVNEADVAALEHDKAYDRQLDSGDNPYLKYNHADAEFQERLKEDTSFGGNLGRAVFQAKKRVLEPLGLVEEPVKTAPGKKRPVEHSPAEPDSSSGTGKAGQQPARKRLNFGQTGDADSVPDPQPLGQPPAAPSGLGTNTMATGSGAPMADNNEGADGVGNSSGNWHCDSTWMGDRVITTSTRTWALPTYNNHLYKQISSQSGASNDNHYFGYSTPWGYFDFNRFHCHFSPRDWQRLINNNWGFRPKRLNFKLFNIQVKEVTQNDGTTTIANNLTSTVQVFTDSEYQLPYVLGSAHQGCLPPFPADVFMVPQYGYLTLNNGSQAVGRSSFYCLEYFPSQMLRTGNNFTFSYTFEDVPFHSSYAHSQSLDRLMNPLIDQYLYYLSKTNAPSGTTTMSRLQFSQAGASDIRDQSRNWLPGPCYRQQRVSKTAADNNNSDYSWTGATKYHLNGRDSLVNPGPAMASHKDDEEKYFPQSGVLIFGKQDSGKTNVDIEKVMITDEEEIRTTNPVATEQYGPVSTNLQSGNTQAATTDVNTQGVLPGMVWQGRDVYLQGPIWAKIPHTDGHFHPSPLMGGFGLKHPPPQILIKNTPVPANPSTTFSAAKFASFITQYSTGQVSVEIEWELQKENSKRWNPEIQYTSNYNKSVNVDFTVDTNGVYSEPRPIGTRYLTRNL

SEQ ID NO: 11023 - protein, 735 aa, Artificial Sequence
  source: /note="Description of Artificial Sequence: Synthetic polypeptide"
MAADGYLPDWLEGTLSEGIRQWWKLKPGPPPPKPAERHQDDSRGLVLPGYKYLGPFNGLDKGEPVNEADAAALEHDKAYDRQLDSGDNPYLKYNHADAEFQERLKEDTSFGGNLGRAVFQAKKRVLEPLGLVEEPVKTAPGKKRPVEHSPAEPDSSSGTGKAGQQPARKRLNFGQTGDADSVPDPQPLGQPPAAPSGLGTNTMATGSGAPMADNNEGADGVGNSSGNWHCDSTWMGDRVITTSTRTWALPTYNNHLYKQISSQSGASSDNHYFGYSTPWGYFDFNRFHCHFSPRDWQRLINNNWGFRPKRLNFKLFNIQVKEVTQNDGTTTIANNLTSTVQVFTDSEYQLPYVLGSAHQGCLPPFPADVFMVPQYGYLTLNNGSQAVGRSSFYCLEYFPSQMLRTGNNFTFSYTFEDVPFHSSYAHSQSLDRLMNPLIDQYLYYLSKTNAPSGTTTMSRLQFSQAGASDIRDQSRNWLPGPCYRQQRVSKTAADNNNSDYSWTGATKYHLNGRDSLVNPGPAMASHKDDEEKYFPQSGVLIFGKQDSGKTNVDIEKVMITDEEEIRTTNPVATEQYGSVSTNLQSGNTQAATTDVNTQGVLPGMVWQDRDVYLQGPIWAKIPHTDGHFHPSPLMGGFGLKHPPPQILIKNTPVPANPSTTFSAAKLASFITQYSTGQVSVEIEWELQKENSKRWNPEIQYTSNYNKSVNVDFTVDTNGVYSEPRPIGTRYLTRNL

SEQ ID NO: 11024 - protein, 735 aa, Artificial Sequence
  source: /note="Description of Artificial Sequence: Synthetic polypeptide"
MAADGYLPDWLEDTLSEGIRQWWKLKPGPPPPKPAERHQDDSRGLVLPGYKYLGPFNGLDKGEPVNEADVAALEHDKAYDRQLDSGDNPYLKYNHADAEFQERLKEDTSFGGNLGRAVFQAKKRVLEPLGLVEEPVKTAPGKKRPVEHSPAEPDSSSGTGKAGQQPARKRLNFGQTGDADSVPDPQPLGQPPAAPSGLGTNTMATGSGAPMADNNEGADGVGNSSGNWHCDSTWMGDRVITTSTRTWALPTYNNHLYKQISSQSGASNDNHYFGYSTPWGYFDFNRFHCHFSPRDWQRLINNNWGFRPKRPNFKLFNIQVKEVTQNDGTTTIANNLTSTVQVFTDSEYQLPYVLGSAHQGCLPPFPADVFMVPQYGYLTLNNGSQAVGRSSFYCLEYFPSQMLRTGNNFTFSYTFEDVPFHSSYAHSQSLDRLMNPLIDQYLYYLSKTNAPSGTTTMSRLQFSQAGASDIRDQSRNWLPGPCYRQQRVSKTAADNNNSDYSWTGATKYHLNGRDSLVNPGPAMASHKDDEEKYFPQSGVLIFGKQDSGKTNVDIEKVMITDEEEIRTTNPVATEQYGSVSTNLQSGNTQAATTDVNTQGVLPGMVWQDRDVYLQGPIWAKIPHTDGHFHPSPLMGGFGLKHPPPQILIKNTPVPANPSTTFSAAKFASFITQYSTGQVSVEIEWELQKENSKRWNPEIQYTSNYNKSVNVDFTVDTNGVYSEPRPIGTRYLTRNL

SEQ ID NO: 11025 - protein, 735 aa, Artificial Sequence
  source: /note="Description of Artificial Sequence: Synthetic polypeptide"
MAADGYLPDWLEDTLSEGIRQWWKLKPGPPPPKPAERHQDDSRGLELPGYKYLGPFNGLDKGEPVNEADAAALEHDKAYDRQLDSGDNPYLKYNHADAEFQERLKEDTSFGGNLGRAVFQAKKRVLEPLGLVEEPVKTAPGKKRPVEHSPAEPDSSSGTGKAGQQPARKRLNFGQTGDADSVPDPQPLGQPPAAPSGLGTNTMATGSGAPMADNNEGADGVGNSSGNWHCDSTWMGDRVITTSTRTWALPTYNNHLYKQISSQSGASNDNHYFGYSTPWGYFDFNRFHCHFSPRDWQRLINNNWGFRPKRLNFKLFNIQVKEVTQNDGTTTIANNLTSTVQVFTDSEYQLPYVLGSAHQGCLPPFPADVFMVPQYGYLTLNNGSQAVGRSSFYCLEYFPSQMLRTGNNFTFSYTFEDVPFHSSYAHSQSLDRLMNPLIDQYLYYLSKTNAPSGTTTMSRLQFSQAGASDIRDQSRNWLPGPCYRQQRVSKTAADNNNSDYSWTGATKYHLNGRDSLVNPGPAMASHKDDEEKYFPQSGVLIFGKQDSGKTNVDIEKVMITDEEEIRTTNPVATEQYGSVSTNLQSGNTQAATTDVNTQGVLPGMVWQDRDVYLQGPIWAKIPHTDGHFHPSPLMGGFGLKHPPPQILIKNTPVPANPSTTFSAAKFASFITQYSTGQVSVEIEWELQKENSKRWNPEIQYTSNYNKSVNVDFTVDTNGVYSEPRPIGTRYLTRNL

SEQ ID NO: 11026 - protein, 735 aa, Artificial Sequence
  source: /note="Description of Artificial Sequence: Synthetic polypeptide"
MAADGYLPDWLEDTLSEGIRQWWKLKPGPPPPKPAERHQDDSRGLVLPGYKYLGPFNGLDKGEPVNEADAAALEHDKAYDRQLDSGDNPYLKYNHADAEFQERLKEDTSFGGNLGRAVFQAKKRVLEPLGLVEEPVKTAPGKKRPVEHSPAEPDSSSGTGKAGQQPARKRLNFGQTGDADSVPDPQPLGQPPAAPSGLGTNTMATGSGAPMADNNEGADGVGNSSGNWHCDSTWMGDRVITTSTRTWALPTYNNHLYKQISSQSGASNDNHYFGYSTPWGYFDFNRFHCHFSPRDWQRLINNNWGFRPKRLNFKLFNIQVKEVTQNDGMTTIANNLTSTVQVFTDSEYQLPYVLGSAHQGCLPPFPADVFMVPQYGYLTLNNGSQAVGRSSFYCLEYFPSQMLRTGNNFTFSYTFEDVPFHSSYAHSQSLDRLMNPLIDQYLYYLSKTNAPSGTTTMSRLQFSQAGASDIRDQSRNWLPGPCYRQQRVSKTAADNNNSDYSWTGATKYHLNGRDSLVNPGPAMASHKDDEEKYFPQSGVLIFGKQDSGKTNVDIEKVMITDEEEIRTTNPVATEQYGSVSTNLQSGNTQAATTDVNTQGVLPGMVWQDRDVYLQGPIWAKIPHTDGHFHPSPLMGGFGLKHPPPQILIKNTPVPANPSTTFSAAKFASFITQYSTGQVSVEIEWELQKENSKRWNPEIQYTSNYNKSVNVDFTVDTNGVYSEPRPIGTRYLTRNL

SEQ ID NO: 11027 - protein, 735 aa, Artificial Sequence
  source: /note="Description of Artificial Sequence: Synthetic polypeptide"
MAADGYLPDWLEDTLSEGIRQWWKLKPGPPPLKPAERHQDDSRGLVLPGYKYLGPFNGLDKGEPVNEADAAALEHDKAYDRQLDSGDNPYLKYNHADAEFQERLKEDTSFGGNLGRAVFQAKKRVLEPLGLVEEPVKTAPGKKRPVEHSPAEPDSSSGTGKAGQQPARKRLNFGQTGDADSVPDPQPLGQPPAAPSGLGTNTMATGSGAPMADNNEGADGVGNSSGNWHCDSTWMGDRVITTSTRTWALPTYNNHLYKQISSQSGASNDNHYFGYSTPWGYFDFNRFHCHFSPRDWQRLINNNWGFRPKRLNFKLFNIQVKEVTQNDGTTTIANNLTSTVQVFTDSEYQLPYVLGSAHQGCLPPFPADVFMVPQYGYLTLNNGSQAVGRSSFYCLEYFPSQMLRTGNNFTFSYTFEDVPFHSSYAHSQSLDRLMNPLIDQYLYYLSKTNAPSGTTTMSRLQFSQAGASDIRDQSRNWLPGPCYRQQRVSKTAADNNNSDYSWTGATKYHLNGRDSLVNPGPAMASHKDDEEKYFPQSGVLIFGKQDSGKTNVDIEKVMITDEEEIRTTNPVATEQYGSVSTNLQSGNTQAATTDVNTQGVPPGMVWQDRDVYLQGPIWAKIPHTDGHFHPSPLMGGFGLKHPPPQILIKNTPVPANPSTTFSAAKFASFITQYSTGQVSVEIEWELQKENSKRWNPEIQYTSNYNKSVNVDFTVDTNGVYSEPRPIGTRYLTRNL

SEQ ID NO: 11028 - protein, 735 aa, Artificial Sequence
  source: /note="Description of Artificial Sequence: Synthetic polypeptide"
MAADGYLPDWLEDTLSEGIRQWWKLKPGPPPPKPAERHQDDSRGLVLPGYKYLGPFNGLDKGEPVNEADAAALEHDKAYDRQLDSGDNPYLKYNHADAEFQERLKEDTSFGGNLGRAVFQAKKRVLEPLGLVEEPVKTAPGKKRPVEHSPAEPDSSSGTGKAGQQPARKRLNFGQTGDADSVPDPQPLGQPPAAPSGLGTNTMATGSGAPMADNNEGADGVGNSSGNWHCDSTWMGDRVITTSTRTWALPTYNNHLYKQISSQSGASNDNHYFGYSTPWGYFDFNRFHCHFSPRDWQRLINNNWGFRPKRLNFKLFNIQVKEVTQNDGTTTIANNLTSTVQVFTDSEYQLPYVLGSAHQGCLPPFPADVFMVPQYGYLTLNNGSQAVGRSSFYCLEYFPSQMLRTGNNFTFSYTFEDVPFHSSYAHSQSLDRLMNPLIDQYLYYLSKTNAPSGTTTMSRLQFSQAGASDIRDQSRNWLPGPCYRQQRVSKTAADNNNSDYSWTGATKYHLNGRDSLVNPGPAMASHKDDEEKYFPQSGVLIFGKQDSGKTNVDIEKVMITDEEEIRTTNPVATEQYGSVSTNLQSGNTQAATTDVNTQGVLPGMAWQDRDVYLQGPIWAKIPHTDGHFHPSPLMGGFGLKHPPPQILIKNTPVPANPSTTLSAAKFASFITQYSTGQVSVEIEWELQKENSKRWNPEIQYTSNYNKSVNVDFTVDTNGVYSEPRPIGTRYLTRNL

SEQ ID NO: 11029 - protein, 735 aa, Artificial Sequence
  source: /note="Description of Artificial Sequence: Synthetic polypeptide"
MAADGYLPDWLEDTLSEGIRQWWKLKPGPPPPKPAERHQDDSRGLVLPGYKYLGPFNGLDKGEPVNEADAAALEHDKAHDRQLDSGDNPYLKYNHADAEFQERLKEDTSFGGNLGRAVFQAKKRVLEPLGLVEEPVKTAPGKKRPVEHSPAEPDSSSGTGKAGQQPARKRLNFGQTGDADSVPDPQPLGQPPAAPSGLGTNTMATGSGAPMADNNEGADGVGNSSGNWHCDSTWMGDRVITTSTRTWALPTYNNHLYKQISSQSGASNDNHYFGYSTPWGYFDFNRFHCHFSPRDWQRLINNNWGFRPKRLNFKLFNIQVKEVTQNDGTTTIANNLTSTVQVFTDSEYQLPYVLGSAHQGCLPPFPADVFMVPQYGYLTLNNGSQAVGRSSFYCLEYFPSQMLRTGNNFTFSYTFEDVPFHSSYAHSQSLDRLMNPLIDQYLYYLSKTNAPSGTTTMSRLQFSQAGASDIRDQSRNWLPGPCYRQQRVSKTAADNNNSDYSWTGATKYHLNGRDSLVSPGPAMASHKDDEEKYFPQSGVLIFGKQDSGKTNVDIEKVMITDEEEIRTTNPVATEQYGSVSTNLQSGNTQAATTDVNTQGVLPGMVWQDRDVYLQGPIWAKIPHTDGHFHPSPLMGGFGLKHPPPQILIKNTPVPANPSTTFSAAKFASFITQYSTGQVSVEIEWELQKENSKRWNPEIQYTSNYNKSVNVDFTVDTNGVYSEPRPIGTRYLTRNL

SEQ ID NO: 11030 - protein, 735 aa, Artificial Sequence
  source: /note="Description of Artificial Sequence: Synthetic polypeptide"
MAADGYLPDWLEDTLSEGIRQWWKLKPGPPPLKPAERHQDDSRGLVLPGYKYLGPFNGLDKGEPVNEADAAALEHDKAYDRQLDSGDNPYLKYNHADAEFQERLKEDTSFGGNLGRAVFQAKKRVLEPLGLVEEPVKTAPGKKRPVEHSPAEPDSSSGTGKAGQQPARKRLNFGQTGDADSVPDPQPLGQPPAAPSGLGTNTMATGSGAPMADNNEGADGVGNSSGNWHCDSTWMGDRVITTSTRTWALPTYNNHLYKQISSQSGASNDNHYFGYSTPWGYFDFNRFHCHFSPRDWQRLINNNWGFRPKRLNFKLFNIQVKEVTQNDGTTTIANNLTSTVQVFTDSEYQLPYVLGSAHQGCLPPFPADVFMVPQYGYLTLNNGSQAVGRSSFYCLEYFPSQMLRTGNNFTFSYTFEDVPFHSSYAHSQSLDRLMNPLIDQYLYYLSKTNAPSGTTTMSRLQFSQAGASDIRDQSRNWLPGPCYRQQRVSKTAADNNNSDYSWTGATKYHLNGRDSLVNPGPAMASHKDDEEKYFPQSGVLIFGKQDSGKTNVDIEKVMITDEEEIRTTNPVATEQYGSVSTNLQSGNTQAATTDVNTQGVLPGMVWQDRDVYLQGPIWAKIPHTDGHFHPSPLMGGFGLKHPPPQILIKNTPVPANPSTTFSAAKFASFITQYSTGQVSVGIEWELQKENSKRWNPEIQYTSNYNKSVNVDFTVDTNGVYSEPRPIGTRYLTRNL

SEQ ID NO: 11031 - protein, 735 aa, Artificial Sequence
  source: /note="Description of Artificial Sequence: Synthetic polypeptide"
MAADGYLPDWLEDTLSEGIRQWWKLKPGPPPPKPAERHQDDSRGLVLPGYKYLGPFNGLDKGEPVNEADAAALEHDKAYDRQLDSGDNPYLKYNHADAEFQERLKEDTSFGGNLGRAVFQAKKRVLEPLGLVEEPVKTAPGKKRPVEHSPAEPDSSSGTGKAGQQPARKRLNFGQTGDADSVPDPQPLGQPPAAPSGLGTNTMATGSGAPMADNNEGADGVGNSSGNWHCDSTWMGDRVITTSTRTWALPTYNNHLYKQISSQSGASNDNHYFGYSTPWGYFDFNRFHCHFSPRDWQRLINNNWGFRPKRLNFKLFNIQVKEVTQNDGTTTIANNLTSTVQVFTDSEYQLPYVLGSAHQGCLPPFPADVFMVPQYGYLTLNNGSQAVGRSSFYCLEYFPSQMLRTGNNFTFSYTFEDVPFHSSYAHSQSLDRLMNPLIDQYLYYLSKTNAPSGTTTMSRLQFSQAGASDIRDQSRNWLPGPCYRQQRVSKTAADNNNSDYSWTGATKYHLNGRDSLVNPGPAMASHKDDEEKYFPQSGVLIFGKQDSGKTNVDIEKVMITDEEEIRTTNPVATEQYGSVSTNLQSGNTQAATTDVNTQGVLPGMVWQDRDVCLQGPIWAKIPHTDGHFHPSPLMGGFGLKHPPPQILIKNTPVPANPSTTFSAAKFASFITQYSTGQVSVEIEWELQKENSKRWNPEIQYTSNYNKSVNVDFTVDTNGVYSEPRPIGTRYLTRNL

SEQ ID NO: 11032 - protein, 735 aa, Artificial Sequence
  source: /note="Description of Artificial Sequence: Synthetic polypeptide"
MAADGYLPDWLEDTLSEGIRQWWKLKPGPPPPKPAERHQDDSRGLVLPGYKYLGPFNGLDKGEPVNEADAAALEHDKAYDRQLDSGDNPYLKYNHADAEFQERLKEDTSFGGNLGRAVFQAKKRVLEPLGLVEEPVKTAPGKKRPVEHSPAEPDSSSGTGKAGQQPARKRLNFGQTGDADSVPDPQPLGQPPAAPSGLGTNTMATGSGAPMADNNEGADGVGNSSGNWHCDSTWMGDRVITTSTRTWALPTYNNHLYKQISSQSGASNDNHYFGYSTPWGYFDFNRFHCHFSPRDWQRLINNNWGFRPKRLNFKLFNIQVKEVAQNDGTTTIANNLTSTVQVFTDSEYQLPYVLGSAHQGCLPPFPADVFMVPQYGYLTLNNGSQAVGRSSFYCLEYFPSQMLRTGNNFTFSYTFEDVPFHSSYAHSQSLDRLMNPLIDQYLYYLSKTNAPSGTTTMSRLQFSQAGASDIRDQSRNWLPGPCYRQQRVSKTAADNNNSDYSWTGATKYHLNGRDSLVNPGPAMASHKDDEEKYFPQSGVLIFGKQDSGKTNVDIEKVMITDEEEIRTTNPVATEQYGSVSTNLQSGNTQAATTDVNTQGVLPGMVWQDRDVYLQGPIWAKIPHTDGHFHPSPLMGGFGLKHPPPQILIKNTPVPANPSTTFSAAKFASFITQYSTGQVSVEIEWELQKENSKRWNPEIQYTSNYNKSVNVDFTVDTNGVYSEPRPIGTRYLTRNL

SEQ ID NO: 11033 - protein, 735 aa, Artificial Sequence
  source: /note="Description of Artificial Sequence: Synthetic polypeptide"
MAADGYLPDWLEDTLSEGIRQWWKLKPGPPPPKPAERHKDDSRGLVLPGYKYLGPFNGLDKGEPVNEADAAALEHDKAYDRQLDSGDNPYLKYNHADAEFQERLKEDTSFGGNLARAVFQAKKRVLEPLGLVEEPVKTAPGKKRPVEHSPAEPDSSSGTGKSGQQPARKRLNFGQTGDADSVPDPQPLGQPPAAPSGLGTNTMASGSGAPMADNNEGADGVGNSSGNWHCDSTWMGDRVITTSTRTWALPTYNNHLYKQISSQSGASNDNHYFGYSTPWGYFDFNRFHCHFSPRDWQRLINNNWGFRPKRLNFKLFNIQVKEVTQNDGTTTIANNLTSTVQVFTDSEYQLPYVLGSAHQGCLPPFPADVFMVPQYGYLTLNNGSQAVGRSSFYCPEYLPSQMLRTGNNFTFSYTFEDVPFHSSYAHSQSLDRLMNPLIDQYLYYLSRTNTPSGTTTQSRLQFSQAGASDIRDQSRNWLPGPCYRQQRVSKTAADNNNSDYSWTGATKYHLNGRDSLVNPGTAMASHKDDEEKYFPQSGVLIFGKQDSGKTNVDIEKVMITDEEETRTTNPVATEQYGSVSTNLQSGNTQAATSDVNTQGVLPGMVWQDRDVYLQGPIWAKIPHTDGHFHPSPLMGGFGLKHPPPQILIKNTPVPANPSTAFSAAKFASFITQYSTGQVSVEIEWELQKENSERWNPEIQYTSNYNKSVNVDFTVDTNGVYSEPRPIGTRYLTRNL

SEQ ID NO: 11034 - protein, 735 aa, Artificial Sequence
  source: /note="Description of Artificial Sequence: Synthetic polypeptide"
MAADGYLPDWLEDTLSEGIRQWWKLKPGPPPPKPAERHKDDSRGLVLPGYKYLGPFNGLDKGEPVNEADAAALEHDKAYDRQLDSGDNPYLKYNHADAEFQERLKEDTSFGGNLARAVFQAKKRVLEPLGLVEEPVKTAPGKKRPVEHSPAEPDSSSGTGKSGQQPARKRLNFGQTGDADSVPDPQPLGQPPAAPSGLGTNTMASGSGAPMADNNEGADGVGNSSGNWHCDSTWMGDRVITTSTRTWALPTYNNHLYKQISSQSGASNDNHYFGYSTPWGYFDFNRFHCHFSPRDWQRLINNNWGFRPKRLNFKLFNIQVKEVTQNDGTTTIANNLTSTVQVFTDSEYQLPYVLGSAHQGCLPPFPADVLMVPQYGYLTLNNGSQAVGRSSFYCPEYLPSQMLRTGNNFTFSYTFEDVPFHSSYAHSQSLDRLMNPLIDQYLYYLSRTNTPSGTTTQSRLQFSQAGASDIRDQSRNWLPGPCYRQQRVSKTAADNNNSDYSWTGATKYHLNGRDSLVNPGTAMASHKDDEEKYFPQSGVLIFGKQDSGKTNVDIEKVMITDEEEIRTTNPVATEQYGSVSTNLQSGNTQAATSDVNTQGVLPGMVWQDRDVYLQGPIWAKIPHTDGHFHPSPLMGGFGLKHPPPQILIKNTPVPANPSTAFSAAKFASFITQYSTGQVSVEIEWELQKENSERWNPEIQYTSNYNKSVNVDFTADTNGVYSEPRPIGTRYLTRNL

SEQ ID NO: 11035 - protein, 735 aa, Artificial Sequence
  source: /note="Description of Artificial Sequence: Synthetic polypeptide"
MAADGYLPDWLEDTLSEGIRQWWKLKPGPPPPKPAERHKDDSRGLVLPGYKYLGPFNGLDKGEPVNEADAAALEHDKAYDRQLDSGDNPYLKYNHADAEFQERLKEDTSFGGNLARAVFQAKKRVLEPLGLVEEPVKTAPGKKRPVEHSPAEPDSSSGTGKSGQQPARKRLNFGQTGDADSVPDPQPLGQPPAAPSGLGTNTMASGSGAPMADNNEGADGVGNSSGNWHCDSTWMGDRVITTSTRAWALPTYNNHLYKQISSQSGASNDNHYFGYSTPWGYFDFNRFHCHFSPRDWQRLINNNWGFRPKRLNFKLFNIQVKEVTQNDGTTTIANNLTSTVQVFTDSEYQLPYVLGSAHQGCLPPFPADVLMVPQYGYLTLNNGSQAVGRSSFYCPEYLPSQMLRTGNNFTFSYTFEDVPFHSSYAHSQSLDRLMNPLIDQYLYYLSRTNTPSGTTTQSRLQFSQAGASDIRDQSRNWLPGPCYRQQRVSKTAADNNNSDYSWTGATKYHLNGRDSLVNPGTAMASHKDDEEKYFPQSGVLIFGKQDSGKTNVDIEKVMITDEEEIRTTNPVATEQYGSVSTNLQSGNTQAATSDVNTQGVLPGMVWQDRDVYLQGPIWAKIPHTDGHFHPSPLMGGFGLKHPPPQILIKNTPVPANPSTAFSAAKFASFITQYSTGQVSVEIEWELQKENSERWNPEIQYTSNYNKSVNVDFTVDTNGVYSEPRPIGTRYLTRNL

SEQ ID NO: 11036 - protein, 735 aa, Artificial Sequence
  source: /note="Description of Artificial Sequence: Synthetic polypeptide"
MAADGYLPDWLEDTLSEGIRQWWKLKPGPPPPKPAERHKDDSRGLVLPGYKYLGPFNGLDKGEPVNEADAAALEHDKAYDRQLDSGDNPYLKYNHADAEFQERLKEDTSFGGNLARAVFQAKKRVLEPLGLVEEPVKTAPGKKRPVEHSPAEPDSSSGTGKSGQQPARKRLNFGQTGDADSVPDPQPLGQPPAAPSGLGTNTMASGSGAPMADNNEGADGVGNSSGNWHCDSTWMGDRVITTSTRTWALPTYNNHLYKQISSQSGASNDNHYFGYSTPWGYFDFNRFHCHFSPRDWQRLINNNWGFRPKRLNFKLFNIQVKEVTQNDGTTTIANNLTSTVQVFTDSEYQLPYVLGSAHQGCLPPFPADVFMVPQYGYLTLNNGSQAVGRSSFYCPEYLPSQMLRTGNNFTFSYTFEDVPFHSSYAHSQSLDRLMNPLIDQYLYYLSRTNTPSGTTTQSRLQFSQAGASDIRDQSRNWLPGPCYRQQRVSKTAADNNNSDYSWTGATKYHLNGRDSLVNPGTATASHKDDEEKYFPQSGVLIFGKQDSGKTNVDIEKVMITDEEEIRTTNPVATEQYGSVSTNLQSGNTQAATSDVNTQGVLPGMVWQDRDVYLQGPIWAKIPHTDGHFHPSPLMGGFGLKHPPPQILIKNTPVPANPSTAFSAAKFASFITQYSTGQVSVEIEWELQKENSERWNPEIQYTSNYNKSVNVDFTVDTNGVYSEPRPIGTRYLTRNL

SEQ ID NO: 11037 - protein, 734 aa, Artificial Sequence
  source: /note="Description of Artificial Sequence: Synthetic polypeptide"
MAADGYLPDWLEDTLSEGIRQWWKLKPGPPPPKPAERHKDDSRGLVLPGYKYLGPFNGLDKGEPVNEADAAALEHDKAYDRQLDSGDNPYLKYNHADAEFQERLKEDTSFGGNLARAVFQAKKRVLEPLGLVEEPVKTAPGKKRPVEHSPAEPDSSSGTGKSGQQPARKRLNFGQTGDADSVPDPQPLGQPPAAPSGLGTNTMASGSGAPMADNNEGADGVGNSSGNWHCDSTWMGDRVITTSTRTWALPTYNNHLYKQISSQSGASNDNHYFGYSTPWGYFDFNRFHCHFSPRDWQRLINNNWGFRPKRLNFKLFNIQVKEVTQNDGTTTIANNLTSTVQVFTDSEYQLPYVLGSAHQGCLPPFPADVFMVPQYGYLTLNNGSQAVGRSSFYCPEYLPSQMLRTGNNFTFSYTFEDVPFHSSYAHSQSLDRLMNPLIDQYLYYLSRTNTPSGTTTQSRLQFSQAGASDIRDQSRNWLPGPCYRQQRVSKTAADNNSDYSWTGATKYHLNGRDSLVNPGTAMASHKDDEEKYFPQSGVLIFGKQDSGKTNVDIEKVMITDEEEIRTTNPVATEQYGSVSTNLQSGNTQAATSDVNTQGVLPGMVWQDRDVYLQGPIWAKIPHTDGHFHPSPLMGGFGLKHPPPQILIKNTPVPANPSTAFSAAKFASFITQYSTGQVSVEIEWELQKENSERWNPEIQYTSNYNKSVNVDFTVDTNGVYSEPRPIGTRYLTRNL

SEQ ID NO: 11038 - protein, 735 aa, Artificial Sequence
  source: /note="Description of Artificial Sequence: Synthetic polypeptide"
MAADGYLPDWLEDTLSEGIRQWWKLKPGPPPPKPAERHKDDSRGLVLPGYKYLGPFNGLDKGEPVNEADAAALEHDKAYDRQLDSGDNPYLKYNHADAEFQERLKEDTSFGGNLARAVFQAKKRVLDPLGLVEEPVKTAPGKKRPVEHSPAEPDSSSGTGKSGQQPARKRLNFGQTGDADSVPDPQPLGQPPAAPSGLGTNTMASGSGAPMADNNEGADGVGNSSGNWHCDSTWMGDRVITTSTRTWALPTYNNHLYKQISSQSGASNDNHYFGYSTPWGYFDFNRFHCHFSPRDWQRLINNNWGFRPKRLNFKLFNIQVKEVTQNDGTTTIANNLTSTVQVFTDSEYQLPYVLGSAHQGCLPPFPADVFMVPQYGYLTLNNGSQAVGRSSFYCPEYLPSQMLRTGNNFTFSYTFEDVPFHSSYAHSQSLDRLMNPLIDQYLYYLSRTNTPSGTTTQSRLQFSQAGASDIRDQSRNWLPGPCYRQQRVSKTAADNNNSDYSWTGATKYHLNGRDSLVNPGTAMASHKDDEEKYFPQSGVLIFGKQDSGKTNVDIEKVMITDEEEIRTTNPVATEQYGSVSTNLQSGNTQAATSDVNTQGVLPGMVWQDRDVYLQGPIWAKIPHTDGHFHPSPLMGGFGLKHPPPQILIKNTPVPANPSTAFSAAKFASFITQYSTGQVSVEIEWELQKENSERWNPEIQYTSNYNKSVNVDFTVDTNGVYSEPRPIGTRYLTRNL

SEQ ID NO: 11039 - protein, 735 aa, Artificial Sequence
  source: /note="Description of Artificial Sequence: Synthetic polypeptide"
MAADGYLPDWLEDTLSEGIRQWWKLKPGPPPPKPAERHKDDSRGLVLPGYKYLGPFNGLDKGEPVNEADAAALEHDKAYDRQLDSGDNPYLKYNHADAEFQERLKEDTSFGGNLARAVFQAKKRVLEPLGLVEEPVKTAPGKKRPVEHSPAEPDSSSGTGKSGQQPARKRLNFGQTGDADSVPDPQPLGQPPAAPSGLGTNTMASGSGAPMADNNEGADGVGNSSGNWHCDSTWMGDRVITTSTRTWALPTYNNHLYKQISSQSGASNDNHYFGYSTPWGYFDFNRFHCHFSPRDWQRLINNNWGFRPKRLNFKLFNIQVKEVTQNDGTTTIANNLTSTVQVFTDSEYQLPYVLGSAHQGCLPPFPADVFMVPQYGYLTLNNGSQAVGRSSFYCPEYLPSQMLRTGNNFTFSYTFEDVPFHSSYAHSQSLDRLMNPLIDQYLYYLSRTNTPSGTTTQSRLQFSQAGASDIRDQSRNWLPGPCYRQQRVSKTAADNNNSDYSWTGATKYHLNGRDSLVNPGTAMASHKDDEEKYFPQSGVLIFRKQDSGKTNVDIEKVMITDEEEIRTTNPVATEQYGSVSTNLQSGNTQAATSDVNTQGVLPGMVWQDRDVYLQGPIWAKIPHTDGHFHPSPLMGGFGLKHPPPQILIKNTPVPANPSTAFSAAKFASFITQYSTGQVSVEIEWELQKENSERWNPEIQYTSNYNKSVNVDFTVDTNGVYSEPRPIGTRYLTRNL

SEQ ID NO: 11040 - protein, 735 aa, Artificial Sequence
  source: /note="Description of Artificial Sequence: Synthetic polypeptide"
MAADGYLPDWLEDTLSEGIRQWWKLKPGPPPPKPAERHKDDSRGLVLPGYKYLGPFNGLDKGEPVNEADAAALEHDKAYDRQLDSGDNPYLKYNHADAEFQERLKEDTSFGGNLARAVFQAKKRVLEPLGLVEEPVKTAPGKKRPVEHSPAEPDSSSGTGKSGQQPARKRLNFGQTGDADSVPDPQPLGQPPAAPSGLGTNTMASGSGAPMADNNEGADGVGNSSGNWHCDSTWMGDRVITTSTRTWALPTYNNHLYKQISSQSGASNDNHYFGYSTPWGYFDFNRFHCHFSPRDWQRLINNNWGFRPKRLNFKLFNIQVKEVTQNDGTTTIANNLTSTVQVFTDSEYQLPYVLGSAHQGCLPPFPADVLMVPQYGYLTLNNGSQAVGRSSFYCPEYLPSQMLRTGNNFTFSYTFEDVPFHSSYAHSQSLDRLMNPLIDQYLYYLSRTNTPSGTTTQSRLQFSQAGASDIRDQSRNWLPGPCYRQQRVSKTAADNNNSDYSWTGATKYHLNGRDSLVNPGTAMASHKDDEEKYFPQSGVLIFRKQDSGKTNVDIEKVMITDEEEIRTTNPVATEQYGSVSTNLQSGNTQAATSDVNTQGVLPGMVWQDRDVYLQGPIWAKIPHTDGHFHPSPLMGGFGLKHPPPQILIKNTPVPANPSTAFSAAKFASFITQYSTGQVSVEIEWELQKENSERWNPEIQYTSNYNKSVNVDFTVDTNGVYSEPRPIGTRYLTRNL

SEQ ID NO: 11041 - protein, 735 aa, Artificial Sequence
  source: /note="Description of Artificial Sequence: Synthetic polypeptide"
MAADGYLPDWLEDTLSEGIRQWWKLKPGPPPPKPAERHKDDSRGLVLPGYKYLGPFNGLDKGEPVNEADAAALEHDKAYDRQLDSGDNPYLKYNHADAEFQERLKEDTSFGGNLARAVFQAKKRVLEPLGLVEEPVKTAPGKKRPVEHSPAEPDSSSGTGKSGQQPARKRLNFGQTGDADSVPDPQPLGQPPAAPSGLGTNTMASGSGAPMADNNEGADGVGNSSGNWHCDSTWMGDRVITTSTRTWALPTYNNHLYKQISSQSGASNDNHYFGYSTPWGYFDFNRFHCHFSPRDWQRLINNNWGFRPKRLNFKLFNIQVKEVTQNDGTTTIANNLTSTVQVFTDSEYQLPYVLGSAHQGCLPPFPADVLMVPQYGYLTLNNGSQAVGRSSFYCPEYLPSQMLRTGNNFTFSYTFEDVPFHSSYAHSQSLDRLMNPLIDQYLYYLSRTNTPSGTTTQSRLQFSQAGASDIRDQSRNWLPGPCYRQQRVSKTAADNNNSDYSWTGATKYHLNGRDSLVNPGTAMASHKDDEEKYFPQSGVLIFGKQDSGKTNVDIEKVMITDEEEIRTTNPVATEQYGSVSTNLQSGNTQAATSDVNTQGVLPGMVWQDRDVYLQGPIWAKIPHTDGHFHPSPLMGGFGLKHPPPQILIKNTPVPANPSTAFSAAKFASFITQYSTGQVSVEIEWELQKENSERWNPEIQYTSNYNKSVNVDFTVDTNGVYSEPRPIGTRYLTRNL

SEQ ID NO: 11042 - protein, 735 aa, Artificial Sequence
  source: /note="Description of Artificial Sequence: Synthetic polypeptide"
MAADGYLPDWLEDTLSEGIRQWWKLKPGPPPPKPAERHKDDSRGLVLPGYKYLGPFNGLDKGEPVNEADAAALEHDKAYDRQLDSGDNPYLKYNHADAEFQERLKEDTSFGGNLARAVFQAKKRVLEPLGLVEEPVKTAPGKKRPVEHSPAEPDSSSGTGKSGQQPARKRLNFGQTGDADSVPDPQPLGQPPAAPSGLGTNTMASGSGAPMADNNEGADGVGNSSGNWHCDSTWMGDRVITTSTRTWALPTYNNHLYKQISSQSGASNDNHYFGYSTPWGYFDFNRFHCHFSPRDWQRLINNNWGFRPKRLNFKLFNIQVKEVTQNDGTTTIANNLTSTVQVFTDSEYQLPYVLGSAHQGCLPPFPADVFMVPQYGYLTLNNGSQAVGRSSFYCPEYLPSQMLRTGNNFTFSYTFEDVPFHSSYAHSQSLDRLMNPLIDQYLYYLSRTNTPSGTTTQSRLQFSQAGASDIRDQSRNWLPGPCYRQQRVSKTAADNNNSDYSWTGATKYHLNGRDSLVNPGTAMASHKDDEEKYFPQSGVLIFGKQDSGKTNVDIEKVMITDEEEIRTTNPVATEQYGSVSTNLQSGNTQAATSDVNTQGVLPGMVWQDRDVYLQGPIWAKIPHTDGHFHPSPLMGGFGLKHPPPQILIKNTPVPANPSTAFSAAKFASFITQYSTGQVSVEIEWELQKENSERWNPEIQYTSNYNKSVNVDFTVDTNGVYSEPRPIGTRYLTRNL

SEQ ID NO: 11043 - protein, 735 aa, Artificial Sequence
  source: /note="Description of Artificial Sequence: Synthetic polypeptide"
MAADGYLPDWLEDTLSEGIRQWWKLKPGPPPPKPAERHKDDSRGLVLPGYKYLGPFNGLDKGEPVNEADAAALEHDKAYDRQLDSGDNPYLKYNHADAEFQERLKEDTSFGGNLARAVFQAKKRVLEPLGLVEEPVKTAPGKKRPVEHSPAEPDSSSGTGKSGQQPARKRLNFGQTGDADSVPDPQPLGQPPAAPSGLGTNTMASGSGAPMADNNEGADGVGNSSGNWHCDSTWMGDRVITTSTRTWALPTYNNHLYKQISSQSGASNDNHYFGYSTPWGYFDFNRFHCHFSPRDWQRLINNNWGFRPKRLNFKLFNIQVKEVTQNDGTTTIANNLTSTVQVFTDSEYQLPYVLGSAHQGCLPPFPADVLMVPQYGYLTLNNGSQAVGRSSFYCPEYLPSQMLRTGNNFTFSYTFEDVPFHSSYAHSQSLDRLMNPLIDQYLYYLSRTNTPSGTTTQSRLQFSQAGASDIRDQSRNWLPGPCYRQQRVSKTAADNNNSDYSWTGATKYHLNGRDSLVNPGTATASHKDDEEKYFPQSGVLIFGKQDSGKTNVDIEKVMITDEEEIRTTNPVATEQYGSVSTNLQSGNTQAATSDVNTQGVLPGMVWQDRDVYLQGPIWAKIPHTDGHFHPSPLMGGFGLKHPPPQILIKNTPVPANPSTAFSAAKFASFITQYSTGQVSVEIEWELQKENSERWNPEIQYTSNYNKSVNVDFTVDTNGVYSEPRPIGTRYLTRNL

SEQ ID NO: 11044 - protein, 735 aa, Artificial Sequence
  source: /note="Description of Artificial Sequence: Synthetic polypeptide"
MAADGYLPDWLEDTLSEGIRQWWKLKPGPPPPKPAERHKDDSRGLVLPGYKYLGPFNGLDKGEPVNEADAAALEHDKAYDRQLDSGDNPYLKYNHADAEFQERLKEDTSFGGNLARAVFQAKKRVLEPLGLVEEPVKTAPGKKRPVEHSPAEPDSSSGTGKSGQQPARKRLNFGQTGDADSVPDPQPLGQPPAAPSGLGTNTMASGSGAPMADNNEGADGVGNSSGNWHCDSTWMGDRVITTSTRTWALPTYNNHLYKQISSQSGASNDNHYFGYSTPWGYFDFNRFHCHFSPRDWQRLINNNWGFRPKRLNFKLFNIQVKEVTQNDGTTTIANNLTSTVQVFTDSEYQLPYVLGSAHQGCLPPFPADVFMVPQYGYLTLNNGSQAVGRSSFYCPEYLPSQMLRTGNNFTFSYTFEDVPFHSSYAHSQSLDRLMNPLIDQYLYYLSRTNTPSGTTTQSRLQFSQAGASDIRDQSRNWLPGPCYRQQRVSKTAADNNNSDYSWTGATKYHLNGRDSLVNPGTAMASHKDDGEKYFPQSGVLIFGKQDSGKTNVDIEKVMITDEEEIRTTNPVATEQYGSVSTNLQSGNTQAATSDVNTQGVLPGMVWQDRDVYLQGPIWAKIPHTDGHFHPSPLMGGFGLKHPPPQILIKNTPVPANPSTAFSAAKFASFITQYSTGQVSVEIEWELQKENSERWNPEIQYTSNYNKSVNVDLTVDTNGVYSEPRPIGTRYLTRNL

SEQ ID NO: 11045 - protein, 735 aa, Artificial Sequence
  source: /note="Description of Artificial Sequence: Synthetic polypeptide"
MAADGYLPDWLEDTLSEGIRQWWKLKPGPPPPKPAERHKDDSRGLVLPGYKYLGPFNGLDKGEPVNEADAAALEHDKAYDRQLDSGDNPYLKYNHADAEFQERLKEDTSFGGNLARAVFQAKKRVLEPLGLVEEPVKTAPGKKGPVEHSPAEPDSSSGTGKSGQQPARKRLNFGQTGDADSVPDPQPLGQPPAAPSGLGTNTMASGSGAPMADNNEGADGVGNSSGNWHCDSTWMGDRVITTSTRTWALPTYNNHLYKQISSQSGASNDNHYFGYSTPWGYFDFNRFHCHFSPRDWQRLINNNWGFRPKRLNFKLFNIQVKEVTQNDGTTTIANNLTSTVQVFTDSEYQLPYVLGSAHQGCLPPFPADVFMVPQYGYLTLNNGSQAVGRSSFYCLEYFPSQMLRTGNNFTFSYTFEDVPFHSSYAHSQSLDRLMNPLIDQYLYYLSRTNTPSGTTTQSRLRFSQAGASDIRDQSRNWLPGPCYRQQRVSKTAADNNNSDYSWTGATKYHLNGRDSLVNPGTAMASHKDDEEKYFPQSGVLIFGKQDSGKTNVDIERVMITDEEEIRTTNPVATEQYGSVSTNLQSGNTQAATSDVNTQGVLPGMVWQDRDVYLQGPIWAKIPHTDGHFHPSPLMGGFGLKHPPPQILIKNTPVPANPSTTFSAAKFASFITQYSTGQVSVEIEWELQKENSKRWNPEIQYTSNYNKSVNVDFTVDTNGVYSEPRPIGTRYLTRNL

SEQ ID NO: 11046 - protein, 735 aa, Artificial Sequence
  source: /note="Description of Artificial Sequence: Synthetic polypeptide"
MAADGYLPDWLEDTLSEGIRQWWKLKPGPPPPKPAERHKDDSRGLVLPGYKYLGPFNGLDKGEPVNEADAAALEHDKAYDRQLDSGDNPYLKYNHADAEFQERLKEDTSFGGNLARAVFQAKKRVLEPLGLVEEPVKTAPGKKRPVEHSPAGPDSSSGTGKSGQQPARKRLNFGQTGDADSVPDPQPLGQPPAAPSGLGTNTMASGSGAPMADNNEGADGVGNSSGNWHCDSTWMGDRVITTSTRTWALPTYNNHLYKQISSQSGASNDNHYFGYSTPWGYFDFNRFHCHFSPRDWQRLINNNWGFRPKRLNFELFNIQVKEVTQNDGTTTIANNLTSTVQVFTDSEYQLPYVLGSAHQGCLPPFPADVFMVPQYGYLTLNNGSQAVGRSSFYCLEYFPSQMLRTGNNFTFSYTFEDVPFHSSYAHSQSLDRLMNPLIDQYLYYLSRTNTPSGTTTQSRLQFSQAGASDIRDQSRNWLPGPCYRQQRVSKTAADNNNSDYSWTGATKYHLNGRDSLVNPGTAMASHKDDEEKYFPQSGVLIFGKQDSGKTNVDIEKVMITDEEEIRTTNPVATEQYGSVSTNLQSGNTQAATSDVNTQGVLPGMVWQDRDVYLQGPIWAKIPHTDGHFHPSPLMGGFGLKHPPPQILIKSTPVPANPSTTFSAAKFASFITQYSTGQVSVEIEWELQKENSKRWNPEIQYTSNYNKSVNVDFTVDTNGVYSDPRPIGTRYLTRNL

SEQ ID NO: 11047 - protein, 735 aa, Artificial Sequence
  source: /note="Description of Artificial Sequence: Synthetic polypeptide"
MAADGYLPDWLEDTLSEGIRQWWKLKPGPPPPRPAERHQDDSRGLVLPGYKYLGPFNGLDKGEPVNEADAAALEHDKAYDRQLDSGDNPYLKYNHADAEFQERLKEDTSFGGNLGRAVFQAKKRVLEPLGLVEEPVKTAPGKKRPVEHSPAEPDSSSGTGKAGQQPARKRLNFGQTGDADSVPDPQPLGQPPAAPTSLGSTTMATGSGAPMADNNEGADGVGNSSGNWHCDSQWLGDRVITTSTRTWALPTYNNHLYKQISSQSGASNDNHYFGYSTPWGYFDFNRFHCHFSPRDWQRLINNNWGFRPKRLNFKLFNIQVKEVTQNDGTTTIANNLTSTVQVFTDSEYQLPYVLGSAHQGCLPPFPADVFMVPQYGYLTLNNGSQAVGRSSFYCLEYFPSQMLRTGNNFTFSYTFEDVPFHSSYAHSQSLDRLMNPLIDQYLYYLSRTNTPSGTTTQSRLRFSQAGASDIRDQSRNWLPGPCYRQQRVSKTAADNNNSDYSWTGATKYHLNGRDSLVNPGTAMASHKDDEEKYFPQSGVLIFGKQDSGKTNVDIERVMITDEEEIRTTNPVATEQYGSVSTNLQSGNTQAATSDVNTQGVLPGMVWQDRDVYLQGPIWAKIPHTDGHFHPSPLMGGFGLKHPPPQILIKNTPVPANPSTTFSAAKFASFITQYSTGQVSVEIEWELQKENSKRWNPEIQYTSNYNKSVNVDFTVDTNGVYSEPRPIGTRYLTRNL

SEQ ID NO: 11048 - protein, 735 aa, Artificial Sequence
  source: /note="Description of Artificial Sequence: Synthetic polypeptide"
MAADGYLPDWLEDTLSEGIRQWWKLKPGPPPPRPAERHQDDSRGLVLPGYKYLGPFNGLDKGEPVNEADAAALEHDKAYDRQLDSGDNPYLKYNHADAEFQERLKEDTSFGGNLGRAVFQAKKRVLEPLGLVEEPVKTAPGKKRPVEHSPAEPDSSSGTGKAGQQPARKRLNFGQTGDADSVPDPQPLGQPPAAPSGLGTNTMASGSGAPMADNNEGADGVGNSSGNWHCDSTWMGDRVITTSTRTWALPTYNNHLYKQISSQSGASNDNHYFGYSTPWGYFDFNRFHCHFSPRDWQRLINNNWGFRPKRLNFKLFNIQVKEVTQNDGTTTIANNLTSTVQVFTDSEYQLPYVLGSAHQGCLPPFPADVFMVPQYGYLTLNNGSQAVGRSSFYCLEYFPSQMLRTGNNFTFSYTFEDVPFHSSYAHSQSLDRLMNPLIDQYLYYLSRTNTPSGTTTQSRLRFSQAGASDIRDQSRNWLPGPCYRQQRVSKTAADNNNSDYSWTGATKYHLNGRDSLVNPGTAMASHKDDEEKYFPQSGVLIFGKQDSGKTNVDIERVMITDEEEIRTTNPVATEQYGSVSTNLQSGNTQAATSDVNTQGVLPGMVWQDRDVYLQGPIWAKIPHTDGHFHPSPLMGGFGLKHPPPQILIKNTPVPANPSTTFSAAKFASFITQYSTGQVSVEIEWELQKENSKRWNPEIQYTSNYNKSVNVDFTVDTNGVYSEPRPIGTRYLTRNL

SEQ ID NO: 11049 - protein, 735 aa, Artificial Sequence
  source: /note="Description of Artificial Sequence: Synthetic polypeptide"
MAADGYLPDWLEDTLSEGIRQWWKLKPGPPPPKPAERHKDDSRGLVLPGYKYLGPFNGLDKGEPVNEADAAALEHDKAYDRQLDSGDNPYLKYNHADAEFQERLKEDTSFGGNLARAVFQAKKRVLEPLGLVEEPVKTAPGKKRPVEHSPAGPDSSSGTGKSGQQPARKRLNFGQTGDADSVPDPQPLGQPPAAPSGLGTNTMASGSGAPMADNNEGADGVGNSSGNWHCDSTWMGDRVITTSTRTWALPTYNNHLYKQISSQSGASNDNHYFGYSTPWGYFDFNRFHCHFSPRDWQRLINNNWGFRPKRLNFELFNIQVKEVTQNDGTTTIANNLTSTVQVFTDSEYQLPYVLGSAHQGCLPPFPADVFMVPQYGYLTLNNGSQAVGRSSFYCLEYFPSQMLRTGNNFTFSYTFEDVPFHSSYAHSQSLDRLMNPLIDQYLYYLSRTNTPSGTTTQSRLQFPQAGASDIRDQSRNWLPGPCYRQQRVSKTAADNNNSDYSWTGATKYHLNGRDSLVNPGTAMASHKDDEEKYFPQSGVLIFGKQDSGKTNVDIEKVMITDEEEIRTTNPVATEQYGSVSTNLQSGNTQAATSDVNTQGVLPGMVWQDRDVYLQGPIWAKIPHTDGHFHPSPLMGGFGLKHPPPQILIKSTPVPANPSTTFSAAKFASFITQYSTGQVSVEIEWELQKENSKRWNPEIQYTSNYNKSVNVDFTVDTNGVYSEPRPIGTRYLTRNL

SEQ ID NO: 11050 - protein, 735 aa, Artificial Sequence
  source: /note="Description of Artificial Sequence: Synthetic polypeptide"
MAADGYLPDWLEDTLSEGIRQWWKLKPGPPPPRPAERHQDDSRGLVLPGYKYLGPFNGLDKGEPVNEADAAALEHDKAYDRQLDSGDNPYLKYNHADAEFQERLKEDTSFGGNLGRAVFQAKKRVLEPLGLVEEPVKTAPGKKRPVEHSPAEPDSSSGTGKSGQQPARKRLNFGQTGDADSVPDPQPLGQPPAAPSGLGTNTMASGSGAPMADNNEGADGVGNSSGNWHCDSTWMGDRVITTSTRTWALPTYNNHLYKQISSQSGASNDNHYFGYSTPWGYFDFNRFHCHFSPRDWQRLINNNWGFRPKRLNFKLFNIQVKEVTQNDGTTTIANNLTSTVQVFTDSEYQLPYVLGSAHQGCLPPFPADVFMVPQYGYLTLNNGSQAVGRSSFYCLEYFPSQMLRTGNNFTFSYTFEDVPFHSSYAHSQSLDRLMNPLIDQYLYYLSRTNTPSGTTTQSRLRFSQAGASDIRDQSRNWLPGPCYRQQRVSKTAADNNNSDYSWTGATKYHLNGRDSLVNPGTAMASHKDDEEKYFPQSGVLIFGKQDSGKTNVDIERVMITDEEEIRTTNPVATEQYGSVSTNLQSGNTQAATSDVNTQGVLPGMVWQDRDVYLQGPIWAKIPHTDGHFHPSPLMGGFGLKHPPPQILIKNTPVPANPSTTFSAAKFASFITQYSTGQVSVEIEWELQKENSKRWNPEIQYTSNYNKSVNVDFTVDTNGVYSEPRPIGTRYLTRNL

SEQ ID NO: 11051 - protein, 735 aa, Artificial Sequence
  source: /note="Description of Artificial Sequence: Synthetic polypeptide"
MAADGYLPDWLEDTLSEGIRQWWKLKPGPPPPKPAERHKDDSRGLVLPGYKYLGPFNGLDKGEPVNEADAAALEHDKAYDRQLDSGDNPYLKYNHADAEFQERLKEDTSFGGNLARAVFQAKKRVLEPLGLVEEPVKTAPGKKRPVEHSPAEPDSSSGTGKSGQQPARKRLNFGQTGDADSVPDPQPLGQPPAAPSGLGTNTMASGSGAPMADNNEGADGVGNSSGNWHCDSTWMGDRVITTSTRTWALPTYNNHLYKQISSQSGASNDNHYFGYSTPWGYFDFNRFHCHFSPRDWQRLINNNWGFRPKRLNFKLFNIQVKEVTQNDGTTTIANNLTSTVQVFTDSEYQLPYVLGSAHQGCLPPFPADVFMVPQYGYLTLNNGSQAVGRSSFYCLEYFPSQMLRTGNNFTFSYTFEDVPFHSSYAHSQSLDRLMNPLIDQYLYYLSRTNTPSGTTTQSRLRFSQAGASDIRDQSRNWLPGPCYRQQRVSKTAADNNNSDYSWTGATKYHLNGRDSLVNPGTAMASHKDDEEKYFPQSGVLIFGKQDSGKTNVDIERVMITDEEEIRTTNPVATEQYGSVSTNLQSGNTQAATSDVNTQGVLPGMVWQDRDVYLQGPIWAKIPHTDGHFHPSPLMGGFGLKHPPPQILIKNTPVPANPSTTFSAAKFASFITQYSTGQVSVEIEWELQKENSKRWNPEIQYTSNYNKSVNVDFTVDTNGVYSEPRPIGTRYLTRNL

SEQ ID NO: 11052 - protein, 735 aa, Artificial Sequence
  source: /note="Description of Artificial Sequence: Synthetic polypeptide"
MAADGYLPDWLEDTLSEGIRQWWKLKPGPPPPKPAERHKDDSRGLVLPGYKYLGPFNGLDKGEPVNEADAAALEHDKAYDRQLDSGDNPYLKYNHADAEFQERLKEDTSFGGNLARAVFQAKKRVLEPLGLVEEPVKTAPGKKRPVEHSPAEPDSSSGTGKSGQQPARKRLNFGQTGDADSVPDPQPLGQPPAAPSGLGTNTMASGSGAPMADNNEGADGVGNSSGNWHCDSTWMGDRVITTSTRTWALPTYNNHLYKQISSQSGASNDNHYFGYSTPWGYFDFNRFHCHFSPRDWQRLINNNWGFRPKRLNFKLFNIQVKEVTQNDGTTTIANNLTSTVQVFTDSEYQLPYVLGSAHQGCLPPFPADVFMVPQYGYLTLNNGSQTVGRSSFYCLEYFPSQMLRTGNNFTFSYTFEDVPFHSSYAHSQSLDRLMNPLIDQYLYYLSRTNTPSGTTTQSRLRFSQAGASDIRDQSRNWLPGPCYRQQRVSKTAADNNNSDYSWTGATKYHLNGRDSLVNPGTAMASHKDDEEKYFPQSGVLIFGKQDSGKTNVDIERVMITDEEEIRTTNPVATEQYGSVSTNLQSGNTQAATSDVNTQGVLPGMVWQDRDVYLQGPIWAKIPHTDGHFHPSPLMGGFGLKHPPPQILIKNTPVPANPSTTFSAAKFASFITQYSTGQVSVEIEWELQKENSKRWNPEIQYTSNYNKSVNVDFTVDTNGVYSEPRPIGTRYLTRNL

SEQ ID NO: 11053 - protein, 735 aa, Artificial Sequence
  source: /note="Description of Artificial Sequence: Synthetic polypeptide"
MAADGYLPDWLEDTLSEGIRQWWKLKPGPPPPKPAERHKDDSRGLVLPGYKYLGPFNGLDKGEPVNEADAAALEHDKAYDRQLDSGDNPYLKYNHADAEFQERLKEDTSFGGNLARAVFQAKKRVLEPLGLVEEPVKTAPGKKRPVEHSPAEPDSSSGTGKSGQQPARKRLNFGQTGDADSVPDPQPLGQPPAAPSGLGTNTMASGSGAPMADNNEGADGVGNSSGNWHCDSTWMGDRVIPTSTRTWALPTYNNHLYKQISSQSGASNDNHYFGYSTPWGYFDFNRFHCHFSPRDWQRLINNNWGFRPKRLNFKLFNIQVKEVTQNDGTTTIANNLTSTVQVFTDSGYQLPYVLGSAHQGCLPPFPADVFMVPQYGYLTLNNGSQAVGRSSFYCLEYFPSQMLRTGNNFTFSYTFEDVPFHSSYAHSQSLDRLMNPLIDQYLYYLSRTNTPSGTTTQSRLRFSQAGASDIRDQSRNWLPGPCYRQQRVSKTAADNNNSDYSWTGATKYHLNGRDSLVNPGTAMASHKDDEEKYFPQSGVLIFGKQDSGKTNVDIERVMITDEEEIRTTNPVATEQYGSVSTNLQSGNTQAATSDVNTQGVLPGMVWQDRDVYLQGPIWAKIPHTDGHFHPSPLMGGFGLKHPPPQILIKNTPVPANPSTTFSAAKFASFITQYSTGQVSVEIEWELQKENSKRWNPEIQYTSNYNKSVNVDFTVDTNGVYSEPRPIGTRYLTRNL

SEQ ID NO: 11054 - protein, 735 aa, Artificial Sequence
  source: /note="Description of Artificial Sequence: Synthetic polypeptide"
MAADGYLPDWLEDTLSEGIRQWWKLKPGPPPPKPAERHKDDSRGLVLPGYKYLGPFNGLDKGEPVNEADAAALEHDKAYDRQLDSGDNPYLKYNHADAEFQERLKEDTSFGGNLARAVFQAKKRVLEPLGLVEEPVKTAPGKKRPVEHSPAEPDSSSGTGKSGQQPARKRLNFGQTGDADSVPDPQPLGQPPAAPSGLGTNTMASGSGAPMADNNEGADGVGNSSGNWHCDSTWMGDRVITTSTRTWALPTYNNHLYKQISSQSGASNDNHYFGYSTPWGYFDFNRFHCHFSPRDWQRLINNNWGFRPKRLNFKLFNIQVKEVTQNDGTTTIANNLTSTVQVFTDSEYQLPYVLGSAHQGCLPPFPADVFMVPQYGYLTLNNGSQAVGRSSFYCLEYFPSQMLRTGNNFTFSYTFEDVPFHSSYAHSQSLDRLMNPLIDQYLYYLSRTNTPSGTTTQSRLRFSQAGASDIRDQSRNWLPGPCYRQQRVSKTAADNNNSDYSWTGATKYHLNGRDSLVNPGTAMASHKDDEEKYFPQSGVLIFGKQDSGKTNVDIERVMITDEEEIRTTNPVATEQYGSVSTNLQSGDTQAATSDVNTQGVLPGMVWQDRDVYLQGPIWAKIPHTDGHFHPSPLMGGFGLKHPPPQILIKNTPVPANPSTTFSAAKFASFITQYSTGQVSVEIEWELQKENSKRWNPEIQYTSNYNKSVNVDFTVDTNGVYSEPRPIGTRYLTRNL

SEQ ID NO: 11055 - protein, 734 aa, Artificial Sequence
  source: /note="Description of Artificial Sequence: Synthetic polypeptide"
MAADGYLPDWLEDTLSEGIRQWWKLKPGPPPPKPAERHKDDSRGLVLPGYKYLGPFNGLDKGEPVNEADAAALEHDKAYDRQLDSGDNPYLKYNHADAEFQERLKEDTSFGGNLARAVFQAKKRVLEPLGLVEEPVKTAPGKKRPVEHSPAEPDSSSGTGKSGQQPARKRLNFGQTGDADSVPDPQPLGQPPAAPSGLGTNTMASGSGAPMADNNEGADGVGNSSGNWHCDSTWMGDRVITTSTRTWALPTYNNHLYKQISSQSGASNDNHYFGYSTPWGYFDFNRFHCHFSPRDWQRLINNNWGFRPKRLNFKLFNIQVKEVTQNDGTTTIANNLTSTVQVFTDSEYQLPYVLGSAHQGCLPPFPADVFMVPQYGYLTLNNGSQAVGRSSFYCLEYFPSQMLRTGNNFTFSYTFEDVPFHSSYAHSQSLDRLMNPLIDQYLYYLSRTNTPSGTTTQSRLRFSQAGASDIRDQSRNWLPGPCYRQQRVSKTAADNNSDYSWTGATKYHLNGRDSLVNPGTAMASHKDDEEKYFPQSGVLIFGKQDSGKTNVDIERVMITDEEEIRTTNPVATEQYGSVSTNLQSGNTQAATSDVNTQGVLPGMVWQDRDVYLQGPIWAKIPHTDGHFHPSPLMGGFGLKHPPPQILIKNTPVPANPSTTFSAAKFASFITQYSTGQVSVEIEWELQKENSKRWNPEIQYTSNYNKSVNVDFTVDTNGVYSEPRPIGTRYLTRNL

SEQ ID NO: 11056 - protein, 735 aa, Artificial Sequence
  source: /note="Description of Artificial Sequence: Synthetic polypeptide"
MAADGYLPDWLEDTLSEGIRQWWKLKPGPPPPKPAERHKDDSRGLVLPGYKYLGPFNGLDKGEPVNEADAAALEHDKAYDRQLDSGDNPYLKYNHADAEFQERLKEDTSFGGNLARAVFQAKKRVLEPLGLVEEPVKTAPGKKRPVEHSPAEPDSSSGTGKSGQQPARKRLNFGQTGDADSVPDPQPLGQPPAAPSGLGTNTMASGSGAPMADNNEGADGVGNSSGNWHCDSTWMGDRVITTSTRTWALPTYNNHLYKQISSQSGASNDNHYFGYSTPWGYFDFNRFHCHFSPRDWQRLINNNWGFRPKRLNFKLFNIQVKEVTQNDGTTTIANNLTSTVQVFTDSEYQLPYVLGSAHQGCLPPFPADVFMVPQYGYLTLNNGSQAVGRSSFYCLEYFPSQMLRTGNNFTFSYTFEDVPFHSSYAHSQSSDRLMNPLIDQYLYYLSRTNTPSGTTTQSRLRFSQAGASDIRDQSRNWLPGPCYRQQRVSKTAADNNNSDYSWTGATKYHLNGRDSLVNPGTAMASHKDDEEKYFPQSGVLIFGKQDSGKTNVDIERVMITDEEEIRTTNPVATEQYGSVSTNLQSGNTQAATSDVNTQGVLPGMVWQDRDVYLQGPIWAKIPHTDGHFRPSPLMGGFGLKHPPPQILIKNTPVPANPSTTFSAAKFASFITQYSTGQVSVEIEWELQKENSKRWNPEIQYTSNYNKSVNVDFTVDTNGVYSEPRPIGTRYLTRNL

SEQ ID NO: 11057 - protein, 735 aa, Artificial Sequence
  source: /note="Description of Artificial Sequence: Synthetic polypeptide"
MAADGYLPDWLEDTLSEGIRQWWKLKPGPPPPKPAERHKDDSRGLVLPGYKYLGPFNGLDKGEPVNEADAAALEHDKAYDRQLDSGDNPYLKYNHADAEFQERLKEDTSFGGNLARAVFQAKKRVLEPLGLVEEPVKTAPGKKRPVEHSPAGPDSSSGTGKSGQQPARKRLNFGQTGDADSVPDPQPLGQPPAAPSGLGTNTMASGSGAPMADNNEGADGVGNSSGNWHCDSTWMGDRVITTSTRTWALPTYNNHLYKQISSQSGASNDNHYFGYSTPWGYFDFNRFHCHFSPRDWQRLINNNWGFRPKRLNFELFNIQVKEVTQNDGTTTIANNLTSTVQVFTDSEYQLPYVLGSAHQGCLPPFPADVFMVPQYGYLTLNNGSQAVGRSSFYCLEYFPSQMLRTGNNFTFSYTFEDVPFHSSYAHSQSLDRLMNPLIDQYLYYLSRTNTPSGTTTQSRLQFSQAGASDIRDQSRNWLPGPCYRQQRVSKTAADNNNSDYSWTGATKYHLNGRDSLVNPGTAMASHKDDEEKYFPQSGVLIFGKQDSGKTNVDIEKVMITDEEEIRTTNPVATEQYGSVSTNLQSGNTQAATSDVNTQGVLPGMVWQDRGVYLQGPIWAKIPHTDGHFHPSPLMGGFGLKHPPPQILIKSTPVPANPSTTFSAAKFASFITQYSTGQVSVEIEWELQKENSKRWNPEIQYTSNYNKSVNVDFTVDTNGVYSDPRPIGTRYLTRNL

SEQ ID NO: 11058 - protein, 735 aa, Artificial Sequence
  source: /note="Description of Artificial Sequence: Synthetic polypeptide"
MAADGYLPDWLEDTLSEGIRQWWKLKPGPPPPKPAERHKDDSRGLVLPGYKYLGPFNGLDKGEPVNEADAAALEHDKAYDRQLDSGDNPYLKYNHADAEFQERLKEDTSFGGNLARAVFQAKKRVLEPLGLVEEPVKTAPGKKRPVEHSPAEPDSSSGTGKSGQQPARKRLNFGQTGDADSVPDPQPLGQPPAAPSGLGTNTMASGSGAPMADNNEGADGVGNSSGNWHCDSTWMGDRVITTSTRTWALPTYNNHLYKQISSQSGASNDNHYFGYSTPWGYFDFNRFHCHFSPRGWQRLINNNWGFRPKRLNFKLFNIQVKEVTQNDGTTTIANNLTSTVQVFTDSEYQLPYVLGSAHQGCLPPFPADVFMVPQYGYLTLNNGSQAVGRSSFYCLEYFPSQMLRTGSNFTFSYTFEDVPFHSSYAHSQSLDRLMNPLIDQYLYYLSRTNTPSGTTTQSRLRFSQAGASDIRDQSRNWLPGPCYRQQRVSKTAADNNNSDYSWTGATKYHLNGRDSLVNPGTAMASHKDDEEKYFPQSGVLIFGKQDSGKTNVDIERVMITDEEEIRTTNPVATEQYGSVSTNLQSGNTQAATSDVNTQGVLPGMVWQDRDVYLQGPIWAKIPHTDGHFHPSPLMGGFGLKHPPPQILIKNTPVPANPSTTFSAAKFASFITQYSTGQVSVEIEWELQKENSKRWNPEIQYTSNYNKSVNVDFTVDTNGVYSEPRPIGTRYLTRNL

SEQ ID NO: 11059 - protein, 735 aa, Artificial Sequence
  source: /note="Description of Artificial Sequence: Synthetic polypeptide"
MAADGYLPDWLEDTLSEGIRQWWKLKPGPPPPRPAERHQDDSRGLVLPGYKYLGPFNGLDKGEPVNEADAAALEHDKAYDRQLDSGDNPYLKYNHADAEFQERLKEDTSFGGNLARAVFQAKKRVLEPLGLVEEPVKTAPGKKRPVEHSPAEPDSSSGTGKSGQQPARKRLNFGQTGDADSVPDPQPLGQPPAAPSGLGTNTMASGSGAPMADNNEGADGVGNSSGNWHCDSTWMGDRVITTSTRTWALPTYNNHLYKQISSQSGASNDNHYFGYSTPWGYFDFNRFHCHFSPRDWQRLINNNWGFRPKRLNFKLFNIQVKEVTQNDGTTTIANNLTSTVQVFTDSEYQLPYVLGSAHQGCLPPFPADVFMVPQYGYLTLNNGSQAVGRSSFYCLEYFPSQMLRTGNNFTFSYTFEDVPFHSSYAHSQSLDRLMNPLIDQYLYYLSRTNTPSGTTTQSRLRFSQAGASDIRDQSRNWLPGPCYRQQRVSKTAADNNNSDYSWTGATKYHLNGRDSLVNPGTAMASHKDDEEKYFPQSGVLIFGKQDSGKTNVDIERVMITDEEEIRTTNPVATEQYGSVSTNLQSGNTQAATSDVNTQGVLPGMVWQDRDVYLQGPIWAKIPHTDGHFHPSPLMGGFGLKHPPPQILIKNTPVPANPSTTFSAAKFASFITQYSTGQVSVEIEWELQKENSKRWNPEIQYTSNYNKSVNVDFTVDTNGVYSEPRPIGTRYLTRNL

SEQ ID NO: 11060 - protein, 735 aa, Artificial Sequence
  source: /note="Description of Artificial Sequence: Synthetic polypeptide"
MAADGYLPDWLEDTLSEGIRQWWKLKPGPPPPKPAERHKDDSRGLVLPGYKYLGPFNGLDKGEPVNEADAAALEHDKAYDRQLDSGDNPYLKYNHADAEFQERLKEDTSFGGNLARAVFQAKKRVLEPLGLVEEPVKTAPGKKRPVEHSPAEPDSSSGTGKSGQQPARKRLNFGQTGDADSVPDPQPLGQPPAAPSGLGTNTMASGSGAPMADNNEGADGVGNSSGNWHCDSTWMGDRVITTSTRTWALPTYNNHLYKQISSQSGASNDNHYFGYSTPWGYFDFNRFHCHFSPRDWQRLINNNWGFRPKRLNFKLFNIQVKEVTQNDGTTTIANNLTSTVQVFTDSEYQLPYVPGSAHQGCLPPFPADVFMVPQYGYLTLNNGSQAVGRSSFYCLEYFPSQMLRTGNNFTFSYTFEDVPFHSSYAHSQSLDRLMNPLIDQYLYYLSRTNTPSGTTTQSRLRFSQAGASDIRDQSRNWLPGPCYRQQRVSKTAADNNNSDYSWTGATKYHLNGRDSLVNPGTAMASHKDDEEKYFPQSGVLIFGKQDSGKTNVDIERVMITDEEEIRTTNPVATEQYGSVSTNLQSGNTQAATSDVNTQGVLPGMVWQDRDVYLQGPIWAKIPHTDGHFHPSPLMGGFGLKHPPPQILIKNTPVPANPSTTFSAAKFASFITQYSTGQVSVEIEWELQKENSKRWNPEIQYTSNYNKSVNVDFTVDTNGVYSEPRPIGTRYLTRNL

SEQ ID NO: 11061 - protein, 735 aa, Artificial Sequence
  source: /note="Description of Artificial Sequence: Synthetic polypeptide"
MAADGYLPDWLEDTLSEGIRQWWKLKPGPPPPKPAERHKDDSRGLVLPGYKYLGPFNGLDKGEPVNEADAAALEHDKAYDRQLDSGDNPYLKYNHADAEFQERLKEDTSFGGNLARAVFQAKKRVLEPLGLVEEPVKTAPGKKRPVEHSPAEPDSSSGTGKSGQQPARKRLNFGQTGDADSVPDPQPLGQPPAAPSGLGTNTMASGSGAPMADNNEGADGVGNSSGNWHCDSTWMGDRVITTSTRTWALPTYDNHLYKQISSQSGASNDNHYFGYSTPWGYFDFNRFHCHFSPRDWQRLINNNWGFRPKRLNFKLFNIQVKEVTQNDGTTTIANNLTSTVQVFTDSEYQLPYVLGSAHQGCLPPFPADVFMVPQYGYLTLNNGSQAVGRSSFYCLEYFPSQMLRTGNNFTFSYTFEDVPFHSSYAHSQSLDRLMNPLIDQYLYYLSRTNTSSGTTTQSRLRFSQAGASDIRDQSRNWLPGPCYRQQRVSKTAADNNNSDYSWTGATKYHLNGRDSLVNPGTAMASHKDDEEKYFPQSGVLIFGKQDSGKTNVDIERVMITDEEEIRTTNPVATEQYGSVSTNLQSGNTQAATSDVNTQGVLPGMVWQDRDVYLQGPIWAKIPHTDGHFHPSPLMGGFGLKHPPPQILIKNTPVPANPSTTFSAAKFASFITQYSTGQVSVEIEWELQKENSKRWNPEIQYTSNYNKSVNVDFTVDTNGVYSEPRPIGTRYLTRNL

SEQ ID NO: 11062 - protein, 735 aa, Artificial Sequence
  source: /note="Description of Artificial Sequence: Synthetic polypeptide"
MAADGYLPDWLEDTLSEGIRQWWKLKPGPPPPRPAERHQDDSRGLVLPGYKYLGPFNGLDKGEPVNEADAAALEHDKAYDRQLDSGDNPYLKYNHADAEFQERLKEDTSFGGNLGRAVFQAKKRVLEPLGLVEEPVKTAPGKKRPVEHSPAEPDSSSGTGKAGQQPARKRLNFGQTGDADSVPDPQPLGQPPAAPTSLGSTTMATGSGAPMADNNEGADGVGNSSGNWHCDSQWLGDRVITTSTRTWALPTYNNHLYKQISSQSGASNDNHYFGYSTPWGYFDFNRFHCHFSPRDWQRLINNNWGFRPKRLNFKLFNIQVKEVTQNDGTTTIANNLTSTVQVFTDSEYQLPYVLGSAHQGCLPPFPADVFMVPQYGYLTLNNGSQAVGRSSFYCLEYFPSQMLRTGNNFTFSYTFEDVPFHSSYAHSQSLDRLMNPLIDQYLYYLSRTNTPSGTTTQSRLQFSQAGASDIRDQSRNWLPGPCYRQQRVSKTAADNNNSDYSWTGATKYHLNGRDSLVNPGTAMASHKDDEEKYFPQSGVLIFGKQDSGKTNVDIEKVMITDEEEIRTTNPVATEQYGSVSTNLQSGNTQAATSDVNTQGVLPGMVWQDRDVYLQGPIWAKIPHTDGHFHPSPLMGGFGLKHPPPQILIKSTPVPANPSTTFSAAKFASFITQYSTGQVSVEIEWELQKENSKRWNPEIQYTSNYNKSVNVDFTVDTNGVYSEPRPIGTRYLTRNL

SEQ ID NO: 11063 - protein, 735 aa, Artificial Sequence
  source: /note="Description of Artificial Sequence: Synthetic polypeptide"
MAADGYLPDWLEDTLSEGIRQWWKLKPGPPPPKPAERHKDDSRGLVLPGYKYLGPFNGLDKGEPVNEADAAALEHDKAYDRQLDSGDNPYLKYNHADAEFQERLKEDTSFGGNLARAVFQAKKRVLEPLGLVEEPVKTAPGKKRPVEHSPAEPDSSSGTGKSGQQPARKRLNFGQTGDADSVPDPQPLGQPPAAPSGLGTNTMASGSGAPMADNNEGADGVGNSSGNWHCDSTWMGDRVITTSTRTWALPTYNNHLYKQISSQSGASNDNHYFGYSTPWGYFDFNRFHCHFSPRDWQRLINNNWGFRPKRLNFKLFNIQVKEVTQNDGTTTIANNLTSTVQVFTDSEYQLPYVLGSAHQGCLPPFPADVFMVPQYGYLTLNNGSQAVGRSSFYCLEYFPSQMLRTGNNFTFSYTFEDVPFHSSYAHSQSSDRLMNPLIDQYLYYLSRTNTPSGTTTQSRLRFSQAGASDIRDQSRNWLPGPCYRQQRVSKTAADNNNSDYSWTGATKYHLNGRDSLVNPGTAMASHKDDEEKYFPQSGVLIFGKQDSGKTNVDIERVMITDEEEIRTTNPVATEQYGSVSTNLQSGNTQAATSDVNTQGVLPGMVWQDRDVYLQGPIWAKIPHTDGHFHPSPLMGGFGLKHPPPQILIKNTPVPANPSTTFSAAKLASFITQYSTGQVSVEIEWELQKENSKRWNPEIQYTSNYNKSVNVDFTVDTNGVYSEPRPIGTRYLTRNL

SEQ ID NO: 11064 - protein, 735 aa, Artificial Sequence
  source: /note="Description of Artificial Sequence: Synthetic polypeptide"
MAADGYLPDWLEDTLSEGIRQWWKLKPGPPPPKPAERHKDDSRGLVLPGYKYLGPFNGLDKGEPVNEADAAALEHDKAYDRQLDSGDNPYLKYNHADAEFQERLKEDTSFGGNLARAVFQAKKRVLEPLGLVEEPVKTAPGKKRPVEHSPAEPDSSSGTGKSGQQPARKRLNFGQTGDADSVPDPQPLGQPPAAPSGLGTNTMASGSGAPMADNNEGADGVGNSSGNWHCDSTWMGDRVITTSTRTWALPTYNNHLYKQISSQSGASNDNHYFGYSTPWGYFDFNRFHCHFSPRDWQRLINNNWGFRPKRLNFKLFNIQVKEVTQNDGTTTIANNLTSTVQVFTDSEYQLPYVLGSAHQGCLPPFPADVFMVPQYGYLTLNNGSQAVGRSSFYCLEYFPSQMLRTGNNFTFSYTFEDVPFHSSYAHSQSLDRLMNPLIDQYLYYLSRTNTPSGTTTQSRLRFSQAGASDIRDQSRNWLPGPCYRQQRVSKTAADNNNSDYSWTGATKYHLNGRDSLVNPGTAMASHKDDEEKYFPQSGVLIFGKQDSGKTNVDIERVMITDEEEIRTTNPVATEQYGSVSTNLQSGNTQAATSDVNTQGVLPGMVWQDRDVYLQGPIWAKIPHTDGHFHPSPLMGGFGLKHPPPQILIKNTPVPANPSTTFSAAKFASFITQYSTGQVSVEIEWELQKENSKRWNPEIQYTSNYNKSVNVDFTVDANGVYSEPRPIGTRYLTRNL

SEQ ID NO: 11065 - protein, 735 aa, Artificial Sequence
  source: /note="Description of Artificial Sequence: Synthetic polypeptide"
MAADGYLPDWLEDTLSEGIRQWWKLKPGPPPPKPAERHKDDSRGLVLPGYKYLGPFNGLDKGEPVNEADAAALEHDKAYDRQLDSGDNPYLKYNHADAEFQERLKEDTSFGGNLARAVFQAKKRVLEPLGLVEEPVKTAPGKKRPVEHSPAGPDSSSGTGKSGQQPARKRLNFGQTGDADSVPDPQPLGQPPAAPSGLGTNTMASGSGAPMADNNEGADGVGNSSGNWHCDSTWMGDRVITTSTRTWALPTYNNHLYKQISSQSGASNDNHYFGYSTPWGYFDFNRFHCHFSPRDWQRLINNNWGFRPKRLNFELFNIQVKEVTQNDGTTTIANNLTSTVQVFTDSEYQLPYVLGSAHQGCLPPFPADVFMVPQYGYLTLNNGSQAVGRSSFYCLEYFPSQMLRTGNNFTFSYTFEDVPFHSSYAHSQSLDRLMNPLIDQYLYYLSRTNTPSGTTTQSRLQFSQAGASDIRDQSRNWLPGPCYRQQRVSKTAADNNNSDYSWTGATKYHLNGRDSLVNPGTAMASHKDDEEKYFPQSGVLIFGKQDSGKTNVDIEKVMITDEEEIRTTNPVATEQYGSVSTNLQSGNTQAATSDVNTQGVLPGMVWQDRDVYLQGPIWAKIPHTDGHFHPSPLMGGFGLKHPPPQILIKSTPVPANPSTTFSAAKFASFITQYSTGQVSVEIEWELQKENSKRWNPEIQYTSNCNKSVNVDFTVDTNGVYSDPRPIGTRYLTRNL

SEQ ID NO: 11066 - protein, 735 aa, Artificial Sequence
  source: /note="Description of Artificial Sequence: Synthetic polypeptide"
MAADGYLPDWLEDTLSEGIRQWWKLKPGPPPPKPAERHKDDSRGLVLPGYKYLGPFNGLDKGEPVNEADAAALEHDKAYDRQLDSGDNPYLKYNHADAELQERLKEDTSFGGNLARAVFQAKKRVLEPLGLVEEPVKTAPGKKRPVEHSPAEPDSSSGTGKSGQQPARKRLNFGQTGDADSVPDPQPLGQPPAAPSGLGTNTMASGSGAPMADNNEGADGVGNSSGNWHCDSTWMGDRVITTSTRTWALPTYNNHLYKQISSQSGASNDNHYFGYSTPWGYFDFNRFHCHFSPRDWQRLINNNWGFRPKRLNFKLFNIQVKEVTQNDGTTTIANNLTSTVQVYTDSEYQLPYVLGSAHQGCLPPFPADVFMVPQYGYLTLNNGSQAVGRSSFYCLEYFPSQMLRTGNNFTFSYTFEDVPFHSSYAHSQSLDRLMNPLIDQYLYYLSRTNTPSGTTTQSRLRFSQAGASDIRDQSRNWLPGPCYRQQRVSKTAADNNNSDYSWTGATKYHLNGRDSLVNPGTAMASHKDDEEKYFPQSGVLIFGKQDSGKTNVDIERVMITDEEEIRTTNPVATEQYGSVSTNLQSGNTQAATSDVNTQGVLPGMVWQDRDVYLQGPIWAKIPHTDGHFHPSPLMGGFGLKHPPPQILIKNTPVPANPSTTFSAAKFASFITQYSTGQVSVEIEWELQKENSKRWNPEIQYTSNYNKSVNVDFTVDTNGVYSEPRPIGTRYLTRNL

SEQ ID NO: 11067 - protein, 735 aa, Artificial Sequence
  source: /note="Description of Artificial Sequence: Synthetic polypeptide"
MAADGYLPDWLEDTLSEGIRQWWKLKPGPPPPKPAERHKDDSRGLVLPGYKYLGPFNGLDKGEPVNEADAAALEHDKAYDRQLDSGDNPYLKYNHADAEFQERLKEDTSFGGNLARAVFQAKKRVLEPLGLVEEPVKTAPGKKRPVEHSPAEPDSSSGTGKSGQQPVRKRLNFGQTGDADSVPDPQPLGQPPAAPSGLGTNTMASGSGAPMADNNEGADGVGNSSGNWHCDSTWMGDRVITTSTRTWALPTYNNHLYKQISSQSGASNDNHYFGYSTPWGYFDFNRFHCHFSPRDWQRLINNNWGFRPKRLNFKLFNIQVKEVTQNDGTTTIANNLTSTVQVFTDSEYQLPYVLGSAHQGCLPPFPADVFMVPQYGYLTLNNGSQAVGRSSFYCLEYFPSQMLRTGSNFTFSYTFEDVPFHSSYAHSQSLDRLMNPLIDQYLYYLSRTNTPSGTTTQSRLRFSQAGASDIRDQSRNWLPGPCYRQQRVSKTAADNNNSDYSWTGATKYHLNGRDSLVNPGTAMASHKDDEEKYFPQSGVLIFGKQDSGKTNVDIERVMITDEEEIRTTNPVATEQYGSVSTNLQSGNTQAATSDVNTQGVLPGMVWQDRDVYLQGPIWAKIPHTDGHFHPSPLMGGFGLKHPPPQILIKNTPVPANPSTTFSAAKFASFITQYSTGQVSVEIEWELQKENSKRWNPEIQYTSNYNKSVNVDFTVDTNGVYSEPRPIGTRYLTRNL

SEQ ID NO: 11068 - protein, 735 aa, Artificial Sequence
  source: /note="Description of Artificial Sequence: Synthetic polypeptide"
MAADGYLPDWLEDTLSEGIRQWWKLKPGPPPPRPAERHQDDSRGLVLPGYKYLGPFNGLDKGEPVNEADAAALEHDKAYDRQLDSGDNPYLKYNHADAEFQERLKEDTSFGGNLGRAVFQAKKRVLEPLGLVEEPVKTAPGKKRPVEHSPAGPDSSSGTGKSGQQPARKRLNFGQTGDADSVPDPQPLGQPPAAPSGLGTNTMASGSGAPMADNNEGADGVGNSSGNWHCDSTWMGDRVITTSTRTWALPTYNNHLYKQISSQSGASNDNHYFGYSTPWGYFDFNRFHCHFSPRDWQRLINNNWGFRPKRLNFELFNIQVKEVTQNDGTTTIANNLTSTVQVFTDSEYQLPYVLGSAHQGCLPPFPADVFMVPQYGYLTLNNGSQAVGRSSFYCLEYFPSQMLRTGNNFTFSYTFEDVPFHSSYAHSQSLDRLMNPLIDQYLYYLSRTNTPSGTTTQSRLQFSQAGASDIRDQSRNWLPGPCYRQQRVSKTAADNNNSDYSWTGATKYHLNGRDSLVNPGTAMASHKDDEEKYFPQSGVLIFGKQDSGKTNVDIEKVMITDEEEIRTTNPVATEQYGSVSTNLQSGNTQAATSDVNTQGVLPGMVWQDRDVYLQGPIWAKIPHTDGHFHPSPLMGGFGLKHPPPQILIKSTPVPANPSTTFSAAKFASFITQYSTGQVSVEIEWELQKENSKRWNPEIQYTSNYNKSVNVDFTVDTNGVYSEPRPIGTRYLTRNL

SEQ ID NO: 11069 - protein, 735 aa, Artificial Sequence
  source: /note="Description of Artificial Sequence: Synthetic polypeptide"
MAADGYLPDWLEDTLSEGIRQWWKLKPGPPPPKPAERHKDDSRGLVLPGYKYLGPFNGLDKGEPVNEADAAALEHDKAYDRQLDSGDNPYLKYNHADAEFQERLKEDTSFGGNLARAVFQAKKRVLEPLGLVEEPVKTAPGKKRPVEHSPAEPDSSSGTGKSGQQPARKRLNFGQTGDADSVPDPQPLGQPPAAPSGLGTNTMASGSGAPMADNNEGADGVGNSSGNWHCDSTWMGDRVITTSTRTWALPTYNNHLYKQISSQSGASNDNHYFGYSTPWGYFDFNRFHGHFSPRDWQRLINNNWGFRPKRLNFKLFNIQVKEVTQNDGTTTIANNLTSTVQVFTDSEYQLPYVLGSAHQGCLPPFPADVFMVPQYGYLTLNNGSQAVGRSSFYCLEYFPSQMLRTGNNFTFSYTFEDVPFHSSYAHSQSLDRLMNPLIDQYLYYLSRTNTPSGTTTQSRLRFSQAGASDIRDQSRNWLPGPCYRQQRVSKTAADNNNSDYSWTGATKYHLNGRDSLVNPGTAMASHKDDEEKYFPQSGVLIFGKQDSGKTNVDIERVMITDEEEIRTTNPVATEQYGSVSTNLQSGNTQAATSDVNTQGVLPGMVWQDRDVYLQGPIWAKIPHTDGHFHPSPLMGGFGLKHPPPQILIKNTPVPANPSTTFSAAKFASFITQYSTGQVSVEIEWELQKENSKRWNPEIQYTSNYNKSVNVDFTVDTNGVYSEPRPIGTRYLTRNL

SEQ ID NO: 11070 - protein, 735 aa, Artificial Sequence
  source: /note="Description of Artificial Sequence: Synthetic polypeptide"
MAADGYLPDWLEDTLSEGIRQWWKLKPGPPPPKPAERHKDDSRGLVLPGYKYLGPFNGLDKGEPVNEADAAALEHDKAYDRQLDSGDNPYLKYNHADAEFQERLKEDTSFGGNLARAVFQAKKRVLEPLGLVEEPVKTAPGKKRPVEHSPAEPDSSSGTGKSGQQPARKRLNFGQTGDADSVPDPQPLGQPPAAPSGLGTNTMASGSGAPMADNNEGADGVGNSSGNWHCDSTWMGDRVITTSTRTWALPTYNNHLYKQISSQSGASNDNHYFGYSTPWGYFDFNRFHCHFSPRDWQRLINNNWGFRPKRLNFKLFNIQVKEVTQNDGTTTIANNLTSTVQVFTDSEYQLPYVLGSAHQGCLPPFPADVFMVPQYGYLTLNNGSQAVGRSSFYCLEYFPSQMLRTGNNFTFSYTFEDVPFHSSYAHSQSLDRLMNPLIDQYLYYLSRTNTPSGTTTQSRLRFSQAGASDIRDQSRNWLPGPCYRQQRVSKTAADNNNSDYSWTGATKYHLNGRDSLVNPGTAMASHKDDEEKYFPQSGVLIFGKQDSGKTNVDIERVMITDEEEIRTTNPVATEQYGSVSTNLQSGNTQAATSDVNTQGVLPGMVWQDRDVYLQGPIWAKIPHTDGHFRPSPLMGGFGLKHPPPQILIKNTPVPANPSTTFSAAKFASFITQYSTGQVSVEIEWELQKENSKRWNPEIQYTSNYNKSVNVDFTVDTNGVYSEPRPIGTRYLTRNL

SEQ ID NO: 11071 - protein, 735 aa, Artificial Sequence
  source: /note="Description of Artificial Sequence: Synthetic polypeptide"
MAADGYLPDWLEDTLSEGIRQWWKLKPGPPPPKPAERHKDDSRGLVLPGYKYLGPFNGLDKGEPVNEADAAALEHDKAYDRQLDSGDNPYLKYNHADAEFQERLKEDTSFGGNLGRAVFQAKKRALEPLGLVEEPVKTAPGKKRPVEHSPVEPDSSSGTGKAGQQPARKRLNFGQTGDADSVPDPQPLGQPPAAPSGLGTNTMATGSGAPMADNNEGADGVGNSSGNWHCDSTWMGDRVITTSTRTWALPTYNNHLYKQISSQSGASNDNHYFGYSTPWGYFDFNRFHCHFSPRDWQRLINNNWGFRPKRLNFKLFNIQVKEVTQNDGTTTIANNLTSTVQVFTDSEYQLPYVLGSAHQGCLPPFPADVFMVPQYGYLTLNNGSQAVGRSSFYCLEYFPSQMLRTGNNFTFSYTFEDVPFHSSYAHSQSLDRLMNPLIDQYLYYLSRTNTPSGTTTQSRLQFSQAGASDIRDQSRNWLPGPCYRQQRVSKTSADNNNSEYSWTGATKYHLNGRDSLVNPGPAMASHKDDEEKFFPQSGVLIFGKQGSEKTNVDIEKVMITDEEEIRTTNPVATEQYGSVSTNLQRGNRQAATADVNTQGVLPGMVWQDRDVYLQGPIWAKIPHTDGHFHPSPLMGGFGLKHPPPQILIKNTPVPANPSTTFSAAKFASFITQYSTGQVSVEIEWELQKENSKRWNPEIQYTSNYNKSVNVDFTVDTNGVYSEPRPIGTRYLTRNL

SEQ ID NO: 11072 - protein, 735 aa, Artificial Sequence
  source: /note="Description of Artificial Sequence: Synthetic polypeptide"
MAADGYLPDWLEDTLSEGIRQWWKLKPGPPPPKPAERHKDDSRGLVLPGYKYLGPFNGLDKGEPVNEADAAALEHDKAYDRQLDSGDNPYLKYNHADAEFQERLKEDTSFGGNLGRAVFQAKKRVLEPLGLVEEPVKTAPGKKRPVEHSPVEPDSSSGTGKAGQQPARKRLNFGQTGDADSVPDPQPLGQPPAAPSGLGTNTMATGSGAPMADNNEGADGVGNSSGNWHCDSTWMGDRVITTSTRTWALPTYNNHLYKQISSQSGASNDNHYFGYSTPWGYFDFNRFHCHFSPRDWQRLINNNWGFRPKRLNFKLFNIQVKEVTQNDGTTTIANNLTSTVQVFTDSEYQLPYVLGSAHQGCLPPFPADVFMVPQYGYLTLNNGSQAVGRSSFYCLEYFPSQMLRTGNNFTFSYTFEDVPFHSSYAHSQSLDRLMNPLIDQYLYYLSRTNTPSGTTTQSRLQFSQAGASDIRDQSRNWLPGPCYRQQRVSKTSADNNNSEYSWTGATKYHLNGRDSLVNPGPAMASHKDDEEKFFPQSGVLIFGKQGSEKTNVDIEKVMITDEEEIRTTNPVATEQYGSVSTNLQRGNRQAATADVNTQGVLPGTVWQDRDVYLQGPIWAKIPHTDGHFHPSPLMGGFGLKHPPPQILIKNTPVPANPSTTFSAAKFASFITQYSTGQVSVEIEWELQKENSKRWNPEIQYTSNYNKSVNVDFTVDTNGVYSEPRPIGTRYLTRNL

SEQ ID NO: 11073 - protein, 735 aa, Artificial Sequence
  source: /note="Description of Artificial Sequence: Synthetic polypeptide"
MAADGYLPDWLEDTLSEGIRQWWKLKPGPPPPKPAERHKDDSRGLVLPGYKYLGPFNGLDKGEPVNEADAAALEHDKAYNRQLDSGDNPYLKYNHADAEFQERLKEDTSFGGNLGRAVFQAKKRVLEPLGLVEEPVKTAPGKKRPVEHSPVEPDSSSGTGKAGQQPARKRLNFGQTGDADSVPDPQPLGQPPAAPSGLGTNTMATGSGAPMADNNEGADGVGNSSGNWHCDSTWMGDRVITTSTRTWALPTYNNHLYKQISSQSGASNDNHYFGYSTPWGYFDFNRFHCHFSPRDWQRLINNNWGFRPKRLNFKLFNIQVKEVTQNDGTTTIANNLTSTVQVFTDSEYQLPYVLGSAHQGCLPPFPADVFMVPQYGYLTLNNGSQAVGRSSFYCLEYFPSQMLRTGNNFTFSYTFEDVPFHSSYAHSQSLDRLMNPLIDQYLYYLSRTNTPSGTTTQSRLQFSQAGASDIRDQSRNWLPGPCYRQQRVSKTSADNNNSEYSWTGATKYHLNGRDSLVNPGPAMASHKDDEEKFFPQSGVLIFGKQGSEKTNVDIEKVMITDEEEIRTTNPVATEQYGSVSTNLQRGNRQAATADVNTQGVLPGMVWQDRDVYLQGPIWAKIPHTDGHFHPSPLMGGFGLKHPPPQILIKNTPVPANPSTTFSAAKFASFITQYSTGQVSVEIEWELQKENSKRGNPEIQYTSNYNKSVNVDFTVDTNGVYSEPRPIGTRYLTRNL

SEQ ID NO: 11074 - protein, 735 aa, Artificial Sequence
  source: /note="Description of Artificial Sequence: Synthetic polypeptide"
MAADGYLPDWLEDTLSEGIRQWWKLKPGPPPPKPAERHKDDSRGLVLPGYKYLGPFNGLDKGEPVNEADAAALEHDKAYDRQLDSGDNPYLKYNHADAEFQERLKEDTSFGGNLGRAVFQAKKRVLEPLGLVEEPVKTAPGKKRPVEHSPVEPDSSSGTGKAGQQPARKRLNFGQTGDADSVPDPQPLGQPPAAPSGLGTNTMATGSGAPMADNNEGADGVGNSSGNWHCDSTWMGDRVITTSTRTWALPTYNNHLYKQISSQSGASNDNHYFGYSTPWGYFDFNRFHCHFSPRDWQRLINNNWGFRPKRLNFKLFNIQVKEVTQNDGTTTIANNLTSTVQVFTDSEYQLPYVLGSAHQGCLPPFPADVFMVPQYGYLTLNNGSQAVGRSSFYCLEYFPSQMLRTGNNFTFSYTFEDVPFHSSYAHSQSLDRLMNPLIDQYLYYLSRTNTPSGTTTQSRLQFSQAGASDIRDQSRNWLPGPCYRQQRVSKTSADNNNSEYPWTGATKYHLNGRDSLVNPGPAMASHKDDEEKFFPQSGVLIFGKQGSEKTNVDIEKVMITDEEEIRTTNPVATEQYGSVSTNLQRGNRQAATADVNTQGVLPGTVWQDRDVYLQGPIWAKIPHTDGHFHPSPLMGGFGLKHPPPQILIKNTPVPANPSTTFSAAKFASFITQYSTGQVSVEIEWELQKENSKRWNPEIQYTSNYNKSVNVDFTVDTNGVYSEPRPIGTRYLTRNL

SEQ ID NO: 11075 - protein, 735 aa, Artificial Sequence
  source: /note="Description of Artificial Sequence: Synthetic polypeptide"
MAADGYLPDWLEDTLSEGIRQWWKLKPGPPPPKPAERHKDDSRGLVLPGYKYLGPFNGLDKGEPVNEADAAALEHDKAYDRQLDSGDNPYLKYNHADAEFQERLKEDTSFGGNLGRAVFQAKKRVLEPLGLVEEPVKTAPGKKRPVEHSPVEPDSSSGTGKAGQQPARKRLNFGQTGDADSVPDPQPLGQPPAAPSGLGTNTMATGSGAPMADNNEGADGVGNSSGNWHCDSTWMGDRVITTSTRTWALPTYNNHLYKQISSQSGASNDNHYFGYSTPWGYFDFNRFHCHFSPRDWQRLINNNWGFRPKRLNFKLFNIQVKEVTQNDGTTTIANNLTSTVQVFTDSEYQLPYVLGSAHQGCLPPFPADVFMVPQYGYLTLNNGSQAVGRSSFYCLEYFPSQMLRTGNNFTFSYTFEDVPFHSSYAHSQSLDRLMNPLIDQYLYYLSRTNTPSGTTTQSRLQFSQAGASDIRDQSRNWLPGPCYRQQRVSKTSADNNNSEYSWTGATKYHLNGRDSLVNPGPAMASHKDDEEKFFPQSGVLIFGKQGSEKTNVGIEKVMITDEEEIRTTNPVATEQYGSVSTNLQRGNRQAATADVNTQGVLPGTVWQDRDVYLQGPIWAKIPHTDGHFHPSPLMGGFGLKHPPPQILIKNTPVPANPSTTFSAAKFASFITQYSTGQVSVEIEWELQKENSKRWNPEIQYTSNYNKSVNVDFTVDTNGVYSEPRPIGTRYLTRNL

SEQ ID NO: 11076 - protein, 735 aa, Artificial Sequence
  source: /note="Description of Artificial Sequence: Synthetic polypeptide"
MAADGYLPDWLEDTLSEGIRQWWKLKPGPPPPKPAGRHKDDSRGLVLPGYKYLGPFNGLDKGEPVNEADAAALEHDKAYDRQLDSGDNPYLKYNHADAEFQERLKEDTSFGGNLGRAVFQAKKRALEPLGLVEEPVKTAPGKKRPVEHSPVEPDSSSGTGKAGQQPARKRLNFGQTGDADSVPDPQPLGQPPAAPSGLGTNTMATGSGAPMADNNEGADGVGNSSGNWHCDSTWMGDRVITTSTRTWALPTYNNHLYKQISSQSGASNDNHYFGYSTPWGYFDFNRFHCHFSPRDWQRLINNNWGFRPKRLNFKLFNIQVKEVTQNDGTTTIANNLTSTVQVFTDSEYQLPYVLGSAHQGCLPPFPADVFMVPQYGYLTLNNGSQAVGRSSFYCLEYFPSQMLRTGNNFTFSYTFEDVPFHSSYAHSQSLDRLMNPLIDQYLYYLSRTNTPSGTTTQSRLQFSQAGASDIRDQSRNWLPGPCYRQQRVSKTSADNNNSEYSWTGATKYHLNGRDSLVNPGPAMASHKDDEEKFFPQSGVLIFGKQGSEKTNVDIEKVMITDEEEIRTTNPVATEQYGSVSTNLQRGNRQAATADVNTQGVLPGMVWQDRDVYLQGPIWAKIPHTDGHFHPSPLMGGFGLKHPPPQILIKNTPVPANPSTTFSAAKFASFITQYSTGQVSVEIEWELQKENSKRWNPEIQYTSNYNKSVNVDFTVDTNGVYSEPRPIGTRYLTRNL

SEQ ID NO: 11077 - protein, 735 aa, Artificial Sequence
  source: /note="Description of Artificial Sequence: Synthetic polypeptide"
MAADGYLPDWLEDTLSEGIRQWWKLKPGPPPPKPAERHKDDSRGLVLPGYKYLGPFNGLDKGEPVNEADAAALEHDKAYDRQLDSGDNPYLKYNHADAEFQERLKEDTSFGGNLGRAVFQAKKRVLEPLGLVEEPVKTAPGKKRPVEHSPVEPDSSSGTGKAGQQPARKRLNFGQTGDADSVPDPQPLGQPPAAPSGLGTNTMATGSGAPMADNNEGADGVGNSSGNWHCDSTWMGDRVITTSTRTWALPTYNNHLYKQISSQSGASNDNHYFGYSTPWGYFDFNRFHCHFSPRDWQRLINNNWGFRPKRLNFKLFNIQVKEVTQNDGTTTIANNLTSTVQVFTDSEYQLPYVLGSAHQGCLPPFPADVFMVPQYGYLTLNNGSQAVGRSSFYCLEYFPSQMLRTGNNFTFSYTFEDVPFHSSYAHSQSLDRLMNPLIDQYLYYLSRTNTPSGTTTQSRPQFSQAGASDIRDQSRNWLPGPCYRQQRVSKTSADNNNSEYSWTGATKYHLNGRDSLVNPGPAMASHKDDEEKFFPQSGVLIFGKQGSEKTNVDIEKVMITDEEEIRTTNPVATEQYGSVSTNLQRGNRQAATADVNTQGVLPGTVWQDRDVYLQGPIWAKIPHTDGHFHPSPLMGGFGLKHPPPQILIKNTPVPANPSTTFSAAKFASFITQYSTGQVSVEIEWELQKENSKRWNPEIQYTSNYNKSVNVDFTVDTNGVYSEPRPIGTRYLTRNL

SEQ ID NO: 11078 - protein, 735 aa, Artificial Sequence [sequence omitted]

SEQ ID NO: 11079 - protein, 735 aa, Artificial Sequence
  source: /note="Description of Artificial Sequence: Synthetic polypeptide"
MAADGYLPDWLEDTLSEGIRQWWKLKPGPPPPKPAERHKDDSRGLVLPGYKYLGPFNGLDKGEPVNEADAAALEHDKAYNRQLDSGDNPYLKYNHADAEFQERLKEDTSFGGNLGRAVFQAKKRVLEPLGLVEEPVKTAPGKKRPVEHSPVEPDSSSGTGKAGQQPARKRLNFGQTGDADSVPDPQPLGQPPAAPSGLGTNTMATGSGAPMADNNEGADGVGNSSGNWHCDSTWMGDRVITTSTRTWALPTYNNHLYKQISSQSGASNDNHYFGYSTPWGYFDFNRFHCHFSPRDWQRLINNNWGFRPKRLNFKLFNIQVKEVTQNDGTTTIANNLTSTVQVFTDSEYQLPYVLGSAHQGCLPPFPADVFMVPQYGYLTLNNGSQAVGRSSFYCLEYFPSQMLRTGNNFTFSYTFEDVPFHSSYAHSQSLDRLMNPLIDQYLYYLSRTNTPSGTTTQSRLQFSQAGASDIRDQSRNWLPGPCYRQQRVSKTSADNNNSEYSWTGATKYHLNGRDSLVNPGPAMASHKDDEEKFFPQSGVLIFGKQGSEKTNVDIEKVMITDEEEIRTTNPVATEQYGSVSTNLQRGNRQAATADVNTQGVLPGMVWQDRDVYLQGPIWAKIPHTDGHFHPSPLMGGFGLKHPPPQILIKNTPVPANPSTTFSAAKFASFITQYSTGQVSVEIEWELQKENSKRWNPEIQYTSNYNKSVNVDFTVDTNGVYSEPRPIGTRYLTRNL

SEQ ID NO: 11080 - protein, 735 aa, Artificial Sequence
  source: /note="Description of Artificial Sequence: Synthetic polypeptide"
MAADGYLPDWLEDTLSEGIRQWWKLKPGPPPPKPAERHKDDSRGLVLPGYKYLGPFNGLDKGEPVNEADAAALEHDKAYDRQLDSGDNPYLKYNHADAEFQERLKEDTSFGGNLGRAVFQAKKRVLEPLGLVEEPVKTAPGKKRPVEHSPVEPDSSSGTGKAGQQPARKRLNFGQTGDADSVPDPQPLGQPPAAPSGLGTNTMATGSGAPMADNNEGADGVGNSSGNWHCDSTWMGDRVITTSTRTWALPTYNNHLYKQISSQSGASNDNHYFGYSTPWGYFDFNRFHCHFSPRDWQRLINNNWGFRPKRLNFKLFNIQVKEVTQNDGTTTIANNLTSTVRVFTDSEYQLPYVLGSAHQGCLPPFPADVFMVPQYGYLTLNNGSQAVGRSSFYCLEYFPSQMLRTGNNFTFSYTFEDVPFHSSYAHSQSLDRLMNPLIDQYLYYLSRTNTPSGTTTQSRLQFSQAGASDIRDQSRNWLPGPCYRQQRVSKTSADNNNSEYSWTGATKYHLNGRDSLVNPGPAMASHKDDEEKFFPQSGVLIFGKQGSEKTNVDIEKVMITDEEEIRTTNPVATEQYGSVSTNLQRGNRQAATADVNTQGVLPGTVWQDRDVYLQGPIWAKIPHTDGHFHPSPLMGGFGLKHPPPQILIKNTPVPANPSTTFSAAKFASFITQYSTGQVSVEIEWELQKENSKRWNPEIQYTSNYNKSVNVDFTVDTNGVYSEPRPIGTRYLTRNL

SEQ ID NO: 11081 - protein, 735 aa, Artificial Sequence
  source: /note="Description of Artificial Sequence: Synthetic polypeptide"
MAADGYLPDWLEDTLSEGIRQWWKLKPGPPPPKPAERHKDDSRGLVLPGYKYLGPFNGLDKGEPVNEADAAALEHDKAYDRQLDSGDNPYLKYNHADAEFQERLKEDTSFGGNLGRAVFQAKKRVLEPLGLVEEPVKTAPGKKRPVEHSPVEPDSSSGTGKAGQQPARKRLNFGQTGDADSVPDPQPLGQPPAAPSGLGTNTMATGSGAPMADNNEGADGVGNSSGNWHCDSTWMGDRVITTSTRTWALPTYNNHLYKQISSQSGASNDNHYFGYSTPWGYFDFNRFHCHFSPRDWQRLINNNWGFRPKRLNFKLFNIQVKEVTQNDGTTTIANNLTSTVQVFTDSEYQLPYVLGSAHQGCLPPFPADVFMVPQYGYLTLNNGSQAVGRSSFYCLEYFPSQMLRTGNNFTFSYTFEDAPFHSSYAHSQSLDRLMNPLIDQYLYYLSRTNTPSGTTTQSRLQFSQAGASDIRDQSRNWLPGPCYRQQRVSKTSADNNNSEYSWTGATKYHLNGRDSLVNPGPAMASHKDDEEKFFPQSGVLIFGKQGSEKTNVDIEKVMITDEEEIRTTNPVATEQYGSVSTNLQRGNRQAATADVNTQGVLPGTVWQDRDVYLQGPIWAKIPHTDGHFHPSPLMGGFGLKHPPPQILIKNTPVPANPSTTFSAAKFASFITQYSTGQVSVEIEWELQKENSKRWNPEIQYTSNYNKSVNVDFTVDTNGVYSEPRPIGTRYLTRNL

SEQ ID NO: 11082 - protein, 734 aa, Artificial Sequence
  source: /note="Description of Artificial Sequence: Synthetic polypeptide"
MAADGYLPDWLEDTLSEGIRQWWKLKPGPPPKPAERHKDDSRGLVLPGYKYLGPFNGLDKGEPVNEADAAALEHDKAYDRQLDSGDNPYLKYNHADAEFQERLKEDTSFGGNLGRAVFQAKKRVLEPLGLVEEPVKTAPGKKRPVEHSPVEPDSSSGTGKAGQQPARKRLNFGQTGDADSVPDPQPLGQPPAAPSGLGTNTMATGSGAPMADNNEGADGVGNSSGNWHCDSTWMGDRVITTSTRTWALPTYNNHLYKQISSQSGASNDNHYFGYSTPWGYFDFNRFHCHFSPRDWQRLINNNWGFRPKRLNFKLFNIQVKEVTQNDGTTTIANNLTSTVQVFTDSEYQLPYVLGSAHQGCLPPFPADVFMVPQYGYLTLNNGSQAVGRSSFYCLEYFPSQMLRTGNNFTFSYTFEDVPFHSSYAHSQSLDRLMNPLIDQYLYYLSRTNTPSGTTTQSRLQFSQAGASDIRDQSRNWLPGPCYRQQRVSKTSADNNNSEYSWTGATKYHLNGRDSLVNPGPAMASHKDDEEKFFPQSGVLIFGKQGSEKTNVDIEKVMITDEEEIRTTNPVATEQYGSVSTNLQRGNRQAATADVNTQGVLPGTVWQDRDVYLQGPIWAKIPHTDGHFHPSPLMGGFGLKHPPPQILIKNTPVPANPSTTFSAAKFASFITQYSTGQVSVEIEWELQKENSKRWNPEIQYTSNYNKSVNVDFTVDTNGVYSEPRPIGTRYLTRNL

SEQ ID NO: 11083 - protein, 735 aa, Artificial Sequence
  source: /note="Description of Artificial Sequence: Synthetic polypeptide"
MAADGYLPDWLEDTLSEGIRQWWKLKPGPPPPKPAERHKDDSRGLVLPGYKYLGPFNGLDKGEPVNEADAAALEHDKAYDRQLDSGDNPYLKYNHADAEFQERLKEDTSFGGNLGRAVFQAKKRALEPLGLVEEPVKTAPGKKRPVEHSPVEPDSSSGTGKAGQQPARKRLNFGQTGDADSVPDPQPLGQPPAAPSGLGTNTMATGSGAPMADNNEGADGVGNSSGNWHCDSTWMGDRVITTSTRTWALPTYNNHLYKQISSQSGASNDNHYFGYSTPWGYFDFNRFHCHFSPRDWQRLINNNWGFRPKRLNFKLFNIQVKEVTQNDGTTTIANNLTSTVQVFTDSEYQLPYVLGSAHQGCLPPFPADVFMVPQYGYLTLNNGSQAVGRSSFYCLEYFPSQMLRTGNNFTFSYTFEDVPFHSSYAHSQSLDRLMNPLIDQYLYYLSRTNTPSGTTTQSRLRFSQAGASDIRDQSRNWLPGPCYRQQRVSKTSADNNNSEYSWTGATKYHLNGRDSLVNPGPAMASHKDDEEKFFPQSGVLIFGKQGSEKTNVDIEKVMITDEEEIRTTNPVATEQYGSVSTNLQRGNRQAATADVNTQGVLPGMVWQDRDVYLQGPIWAKIPHTDGHFHPSPLMGGFGLKHPPPQILIKNTPVPANPSTTFSAAKFASFITQYSTGQVSVEIEWELQKENSKRWNPEIQYTSNYNKSVNVDFTVDTNGVYSEPRPIGTRYLTRNL

SEQ ID NO: 11084 - protein, 735 aa, Artificial Sequence
  source: /note="Description of Artificial Sequence: Synthetic polypeptide"
MAADGYLPDWLEDTLSEGIRQWWKLKPGPPPPKPAERHKDDSRGLVLPGYKYLGPFNGLDKGEPVNEADAAALEHDKAYDRQLDSGDNPYLKYNHADAEFQERLKEDTSFGGNLGRAVFQAKKRVLEPLGLVEEPVKTAPGKKRPVEHSPVEPDSSSGTGKAGQRPARKRLNFGQTGDADSVPDPQPLGQPPAAPSGLGTNTMATGSGAPMADNNEGADGVGNSSGNWHCDSTWMGDRVITTSTRTWALPTYNNHLYKQISSQSGASNDNHYFGYSTPWGYFDFNRFHCHFSPRDWQRLINNNWGFRPKRLNFKLFNIQVKEVTQNDGTTTIANNLTSTVQVFTDSEYQLPYVLGSAHQGCLPPFPADVFMVPQYGYLTLNNGSQAVGRSSFYCLEYFPSQMLRTGNNFTFSYTFEDVPFHSSYAHSQSLDRLMNPLIDQYLYYLSRTNTPSGTTTQSRLQFSQAGASDIRDQSRNWLPGPCYRQQRVSKTSADNNNSEYSWTGATKYHLNGRDSLVNPGPAMASHKDDEEKFFPQSGVLIFGKQGSEKTNVDIEKVMITDEEEIRTTNPVATEQYGSVSTNLQRGNRQAATADVNTQGVLPGTVWQDRDVYLQGPIWAKIPHTDGHFHPSPLMGGFGLKHPPPQILIKNTPVPANPSTTFSAAKFASFITQYSTGQVSVEIEWELQKENSKRWNPEIQYTSNYNKSVNVDFTVDTNGVYSEPRPIGTRYLTRNL

SEQ ID NO: 11085 - protein, 735 aa, Artificial Sequence
  source: /note="Description of Artificial Sequence: Synthetic polypeptide"
MAADGYLPDWLEDTLSEGIRQWWKLKPGPPPPKPAERHKDDSRGLVLPGYKYLGPFNGLDKGEPVNEADAAALEHDKAYDRQLDSGDNPYLKYNHADAEFQERLKEDTSFGGNLGRAVFQAKKRVLEPLGLVEEPVKTAPGKKRPVEHSPVEPDSSSGTGKAGQQPARKRLNFGQTGDADSVPDPQPLGQPPAAPSGLGTNTMATGSGAPMADNNEGADGVGNSSGNWHCDSTWMGDRVITTSTRTWALPTYNNHLYKQISSQSGASNDNHYFGYSTPWGYFDFNRFHCHFSPRDWQRLINNNWGFRPKRLNFKLFNIQVKEVTQNDGTTTIANNLTSTVQVFTDSEYQLPYVLGSAHQGCLPPFPADVFMVPQYGYLTLNNGSQAVGRSSFYCLEYFPSQMLRTGNNFTFSYTFEDVPFHSSYAHSQSLDRLMNPLIDQYLYYLSRTNTPSGTTTQSRLQFSQAGASDIRDQSRNWLPGPCYRQQRVSKTSADNNNSEYSWTGATKYHLNGRDSLVNPGPAMASHKDDEEKFFPQSGVLIFGKQGSEKTNVDIEKVMITDEEEIRTTNPVATEQYGSVSTNLQRGNRQAATADVNTQGVLPGMVWQDRDVYLQGPIWAKIPHTDGHFHPSPLMGGFGLKHPPPQILIKNTPVPANPSTTFSAAKFASFITQYSTGQVSVEIEWELQKENSNRWNPEIQYTSNYNKSVNVDFTVDTNGVYSEPRPIGTRYLTRNL

SEQ ID NO: 11086 - protein, 735 aa, Artificial Sequence
  source: /note="Description of Artificial Sequence: Synthetic polypeptide"
MAADGYLPDWLEDTLSEGIRQWWKLKPGPPPPKPAERHKDDSRGLVLPGYKYLGPFNGLDKGEPVNEADAAALEHDKAYDRQLDSGDNPYLKYNHADAEFQERLKEDTSFGGNLGRAVFQAKKRVLEPLGLVEEPVKTAPGKKRPVEHSPVEPDSSSGTGKAGQQPARKRLNFGQTGDADSVPDPQPLGQPPAAPSGLGTNTMATGSGAPMADNNEGADGVGNSSGNWHCDSTWMGDRVITTSTRTWALPTYNNHLYKQISSQSGASNDNHYFGYSTPWGYFDFNRFHCHFSPRDWQRLINNNWGFRPKRLNFKLFNIQVKEVTQNDGTTTIANNLTSTVQVFTDSEYQLPYVLGSAHQGCLPPFPADVFMVPQYGYLTLNNGSQAVGRSSFYCLEYFPSQMLRTGNNFTFSYTFEDVPFHSSYAHSQSLDRLMNPLIDQYLYYLSRTNTPSGTTTQSRLQFSQAGASDIRDQSRNWLPGPCYRQQRVSKTSADNNNSEYSWTGATKYHLNGRDSLVNPGPAMASHKDDEEKFFPQSGVLIFGKQGSEKTNVDIEKVMITDEEEIRTTNPVATEQYGSVSTNLQRGNRQAATADVNTQGVLPGTVWQDRDVYLQGPIWAKIPHTDGHFHPSPLMGGFGLKHPPPQILIKNTPVPANPSTTFSAAKFASFITQYSTGQVGVEIEWELQKENSKRWNPEIQYTSNYNKSVNVDFTVDTNGVYSEPRPIGTRYLTRNL

SEQ ID NO: 11087 - protein, 735 aa, Artificial Sequence
  source: /note="Description of Artificial Sequence: Synthetic polypeptide"
MAADGYLPDWLEDTLSEGIRQWWKLKPGPPPPKPAERHKDDSRGLVLPGYKYLGPFNGLDKGEPVNEADAAALEHDKAYDRQLDSGDNPYLKYNHADAEFQERLKEDTSFGGNLGRAVFQAKKRVLEPLGLVEEPVKTAPGKKRPVEHSPVEPDSSSGTGKAGQQPARKRLNFGQTGDADSVPDPQPLGQPPAAPSGLGTNTMATGSGAPMADNNEGADGVGNSSGNWHCDSTWMGDRVITTSTRTWALPTYNNHLYKQISSQSGASNDNHYFGYSTPWGYFDFNRFHCHFSPRDWQRLINNNWGFRPKRLNFKLFNIQVKEVTQNDGTTTIANNLTSTVQVFTDSEYQLPYVLGSAHQGCLPPFPADVFMVPQYGYLTLNNGSQAVGRSSFYCLEYFPSQMLRTGNNFTFSYTFEDVPFHSSYAHSQSLDRLMNPLIDQYLYYLSRTNTPSGTTTQSRLQFSQAGASDIRDQSRNWLPGPCYRQQRVSKTSADNNNSEYSWTGATKYHLNGRDSLVNPGPAMASHKDDEEKFFPQSGVLIFGKQGSEKTNVDIEKVMITDEEEIRATNPVATEQCGSVSTNLQRGNRQAATADVNTQGVLPGTVWQDRDVYLQGPIWAKIPHTDGHFHPSPLMGGFGLKHPPPQILIKNTPVPANPSTTFSAAKFASFITQYSTGQVSVEIEWELQKENSKRWNPEIQYTSNYNKSVNVDFTVDTNGVYSEPRPIGTRYLTRNL

SEQ ID NO: 11088 - protein, 735 aa, Artificial Sequence
  source: /note="Description of Artificial Sequence: Synthetic polypeptide"
MAADGYLPDWLEDTLSEGIRQWWKLKPGPPPPKPAERHKDDSRGLVLPGYKYLGPFNGLDKGEPVNEADAAALEHDKAYDRQLDSGDNPYLKYNHADAEFQERLKEDTSFGGNLGRAVFQAKKRALEPLGLVEEPVKTAPGKKRPVEHSPVEPDSSSGTGKAGQQPARKRLNFGQTGDADSVPDPQPLGQPPAAPSGLGTNTMATGSGAPMADNNEGADGVGNSSGNWHCDSTWMGDRVITTSTRTWALPTYNNHLYKQISSQSGASNDNHYFGYSTPWGYFDFNRFHCHFSPRDWQRLINNNWGFRPKRLNFKLFNIQVKEVTQNDGTTTIANNLTSTVQVFTDSEYQLPYVLGSAHQGCLPPFPADVFVVPQYGYLTLNNGSQAVGRSSFYCLEYFPSQMLRTGNNFTFSYTFEDVPFHSSYAHSQSLDRLMNPLIDQYLYYLSRTNTPSGTTTQSRLQFSQAGASDIRDQSRNWLPGPCYRQQRVSKTSADNNNSEYSWTGATKYHLNGRDSLVNPGPAMASHKDDEEKFFPQSGVLIFGKQGSEKTNVDIEKVMITDEEEIRTTNPVATEQYGSVSTNLQRGNRQAATADVNTQGVLPGMVWQDRDVYLQGPIWAKIPHTDGHFHPSPLMGGFGLKHPPPQILIKNTPVPANPSTTFSAAKFASFITQYSTGQVSVEIEWELQKENSKRWNPEIQYTSNYNKSVNVDFTVDTNGVYSEPRPIGTRYLTRNL

SEQ ID NO: 11089 - protein, 735 aa, Artificial Sequence
  source: /note="Description of Artificial Sequence: Synthetic polypeptide"
MAADGYLPDWLEDTLSEGIRQWWKLKPGPPPPKPAERHKDDSRGLVLPGYKYLGPFNGLDKGEPVNEADAAALEHDKAYDRQLDSGDNPYLKYNHADAEFQERLKEDTSFGGNLGRAVFQAKKRVLEPLGLVEEPVKTAPGKKRPVEHSPVEPDSSSGTGKAGQQPARKRLNFGQTGDADSVPDPQPLGQPPAAPSGLGTNTMATGSGAPMADNNEGADGVGNSSGNWHCDSTWMGDRVITTSTRTWALPTYNNHLYKQISSQSGASNDNHYFGYSTPWGYFDFNRFHCHFSPRDWQRLINNNWGFRPKRLNFKLFNIQVKEVTQNDGTTTIANNLTSTVQVFTDSEYQLPYVLGSAHQGCLPPFPADVFMVPQYGYLTLNNGSQAVGRSSFYCLEYFPSQMLRTGNNFTFSYTFEDVPFHSSYAHSQSLDRLMNPLIDQYLYYLSRTNTPSGTTTQSRLQFSQAGASDIRDQSRNWLPGPCYRQQRVSKTSADNNNSEYSWTGATKYHLNGRDSLVNPGPAMASHKDDEEKFFPQSGVLIFGKQGSEKTNVDIEKVMITDEEEIRTTNPVATEQYGSVSTNLQRGNRQAATADVNTQGVLPGTVWQDRDVYLQGPIWAKIPHTDGHFHPSPLVGGFGLKHPPPQILIKNTPVPANPSTTFSAAKFASFITQYSTGQVSVEIEWELQKENSKRWNPEIQYTSNYNKSVNVDFTVDTNGVYSEPRPIGTRYLTRNL

SEQ ID NO: 11090 - protein, 735 aa, Artificial Sequence
  source: /note="Description of Artificial Sequence: Synthetic polypeptide"
MAADGYLPDWLEDTLSEGIRQWWKLKPGPPPPKPAERHKDDSRGLVLPGYKYLGPFNGLDKGEPVNEADAAALEHDKAYDRQLDSGDNPYLKYNHADAEFQERLKEDTSFGGNLGRAVFQAKKRVLEPLGLVEEPVKTAPGKKRPVEHSPVEPDSSSGTGKAGQQPARKRLNFGQTGDADSVPDPQPLGQPPAAPSGLGTNTMATGSGAPMADNNEGADGVGNSSGNWHCDSTWMGDRVITTSTRTWALPTYNNHLYKQISSQSGASNDNHYFGYSTPWGYFDFNRFHCHFSPRDWQRLINNNWGFRPKRLNFKLFNIQVKEVTQNDGTTTIANNLTSTVQVFTDSEYQLPYVLGSAHQGCLPPFPADVFMVPQYGYLTLNNGSQAVGRSSFYCLEYFPSQMLRTGNNFTFSYTFEDVPFHSSYAHSQSLDRLMNPLIDQYLYYLSRTNTPSGTTTQSRLQFSQAGASDIRDQSRNWLPGPCYRQQRVSKTSADNNNSEYSWTGATKYHLNGRDSLVNPGPAMASHKDDEEKFFPQSGVLIFGKQGSEKTNVDIEKVMITDEEEIRTTNPVATEQYGSVSTNLQRGNRQAATADVNTQGVLPGTVWQDRDVYLQGPIWAKIPHTDGHFHPSPLMGGFGLKHPPPQILIKNTPVPANPSTTLSAAKFASFITQYSTGQVSVEIEWELQKENSKRWNPEIQYTSNYNKSVNVDFTVDTNGVYSEPRPIGTRYLTRNL

SEQ ID NO: 11091 - protein, 735 aa, Artificial Sequence
  source: /note="Description of Artificial Sequence: Synthetic polypeptide"
MAADGYLPDWLEDTLSEGIRQWWKLKPGPPPPKPAERHKDDSRGLVLPGYKYLGPFNGLDKGEPVNEADAAALEHDKAYDRQLDSGDNPYLKYNHADAEFQERLKEDTSFGGNLGRAVFQAKKRVLEPLGLVEEPVKTAPGKKRPVEHSPVEPDSSSGTGKAGQQPARKRLNFGQTGDADSVPDPQPLGQPPAAPSGLGTNTMATGSGAPMADNNEGADGVGNSSGNWHCDSTWMGDRVITTSTRTWALPTYNNHLYKQISSQSGASNDNHYFGYSTPWGYFDFNRFHCHFSPRDWQRLINNNWGFRPKRLNFKLFNIQVKEVTQNDGTTTIANNLTSTVQVFTDSEYQLPYVLGSAHQGCLPPFPADVFMVPQYGYLTLNNGSQAVGRSSFYCLEYFPSQMLRTGNNFTFSYTFEDVPFHSSYAHSQSLDRLMNPLIDQYLYYLSRTNTPSGTTTQSRLQFSQAGASDIRDQSRNWLPGPCYRQQRVSKTSADNNNSEYSWTGATKYHLNGRDSLVNPGPAMASHKDDEEKFFPQSGVLIFGKQGSEKTNVDIEKVMITDEGEIRTTNPVATEQYGSVSTNLQRGNRQAATADVNTQGVLPGTVWQDRDVYLQGPIWAKIPHTDGHFHPSPLMGGFGLKHPPPQILIKNTPVPANPSTTFSAAKFASFITQYSTGQVSVEIEWELQKENSKRWNPEIQYTSNYNKSVNVDFTVDTNGVYSEPRPIGTRYLTRNL

SEQ ID NO: 11092 - protein, 735 aa, Artificial Sequence
  source: /note="Description of Artificial Sequence: Synthetic polypeptide"
MAADGYLPDWLEDTLSEGIRQWWKLKPGPPPPKPAERHKDDSRGLVLPGYKYLGPFNGLDKGEPVNEADAAALEHDKAYDRQLDSGDNPYLKYNHADAEFQERLKEDTSFGGNLGRAVFQAKKRALEPLGLVEEPVKTAPGKKRPVEHSPVEPDSSSGTGKAGQQPARKRLNFGQTGDADSVPDPQPLGQPPAAPSGLGTNTMATGSGAPMADNNEGADGVGNSSGNWHCDSTWMGDRVITTSTRTWALPTYNNHLYKQISSQSGASNDNHYFGYSTPWGYFDFNRFHCHFSPRDWQRLINNNWGFRPKRLNFKLFNIQVKEVTQNDGTTTIANNLTSTVQVFTDSEYQLPYVLGSAHQGCLPPFPADVFMVPQYGYLTLNNGSQAVGRSSFYCLEYFPSQMLRTGNNFTFSYTFEDVPFHSSYAHSQSLDRLMNPLIDQYLYYLSRTNTPSGTTTQSRLQFSQAGASDIRDQSRNWLPGPCYRQQRVSKTSADNNNSEYSWTGATKYHLNGRDSLVNPGPAMASHKDDEEKFFPQSGVLIFGKQGSEKTNVDIEKVMITDEEEIRTTNPVATEQYGSVSTNLQRGNRQAATADVNTQGVLPGMVWQDRDVYLQGPIWAKIPHTDGHFHPSPLMGGFGLKHPPPQILIKNTPVPANPSTTFSAAKFASFITQYSAGQVSVEIEWELQKENSKRWNPEIQYTSNYNKSVNVDFTVDTNGVYSEPRPIGTRYLTRNL

SEQ ID NO: 11093 - protein, 735 aa, Artificial Sequence
  source: /note="Description of Artificial Sequence: Synthetic polypeptide"
MAADGYLPDWLEDTLSEGIRQWWKLKPGPPPPKPAERHKDDSRGLVLPGYKYLGPFNGLDKGEPVNEADAAALEHDKAYDRQLDSGDNPYLKYNHADAEFQERLKEDTSFGGNLGRAVFQAKKRVLEPLGLVEEPVKTAPGKKRPVEHSPVEPDSSSGTGKAGQQPARKRLNFGQTGDADSVPDPQPLGQPPAAPSGLGTNTMATGSGAPMADNNEGADGVGNSSGNWHCDSTWMGDRVITTSTRTWALPTYNNHLYKQISSQSGASNDNHYFGYSTPWGYFDFNRFHCHFSPRDWQRLINNNWGFRPKRLNFKLFNIQVKEVTQNDGTTTIANNLTSTVQVFTDSEYQLPYVLGSAHQGCLPPFPADVFMVPQYGYLTLNNGSQAVGRSSFYCLEYFPSQMLRTGNNFTFSYTFEDVPFHSSYAHSQSLDRLMNPLIDQYLYYLSRTNTPSGTTTQSRLQFSQAGASDIRDQSRNWLPGPCYRQQRVSKTSADNNNSEYSWTGATEYHLNGRDSLVNPGPAMASHKDDEEKFFPQSGVLIFGKQGSEKTNVDIEKVMITDEEEIRTTNPVATEQYGSVSTNLQRGNRQAATADVNTQGVLPGTVWQDRDVYLQGPIWAKIPHTDGHFHPSPLMGGFGLKHPPPQILIKNTPVPANPSTTFSAAKFASFITQYSTGQVSVEIEWELQKENSKRWNPEIQYTSNYNKSVNVDFTVDTNGVYSEPRPIGTRYLTRNL

SEQ ID NO: 11094 - protein, 735 aa, Artificial Sequence
  source: /note="Description of Artificial Sequence: Synthetic polypeptide"
MAADGYLPDWLEDTLSEGIRQWWKLKPGPPPPKPAERHKDDSRGLVLPGYKYLGPFNGLDKGEPVNEADAAALEHGKAYDRQLDSGDNPYLKYNHADAEFQERLKEDTSFGGNLGRAVFQAKKRVLEPLGLVEEPVKTAPGKKRPVEHSPVEPDSSSGTGKAGQQPARKRLNFGQTGDADSVPDPQPLGQPPAAPSGLGTNTMATGSGAPMADNNEGADGVGNSSGNWHCDSTWMGDRVITTSTRTWALPTYNNHLYKQISSQSGASNDNHYFGYSTPWGYFDFNRFHCHFSPRDWQRLINNNWGFRPKRLNFKLFNIQVKEVTQNDGTTTIANNLTSTVQVFTDSEYQLPYVLGSAHQGCLPPFPADVFMVPQYGYLTLNNGSQAVGRSSFYCLEYFPSQMLRTGNNFTFSYTFEDVPFHSSYAHSQSLDRLMNPLIDQYLYYLSRTNTPSGTTTQSRLQFSQAGASDIRDQSRNWLPGPCYRQQRVSKTSADNNNSEYSWTGATKYHLNGRDSLVNPGPAMASHKDDEEKFFPQSGVLIFGKQGSEKTNVDIEKVMITDEEEIRTTNPVATEQYGSVSTNLQRGNRQAATADVNTQGVLPGTVWQDRDVYLQGPIWAKIPHTDGHFHPSPLMGGFGLKHPPPQILIKNTPVPANPSTTFSAAKFASFITQYSTGQVSVEIEWELQKENSKRWNPEIQYTSNYNKSVNVDFTVDTNGVYSEPRPIGTRYLTRNL

SEQ ID NO: 11095 - protein, 735 aa, Artificial Sequence
  source: /note="Description of Artificial Sequence: Synthetic polypeptide"
MAADGYLPDWLEDTLSEGIRQWWKLKPGPPPPKPAERHKDDSRGLVLPGYKYLGPFNGLDKGEPVNEADAAALEHDKAYDRQLDSGDNPYLKYNHADAEFQERLKEDTSFGGNLGRAVFQAKKRALEPLGLVEEPVKTAPGKKRPVEHSPVEPDSSSGTGKAGQQPARKRLNFGQTGDADSVPDPQPLGQPPAAPSGLGTNTMATGSGAPMADNNEGADGVGNSSGNWHCDSTWMGDRVITTSTRTWALPTYNNHLYKQISSQSGASNDNHYFGYSTPWGYFDFNRFHCHFSPRDWQRLINNNWGFRPKRLNFKLFNIQVKEVTQNDGTTTIANNLTSTVQVFTDSEYQLPYVLGSAHQGCLPPFPADVFMVPQYGYLTLNNGSQAVGRSSFYCLEYFPSQMLRTGNNFTFSYTFEDVPFHSSYAHSQSLDRLMNPLVDQYLYYLSRTNTPSGTTTQSRLQFSQAGASDIRDQSRNWLPGPCYRQQRVSKTSADNNNSEYSWTGATKYHLNGRDSLVNPGPAMASHKDDEEKFFPQSGVLIFGKQGSEKTNVDIEKVMITDEEEIRTTNPVATEQYGSVSTNLQRGNRQAATADVNTQGVLPGMVWQDRDVYLQGPIWAKIPHTDGHFHPSPLMGGFGLKRPPPQILIKNTPVPANPSTTFSAAKFASFITQYSTGQVSVEIEWELQKENSKRWNPEIQYTSNYNKSVNVDFTVDTNGVYSEPRPIGTRYLTRNL

SEQ ID NO: 11096 - protein, 735 aa, Artificial Sequence
  source: /note="Description of Artificial Sequence: Synthetic polypeptide"
MAADGYLPDWLEDTLSEGIRQWWKLKPGPPPPKPAERHKDDSRGLVLPGYKYLGPFNGLDKGEPVNEADAAALEHDKAYDRQLDSGDNPYLKYNHADAEFQERLKEDTSFGGNLGRAVFQAKKRVLEPLGLVEEPVKTAPGKKRPVEHSPVEPDSSSGTGKAGQQPARKRLNFGQTGDADSVPDPQPLGQPPAAPSGLGTNTMATGSGAPMADNNEGADGVGNSSGNWHCDSTWMGDRVITTSTRTWALPTYNNHLYKQISSQSGASNDNHYFGYSTPWGYFDFNRFHCHFSPRDWQRLINNNWGFRPKRLNFKLFNIQVKEVTQNDGTTTIANNLTSTVQVFTDSEYQLPYVLGSAHQGCLPPFPADVFMVPQYGYLTLNNGSQAVGRSSFYCLEYFPSQMLRTGNNFTFSYTFEDVPFHSSYAHSQSLDRLMNPLIDQYLYYLSRTNTPSGTTTQSRLQFSQAGASDIRDQSRNWLPGPCYRQQRVSKTSADNNNSEYSWTGATKYHLNGRDSLVNPGPAMASHKDDEEKFFPQSGVLIFGKQGSEKTNVDIEKVMITDEEEIRTTNPVATEQYGSVSTNLQRGNRQAATADVNTQGVLPGTVWQDRDVYLQGPIWAKIPHTDGHFHPSPLMGGFGLKHPPPQILIKNTPVPANPSTTFSAAKFASFITQHSTGQVSVEIEWELQKENSKRWNPEIQYTSNYNKSVNVDFTVDTNGVYSEPRPIGTRYLTRNL

SEQ ID NO: 11097 - protein, 735 aa, Artificial Sequence
  source: /note="Description of Artificial Sequence: Synthetic polypeptide"
MAADGYLPDWLEDTLSEGIRQWWKLKPGPPPPKPAERHKDDSRGLVLPGYKYLGPFNGLDKGEPVNEADAAALEHDKAYDRQLDSGDDPYLKYNHADAEFQERLKEDTSFGGNLARAVFQAKKRVLEPLGLVEEPVKTAPGKKRPVEHSPAEPDSSSGTGKAGQQPARKRLNFGQTGDADSVPDPQPLGQPPAAPSGLGTNTMATGSGAPMADNNEGADGVGNSSGNWHCDSTWMGDRVITTSTRTWALPTYNNHLYKQISSQSGASNDNHYFGYSTPWGYFDFNRFHCHFSPRDWQRLINNNWGFRPKRLSFKLFNIQVKEVTQNDGTTTIANNLTSTVQVFTDSEYQLPYVLGSAHQGCLPPFPADVFMVPQYGYLTLNNGSQAVGRSSFYCLEYFPSQMLRTGNNFTFSYTFEDVPFHSSYAHSQSLDRLMNPLIDQYLYYLSKTNAPSGTTTMSRLQFSQAGASDIRDQSRNWLPGPCYRQQRVSKTAADNNNSDYSWTGATKYHLNGRDSLVNPGPAMASHKDDEEKYFPQSGVLIFGKQGSNKTNVDIEKVMITDEEEIRTTNPVATEQYGSVSTNLQSGNTQAATSDVNTQGVLPGMVWQDRDVYLQGPIWAKIPHTDGHFHPSPLMGGFGLKHPPPQILIKNTPVPANPSTTFSAAKFASFITQYSTGQVSVEIEWELQKENSKRWNPEIQYTSNYNKSVNVDFTVDTNGVYSEPRPIGTRYLTRNL

SEQ ID NO: 11098 - protein, 735 aa, Artificial Sequence
  source: /note="Description of Artificial Sequence: Synthetic polypeptide"
MAADGYLPDWLEDTLSEGIRQWWKLKPGPPPPKPAERHKDDSRGLVLPGYKYLGPFNGLDKGEPVNEADAAALEHDKAYDRQLDSGDNPYLKYNHADAEFQERLKEDTSFGGNLGRAVFQAKKRVLEPLGLVEEPVKTAPGKKRPVEHSPVEPDSSSGTGKAGQQPARKRLNFGQTGDADSVPDPQPLGQPPAAPSGLGTNTMATGSGAPMADNNEGADGVGNSSGNWHCDSTWMGDRVITTSTRTWALPTYNNHLYKQISSQSGASNDNHYFGYSTPWGYFDFNRFHCHFSPRDWQRLINNNWGFRPKRLNFKLFNIQVKEVTQNDGTTTIANNLTSTVQVFTDSEYQLPYVLGSAHQGCLPPFPADVFMVPQYGYLTLNNGSQAVGRSSFYCLEYFPSQMLRTGNNFTFSYTFEDVPFHSSYAHSQSLDRLMNPLIDQYLYYLSRTNTPSGTTTQPRLQFSQAGASDIRDQSRNWLPGPCYRQQRVSKTSADNNNSEYSWTGATKYHLNGRDSLVNPGPAMASHKDDEEKFFPQSGVLIFGKQGSEKTNVDIEKVMITDEEEIRTTNPVATEQYGSVSTNLQRGNRQAATADVNTQGVLPGTVWQDRDVYLQGPIWAKIPHTDGHFHPSPLMGGFGLKHPPPQILIKNTPVPANPSTTFSAAKFASFITQYSTGQVSVEIEWELQKENSKRWNPEIQYTSNYNKSVNVDFTVDTNGVYSEPRPIGTRYLTRNL

SEQ ID NO: 11099 - protein, 735 aa, Artificial Sequence
  source: /note="Description of Artificial Sequence: Synthetic polypeptide"
MAADGYLPDWLEDTLSEGIRQWWKLKPGPPPPKPAERHKDDSRGLVLPGYKYLGPFNGLDKGEPVNEADAAALEHDKAYDRQLDSGDNPYLKYNHADAEFQERLKEDTSFGGNLGRAVFQAKKRVLEPLGLVEEPVKTAPGKKRPVEHSPVEPDSSSGTGKAGQQPARKRLNFGQTGDADSVPDPQPLGQPPAAPSGLGTNTMATGSGAPMADNNEGADGVGNSSGNWHCDSTWMGDRVITTSTRTWALPTYNNHLYKQISSQSGASNDNHYFGYSTPWGYFDFNRFHCHFSPRDWQRLINNNWGFRPKRLNFKLFNIQVKEVTQNDGTTTIANNLTSTVQVFTDSEYQLPYVLGSAHQGCLPPFPADVFMVPQYGYLTLNNGSQAVGRSSFYCLEYFPSQMLRTGNNFTFSYTFEDVPFHSSYAHSQSLDRLMNPLIDQYLYYLSRTNTPSGTTTQSRLQFSQAGASDIRDQSRNWLPGPCYRQQRVSKTSADNNNSEYLWTGATKYHLNGRDSLVNPGPAMASHKDDEEKFFPQSGVLIFGKQGSEKTNVDIEKVMITDEEEIRTTNPVATEQYGSVSTNLQRGNRQAATADVNTQGVLPGTVWQDRDVYLQGPIWAKIPHTDGHFHPSPLMGGFGLKHPPPQILIKNTPVPANPSTTFSAAKFASFITQYSTGQVSVEIEWELQKENSKRWNPEIQYTSNYNKSVNVDFTVDTNGVYSEPRPIGTRYLTRNL

SEQ ID NO: 11100 - protein, 735 aa, Artificial Sequence
  source: /note="Description of Artificial Sequence: Synthetic polypeptide"
MAADGYLPDWLEDTLSEGIRQWWKLKPGPPPPKPAERHKDDSRGLVLPGYKYLGPFNGLDKGEPVNEADAAALEHDKAYDRQLDSGDNPYLKYNHADAEFQERLKEDTSFGGNLGRAVFQAKKRVLEPLGLVEEPVKTAPGKKRPVEHSPVEPDSSSGTGKAGQQPARKRLNFGQTGDADSVPDPQPLGQPPAAPSGLGTNTMATGSGAPMADNNEGADGVGNSSGNWHCDSTWMGDRVITTSTRTWALPTYNNHLYKQISSQSGASNDNHYFGYSTPWGYFDFNRFHCHFSPRDWQRLINNNWGFRPKRLNFKPFNIQVKEVTQNDGTTTIANNLTSTVQVFTDSEYQLPYVLGSAHQGCLPPFPADVFMVPQYGYLTLNNGSQAVGRSSFYCLEYFPSQMLRTGNNFTFSYTFEDVPFHSSYAHSQSLDRLMNPLIDQYLYYLSRTNTPSGTTTQSRLQFSQAGASDIRDQSRNWLPGPCYRQQRVSKTSADNNNSEYSWTGATKYHLNGRDSLVNPGPAMASHKDDEEKFFPQSGVLIFGKQGSEKTNVDIEKVMITDEEEIRTTNPVATEQYGSVSTNLQRGNRQAATADVNTQGVLPGTVWQDRDVYLQGPIWAKIPHTDGHFHPSPLMGGFGLKHPPPQILIKNTPVPANPSTTFSAAKFASFITQYSTGQVSVEIEWELQKENSKRWNPEIQYTSNYNKSVNVDFTVDTNGVYSEPRPIGTRYLTRNL

SEQ ID NO: 11101 - protein, 735 aa, Artificial Sequence
  source: /note="Description of Artificial Sequence: Synthetic polypeptide"
MAADGYLPDWLEDTLSEGIRQWWKLKPGPPPPKPAERHKDDSRGLVLPGYKYLGPFNGLDKGEPVNEADAAALEHDKAYDRQLDSGDNPYLKYNHADAEFQERLKEDTSFGGNLGRAVFQAKKRVLEPLGLVEEPVKTAPGKKRPVEHSPVEPDSSSGTGKAGQQPARKRLNFGQTGDADSVPDPQPLGQPPAAPSGLGTNTMATGSGAPMADNNEGADGVGNSSGNWHCDSTWMGDRVITTSTRTWALPTYNNHLYKQISSQSGASNDNHYFGYSTPWGYFDFNRFHCHFSPRDWQRLINNNWGFRPKRLNFKLFNIQVKEVTQNDGTTTIANNLTSTVQVFTDSEYQLPYVLGSAHQGCLPPFPADVFMVPQYGYLTLNNGSQAVGRSSFYCLEYFPSQMLRTGNNFTFSYTFEDVPFHSSYAHSQSLDRLMNPLIDQYPYYLSRTNTPSGTTTQSRLQFSQAGASDIRDQSRNWLPGPCYRQQRVSKTSADNNNSEYSWTGATKYHLNGRDSLVNPGPAMASHKDDEEKFFPQSGVLIFGKQGSEKTNVDIEKVMITDEEEIRTTNPVATEQYGSVSTNLQRGNRQAATADVNTQGVLPGTVWQDRDVYLQGPIWAKIPHTDGHFHPSPLMGGFGLKHPPPQILIKNTPVPANPSTTFSAAKFASFITQYSTGQVSVEIEWELQKENSKRWNPEIQYTSNYNKSVNVDFTVDTNGVYSEPRPIGTRYLTRNL

SEQ ID NO: 11102 - protein, 735 aa, Artificial Sequence
  source: /note="Description of Artificial Sequence: Synthetic polypeptide"
MAADGYLPDWLEDTLSEGIRQWWKLKPGPPPPKPAERHKDDSRGLVLPGYKYLGPFNGLDKGEPVNEADAAALEHDKAYDRQLDSGDNPYLKYNHADAEFQERLKEDTSFGGNLGRAVFQAKKRALEPLGLVEEPVKTAPGKKRPVEHSPVEPDSSSGTGKAGQQPARKRLNFGQTGDADSVPDPQPLGQPPAAPSGLGTNTMATGSGAPMADNNEGADGVGNSSGNWHCDSTWMGDRVITTSTRTWALPTYNNHLYKQISSQSGASNDNHYFGYSTPWGYFDFNRFHCHFSPRDWQRLINNNWGFRPKRLNFKLFNIQVKEVTQNDGTTTIANNLTSTVQVFTDSEYQLPYVLGSAHQGCLPPFPADVFMVPQYGYLTLNNGSQAVGRSSFYCLEYFPSQMLRTGNNFTFSYTFEDVPFHSSYAHSQSLDRLMNPLIDQYLYYLSRTNTPSGTTTQSRLQFSQAGASDIRDQSRNWLPGPCYRQQRVSKTSADNNNSEYSWTGATKYHLNGRDSLVNPGPAMASHKDDEEKFFPQSGVLIFGKQGSEKTNVDIEKVMITDEEEIRTTNPVATEQYGSVSTNLQRGNRQAATADVNTQGVLPGTVWQDRDVYLQGPIWAKIPHTDGHFHPSPLMGGFGLKHPPPQILIKNTPVPANPSTTFSAAKFASFITQYSTGQVSVEIEWELQKENSKRWNPEIQYTSNYNKSVNVDFTVDTNGVYSEPRPIGTRYLTRNL

SEQ ID NO: 11103 - protein, 735 aa, Artificial Sequence
  source: /note="Description of Artificial Sequence: Synthetic polypeptide"
MAADGYLPDWLEDTLSEGIRQWWKLKPGPPPPKPAERHKDDSRGLVLPGYKYLGPFNGLDKGEPVNEADAAALEHDKAYDRQLDSGDNPYLKYNHADAEFQERLKEDTSFGGNLGRAVFQAKKRVLEPLGLVGEPVKTAPGKKRPVEHSPVEPDSSSGTGKAGQQPARKRLNFGQTGDADSVPDPQPLGQPPAAPSGLGTNTMATGSGAPMADNNEGADGVGNSSGNWHCDSTWMGDRVITTSTRTWALPTYNNHLYKQISSQSGASNDNHYFGYSTPWGYFDFNRFHCHFSPRDWQRLINNNWGFRPKRLNFKLFNIQVKEVTQNDGTTTIANNLTSTVQVFTDSEYQLPYVLGSAHQGCLPPFPADVFMVPQYGYLTLNNGSQAVGRSSFYCLEYFPSQMLRTGNNFTFSYTFEDVPFHSSYAHSQSLDRLMNPLIDQYLYYLSRTNTPSGTTTQSRLQFSQAGASDIRDQSRNWLPGPCYRQQRVSKTSADNNNSEYSWTGATKYHLNGRDSLVNPGPAMASHKDDEEKFFPQSGVLIFGKQGSEKTNVDIEKVMITDEEEIRTTNPVATEQYGSVSTNLQRGNRQAATADVNTQGVLPGMVWQDRDVYLQGPIWAKIPHTDGHFHPSPLMGGFGLKHPPPQILIKNTPVPANPSTTFSAAKFASFITQYSTGQVSVEIEWELQKENSKRWNPEIQYTSNYNKSVNVDFTVDTNGVYSEPRPIGTRYLTRNL

SEQ ID NO: 11104 - protein, 735 aa, Artificial Sequence
  source: /note="Description of Artificial Sequence: Synthetic polypeptide"
MAADGYLPDWLEDTLSEGIRQWWKLKPGPPPPKPAERHKDDSRGLVLPGYKYLGPFNGLDKGEPVNEADAAALEHDKAYDRQPDSGDNPYLKYNHADAEFQERLKEDTSFGGNLGRAVFQAKKRVLEPLGLVEEPVKTAPGKKRPVEHSPVEPDSSSGTGKAGQQPARKRLNFGQTGDADSVPDPQPLGQPPAAPSGLGTNTMATGSGAPMADNNEGADGVGNSSGNWHCDSTWMGDRVITTSTRTWALPTYNNHLYKQISSQSGASNDNHYFGYSTPWGYFDFNRFHCHFSPRDWQRLINNNWGFRPKRLNFKLFNIQVKEVTQNDGTTTIANNLTSTVQVFTDSEYQLPYVLGSAHQGCLPPFPADVFMVPQYGYLTLNNGSQAVGRSSFYCLEYFPSQMLRTGNNFTFSYTFEDVPFHSSYAHSQSLDRLMNPLIDQYLYYLSRTNTPSGTTTQSRLQFSQAGASDIRDQSRNWLPGPCYRQQRVSKTSADNNNSEYSWTGATKYHLNGRDSLVNPGPAMASHKDDEEKFFPQSGVLIFGKQGSEKTNVDIEKVMITDEEEIRTTNPVATEQYGSVSTNLQRGNRQAATADVNTQGVLPGTVWQDRDVYLQGPIWAKIPHTDGHFHPSPLMGGFGLKHPPPQILIKNTPVPANPSTTFSAAKFASFITQYSTGQVSVEIEWELQKENSKRWNPEIQYTSNYNKSVNVDFTVDTNGVYSEPRPIGTRYLTRNL

SEQ ID NO: 11105 - protein, 735 aa, Artificial Sequence
  source: /note="Description of Artificial Sequence: Synthetic polypeptide"
MAADGYLPDWLEDTLSEGIRQWWKLKPGPPPPKPAERHKDDSRGLVLPGYKYLGPFNGLDKGEPVNEADAAALEHDKAYDRQLDSGDNPYLKYNHADAEFQERLKEDTSFGGNLGRAVFQAKKRVLEPLGLVEEPVKTAPGKKRPVEHSPVEPDSSSGTGKAGQQPARKRLNFGQTGDADSVPDPQPLGQPPAAPSGLGTNTMATGSGAPMADNNEGADGVGNSSGNWHCDSTWMGDRVITTSTRTWALPTYNNHLYKQISSQSGASNDNHYFGYSTPWGYFDFNRFHCHFSPRDWQRLINNNWGFRPKRLNFKLFNIQVKEVTQNDGTTTIANNLTSTVQVFTDSEYQLPYVLGSAHQGCLPPFPADVFMVPQYGYLTLNNGSQAVGRSSFYCLEYFPSQMLRTGNNFTFSYTFEDVPFHSSYAHSQSLDRLMNPLIDQYLYYLSRTNTPSGTTTQSRLQFSQAGASDIRDQSRNWLPGPCYRQQRVSKTSADNNNSEYSWTGATKYHLNGRDSLVNPGPAMASHKDDEEKFFPQSGVLIFGKQGSEKTNVDIEKVMITDEEEIRTTNPVATEQYGSVSTNLQRGNRQAATADVNTQGVLPGMVWQDRDVYLQGPIWAKIPHTDGHFHPSPLMGGFGLKHPPPQILIKNTPVPANPSTTFSAAKFASSITQYSTGQVSVEIEWELQKENSKRWNPEIQYTSNYNKSVNVDFTVDTNGVYSEPRPIGTRYLTRNL

SEQ ID NO: 11106 - protein, 735 aa, Artificial Sequence
  source: /note="Description of Artificial Sequence: Synthetic polypeptide"
MAADGYLPDWLEDTLSEGIRQWWKLKPGPPPPKPAERHKDDSRGLVLPGYKYLGPFNGLDKGEPVNEADAAALEHDKAYDRQLDSGDNPYLKYNHADAEFQERLKEDTSFGGNLGRAVFQAKKRVLEPLGLVEEPVKTAPGKKRPVEHSPVEPDSSSGTGKAGQQPARKRLNFGQTGDADSVPDPQPLGQPPAAPSGLGTNTMATGSGAPMADNNEGADGVGNSSGNWHCDSTWMGDRVITTSTRTWALPTYNNHLYKQISSQSGASNDNHYFGYSTPWGYFDLNRFHCHFSPRDWQRLINNNWGFRPKRLNFKLFNIQVKEVTQNDGTTTIANNLTSTVQVFTDSEYQLPYVLGSAHQGCLPPFPADVFMVPQYGYLTLNNGSQAVGRSSFYCLEYFPSQMLRTGNNFTFSYTFEDVPFHSSYAHSQSLDRLMNPLIDQYLYYLSRTNTPSGTTTQSRLQFSQAGASDIRDQSRNWLPGPCYRQQRVSKTSADNNNSEYSWTGATKYHLNGRDSLVNPGPAMASHKDDEEKFFPQSGVLIFGKQGSEKTNVDIEKVMITDEEEIRTTNPVATEQYGSVSTNLQRGNRQAATADVNTQGVLPGTVWQDRDVYLQGPIWAKIPHTDGHFHPSPLMGGFGLKHPPPQILIKNTPVPANPSTTFSAAKFASFITQYSTGQVSVEIEWELQKENSKRWNPEIQYTSNYNKSVNVDFTVDTNGVYSEPRPIGTRYLTRNL

SEQ ID NO: 11107 - protein, 735 aa, Artificial Sequence
  source: /note="Description of Artificial Sequence: Synthetic polypeptide"
MAADGYLPDWLEDTLSEGIRQWWKLKPGPPPPKPAERHKDDSRGLVLPGYKYLGPFNGLDKGEPVNEADAAALEHDKAYDRQLDSGDNPYLKYNHADAEFQERLKEDTSFGGNLGRAVFQAKKRVLEPLGLVEEPVKTAPGKKRPVEHSPVEPDSSSGTGKAGQQPARKRLNFGQTGDADSVPDPQPLGQPPAAPSGLGTNTMATGSGAPMADNNEGADGVGNSSGNWHCDSTWMGDRVITTSTRTWALPTYNNHLYKQISSQSGASNDNRYFGYSTPWGYFDFNRFHCHFSPRDWQRLINNNWGFRPKRLNFKLFNIQVKEVTQNDGTTTIANNLTSTVQVFTDSEYQLPYVLGSAHQGCLPPFPADVFMVPQYGYLTLNNGSQAVGRSSFYCLEYFPSQMLRTGNNFTFSYTFEDVPFHSSYAHSQSLDRLMNPLIDQYLYYLSRTNTPSGTTTQSRLQFSQAGASDIRDQSRNWLPGPCYRQQRVSKTSADNNNSEYSWTGATKYHLNGRDSLVNPGPAMASHKDDEEKFFPQSGVLIFGKQGSEKTNVDIEKVMITDEEEIRTTNPVATEQYGSVSTNLQRGNRQAATADVNTQGVLPGTVWQDRDVYLQGPIWAKIPHTDGHFHPSPLMGGFGLKHPPPQILIKNTPVPANPSTTFSAAKFASFITQYSTGQVSVEIEWELQKENSKRWNPEIQYTSNYNKSVNVDFTVDTNGVYSEPRPIGTRYLTRNL

SEQ ID NO: 11108 - protein, 735 aa, Artificial Sequence
  source: /note="Description of Artificial Sequence: Synthetic polypeptide"
MAADGYLPDWLEDTLSEGIRQWWKLKPGPPPPKPAERHKDDSRGLVLPGYKYLGPFNGLDKGEPVNEADAAALEHDKAYDRQLDSGDNPYLKYNHADAEFQERLKEDTSFGGNLGRAVFQAKKRVLEPLGLVEEPVKTAPGKKRPVEHSPVEPDSSSGTGKAGQQPARKRLNFGQTGDADSVPDPQPLGQPPAAPSGLGTNTMATGSGAPMADNNEGADGVGNSSGNWHCDSTWMGDRVITTSTRTWALPTYNNHLYKQISSQSGASNDNHYFGYSTPWGYFDFNRFHCHFSPRDWQRLINNNWGFRPKRLNFKLFNIQVKEVTQNDGTTTIANNLTSTVQVFTDSEYQLPYVLGSAHQGCLPPFPADVFMVPQYGYLTLNNGSQAVGRSSFYCLEYFPSQMLRTGNNFTFSYTFEDVPFHSSYAHSQSLDRLMNPLIDQYLYYLSRTNTPSGTTTQSRLQFSQAGASDIRDQSRNWLPGPCYRQQRVSKTSADNNNSEYSWTGATKYHLNGRDSLVNPGPAMASHKDDEEKFFPQSGVLIFGKQGSEKTNVDIEKVMITDEEEIRTTNPVATEQYGSVSTNLQRGNRQAATADVNTQGVLPGTVWQDRDVYLQGPIWAKIPHTDGHFHPSPLMGGFGLKHPPPQILIKNTPVPANPSTTFSAAKFASFITQYSTGQVSVEIEWELQKENSKRWNPEIQYTSNYNKSANVDFTVDTNGVYSEPRPIGTRYLTRNL

SEQ ID NO: 11109 - protein, 735 aa, Artificial Sequence
  source: /note="Description of Artificial Sequence: Synthetic polypeptide"
MAADGYLPDWLEDTLSEGIRQWWKLKPGPPPPKPAERHKDDSRGLVLPGYKYLGPFNGLDKGEPVNEADAAALEHDKAYDRQLDSGDNPYLKYNHADAEFQERLKEDTSFGGNLGRAVFQAKKRVLEPLGLVEEPVKTAPGKKRPVEHSPVEPDSSSGTGKAGQQPARKRLNFGQTGDADSVPDPQPLGQPPAAPSGLGTNTMATGSGAPMAGNNEGADGVGNSSGNWHCDSTWMGDRVITTSTRTWALPTYNNHLYKQISSQSGASNDNHYFGYSTPWGYFDFNRFHCHFSPRDWQRLINNNWGFRPKRLNFKLFNIQVKEVTQNDGTTTIANNLTSTVQVFTDSEYQLPYVLGSAHQGCLPPFPADVFMVPQYGYLTLNNGSQAVGRSSFYCLEYFPSQMLRTGNNFTFSYTFEDVPFHSSYAHSQSLDRLMNPLIDQYLYYLSRTNTPSGTTTQSRLQFSQAGASDIRDQSRNWLPGPCYRQQRVSKTSADNNNSEYSWTGATKYHLNGRDSLVNPGPAMASHKDDEEKFFPQSGVLIFGKQGSEKTNVDIEKVMITDEEEIRTTNPVATEQYGSVSTNLQRGNRQAATADVNTQGVLPGTVWQDRDVYLQGPIWAKIPHTDGHFHPSPLMGGFGLKHPPPQILIKNTPVPANPSTTFSAAKFASFITQYSTGQVSVEIEWELQKENSKRWNPEIQYTSNYNKSVNVDFTVDTNGVYSEPRPIGTRYLTRNL

SEQ ID NO: 11110 - protein, 735 aa, Artificial Sequence
  source: /note="Description of Artificial Sequence: Synthetic polypeptide"
MAADGYLPDWLEDTLSEGIRQWWKLKPGPPPPKPAERHKDDSRGLVLPGYKYLGPFNGLDKGEPVNEADAAALEHDKAYNRQLDSGDNPYLKYNHADAEFQERLKEDTSFGGNLGRAVFQAKKRVLEPLGLVEEPVKTAPGKKRPVEHSPVEPDSSSGTGKAGQQPARKRLNFGQTGDADSVPDPQPLGQPPAAPSGLGTNTMATGSGAPMADNNEGADGVGNSSGNWHCDSTWMGDRVITTSTRTWALPTYNNHLYKQISSQSGASNDNHYFGYSTPWGYFDFNRFHCHFSPRDWQRLINNNWGFRPKRLNFKLFNIQVKEVTQNDGTTTIANNLTSTVQVFTDSEYQLPYVLGSAHQGCLPPLPADVFMVPQYGYLTLNNGSQAVGRSSFYCLEYFPSQMLRTGNNFTFSYTFEDVPFHSSYAHSQSLDRLMNPLIDQYLYYLSRTNTPSGTTTQSRLQFSQAGASDIRDQSRNWLPGPCYRQQRVSKTSADNNNSEYSWTGATKYHLNGRDSLVNPGPAMASHKDDEEKFFPQSGVLIFGKQGSEKTNVDIEKVMITDEEEIRTTNPVATEQYGSVSTNLQRGNRQAATADVNTQGVLPGMVWQDRDVYLQGPIWAKIPHTDGHFHPSPLMGGFGLKHPPPQILIKNTPVPANPSTTFSAAKFASFITQYSTGQVSVEIEWELQKENSKRWNPEIQYTSNYNKSVNVDFTVDTNGVYSEPRPIGTRYLTRNL

SEQ ID NO: 11111 - protein, 735 aa, Artificial Sequence
  source: /note="Description of Artificial Sequence: Synthetic polypeptide"
MAADGYLPDWLEDTLSEGIRQWWKLKPGPPPPKPAERHKDDSRGLVLPGYKYLGPFNGLDKGEPVNEADAAALEHDKAYDRQLDSGDNPYLKYNHADAEFQERLKEDTSFGGNLARAVFQAKKRVLEPLGLVEEPVKTAPGKKRPVEHSPAEPDSSSGTGKAGQQPARKRLNFGQTGDADSVPDPQPLGQPPAAPSGLGTNTMATGSGAPMADNNEGADGVGNSSGNWHCDSTWMGDRVITTSTRTWALPTYNNHLYKQISSQSGASNDNHYFGYSTPWGYFDFNRFHCHFSPRDWQRLINNNWGFRPKRLSFKLFNIQVKEVTQNDGATTIANNLTSTVQVFTDSEYQLPYVLGSAHQGCLPPFPADVFMVPQYGYLTLNNGSQAVGRSSFYCLEYFPSQMLRTGNNFTFSYTFEDVPFHSSYAHSQSLDRLMNPLIDQYLYYLSKTNAPSGTTTMSRLQFSQAGASDIRDQSRNWLPGPCYRQQRVSKTAADNNNSDYSWTGATKYHLNGRDSLVNPGPAMASHKDDEEKYFPQSGVLIFGKQGSNKTNVDIEKVMITDEEEIRTTNPVATEQYGSVSTNLQSGNTQAATSDVNTQGVLPGMVWQDRDVYLQGPIWAKIPHTDGHFHPSPLMGGFGLKHPPPQILIKNTPVPANPSTTFSAAKFASFITQYSTGQVSVEIEWELQKENSKRWNPEIQYTSNYNKSVNVDFTVDTNGVYSEPRPIGTRYLTRNL

SEQ ID NO: 11112 - protein, 734 aa, Artificial Sequence
  source: /note="Description of Artificial Sequence: Synthetic polypeptide"
MAADGYLPDWLEDTLSEGIRQWWKLKPGPPPKPAERHKDDSRGLVLPGYKYLGPFNGLDKGEPVNEADAAALEHDKAYDRQLDSGDNPYLKYNHADAEFQERLKEDTSFGGNLGRAVFQAKKRALEPLGLVEEPVKTAPGKKRPVEHSPVEPDSSSGTGKAGQQPARKRLNFGQTGDADSVPDPQPLGQPPAAPSGLGTNTMATGSGAPMADNNEGADGVGNSSGNWHCDSTWMGDRVITTSTRTWALPTYNNHLYKQISSQSGASNDNHYFGYSTPWGYFDFNRFHCHFSPRDWQRLINNNWGFRPKRLNFKLFNIQVKEVTQNDGTTTIANNLTSTVQVFTDSEYQLPYVLGSAHQGCLPPFPADVFMVPQYGYLTLNNGSQAVGRSSFYCLEYFPSQMLRTGNNFTFSYTFEDVPFHSSYAHSQSLDRLMNPLIDQYLYYLSRTNTPSGTTTQSRLQFSQAGASDIRDQSRNWLPGPCYRQQRVSKTSADNNNSEYSWTGATKYHLNGRDSLVNPGPAMASHKDDEEKFFPQSGVLIFGKQGSEKTNVDIEKVMITDEEEIRTTNPVATEQYGSVSTNLQRGNRQAATADVNTQGVLPGMVWQDRDVYLQGPIWAKIPHTDGHFHPSPLMGGFGLKHPPPQILIKNTPVPANPSTTFSAAKFASFITQYSTGQVSVEIEWELQKENSKRWNPEIQYTSNYNKSVNVDFTVDTNGVYSEPRPIGTRYLTRNL

SEQ ID NO: 11113 - protein, 735 aa, Artificial Sequence
  source: /note="Description of Artificial Sequence: Synthetic polypeptide"
MAADGYLPDWLEDTLSEGIRQWWKLKPGPPPPKPAERHKDDSRGLVLPGYKYLGPFNGLDKGEPVNEADAAALEHDKAYDRQLDSGDNPYLKYNHADAEFQERLKEDTSFGGNLARAVFQAKKRVLEPLGLVEEPVKTAPGKKRPVEHSPAEPDSSSGTGKAGQQPARKRLNFGQTGDADSVPDPQPLGQPPAAPSGLGTNTMATGSGAPMADNNEGADGVGNSSGNWHCDSTWMGDRVITTSTRTWALPTYNNHLYKQISSQSGASNDNHYFGYSTPWGYFDFNRFHCHFSPRDWQRLINNNWGFRPKRLSFKLFNIQVKEVTQNDGTTTIANNLTSTVQVFTDSEYQLPYVLGSAHQGCLPPFPADVFMVPQYGYLTLNNGSQAVGRSSFYCLEYFPSQMLRTGNNFTFSYTFEDVPFHSSYAHSQSLDRLMNPLIDQYLYYLSKTNAPSGTTTMSRLQFSQAGASDIRDQSRNWLPGPCYRQQRVSKTAADNNNSDYSWTGATKYHLNGRDSLVNPGPAMASHKDDEEKYFPQSGVLIFGKQGSNKTNVDIEKVMITDEEEIRTTNPVATEQYGSVSTNLQSGNTQAATSDVNTQGVLPGMVWQDRDVYLQGPIWAKIPHTDGHFHPSPLMGGFGLKHPPPQILIKNTPVPANPSTTFSAAKFASFITQYSTGQVSVEIEWELQKENGKRWNPEIQYTSNYNKSVNVDFTVDTNGVYSEPRPIGTRYLTRNL

SEQ ID NO: 11114 - protein, 735 aa, Artificial Sequence
  source: /note="Description of Artificial Sequence: Synthetic polypeptide"
MAADGYLPDWLEDTLSEGIRQWWKLKPGPPPPKPAERHKDDSRGLVLPGYKYLGPFNGLDKGEPVNEADAAALEHDKAYDRQLDSGDNPYLKYNHADAEFQERLKEDTSFGGNLGRAVFQAKKRVLEPLGLVEEPVKTAPGKKRPVEHSPVEPDSSSGTGKAGQQPARKRLNFGQTGDADSVPDPQPLGQPPAAPSGLGTNTMATGSGAPMADNNEGADGVGNSSGNWHCDSTWMGDRVITTSTRTWALPTYNNHLYKQISSQSGASNDNHYFGYSTPWGYFDFNRFHCHFSPRDWQRLINNNWGFRPKRLNFKLFNIQVKEVTQNDGTTTIANNLTSTVQVFTDSEYQLPYVLGSAHQGCLPPFPADVFMVPQYGYLTLNNGSQAVGRSSFYCLEYFPSQMLRTGNNFTFSYTFEDVPFHSSYAHSQSLDRLMNPLIDQYLYYLSRTNTPSGTTTQSRLQFSQAGASDIRDQSRNWLPRPCYRQQRVSKTSADNNNSEYSWTGATKYHLNGRDSLVNPGPAMASHKDDEEKFFPQSGVLIFGKQGSEKTNVDIEKVMITDEEEIRTTNPVATEQYGSVSTNLQRGNRQAATADVNTQGVLPGTVWQDRDVYLQGPIWAKIPHTDGHFHPSPLMGGFGLKHPPPQILIKNTPVPANPSTTFSAAKFASFITQYSTGQVSVEIEWELQKENSKRWNPEIQYTSNYNKSVNVDFTVDTNGVYSEPRPIGTRYLTRNL

SEQ ID NO: 11115 - protein, 735 aa, Artificial Sequence
  source: /note="Description of Artificial Sequence: Synthetic polypeptide"
MAADGYLPDWLEDTLSEGIRQWWKLKPGPPPPKPAERHKDDSRGLVLPGYKYLGPFNGLDKGEPVNEADAAALEHDKAYDRQLDSGDNPYLKYNHADAEFQERLKEDTSFGGNLGRAVFQAKKRALEPLGLVEEPVKTAPGKKRPVEHSPVEPDSSSGTGKAGQQPARKRLNFGQTGDADSVPDPQPLGQPPAAPSGLGTNTMATGSGAPMADNNEGADGVGNSSGNWHCDSTWMGDRVITTSTRTWALPTYNNHLYKQISSQSGASNDNHYFGYSTPWGYFDFNRFHCHFSPRDWQRLINNNWGFRPKRLNFKLFNIQVKEVTQNDGTTTIANNLTSTVQVFTDSEYQLPYVLGSAHQGCLPPFPADVFMVPQYGYLTLNNGSQAVGRSSFYCLEYFPSQMLRTGNNFTFSYTFEDVPFHSSYAHSQSLDRLMNPLIDQYLYYLSRTNTPSGTTTQSRLQFSQAGASDIRDQSRNWLPGPCYRQQRVSKTSADNNNSEYSWTGATKYHLNGRDSLVNPGPAMASHKDDEEKFFPQSGVLIFGKQGSEETNVDIEKVMITDEEEIRTTNPVATEQYGSVSTNLQRGNRQAATADVNTQGVLPGMVWQDRDVYLQGPIWAKIPHTDGHFHPSPLMGGFGLKHPPPQILIKNTPVPANPSTTFSAAKFASFITQYSTGQVSVEIEWELQKENSKRWNPEIQYTSNYNKSVNVDFTVDTNGVYSEPRPIGTRYLTRNL

SEQ ID NO: 11116 - protein, 735 aa, Artificial Sequence
  source: /note="Description of Artificial Sequence: Synthetic polypeptide"
MAADGYLPDWLEDTLSEGIRQWWKLKPGPPPPKPAERHKDDSRGLVLPGYKYLGPFNGLDKGEPANEADAAALEHDKAYDRQLDSGDNPYLKYNHADAEFQERLKEDTSFGGNLGRAVFQAKKRVLEPLGLVEEPVKTAPGKKRPVEHSPVEPDSSSGTGKAGQQPARKRLNFGQTGDADSVPDPQPLGQPPAAPSGLGTNTMATGSGAPMADNNEGADGVGNSSGNWHCDSTWMGDRVITTSTRTWALPTYNNHLYKQISSQSGASNDNHYFGYSTPWGYFDFNRFHCHFSPRDWQRLINNNWGFRPKRLNFKLFNIQVKEVTQNDGTTTIANNLTSTVQVFTDSEYQLPYVLGSAHQGCLPPFPADVFMVPQYGYLTLNNGSQAVGRSSFYCLEYFPSQMLRTGNNFTFSYTFEDVPFHSSYAHSQSLDRLMNPLIDQYLYYLSRTNTPSGTTTQSRLQFSQAGASDIRDQSRNWLPGPCYRQQRVSKTSADNNNSEYSWTGATKYHLNGRDSLVNPGPAMASHKDDEEKFFPQSGVLIFGKQGSEKTNVDIEKVMITDEEEIRTTNPVATEQYGSVSTNLQRGNRQAATADVNTQGVLPGTVWQDRDVYLQGPIWAKIPHTDGHFHPSPLMGGFGLKHPPPQILIKNTPVPANPSTTFSAAKFASFITQYSTGQVSVEIEWELQKENSKRWNPEIQYTSNYNKSVNVDFTVDTNGVYSEPRPIGTRYLTRNL

SEQ ID NO: 11117 - protein, 735 aa, Artificial Sequence
  source: /note="Description of Artificial Sequence: Synthetic polypeptide"
MAADGYLPDWLEDTLSEGIRQWWKLKPGPPPPKPAERHKDDSRGLVLPGYKYLGPFNGLDKGEPVNEADAAALEHDKAYDRQLDSGDNPYLKYNHADAEFQERLKEDTSFGGNLGRAVFQAKKRVLEPLGLVEEPVKTAPGKKRPVEHSPVEPDSSSGTGKAGQQPARKRLNFGQTGDADSVPDPQPLGQPPAAPSGLGTNTMATGSGAPMADNNEGADGVGNSSGNWHCDSTWMGDRVITTSTRTWALPTYNNHLYKQISSQSGASNDNHYFGYSTPWGYFDFNRFHCHFSPRDWQRLINNNWGFRPKRLNFKLFNIQVKEVTQNDGTTTIANNLTSTVQVFTDSEYQLPYVLGSAHQGCLPPFPADVFMVPQYGYLTLNNGSQAVGRSSFYCLEYFPSQMLRTGNNFTFSYTFEDVPFHSSYAHSQSLDRLMNPLIDQYLYYLSRTNTPSGTTTQSRLQFSQAGASDIRDQSRNWLPGPCYRQQRVSKTSADNNNSEYSWTGATKYHLNGRDSLVNPGPAMASHKDDEEKFFPQSGVLIFGKQGSEKTNVDIEKVMVTDEEEIRTTNPVATEQYGSVSTNLQRGNRQAATADVNTQGVLPGTVWQDRDVYLQGPIWAKIPHTDGHFHPSPLMGGFGLKHPPPQILIKNTPVPANPSTTFSAAKFASFITQYSTGQVSVEIEWELQKENSKRWNPEIQYTSNYNKSVNVDFTVDTNGVYSEPRPIGTRYLTRNL

SEQ ID NO: 11118 - protein, 735 aa, Artificial Sequence
  source: /note="Description of Artificial Sequence: Synthetic polypeptide"
MAADGYLPDWLEDTLSEGIRQWWKLKPGPPPPKPAERHKDDSRGLVLPGYKYLGPFNGLDKGEPVNEADAAALEHDKAYDRQLDSGDNPYLKYNHADAEFQERLKEDTSFGGNLGRAVFQAKKRVLEPLGLVEEPVKTAPGKKRPVEHSPVEPDSSSGTGKAGQQPARKRLNFGQTGDADSVPDPQPLGQPPAAPSGLGTNTMATGSGAPMADNNEGADGVGNSSGNWHCDSTWMGDRVITTSTRTWALPTYNNHLYKQISSQSGASNDNHYFGYSTPWGYFDFNRFHCHFSPRDWQRLINNNWGFRPKRLNFKLFNIQVKEVTQNDGTTTIANNLTSTVQVFTDSEYQLPYVLGSAHQGCLPPFPADVFMAPQYGYLTLNNGSQAVGRSSFYCLEYFPSQMLRTGNNFTFSYTFEDVPFHSSYAHSQSLDRLMNPLIDQYLYYLSRTNTPSGTTTQSRLQFSQAGASDIRDQSRNWLPGPCYRQQRVSKTSADNNNSEYSWTGATKYHLNGRDSLVNPGPAMASHKDDEEKFFPQSGVLIFGKQGSEKTNVDIEKVMITDEEEIRTTNPVATEQYGSVSTNLQRGNRQAATADVNTQGVLPGTVWQDRDVYLQGPIWAKIPHTDGHFHPSPLMGGFGLKHPPPQILIKNTPVPANPSTTFSAAKFASFITQYSTGQVSVEIEWELQKENSKRWNPEIQYTSNYNKSVNVDFTVDTNGVYSEPRPIGTRYLTRNL

SEQ ID NO: 11119 - protein, 735 aa, Artificial Sequence
  source: /note="Description of Artificial Sequence: Synthetic polypeptide"
MAADGYLPDWLEDTLSEGIRQWWKLKPGPPPPKPAERHKDDSRGLVLPGYKYLGPFNGLDKGEPVNEADAAALEHDKAYDRQLDSGDNPYLKYNHADAEFQERLKEDTSFGGNLGRAVFQAKKRVLEPLGLVEEPVKTAPGKKRPVEHSPVEPDSSSGTGKTGQQPARKRLNFGQTGDADSVPDPQPLGQPPAAPSGLGTNTMATGSGAPMADNNEGADGVGNSSGNWHCDSTWMGDRVITTSTRTWALPTYNNHLYKQISSQSGASNDNHYFGYSTPWGYFDFNRFHCHFSPRDWQRLINNNWGFRPKRLNFKLFNIQVKEVTQNDGTTTIANNLTSTVQVFTDSEYQLPYVLGSAHQGCLPPFPADVFMVPQYGYLTLNNGSQAVGRSSFYCLEYFPSQMLRTGNNFTFSYTFEDVPFHSSYAHSQSLDRLMNPLIDQYLYYLSRTNTPSGTTTQSRLQFSQAGASDIRDQSRNWLPGPCYRQQRVSKTSADNNNSEYSWTGATKYHLNGRDSLVNPGPAMASHKDDEEKFFPQSGVLIFGKQGSEKTNVDIEKVMITDEEEIRTTNPVATEQYGSVSTNLQRGNRQAATADVNTQGVLPGMVWQDRDVYLQGPIWAKIPHTDGHFHPSPLMGGFGLKHPPPQILIKNTPVSANPSTTFSAAKFASFITQYSTGQVSVEIEWELQKENSKRWDPEIQYTSNYNKSVNVDFTVDTNGVYSEPRPIGTRYLTRNL

SEQ ID NO: 11120 - protein, 734 aa, Artificial Sequence
  source: /note="Description of Artificial Sequence: Synthetic polypeptide"
MAADGYLPDWLEDTLSEGIRQWWKLKPGPPPPKPAERHKDDSRGLVLPGYKYLGPFNGLDKGEPVNEADAAALEHDKAYDRQLDSGDNPYLKYNHADAEFQERLKEDTSFGGNLGRAVFQAKKRVLEPLGLVEEPVKTAPGKKRPVEHSPVEPDSSSGTGKAGQQPARKRLNFGQTGDADSVPDPQPLGQPPAAPSGLGTNTMATGSGAPMADNNEGADGVGNSSGNWHCDSTWMGDRVITTSTRTWALPTYNNHLYKQISSQSGASNDNHYFGYSTPWGYFDFNRFHCHFSPRDWQRLINNWGFRPKRLNFKLFNIQVKEVTQNDGTTTIANNLTSTVQVFTDSEYQLPYVLGSAHQGCLPPFPADVFMVPQYGYLTLNNGSQAVGRSSFYCLEYFPSQMLRTGNNFTFSYTFEDVPFHSSYAHSQSLDRLMNPLIDQYLYYLSRTNTPSGTTTQSRLQFSQAGASDIRDQSRNWLPGPCYRQQRVSKTSADNNNSEYSWTGATKYHLNGRDSLVNPGPAMASHKDDEEKFFPQSGVLIFGKQGSEKTNVDIEKVMITDEEEIRTTNPVATEQYGSVSTNLQRGNRQAATADVNTQGVLPGTVWQDRDVYLQGPIWAKIPHTDGHFHPSPLMGGFGLKHPPPQILIKNTPVPANPSTTFSAAKFASFITQYSTGQVSVEIEWELQKENSKRWNPEIQYTSNYNKSVNVDFTVDTNGVYSEPRPIGTRYLTRNL

SEQ ID NO: 11121 - protein, 735 aa, Artificial Sequence
  source: /note="Description of Artificial Sequence: Synthetic polypeptide"
MAADGYLPDWLEDTLSEGIRQWWKLKPGPPPPKPAERHKDDSRGLVLPGYKYLGPFNGLDKGEPVNEADAAALEHDKAYDRQLDSGDNPYLKYNHADAEFQERLKEDTSFGGNLGRAVFQAKKRVLEPLGLVEEPVKTAPGKKRPVEHSPVEPDSSSGTGKAGQQPARKRLNFGQTGDADSVPDPQPLGQPPAAPSGLGTNTMATGSGAPMADNNEGADGVGNSSGNWHCDSTWMGDRVITTSTRTWALPTYNNHLYKQISSQSGASNDNHYFGYSTPWGYFDFNRFHCHFSPRDWQRLINNNWGFRPKRLNFKLFNIQVKEVTQNDGTTTIANNLTSTVQVFTDSEYQLPYVLGSAHQGCLPPFPADVFMVPQYGYLTLNNGSQAVGRSSFYCLEYFPSQMLRTGNNFTFSYTFEDVPFHSSYAHSQSLDRLMNPLIDQYLYYLSRTNTPSGTTTQSRLQFSQAGASDIRDQSRNWLPGPCYRQQRVSKTSADNNNSEYSWTGATKYHLNGRDSLVNPGPAMASHKDDEEKFFPQSGVLIFGKQGSEKTNVDIEKVMITDEEEIRTTNPVATEQYGSVSTNLQRGNRQAATADVNTQGVLPGTVWQDRDVYLQGPIWAKIPHTDGHFHPSPLMGGFGLKHPPPQILIKNTPVPANPSTTFSAAKFASFITQYSTGQVSVEIEWELQKENGKRWNPEIQYTSNYNKSVNVDFTVDTNGVYSEPRPIGTRYLTRNL

SEQ ID NO: 11122 - protein, 735 aa, Artificial Sequence
  source: /note="Description of Artificial Sequence: Synthetic polypeptide"
MAADGYLPDWLEDTLSEGIRQWWKLKPGPPPPKPAERHKDDSRGLVLPGYKYLGPFNGLDKGEPVNEADAAALEHDKAYDRQLDSGDNPYLKYNHADAEFQERPKEDTSFGGNLGRAVFQAKKRVLEPLGLVEEPVKTAPGKKRPVEHSPVEPDSSSGTGKAGQQPARKRLNFGQTGDADSVPDPQPLGQPPAAPSGLGTNTMATGSGAPMADNNEGADGVGNSSGNWHCDSTWMGDRVITTSTRTWALPTYNNHLYKQISSQSGASNDNHYFGYSTPWGYFDFNRFHCHFSPRDWQRLINNNWGFRPKRLNFKLFNIQVKEVTQNDGTTTIANNLTSTVQVFTDSEYQLPYVLGSAHQGCLPPFPADVFMVPQYGYLTLNNGSQAVGRSSFYCLEYFPSQMLRTGNNFTFSYTFEDVPFHSSYAHSQSLDRLMNPLIDQYLYYLSRTNTPSGTTTQSRLQFSQAGASDIRDQSRNWLPGPCYRQQRVSKTSADNNNSEYLWTGATKYHLNGRDSLVNPGPAMASHKDDEEKFFPQSGVLIFGKQGSEKTNVDIEKVMITDEEEIRTTNPVATEQYGSVSTNLQRGNRQAATADVNTQGVLPGTVWQDRDVYLQGPIWAKIPHTDGHFHPSPLMGGFGLKHPPPQILIKNTPVPANPSTTFSAAKFASFITQYSTGQVSVEIEWELQKENSKRWNPEIQYTSNYNKSVNVDFTVDTNGVYSEPRPIGTRYLTRNL

SEQ ID NO: 11123 - protein, 735 aa, Artificial Sequence
  source: /note="Description of Artificial Sequence: Synthetic polypeptide"
MAADGYLPDWLEDTLSEGIRQWWKLKPGPPPPKPAERHKDDSRGLVLPGYKYLGPFNGLDKGEPVNEADAAALEHDKAYDRQLDSGDNPYLKYNHADAEFQERLKEDTSFGGNLGRAVFQAKKRALEPLGLVEEPVKTAPGKKRPVEHSPVEPDSSSGTGKAGQQPARKRLDFGQTGDADSVPDPQPLGQPPAAPSGLGTNTMATGSGAPMADNNEGADGVGNSSGNWHCDSTWMGDRVITTSTRTWALPTYNNHLYKQISSQSGASNDNHYFGYSTPWGYFDFNRFHCHFSPRDWQRLINNNWGFRPKRLNFKLFNIQVKEVTQNDGTTTIANNLTSTVQVFTDSEYQLPYVLGSAHQGCLPPFPADVFMVPQYGYLTLNNGSQAVGRSSFYCLEYFPSQMLRTGNNFTFSYTFEDVPFHSSYAHSQSLDRLMNPLIDQYLYYLSRTNTPSGTTTQSRLQFSQAGASDIRDQSRNWLPGPCYRQQRVSKTSADNNNSEYSWTGATKYHLNGRDSLVNPGPAMASHKDDEEKFFPQSGVLIFGKQGSEKTNVDIEKVMITDEEEIRTTNPVATEQYGSVSTNLQRGNRQAATADVNTQGVLPGMVWQDRDVYLQGPIWAKIPHTDGHFHPSPLMGGFGLKHPPPQILIKNTPVPANPSTTFSAAKFASFITQYSTGQVSVEIEWELQKENSKRWNPEIQYTSNYNKSVNVDFTVDTNGVYSEPRPIGTRYLTRNL

SEQ ID NO: 11124 - protein, 735 aa, Artificial Sequence
  source: /note="Description of Artificial Sequence: Synthetic polypeptide"
MAADGYLPDWLEDTLSEGIRQWWKLKPGPPPPKPAERHKDDSRGLVLPGYKYLGPFNGLDKGEPVNEADAAALEHDKAYDRQLDSGDNPYLKYNHADAEFQERLKEDTSFGGNLARAVFQAKKRVLEPLGLVEEPVKTAPGKKRPVEHSPAEPDSSSGTGKAGQQPARKRLNFGQTGDADSVPDPQPLGQPPAAPSGLGTNTMATGSGAPMADNNEGADGVGNSSGNWHCDSTWMGDRVITTSTRTWALPTYNNHLYKQISSQSGASNDNHYFGYSTPWGYFDFNRFHCHFSPRDWQRLINNNWGFRPKRLSFKLFNIQVKEVTQNDGTTTIANNLTSTVQVFTDSEYQLPYVLGSAHQGCLPPFPADVFMVPQYGYLTLNNGSQAVGRSSFYCLEYFPSQMLRTGNNFTFSYTFEDVPFHSSYAHSQSLDRLMNPLIDQYLYYLSKTNAPSGTTTMSRLQFSQAGASDIRDQSRNWLPGPCYRQQRVSKTAADNNNSDYSWTGATKYHLNGRDSLVNPGPAMASHKDDEEKYFPQSGVLIFGKQGSNKTNVDIEKVMITDEEEIRTTNPVATEQYGSVSTNLQSGNTQAATSDVNTQGVLPGMVWQDRDVYLQGPIWAKIPHTDGHFHPSPLMGGFGLKHPPPQILIKNTPVPANPSTTFSAAKFASFITQYSTGQVSVEIEWELQKENSKRWNPEIQYTSNYNKSVNVDFTVDTNGVYSEPRPIGTRYLTRNL

SEQ ID NO: 11125 - protein, 735 aa, Artificial Sequence
  source: /note="Description of Artificial Sequence: Synthetic polypeptide"
MAADGYLPDWLEDTLSEGIRQWWKLKPGPPPPKPAERHKDDSRGLVLPGYKYLGPFNGLDKGEPVNEADAAALEHDKAYDRQLDSGDNPYLKYNHADAEFQERLKEDTSFGGNLGRAVFQAKKRVLEPLGLVEEPVKTAPGKKRPVEHSPVEPDSSSGTGKAGQQPARKRLNFGQTGDADSVPDPQPLGQPPAAPSGLGTNTMATGSGAPMADNNEGADGVGNSSGNWHCDSTWMGDRVITTSTRTWALPTYNNHLYKQISSQSGASNDNHYFGYSTPWGYFDFNRFHCHFSPRDWQRLINNNWGFRPKRLNFKLFNIQVKEVTQNDGTTTIANNLTSTVQVFTDSEYQLPYVLGSAHQGCLPPFPADVSMVPQYGYLTLNNGSQAVGRSSFYCLEYFPSQMLRTGNNFTFSYTFEDVPFHSSYAHSQSLDRLMNPLIDQYLYYLSRTNTPSGTTTQSRLQFSQAGASDIRDQSRNWLPGPCYRQQRVSKTSADNNNSEYSWTGATKYHLNGRDSLVNPGPAMASHKDDEEKFFPQSGVLIFGKQGSEKTNVDIEKVMITDEEEIRTTNPVATEQYGSVSTNLQRGNRQAATADVNTQGVLPGTVWQDRDVYLQGPIWAKIPHTDGHFHPSPLMGGFGLKHPPPQILIKNTPVPANPSTTFSAAKFASFITQYSTGQVSVEIEWELQKENSKRWNPEIQYTSNYNKSVNVDFTVDTNGVYSEPRPIGTRYLTRNL

SEQ ID NO: 11126 - protein, 735 aa, Artificial Sequence
  source: /note="Description of Artificial Sequence: Synthetic polypeptide"
MAADGYLPDWLEDTLSEGIRQWWKLKPGPPPPKPAERHKDDSRGLTLPGYKYLGPFNGLDKGEPVNEADAAALEHDKAYDRQLDSGDNPYLKYNHADAEFQERLKEDTSFGGNLARAVFQAKKRVLEPLGLVEEPVKTAPGKKRPVEHSPAELDSSSGTGKSGQQPARKRLNFGQTGDADSVPDPQPLGQPPAAPSGLGTNTMASGSGAPMADNNEGADGVGNSSGNWHCDSTWMGDRVITTSTRTWALPTYNNHLYKQISSQSGASNDNHYFGYSTPWGYFDFNRFHCHFSPRDWQRLINNNWGFRPKRLNFKLFNIQVKEVTQNDGTTTIANNLTSTVQVFTDSEYQLPYVLGSAHQGCLPPFPADVFMVPQYGYLTLNNGSQAVGRSSFYCLEYFPSQMLRTGNNFTFSYTFEDVPFHSSYAHSQSLDRLMNPLIDQYLYYLSRTNTPSGTTTQSRLQFSQAGASDIRDQSRNWLPGPCYRQQRVSKTAADNNNSDYSWTGATKYHLNGRDSLVNPGTAMASHKDDEEKYFPQSGVLIFGKQDSGKTNVDIEKVMITDEEEIRTTNPVATEQYGSVSTNLQSGNTQAATSDVNTQGVLPGMVWQDRDVYLQGPIWAKIPHTDGHFHPSPLMGGFGPKHPPPQILIKNTPVPANPSTTFSAAKFASFITQYSTGQVSVEIEWELQKENSKRWNPEIQYTSNYNKSVNVDFTVDTNGVYSEPRPIGTRYLTRNL

SEQ ID NO: 11127 - protein, 735 aa, Artificial Sequence
  source: /note="Description of Artificial Sequence: Synthetic polypeptide"
MAADGYLPDWLEDTLSEGIRQWWKLKPGPPPPKPAERHKDDSRGLVLPGYKYLGPFNGLDKGEPVNEADAAALEHDKAYDRQLDSGDNPYLKYNHADAEFQERLKEDTSFGGNLARAVFQAKKRVLEPLGLVEEPVKTAPGKKRPVEHSPAEPDSSSGTGESGQQPARKRLNFGQTGDADSVPDPQPLGQPPAAPSGLGTNTMASGSGAPMADNNEGADGVGNSSGNWHCDSTWMGDRVITTSTRTWALPTYNNHLYKQISSQSGASNDNHYFGYSTPWGYFDFNRFHCHFSPRDWQRLINNNWGFRPKRLNFKLFNIQVKEVTQNDGTTTIANNLTSTVQVFTDSEYQLPYVLGSAHQGCLPPFPADVFMVPQYGYLTLNNGSQAVGRSSFYCLEYFPSQMLRTGNNFTFSYTFEDVPFHSSYAHSQSLDRLMNPLIDQYLYYLSRTNTPSGTTTQSRLQFSQAGASDIRDQSRNWLPGPCYRQQRVSKTAADNNNSDYSWTGATKYHLNGRDSLVNPGTAMASHKDDEEKYFPQSGVLIFGKQDSGKTNVDIEKVMITDEEEIRTTNPVATEQYGSVSTNLQSGNTQAATSDVNTQGVLPGMVRQDRDVYLQGPIWAKIPHTDGHFHPSPLMGGFGLKHPPPQILIKNTPVPANPSTTFSAAKFASFITQYSTGQVSVEIEWEPQKENSKRWNPEIQYTSNYNKSVNVDFTVDTNGVYSEPRPIGTRYLTRNL

SEQ ID NO: 11128 - protein, 735 aa, Artificial Sequence
  source: /note="Description of Artificial Sequence: Synthetic polypeptide"
MAADGYLPDWLEDTLSEGIRQWWKLKPGPPPPKPAERHKDDSRGLALPGYKYLGPFNGLDKGEPVNEADAAALEHDKAYDRQLDSGDNPYLKYNHADAEFQERLKEDTSFGGNLARAVFQAKKRVLEPLGLVEEPVKTAPGKKRPVEHSPAELDSSSGTGKSGQQPARKRLNFGQTGDADSVPDPQPLGQPPAAPSGLGTNTMASGSGAPMADNNEGADGVGNSSGNWHCDSTWMGDRVITTSTRTWALPTYNNHLYKQISSQSGASNDNHYFGYSTPWGYFDFNRFHCHFSPRDWQRLINNNWGFRPKRLNFKLFNIQVKEVTQNDGTTTIANNLTSTVQVFTDSEYQLPYVLGSAHQGCLPPFPADVFMVPQYGYLTLNNGSQAVGRSSFYCLEYFPSQMLRTGNNFTFSYTFEDVPFHSSYAHSQSLDRLMNPLIDQYLYYLSRTNTPSGTTTQSGLQFSQAGASDIRDQSRNWLPGPCYRQQRVSKTAADNNNSDYSWTGATKYHLNGRDSLVNPGTAMASHKDDEEKYFPQSGVLIFGKQDSGKTNVDIEKVMITDEEEIRTTNPVATEQYGSVSTNLQSGNTQAATSDVNTQGVLPGMVWQDRDVYLQGPIWAKIPHTDGHFHPSPLMGGFGPKHPPPQILIKNTPVPANPSTTFSAAKFASFITQYSTGQVSVEIEWELQKENSKRWNPEIQYTSNYNKSVNVDFTVDTNGVYSEPRPIGTRYLTRNL

SEQ ID NO: 11129 - protein, 735 aa, Artificial Sequence
  source: /note="Description of Artificial Sequence: Synthetic polypeptide"
MAADGYLPDWLEDTLSEGIRQWWKLKPGPPPPKPAERHKDDSRGLVLPGYKYLGPFNGLDKGEPVNEADAAALEHDKAYDRQLDSGDNPYLKYNHADAEFQERLKEDTSFGGNLARAVFQAKKRVLEPLGLVEEPVKTAPGKKRPVEHSPAEPDSSSGTGKSGQQPARKRLNFGQTGDADSVPDPQPLGQPPAAPSGLGTNTMASGSGAPMADNNEGADGVGNSSGNWHCDSTWMGDRVITTSTRTWALPTYNNHLYKQISSQSGASNDNHYFGYSTPWGYFDFNRFHCHFSPRDWQRLINNNWGFRPKRLNFKLFNIQVKEVTQNDGTTTVANNLTSTVQVFTDSEYQLPYVLGSAHQGCLPPFPADVFMVPQYGYLTLNNGSQAVGRSSFYCLEYFPSQMLRTGNNFTFSYTFEDVPFHSSYAHSQSLDRLMNPLIDQYLYYLSRTNTPSGTTTQSRLQFSQAGASDIRDQSRNWLPGPCYRQQRVSKTAADNNNSDYSWTGATKYHLNGRDSLVNPGTAMASHKDDEEKYFPQSGVLIFGKQDSGKTNVDIEKVMITDEEEIRTTNPVATEQYGSVSTNLQSGNTQAATSDVNTQGVLPGMVRQDRDVYLQGPIWAKIPHTDGHFHPSPLMGGFGLKHPPPQILIKNTPVPANPSTTFSAAKFASFITQYSTGQVSVEIEWEPQKENSKRWNPEIQYTSNYNKSVNVDFTVDTNGVYSEPRPIGTRYLTRNL

SEQ ID NO: 11130 - protein, 735 aa, Artificial Sequence
  source: /note="Description of Artificial Sequence: Synthetic polypeptide"
MAADGYLPDWLEDTLSEGIRQWWKLKPGPPPPKPAERHKDDSRGLVLPGYKYLGPFNGLDKGEPVNEADAAALEHDKAYDRQLDSGDNPYLKYNHADAEFQERLKEDTSFGGNLARAVFQAKKRVLEPLGLVEEPVKTAPGKKRPVEHSPAEPDSSSGTGKSGQQPARKRLNFGQTGDADSVPDPQPLGQPPAAPSGLGTNTMASGSGAPMADNNEGADGVGNSSGNWHCDSTWMGDRVITTSTRTWALPTYNNHLYKQISSQSGASNDNHYFGYSTPWGYFDFNRFHCHFSPRDWQRLINNNWGFRPKRLNFKLFNIQVKEVTQNDGTTTIANNLTSTVQVFTDSEYQLPYVLGSAHQGCLPPFPADVFMVPQYGYLTLNNGSQAVGRSSFYCLEYFPSQMLRTGNNFTFSYTFEDVPFHSSYAHSQSLDRLMNPLIDQYLYYLSRTNTPSGTTTQSRLQFSQAGASDIRDQSRNWLPGPCYRQQRVSKTAADNNNSDYSWTGATKYHLNGRDSLVNPGTAMASHKDDEEKYFPQGGVLIFGKQDSGKTNVDIEKVMITDEEEIRTTNPVATEQYGSVSTNLQSGNTQAATSDVNTQGVLPGMVRQDRDVYLQGPIWAKIPHTDGHFHPSPLMGGFGLKHPPPQILIKNTPVPANPSTTFSAAKFASFITQYSTGQVSVEIEWEPQKENSKRWNPEIQYTSNYNKSVNVDFTVDTNGVYSEPRPIGTRYLTRNL

SEQ ID NO: 11131 - protein, 735 aa, Artificial Sequence
  source: /note="Description of Artificial Sequence: Synthetic polypeptide"
MAADGYLPDWLEDTLSEGIRQWWKLKPGPPPPKPAERHKDDSRGLALPGYKYLGPFNGLDKGEPVNEADAAALEHDKAYDRQLDSGDNPYLKYNHADAEFQERLKEDTSFGGNLARAVFQAKKRVLEPLGLVEEPVKTAPGKKRPVEHSPAELDSSSGTGKSGQQPARKRLNFGQTGDADSVPDPQPLGQPPAAPSGLGTNTMASGSGAPMADNNEGADGVGNSSGNWHCDSTWMGDRVITTSTRTWALPTYNNHLYKQISSQSGASNDNHYFGYSTPWGYFDFNRFHCHFSPRDWQRLINNNWGFRPKRLNFKLFNIQVKEVTQNDGTTTIANNLTSTVQVFTDSEYQLPYVLGSAHQGCLPPFPADVFMVPQYGYLTLNNGSQAVGRSSFYCLEYFPSQMLRTGNNFTFSYTFEDVPFHSSYAHSQSLDRLMNPLIDQYLYYLSRTNTPSGTTTQSRLQFSQAGASDIRDQSRNWLPGPCYRQQRVSKTAADNNNSDYSWTGATKYHLNGRDSLVNPGTAMAGHKDDEEKYFPQSGVLIFGKQDSGKTNVDIEKVMITDEEEIRTTNPVATEQYGSVSTNLQSGNTQAATSDVNTQGVLPGMVWQDRDVYLQGPIWAKIPHTDGHFHPSPLMGGFGPKHPPPQILIKNTPVPANPSTTFSAAKFASFITQYSTGQVSVEIEWELQKENSKRWNPEIQYTSNYNKSVNVDFTVDTNGVYSEPRPIGTRYLTRNL

SEQ ID NO: 11132 - protein, 735 aa, Artificial Sequence
  source: /note="Description of Artificial Sequence: Synthetic polypeptide"
MAADGYLPDWLEDTLSEGIRQWWKLKPGPPPPKPAERHKDDSRGLALPGYKYLGPFNGLDKGEPVNEADAAALEHDKAYDRQLDSGDNPYLKYNHADAEFQERLKEDTSFGGNLARAVFQAKKRVLEPLGLVEEPVKTAPGKKRPVEHSPAELDSSSGTGKSGQQPARKRLNFGQTGDADSVPDPQPLGQPPAAPSGLGTNTMASGSGAPMADNNEGADGVGNSSGNWHCDSTWMGDRVITTSTRTWALPTYNNHLYKQISSQSGASNDNHYFGYSTPWGYFDFNRFHCHFSPRDWQRLINNNWGFRPKRLNFKLFNIQVKEVTQNDGTTTIANNLTSTVQVFTDSEYQLPYVLGSAHQGCLPPFPADVFMVPQYGYLTLNNGSQAVGRSSFYCLEYFPSQMLRTGNNFTFSYTFEDVPFHSSYAHSQSLDRLMNPLIDQYLYYLSRTNTPSGTTTQSRLQFSQAGASDIRDQSRNWLPGPCYRQQRVSKTAADNNNSDYSWTGATKYHLNGRDSLVNPGTAMASHKDDEEKYFPQSGVLIFGKQDSGKTNVDIEKVMITDEEEIRTTNPVATEQYGSVSTNLQSGNTQAATSDVNTQGVLPGMVWQDRDVYLQGPIWAKIPHTDGHFHPSPLMGGFGPKHPPPQILIKNTPVPANPSTTFSAAKFASFITQYSTGQVSVEIEWELQKENSKRWNPEIQYTSNYNKSVNVDFTVDTNGVYSEPRPIGTRYLTRNL

SEQ ID NO: 11133 - protein, 735 aa, Artificial Sequence
  source: /note="Description of Artificial Sequence: Synthetic polypeptide"
MAADGYLPDWLEDTLSEGIRQWWKLKPGPPPPKPAERHKDDSRGLVLPGYKYLGPFNGLDKGEPVNEADAAALEHDKAYDRQLDSGDNPYLKYNHADAEFQERLKEDTSFGGNLARAVFQAKKRVLEPLGLVEEPVKTAPGKKRPVEHSPAEPDSSSGTGKSGQQPARKRLNFGQTGDADSVPGPQPLGQPPAAPSGLGTNTMASGSGAPMADNNEGADGVGNSSGNWHCDSTWMGDRVITTSTRTWALPTYNNHLYKQISSQSGASNDNHYFGYSTPWGYFDFNRFHCHFSPRDWQRLINNNWGFRPKRLNFKLFNIQVKEVTQNDGTTTVANNLTSTVQVFTDSEYQLPYVLGSAHQGCLPPFPADVFMVPQYGYLTLNNGSQAVGRSSFYCLEYFPSQMLRTGNNFTFSYTFEDVPFHSSYAHSQSLDRLMNPLIDQYLYYLSRTNTPSGTTTQSRLQFSQAGASDIRDQSRNWLPGPCYRQQRVSKTAADNNNSDYSWTGATKYHLNGRDSLVNPGTAMASHKDDEEKYFPQSGVLIFGKQDSGKTNVDIEKVMITDEEEIRTTNPVATEQYGSVSTNLQSGNTQAATSDVNTQGVLPGMVRQDRDVYLQGPIWAKIPHTDGHFHPSPLMGGFGLKHPPPQILIKNTPVPANPSTTFSAAKFASFITQYSTGQVSVEIEWEPQKENSKRWNPEIQYTSNYNKSVNVDFTVDTNGVYSEPRPIGTRYLTRNL

SEQ ID NO: 11134 - protein, 735 aa, Artificial Sequence
  source: /note="Description of Artificial Sequence: Synthetic polypeptide"
MAADGYLPDWLEDTLSEGIRQWWKLKPGPPPPKPAERHKDDSRGLVLPGYKYLGPFNGLDKGEPVNEADAAALEHDKAYDRQLDSGDNPYLKYNHADAEFQERLKEDTSFGGNLARAVFQAKKRVLEPLGLVEEPVKTAPGKKRPVEHSPAEPDSSSGTGKSGQQPARKRLNFGQTGDADSVPDPQPLGQPPAAPSGLGTNTMASGSGAPMADNNEGADGVGNSSGNWHCDSTWMGDRVITTSTRTWALPTYNNHLYKQISSQSGASNDNHYFGYSTPWGYFDFNRFHCHFSPRDWQRLINNNWGFRPKRLNFKLFNIQVKEVTQNDGTTTIANNLTSTVQVFTDSEYQLPYVLGSAHQGCLPPFPADVFMVPQYGYLTLNNGSQAVGRSSFYCLEYFPSQMLRTGNNFTFSYTFEDAPFHSSYAHSQSLDRLMNPLIDQYLYYLSRTNTPSGTTTQSRLQFSQAGASDIRDQSRNWLPGPCYRQQRVSKTAADNNNSDYSWTGATKYHLNGRDSLVNPGTAMASHKDDEEKYFPQSGVLIFGKQDSGKTNVDIEKVMITDEEEIRTTNPVATEQYGSVSTNLQSGNTQAATSDVNTQGVLPGMVRQDRDVYLQGPIWAKIPHTDGHFHPSPLMGGFGLKHPPPQILIKNTPVPANPSTTFSAAKFASFITQYSTGQVSVEIEWEPQKENSKRWNPEIQYTSNYNKSVNVDFTVDTNGVYSEPRPIGTRYLTRNL

SEQ ID NO: 11135 - protein, 735 aa, Artificial Sequence
  source: /note="Description of Artificial Sequence: Synthetic polypeptide"
MAADGYLPDWLEDTLSEGIRQWWKLKPGPPPPKPAERHKDDSRGLVLPGYKYLGPFNGLDKGEPVNEADAAALEHDKAYDRQLDSGDNPYLKYNHADAEFQERLKEDTSFGGNLARAVFQAKKRVLEPLGLVEEPVKTAPGKKRPVEHSPAEPDSSSGTGKSGQQPARKRLNFGQTGDADSVPDPQPLGQPPAAPSGLGTNTMASGSGAPMADNNEGADGVGNSSGNWHCDSTWMGDRVIPTSTRTWALPTYNNHLYKQISSQSGASNDNHYFGYSTPWGYFDFNRFHCHFSPRDWQRLINNNWGFRPKRLNFKLFNIQVKEVTQNDGTTTIANNLTSTVQVFTDSEYQLPYVLGSAHQGCLPPFPADVFMVPQYGYLTLNNGSQAVGRSSFYCLEYFPSQMLRTGNNFTFSYTFEDVPFHSSYAHSQSLDRLMNPLIDQYLYYLSRTNTPSGTTTQSRLQFSQAGASDIRDQSRNWLPGPCYRQQRVSKTAADNNNSDYSWTGATKYHLNGRDSLVNPGTAMASHKDDEEKYFPQSGVLIFGKQDSGKTNVDIEKVMITDEEEIRTTNPVATEQYGSVSTNLQSGNTQAATSDVNTQGVLPGMVRQDRDVYLQGPIWAKIPHTDGHFHPSPLMGGFGLKHPPPQILIKNTPVPANPSTTFSAAKFASFITQYSTGQVSVEIEWEPQKENSKRWNPEIQYTSNYNKSVNVDFTVDTNGVYSEPRPIGTRYLTRNL

SEQ ID NO: 11136 - protein, 735 aa, Artificial Sequence
  source: /note="Description of Artificial Sequence: Synthetic polypeptide"
MAADGYLPDWLEDTLSEGIRQWWKLKPGPPPPKPAERHKDDSRGLVLPGYKYLGPFNGLDKGEPVNEADAAALEHDKAYDRQLDSGDNPYLKYNHADAEFQERLKEDTSFGGNLARAVFQAKKRVLEPLGLVEEPVKTAPGKKRPAEHSPAEPDSSSGTGKSGQQPARKRLNFGQTGDADSVPDPQPLGQPPAAPSGLGTNTMASGSGAPMADNNEGADGVGNSSGNWHCDSTWMGDRVITTSTRTWALPTYNNHLYKQISSQSGASNDNHYFGYSTPWGYFDFNRFHCHFSPRDWQRLINNNWGFRPKRLNFKLFNIQVKEVTQNDGTTTIANNLTSTVQVFTDSEYQLPYVLGSAHQGCLPPFPADVFMVPQYGYLTLNNGSQAVGRSSFYCLEYFPSQMLRTGNNFTFSYTFEDVPFHSSYAHSQSLDRLMNPLIDQYLYYLSRTNTPSGTTTQSRLQFSQAGASDIRDQSRNWLPGPCYRQQRVSKTAADNNNSDYSWTGATKYHLNGRDSLVNPGTAMASHKDDEEKYFPQSGVLIFGKQDSGKTNVDIEKVMITDEEEIRTTNPVATEQYGSVSTNLQSGNTQAATSDVNTQGVLPGMVRQDRDVYLQGPIWAKIPHTDGHFHPSPLMGGFGLKHPPPQILIKNTPVPANPSTTFSAAKFASFITQYSTGQVSVEIEWEPQKENSKRWNPEIQYTSNYNKSVNVDFTVDTNGVYSEPRPIGTRYLTRNL

SEQ ID NO: 11137 - protein, 735 aa, Artificial Sequence
  source: /note="Description of Artificial Sequence: Synthetic polypeptide"
MAADGYLPDWLEDTLSEGIRQWWKLKPGPPPPKPAERHKDDSRGLVLPGYKYLGPFNGLDKGEPVNEADAAALEHDKAYDRQLDSGDNPYLKYNHADAEFQERLKEDTSFGGNLARAVFQAKKRVLEPLGLVEEPVKTAPGKKRPVEHSPAEPDSSSGTGKSGQQPARKRLNFGQTGDADSVPDPQPLGQPPAAPSGLGTNTMASGSGAPMADNNEGADGVGNSSGNWHCDSTWMGDRVITTSTRTWALPTYNNHLYKQISSQSGASNDNHYFGYSTPWGYFDFNRFHCHFSPRDWQRLINNNWGFRPKRLNFKLFNIQVKEVTQNDGTTTIANNLTSTVQVFTDSEYQLPYVLGSAHQGCLPPFPADVFMVPQYGYLTLNNGSQAVGRSSFYCLEYFPSQMLRTGNNFTFSYTFEDVPFHSSYAHSQSLDRLMNPLIDQYLYYLSRTNTPSGTTTQSRLQFSQAGASDIRDQSRNWLPGPCYRQQRVSRTAADNNNSDYSWTGATKYHLNGRDSLVNPGTAMASHKDDEEKYFPQSGVLIFGKQDSGKTNVDIEKVMITDEEEIRTTNPVATEQYGSVSTNLQSGNTQAATSDVNTQGVLPGMVRQDRDVYLQGPIWAKIPHTDGHFHPSPLMGGFGLKHPPPQILIKNTPVPANPSTTFSAAKFASFITQYSTGQVSVEIEWEPQKENSKRWNPEIQYTSNYNKSVNVDFTVDTNGVYSEPRPIGTRYLTRNL

SEQ ID NO: 11138 - protein, 735 aa, Artificial Sequence
  source: /note="Description of Artificial Sequence: Synthetic polypeptide"
MAADGYLPDWLEDTLSEGIRQWWKLKPGPPPPKPAERHKDDSRGLVLPGYKYLGPFNGLDKGEPVNEADAAALEHDKAYDRQLDSGDNPYLKYNHADAEFQERLKEDTSFGGNLARAVFQAKKRVLEPLGLVEEPVKTAPGKKRPVEHSPAGPDSSSGTGKSGQQPARKRLNFGQTGDADSVPDPQPLGQPPAAPSGLGTNTMASGSGAPMADNNEGADGVGNSSGNWHCDSTWMGDRVITTSTRTWALPTYNNHLYKQISSQSGASNDNHYFGYSTPWGYFDFNRFHCHFSPRDWQRLINNNWGFRAKRLNFELFNIQVKEVTQNDGTTTIANNLTSTVQVFTDSEYQLPYVLGSAHQGCLPPFPADVFMVPQYGYLTLNNGSQAVGRSSFYCLEYFPSQMLRTGNNFTFSYTFEDVPFHSSYAHSQSLDRLMNPLIDQYLYYLSRTNTPSGTTTQSRLQFSQAGASDIRDQSRNWLPGPCYRQQRVSKTAADNNNSDYSWTGATKYHLNGRDSLVNPGTAMASHKDDEEKYFPQSGVLIFGKQDSGKTNVDIEKVMITDEEEIRTTNPVATEQYGSVSTNLQSGNTQAATSDVNTQGVLPGMVWQDRDVYLQGPIWAKIPHTDGHFHPSPLMGGFGLKHPPPQILIKSTPVPANPSTTFSAAKFASFITQYSTGQVSVEIEWELQKENSKRWNPEIQYTSNYNKSVNVDFTVDTNGVYSEPRPIGTRYLTRNL

SEQ ID NO: 11139 - protein, 735 aa, Artificial Sequence
  source: /note="Description of Artificial Sequence: Synthetic polypeptide"
MAADGYLPDWLEDTLSEGIRQWWKLKPGPPPPKPAERHKDDSRGLVLPGYKYLGPFNGLDKGEPVNEADAAALEHDKAYDRQLDSGDNPYLKYNHADAEFQERLKEDTSFGGNLARAVFQAKKRVLEPLGLVEEPVKTAPGKKRPVEHSPAEPDSSSGTGKSGQQPARKRLNFGQTGDADSVPDPQPLGQPPAAPSGLGTNTMASGSGAPMADNNEGADGVGNSSGNWHCDSTWMGDRVITTSTRTWALPTYNNHLYKQISSQSGASNDNHYFGYSTPWGYFDFNRFHCHFSPRDWQRLINNNWGFRPKRLNFKLFNIQVKEVTQNDGTTTIANNLTSTVQVFTDSEYQLPYVLGSAHQGCLPPFPADVFMVPQYGYLTLNNGSQAVGRSSFYCLEYFPSQMLRTGNNFTFSYTFEDVPFHSSYAHSQSLDRLMNPLIDQYLYYLSRTNTPSGTTTQSRLRFSQAGASDIRDQSRNWLPGPCYRQQRVSKTAADNNNSDYSWTGATKYHLNGRDSLVNPGTAMASHKDDEEKYFPQSGVLIFRKQDSGKTNVDIERVMITDEEEIRTTNPVATEQYGSVSTNLQSGNTQAATSDVNTQGVLPGMVWQDRDVYLQGPIWAKIPHTDGHFHPSPLMGGFGLKHPPPQILIKNTPVPANPSTTFSAAKFASFITQYSTGQVSVEIEWELQKENSKRWNPEIQYTSNYNKSVNVDFTVDTNGVYSEPRPIGTRYLTRNL

SEQ ID NO: 11140 - protein, 735 aa, Artificial Sequence
  source: /note="Description of Artificial Sequence: Synthetic polypeptide"
MAADGYLPDWLEDTLSEGIRQWWKLKPGPPPPKPAERHKDDSRGLVLPGYKYLGPFNGLDKGEPVNEADAAALEHDKAYDRQLDSGDNPYLKYNHADAEFQERLKEDTSFGGNLARAVFQAKKRVLEPLGLVEEPVKTAPGKKRPVEHSPAEPDSSSGTGKSGQQPARKRLNFGQTGDADSVPDPQPLGQPPAAPSGLGTNTMASGSGAPMADNNEGADGVGNSSGNWHCDSTWMGDRVITTSTRTWALPTYNNHLYKQISSQSGASNDNHYFGYSTPWGYFDFNRFHCHFSPRDWQRLINNNWGFRAKRLNFKLFNIQVKEVTQNDGTTTIANNLTSTVQVFTDSEYQLPYVLGSAHQGCLPPFPADVFMVPQYGYLTLNNGSQAVGRSSFYCLEYFPSQMLRTGNNFTFSYTFEDVPFHSSYAHSQSLDRLMNPLIDQYLYYLSRTNTPSGTTTQSRLRFSQAGASDIRDQSRNWLPGPCYRQQRVSKTAADNNNSDYSWTGATKYHLNGRDSLVNPGTAMASHKDDEEKYFPQSGVLIFGKQDSGKTNVDIERVMITDEEEIRTTNPVATEQYGSVSTNLQSGNTQAATSDVNTQGVLPGMVWQDRDVYLQGPIWAKIPHTDGHFHPSPLMGGFGLKHPPPQILIKNTPVPANPSTTFSAAKFASFITQYSTGQVSVEIEWELQKENSKRWNPEIQYTSNYNKSVNVDFTVDTNGVYSEPRPIGTRYLTRNL

SEQ ID NO: 11141 - protein, 735 aa, Artificial Sequence
  source: /note="Description of Artificial Sequence: Synthetic polypeptide"
MAADGYLPDWLEDTLSEGIRQWWKLKPGPPPPRPAERHQDDSRGLVLPGYKYLGPFNGLDKGEPVNEADAAALEHDKAYDRQLDSGDNPYLKYNHADAEFQERLKEDTSFGGNLGRAVFQAKKRVLEPLGLVEEPVKTAPGKKRPVEHSPAEPDSSSGTGKAGQQPARKRLNFGQTGDADSVPDPQPLGQPPAAPTSLGSTTMATGSGAPMADNNEGADGVGNSSGNWHCDSQWLGDRVITTSTRTWALPTYNNHLYKQISSQSGASNDNHYFGYSTPWGYFDFNRFHCHFSPRDWQRLINNNWGFRPKRLNFELFNIQVKEVTQNDGTTTIANNLTSTVQVFTDSEYQLPYVLGSAHQGCLPPFPADVFMVPQYGYLTLNNGSQAVGRSSFYCLEYFPSQMLRTGNNFTFSYTFEDVPFHSSYAHSQSLDRLMNPLIDQYLYYLSRTNTPSGTTTQSRLQFSQAGASDIRDQSRNWLPGPCYRQQRVSKTAADNNNSDYSWTGATKYHLNGRDSLVNPGTAMASHKDDEEKYFPQSGVLIFGKQDSGKTNVDIEKVMITDEEEIRTTNPVATEQYGSVSTNLQSGNTQAATSDVNTQGVLPGMVWQDRDVYLQGPIWAKIPHTDGHFHPSPLMGGFGLKHPPPQILIKSTPVPANPSTTFSAAKFASFITQYSTGQVSVEIEWELQKENSKRWNPEIQYTSNYNKSVNVDFTVDTNGVYSEPRPIGTRYLTRNL

SEQ ID NO: 11142 - protein, 735 aa, Artificial Sequence
  source: /note="Description of Artificial Sequence: Synthetic polypeptide"
MAADGYLPDWLEDTLSEGIRQWWKLKPGPPPPKPAERHKDDSRGLVLPGYKYLGPFNGLDKGEPVNEADAAALEHDKAYDRQLDSGDNPYLKYNHADAEFQERLKEDTSFGGNLARAVFQAKKRVLEPLGLVEEPVKTAPGKKRPVEHSPAGPDSSSGTGKSGQQPARKRLNFGQTGDADSVPDPQPLGQPPAAPSGLGTNTMASGSGAPMADNNEGADGVGNSSGNWHCDSTWMGDRVITTSTRTWALPTYNNHLYKQISSQSGASNDNHYFGYSTPWGYFDFNRFHCHFSPRDWHRLINNNWGFRPKRLNFELFNIQVKEVTQNDGTTTIANNLTSTVQVFTDSEYQLPYVLGSAHQGCLPPFPADVFMVPQYGYLTLNNGSQAVGRSSFYCLEYFPSQMLRTGNNFTFSYTFEDVPFHSSYARSQSLDRLMNPLIDQYLYYLSRTNTPSGTTTQSRLQFSQAGASDIRDQSRNWLPGPCYRQQRVSKTAADNNNSDYSWTGATKYHLNGRDSLVNPGTAMASHKDDEEKYFPQSGVLIFGKQDSGKTNVDIEKVMITDEEEIRTTNPVATEQYGSVSTNLQSGNTQAATSDVNTQGVLPGMVWQDRDVYLQGPIWAKIPHTDGHFHPSPLMGGFGLKHPPPQILIKSTPVPANPSTTFSAAKFASFITQYSTGQVSVEIEWELQKENSKRWNPEIQYTSNYNKSVNVDFTVDTNGVYSEPRPIGTRYLTRNL

SEQ ID NO: 11143 - protein, 735 aa, Artificial Sequence
  source: /note="Description of Artificial Sequence: Synthetic polypeptide"
MAADGYLPDWLEDTLSEGIRQWWKLKPGPPPPKPAERHKDDSRGLVLPGYKYLGPFNGLDKGEPVNEADAAALEHDKAYDRQLDSGDNPYLKYNHADAEFQERLKEDTSFGGNLARAVFQAKKRVLEPLGLVEEPVKTAPGKKRPVEHSPAGPDSSSGTGKSGQQPARKRLNFGQTGDADSVPDPQPLGQPPAAPSGLGTNTMASGSGAPMADNNEGADGVGNSSGNWHCDSTWMGDRVITTSTRTWALPTYNNHLYKQISSQSGASNDNHYFGYSTPWGYFDFNRFHCHFSPRDWQRLINNNWGFRPKRLNFELFNIQVKEVTQNDGTTTIANNLTSTVQVFTDSEYQLPYVLGSAHQGCLPPFPADVFMVPQYGYLTLNNGSQAVGRSSFYCLEYFPSQMLRTGNNFTFSYTFEDVPFHSSYAHSQSLDRLMNPLIDQYLYYLSRTNTPSGTTTQSRLQFSQAGASDIRDQSRNWLPGPCYRQQRVSKTAADNNNSDYSWTGATKYHLNGRDSLVNPGTAMASHKDDEEKYFPQSGVLIFGKQDSGKTNVDIEKVMITDEEEIRTTNPVATEQYGSVSTNLQSGNTQAATSDVNTQGVLPGMVWQDRDVYLQGPIWAKIPHTDGHFHPSPLMGGFGLKHPPPQILIKSTPVPANPSTTFSAAKFASFITQYSTGQVSVEIEWELQKENSKRWNPEIQYTSNYNKSVNVDFTVDANGVYSEPRPIGTRYLTRNL

SEQ ID NO: 11144 - protein, 735 aa, Artificial Sequence
  source: /note="Description of Artificial Sequence: Synthetic polypeptide"
MAADGYLPDWLEDTLSEGIRQWWKLKPGPPPPKPAERHKDDSRGLVLPGYKYLGPFNGLDKGEPVNEADAAALEHDKAYDRQLDSGDNPYLKYNHADAEFQERLKEDTSFGGNLARAVFQAKKRVLEPLGLVEEPVKTAPGKKRPVEHSPAGPDSSSGTGKSGQQPARKRLNFGQTGDADSVPDPQPLGQPPAAPSGLGTNTMASGSGAPMADNNEGADGVGNSSGNWHCDSTWMGDRVITTSTRTWALPTYNNHLYKQISSQSGASNDNHYFGYSTPWGYFDFNRFHCHFSPRDWQRLINNNLGFRAKRLNFELFNIQVKEVTQNDGTTTIANNLTSTVQVFTDSEYQLPYVLGSAHQGCLPPFPADVFMVPQYGYLTLNNGSQAVGRSSFYCLEYFPSQMLRTGNNFTFSYTFEDVPFHSSYAHSQSLDRLMNPLIDQYLYYLSRTNTPSGTTTQSRLQFSQAGASDIRDQSRNWLPGPCYRQQRVSKTAADNNNSDYSWTGATKYHLNGRDSLVNPGTAMASHKDDEEKYFPQSGVLIFGKQDSGKTNVDIEKVMITDEEEIRTTNPVATEQYGSVSTNLQSGNTQAATSDVNTQGVLPGMVWQDRDVYLQGPIWAKIPHTDGHFHPSPLMGGFGLKHPPPQILIKSTPVPANPSTTFSAAKFASFITQYSTGQVSVEIEWELQKENSKRWNPEIQYTSNYNKSVNVDFTVDTNGVYSEPRPIGTRYLTRNL

SEQ ID NO: 11145 - protein, 735 aa, Artificial Sequence
  source: /note="Description of Artificial Sequence: Synthetic polypeptide"
MAADGYLPDWLEDTLSEGIRQWWKLKPGPPPPKPAERHKDDSRGLVLPGYKYLGPFNGLDKGEPVNEADAAALEHDKAYDRQLDSGDNPYLKYNHADAEFQERLKEDTSFGGNLARAVFQAKKRVLEPLGLVEEPVKTAPGKKRPVEHSPAEPDSSSGTGKSGQQPARKRLNFGQTGDADSVPDPQPLGQPPAAPSGLGTNTMASGSGAPMADNNEGADGVGNSSGNWHCDSTWMGDRVITTSTRTWALPTYNNHLYKQISSQSGASNDNHYFGYSTPWGYFDFNRFHCHFSPRDWQRLINNNWGFRPKRLNFELFNIQVKEVTQNDGTTTIANNLTSTVQVFTDSEYQLPYVLGSAHQGCLPPFPADVFMVPQYGYLTLNNGSQAVGRSSFYCLEYFPSQMLRTGNNFTFSYTFEDVPFHSSYAHSQSLDRLMNPLIDQYLYYLSRTNTPSGTTTQSRLQFSQAGASDIRDQSRNWLPGPCYRQQRVSKTAADNNNSDYSWTGATKYHLNGRDSLVNPGTAMASHKDDEEKYFPQSGVLIFRKQDSGKTNVDIEKVMITDEEEIRTTNPVATEQYGSVSTNLQSGNTQAATSDVNTQGVLPGMVWQDRDVYLQGPIWAKIPHTDGHFHPSPLMGGFGLKHPPPQILIKSTPVPANPSTTFSAAKFASFITQYSTGQVSVEIEWELQKENSKRWNPEIQYTSNYNKSVNVDFTVDTNGVYSEPRPIGTRYLTRNL

SEQ ID NO: 11146 - protein, 735 aa, Artificial Sequence
  source: /note="Description of Artificial Sequence: Synthetic polypeptide"
MAADGYLPDWLEDTLSEGIRQWWKLKPGPPPPKPAERHQDDSRGLVLPGHKYLGPFNGLDKGEPVNEADAAALEHDKAYDRQLDSGDNPYLKYNHADAEFQERLKEDTSFGGNLGRAVFQAKKRVLEPLGLVEEPVKTAPGKKRPVEHSPAGPDSSSGTGKSGQQPARKRLNFGQTGDADSVPDPQPLGQPPAAPSGLGTNTMASGSGAPMADNNEGADGVGNSSGNWHCDSTWMGDRVITTSTRTWALPTYNNHLYKQISSQSGASNDNHYFGYSTPWGYFDFNRFHCHFSPRDWQRLINNNWGFRPKRLNFELFNIQVKEVTQNDGTTTIANNLTSTVQVFTDSEYQLPYVLGSAHQGCLPPFPADVFMVPQYGYLTLNNGSQAVGRSSFYCLEYFPSQMLRTGNNFTFSYTFEDVPFHSSYAHSQSLDRLMNPLIDQYLYYLSRTNTPSGTTTQSRLQFSQAGASDIRDQSRNWLPGPCYRQQRVSKTAADNNNSDYSWTGATKYHLNGRDSLVNPGTAMASHKDDEEKYFPQSGVLIFGKQDSGKTNVDIEKVMITDEEEIRTTNPVATEQYGSVSTNLQSGNTQAATSDVNTQGVLPGMVWQDRDVYLQGPIWAKIPHTDGHFHPSPLMGGFGLKHPPPQILIKSTPVPANPSTTFSAAKFASFITQYSTGQVSVEIEWELQKENSKRWNPEIQYTSNYNKSVNVDFTVDTNGVYSEPRPIGTRYLTRNL

SEQ ID NO: 11147 - protein, 735 aa, Artificial Sequence
  source: /note="Description of Artificial Sequence: Synthetic polypeptide"
MAADGYLPDWLEDTLSEGIRQWWKLKPGPPPPKPAERHKDDSRGLVLPGYKYLGPFNGLDKGEPVNEADAAALEHDKAYDRQLDSGDNPYLKYNHADAEFQERLKEDTSFGGNLARAVFQAKKRVLEPLGLVEEPVKTAPGKKRPVEHSPAGPDSSSGTGKSGQQPARKRLNFGQTGDADSVPDPQPLGQPPAAPSGLGTNTMASGSGAPMADNNEGADGVGNSSGNWHCDSTWMGDRVITTSTRTWALPTYNNHLYKQISSQSGASNDNHYFGYSTPWGYFDFNRFHCHFSPRDWHRLINNNWGFRPKRLNFELFNIQVKEVTQNDGTTTIANNLTSTVQVFTDSEYQLPYVLGSAHQGCLPPFPADVFMVPQYGYLTLNNGSQAVGRSSFYCLEYFPSQMLRTGNNFTFSYTFEDVPFHSSYAHSQSLDRLMNPLIDQYLYYLSRTNTPSGTTTQSRLQFSQAGASDIRDQSRNWLPGPCYRQQRVSKTAADNNNSDYSWTGATKYHLNGRDSLVNPGTAMASHKDDEEKYFPQSGVLIFGKQDSGKTNVDIEKVMITDEEEIRTTNPVATEQYGSVSTNLQSGNTQAATSDVNTQGVLPGMVWQDRDVYLQGPIWAKIPHTDGHFHPSPLMGGFGLKHPPPQILIKSTPVPANPSTTFSAAKFASFITQYSTGQVSVEIEWELQKENSKRWNPEIQYTSNYNKSVNVDFTVDTNGVYSEPRPIGTRYLTRNL

SEQ ID NO: 11148 - protein, 735 aa, Artificial Sequence
  source: /note="Description of Artificial Sequence: Synthetic polypeptide"
MAADGYLPDWLEDTLSEGIRQWWKLKPGPPPPKPAERHKDDSRGLVLPGYKYLGPFNGLDKGEPVNEADAAALEHDKAYDRQLDSGDNPYLKYNHADAEFQERLKEDTSFGGNLGRAVFQAKKRVLEPLGLVEEPVKTAPGKKRPVEHSPVEPDSSSGTGKAGQQPARKRLNFGQTGDADSVPDPQPLGQPPAAPSGLGTNTMATGSGAPMADNNEGADGVGNSSGNWHCDSTWMGDRVITTSTRTWALPTYNNHLYKQISSQSGASNDNHYFGYSTPWGYFDFNRFHCHFSPRDWQRLINNNWGFRPKRLSFKLFNIQVKEVTQNDGTTTIANNLTSTVQVFTDSEYQLPYVLGSAHQGCLPPFPADVFMVPQYGYLTLNNGSQAVGRSSFYCLEYFPSQMLRTGNNFTFSYTFEDVPFHSGYAHSQSLDRLMNPLIDQYLYYLSKTNAPSGTTTMSRLQFSQAGASDIRDQSRNWLPGPCYRQQRVSKTAADNNNSDYSWTGATKYHLNGRDSLVNPGPAMASHKDDEEKYFPQSGVLIFGKQGSNKTNVDIEKVMITDEEEIRTTNPVATEQYGSVSTNLQSGNTQAATSDVNTQGVLPGMVWQDRDVYLQGPIWAKIPHTDGHFHPSPLMGGFGLKHPPPQILIKNTPVPANPSTTFSAAKFASFITQYSTGQVSVEIEWELQKENSKRWNPEIQYTSNYNKSVNVDFTVDTNGVYSEPRPIGTRYLTRNL

SEQ ID NO: 11149 - protein, 735 aa, Artificial Sequence
  source: /note="Description of Artificial Sequence: Synthetic polypeptide"
MAADGYLPDWLEDTLSEGIRQWWKLKPGPPPPRPAERHQDDSRGLVLPGYKYLGPFNGLDKGEPVNEADAAALEHDKAYDRQLDSGDNPYLKYNHADAEFQERLKEDTSFGGNLGRAVFQAKKRVLEPLGLVEEPVKTAPGKKRPVEHSPAEPDSSSGTGKAGQQPARKRLNFGQTGDADSVPDPQPLGQPPAAPTSLGSTTMATGSGAPMADNNEGADGVGNSSGNWHCDSTWMGDRVITTSTRTWALPTYNNHLYKQISSQSGASNDNHYFGYSTPWGYFDFNRFHCHFSPRDWQRLINNNWGFRPKRLNFELFNIQVKEVTQNDGTTTIANNLTSTVQVFTDSEYQLPYVLGSAHQGCLPPFPADVFMVPQYGYLTLNNGSQAVGRSSFYCLEYFPSQMLRTGNNFTFSYTFEDVPFHSSYAHSQSLDRLMNPLIDQYLYYLSRTNTPSGTTTQSRLQFSQAGASDIRDQSRNWLPGPCYRQQRVSKTAADNNNSDYSWTGATKYHLNGRDSLVNPGTAMASHKDDEEKYFPQSGVLIFGKQDSGKTNVDIEKVMITDEEEIRTTNPVATEQYGSVSTNLQSGNTQAATSDVNTQGVLPGMVWQDRDVYLQGPIWAKIPHTDGHFHPSPLMGGFGLKHPPPQILIKSTPVPANPSTTFSAAKFASFITQYSTGQVSVEIEWELQKENSKRWNPEIQYTSNYNKSVNVDFTVDTNGVYSEPRPIGTRYLTRNL

SEQ ID NO: 11150 - protein, 735 aa, Artificial Sequence
  source: /note="Description of Artificial Sequence: Synthetic polypeptide"
MAADGYLPDWLEDTLSEGIRQWWKLKPGPPPPKPAERHQDDSRGLVLPGHKYLGPFNGLDKGEPVNEADAAALEHDKAYDRQLDSGDNPYLKYNHADAEFQERLKEDTSFGGNLGRAVFQAKKRVLEPLGLVEEPVKTAPGKKRPVEHSPAEPDSSSGTGKAGQQPARKRLNFGQTGDADSVPDPQPLGQPPAAPSGLGTNTMASGSGAPMADNNEGADGVGNSSGNWHCDSTWMGDRVITTSTRTWALPTYNNHLYKQISSQSGASNDNHYFGYSTPWGYFDFNRFHCHFSPRDWQRLINNNWGFRPKRLNFELFNIQVKEVTQNDGTTTIANNLTSTVQVFTDSEYQLPYVLGSAHQGCLPPFPADVFMVPQYGYLTLNNGSQAVGRSSFYCLEYFPSQMLRTGNNFTFSYTFEDVPFHSSYAHSQSLDRLMNPLIDQYLYYLSRTNTPSGTTTQSRLQFSQAGASDIRDQSRNWLPGPCYRQQRVSKTAADNNNSDYSWTGATKYHLNGRDSLVNPGTAMASHKDDEEKYFPQSGVLIFGKQDSGKTNVDIEKVMITDEEEIRTTNPVATEQYGSVSTNLQSGNTQAATSDVNTQGVLPGMVWQDRDVYLQGPIWAKIPHTDGHFHPSPLMGGFGLKHPPPQILIKSTPVPANPSTTFSAAKFASFITQYSTGQVSVEIEWELQKENSKRWNPEIQYTSNYNKSVNVDFTVDTNGVYSEPRPIGTRYLTRNL

SEQ ID NO: 11151 - protein, 735 aa, Artificial Sequence
  source: /note="Description of Artificial Sequence: Synthetic polypeptide"
MAADGYLPDWLEDTLSEGIRQWWKLKPGPPPPKPAERHKDDSRGLVLPGYKYLGPFNGLDKGEPVNEADAAALEHDKAYDRQLDSGDNPYLKYNHADAEFQERLKEDTSFGGNLARAVFQAKKRVLEPLGLVEEPVKTAPGKKRPVEHSPAEPDSSSGTGKSGQQPARKRLNFGQTGDADSVPDPQPLGQPPAAPSGLGTNTMASGSGAPMADNNEGADGVGNSSGNWHCDSTWMGDRVITTSTRTWALPTYNNHLYKQISSQSGASNDNHYFGYSTPWGYFDFNRFHCHFSPRDWQRLINNNWGFRPKRLNFKLFNIQVKEVTQNDGTTTIANNLTSTVQVFTDSEYQLPYVLGSAHQGCLPPFPADVFMVPQYGYLTLNNGSQAVGRSSFYCLEYFPSQMLRTGNNFTFSYTFEDVPFHSSYAHSQSLDRLMNPLIDQYLYYLSRTNTPSGTTTQSRLRFSQAGASDIRDQSRNWLPGPCYRQQRVSKTAADNNNSDYSWTGATKYHLNGRDSLVNPGTAMASHKDDEEKYFPQSGVLIFGKQDSEKTNVDIERVMITDEEEIRTTNPVATEQYGSVSTNLQSGNTQAATSDVNTQGVLPGMVWQDRDVYLQGPIWAKIPHTDGHFHPSPLMGGFGLKHPPPQILIKNTPVPANPSTTFSAAKFASFITQYSTGQVSVEIEWELQKENSKRWNPEIQYTSNYNKSVNVDFTVDTNGVYSEPRPIGTRYLTRNL

SEQ ID NO: 11152 - protein, 735 aa, Artificial Sequence
  source: /note="Description of Artificial Sequence: Synthetic polypeptide"
MAADGYLPDWLEDTLSEGIRQWWKLKPGPPPPKPAERHQDDSRGLVLPGYKYLGPFNGLDKGEPVNEADAAALEHDKAYDRQLDSGDNPYLKYNHADAEFQERLKEDTSFGGNLGRAVFQAKKRVLEPLGLVEEPVKTAPGKKRPVEHSPVEPDSSSGTGKAGQQPARKRLNFGQTGDADSVPDPQPLGQPPAAPSGLGTNTMATGSGAPMADNNEGADGVGNSSGNWHCDSTWMGDRVITTSTRTWALPTYNNHLYKQISSQSGASNDNHYFGYSTPWGYFDFNRFHCHFSPRDWQRLINNNWGFRPKRLSFKLFNIQVKEVTQNDGTTTIANNLTSTVQVFTDSEYQLPYVLGSAHQGCLPPFPADVFMVPQYGYLTLNNGSQAVGRSSFYCLEYFPSQMLRTGNNFTFSYTFEDVPFHSSYAHSQSLDRLMNPLIDQYLYYLSKTNAPSGTTTMSRLQFSQAGASDIRDQSRNWLPGPCYRQQRVSKTAADNNNSDYSWTGATKYHLNGRDSLVNPGPAMASHKDDEEKYFPQSGVLIFGKQGSNKTNVDIEKVMITDEEEIRTTNPVATEQYGSVSTNLQSGNTQAATSDVNTQGVLPGMVWQDRDVYLQGPIWAKIPHTDGHFHPSPLMGGFGLKHPPPQILIKNTPVPANPSTTFSAAKFASFITQYSTGQVSVEIEWELQKENSKRWNPEIQYTSNYNKSVNVDFTVDTNGVYSEPRPIGTRYLTRNL

SEQ ID NO: 11153 - protein, 735 aa, Artificial Sequence
  source: /note="Description of Artificial Sequence: Synthetic polypeptide"
MAADGYLPDWLEDTLSEGIRQWWKLKPGPPPPRPAERHQDDSRGLVLPGYKYLGPFNGLDKGEPVNEADAAALEHDKAYDRQLDSGDNPYLKYNHADAEFQERLKEDTSFGGNLGRAVFQAKKRVLEPLGLVEEPVKTAPGKKRPVEHSPAGPDSSSGTGKSGQQPARKRLNFGQTGDADSVPDPQPLGQPPAAPSGLGTNTMASGSGAPMADNNEGADGVGNSSGNWHCDSTWMGDRVITTSTRTWALPTYNNHLYKQISSQSGASNDNHYFGYSTPWGYFDFNRFHCHFSPRDWQRLINNNWGFRAKRLNFELFNIQVKEVTQNDGTTTIANNLTSTVQVFTDSEYQLPYVLGSAHQGCLPPFPADVFMVPQYGYLTLNNGSQAVGRSSFYCLEYFPSQMLRTGNNFTFSYTFEDVPFHSSYAHSQSLDRLMNPLIDQYLYYLSRTNTPSGTTTQSRLQFSQAGASDIRDQSRNWLPGPCYRQQRVSKTAADNNNSDYSWTGATKYHLNGRDSLVNPGTAMASHKDDEEKYFPQSGVLIFGKQDSGKTNVDIEKVMITDEEEIRTTNPVATEQYGSVSTNLQSGNTQAATSDVNTQGVLPGMVWQDRDVYLQGPIWAKIPHTDGHFHPSPLMGGFGLKHPPPQILIKSTPVPANPSTTFSAAKFASFITQYSTGQVSVEIEWELQKENSKRWNPEIQYTSNYNKSVNVDFTVDTNGVYSEPRPIGTRYLTRNL

SEQ ID NO: 11154 - protein, 735 aa, Artificial Sequence
  source: /note="Description of Artificial Sequence: Synthetic polypeptide"
MAADGYLPDWLEDTLSEGIRQWWKLKPGPPPPKPAERHKDDSRGLVLPGYKYLGPFNGLDKGEPVNEADAAALEHDKAYDRQLDSGDNPYLKYNHADAEFQERLKEDTSFGGNLARAVFQAKKRVLEPLGLVEEPVKTAPGKKRPVEHSPAGPDSSSGTGKSGQQPARKRLNFGQTGDADSVPDPQPLGQPPAAPSGLGTNTMASGSGAPTADNNEGADGVGNSSGNWHCDSTWMGDRVITTSTRTWALPTYNNHLYKQISSQSGASNDNHYFGYSTPWGYFDFNRFHCHFSPRDWQRLINNNWGFRPKRLNFELFNIQVKEVTQNDGTTTIANNLTSTVQVFTDSEYQLPYVLGSAHQGCLPPFPADVFMVPQYGYLTLNNGSQAVGRSSFYCLEYFPSQMLRTGNNFTFSYTFEDVPFHSSYAHSQSLDRLMNPLIDQYLYYLSRTNTPSGTTTQSRLQFSQAGASDIRDQSRNWLPGPCYRQQRVSKTAADNNNSDYSWTGATKYHLNGRDSLVNPGTAMASHKDDEEKYFPQSGVLIFGKQDSGKTNVDIEKVMITDEEEIRTTNPVATEQYGSVSTNLQSGNTQAATSDVNTQGVLPGMVWQDRDVYLQGPIWAKIPHTDGHFHPSPLMGGFGLKHPPPQILIKSTPVPANPSTTFSAAKFASFITQYSTGQVSVEIEWELQKENSKRWNPEIQYTSNYNKSVNVDFTVDTNGVYSEPRPIGTRYLTRNL

SEQ ID NO: 11155 - protein, 735 aa, Artificial Sequence
  source: /note="Description of Artificial Sequence: Synthetic polypeptide"
MAADGYLPDWLEDTLSEGIRQWWKLKPGPPPPKPAERHKDDSRGLVLPGYKYLGPFNGLDKGEPVNEADAAALEHDKAYDRQLDSGDNPYLKYNHADAEFQERLKEDTSFGGNLARAVFQAKKRVLEPLGLVEEPVKTAPGKKRPVEHSPAGPDSSSGTGKSGQQPARKRLNFGQTGDADSVPDPQPLGQPPAAPSGLGTNTMASGSGAPMADNNEGADGVGNSSGNWHCDSTWMGDRVITTSTRTWALPTYNNHLYKQISSQSGASNDNHYFGYSTPWGYFDFNRFHCHFSPRDWQRLINNNWGFRPKRLNFELFNIQVKEVTQNDGTTTIANNLTSTVQVFTDSEYQLPYVLGSAHQGCLPPFPADVFMVPQYGYLTLNNGSQAVGRSSFYCLEYFPSQMLRTGNNFTFSYTFEDVPFHSSYAHSQSLDRLMNPLIDQYLYYLSRTNTPSGTTTQSRLQFSQAGASDIRDQSRNWLPGPCYRQQRVSKTAADNNNSDYSWTGATKYHLNGRDSLVNPGTAMASHKDDEEKYFPQSGVLIFRKQDSGKTNVDIEKVMITDEEEIRTTNPVATEQYGSVSTNLQSGNTQAATSDVNTQGVLPGMVWQDRDVYLQGPIWAKIPHTDGHFHPSPLMGGFGLKHPPPQILIKSTPVPANPSTTFSAAKFASFITQYSTGQVSVEIEWELQKENSKRWNPEIQYTSNYNKSVNVDFTVDTNGVYSEPRPIGTRYLTRNL

SEQ ID NO: 11156 - protein, 735 aa, Artificial Sequence
  source: /note="Description of Artificial Sequence: Synthetic polypeptide"
MAADGYLPDWLEDTLSEGIRQWWKLKPGPPPPKPAERHKDDSRGLVLPGYKYLGPFNGLDKGEPVNEADAAALEHDKAYDRQLDSGDNPYLKYNHADAEFQERLKEDTSFGGNLARAVFQAKKRVLEPLGLVEEPVKTAPGKKRPVEHSPAEPDSSSGTGKSGQQPARKRLNFGQTGDADSVPDPQPLGQPPAAPSGLGTNTMASGSGAPMADNNEGADGVGNSSGNWHCDSTWMGDRVITTSTRTWALPTYNNHLYKQISSQSGASNDNHYFGYSTPWGYFDFNRFHCHFSPRDWQRLINNNWGFRPKRLNFKLFNIQVKEVTQNDGTTTIANNLTSTVQVFTDSEYQLPYVLGSAHQGCLPPFPADVFMVPQYGYLTLNNGSQAVGRSSFYCLEYFPSQMLRTGNNFTFSYTFEDVPFHSSYAHSQSLDRLMNPLIDQYLYYLSRTNTPSGTTTQSRLQFSQAGASDIRDQSRNWLPGPCYRQQRVSKTAADNNNSDYSWTGATKYHLNGRDSLVNPGTAMASHKDDEEKYFPQSGALIFGKQDSGKTNVDIEKVMITDEEEIRTTNPVATEQYGSVSTNLQSGNTQAATSDVNTQGVLPGMVWQDRDVYLQGPIWAKIPHTDGHFHPSPLMGGFGLKHPPPQILIKNTPVPANPSTTFSAAKFASFITQYSTGQVSVEIEWELQKENSKRWNPEIQYTSNYNKSVNVDFTVDTNGVYSEPRPIGTRYLTRNL

SEQ ID NO: 11157 - protein, 735 aa, Artificial Sequence
  source: /note="Description of Artificial Sequence: Synthetic polypeptide"
MAADGYLPDWLEDTLSEGIRQWWKLKPGPPPPKPAERHKDDSRGLVLPGYKYLGPFNGLDKGEPVNEADAAALEHDKAYDRQLDSGDNPYLKYNHADAEFQERLKEDTSFGGNLARAVFQAKKRVLEPLGLVEEPVKTAPGKKRPVEHSPAEPGSSSGTGKSGQQPARKRLNFGQTGDADSVPDPQPLGQPPAAPSGLGTNTMASGSGAPMADNNEGADGVGNSSGNWHCDSTWMGDRVITTSTRTWALPTYNNHLYKQISSQSGASNDNHYFGYSTPWGYFDFNRFHCHFSPRDWQRLINNNWGFRPKRLNFKLFNIQVKEVTQNDGTTTIANNLTSTVQVFTDSEYQLPYVLGSAHQGCLPPFPADVFMVPQYGYLTLNNGSQAVGRSSFYCLEYFPSQMLRTGNNFTFSYTFEDVPFHSSYARSQSLDRLMNPLIDQYLYYLSRTNTPSGTTTQSRLRFSQAGASDIRDQSRNWLPGPCYRQQRVSKTAADNNNSDYSWTGATKYHLNGRDSLVNPGTAMASHKDDEEKYFPQSGVLIFGKQDSGKTNVDIERVMITDEEEIRTTNPVATEQYGSVSTNLQSGNTQAATSDVNTQGVLPGMVWQDRDVYLQGPIWAKIPHTDGHFHPSPLMGGFGLKHPPPQILIKNTPVPANPSTTFSAAKFASFITQYSTGQVSVEIEWELQKENSKRWNPEIQYTSNYNKSVNVDFTVDTKGVYSEPRPIGTRYLTRNL

SEQ ID NO: 11158 - protein, 735 aa, Artificial Sequence
  source: /note="Description of Artificial Sequence: Synthetic polypeptide"
MAADGYLPDWLEDTLSEGIRQWWKLKPGPPPPKPAERHKDDSRGLVLPGYKYLGPFNGLDKGEPVNEADAAALEHDKAYDRQLDSGDNPYLKYNHADAEFQERLKEDTSFGGNLARAVFQAKKRVLEPLGLVEEPVKTAPGKKRPVEHSPAEPDSSSGTGKSGQQPARKRLNFGQTGDADSVPDPQPLGQPPAAPSGLGTNTMASGSGAPMADNNEGADGVGNSSGNWHCDSTWMGDRVITTSTRTWALPTYNNHLYKQISSQSGASNDNHYFGYSTPWGYFDFNRFHCHFSPRDWQRLINNNWGFRPKRLNFKLFNIQVKEVTQNDGTTTIANNLTSTVQVFTDSEYQLPYVLGSAHQGCLPPFPADVFMVPQYGYLTLNNGSQAVGRSSFYCLEYFPSQMLRTGNNFTFSYTFEDVPFHSSYAHSQSLDRLMNPLIDQYLYYLSRTNTPSGTTTQSRLQFSQAGASDIRDQSRNWLPGPCYRQQRVSKTAADNNNSDYSWTGATKYHLNGRDSLVNPGTAMASHKDDEEKYFPQSGVLIFGKQDSGKTNVDIEKVMITDEEEIRTTNPVATEQYGSVSTNLQSGNTQAATSDVNTQGVLPGMVWQDRDVYLQGPIWAKIPHTDGHFHPSPLMGGFGLKHPPPQILIKSTPVPANPSTTFSAAKFASFITQYSTGQVSVEIEWELQKENSKRWNPEIQYTSNYNKSVNVDFTVDTNGVYSEPRPIGTRYLTRNL

SEQ ID NO: 11159 - protein, 735 aa, Artificial Sequence
  source: /note="Description of Artificial Sequence: Synthetic polypeptide"
MAADGYLPDWLEDTLSEGIRQWWKLKPGPPPPKPAERHKDDSRGLVLPGYKYLGPFNGLDKGEPVNEADAAALEHDKAYDRQLDSGDNPYLKYNHADAEFQERLKEDTSFGGNLARAVFQAKKRVLEPLGLVEEPVKTAPGKKRPVEHSPAELDSSSGTGKSGQQPARKRLNFGQTGDADSVPDPQPLGQPPAAPSGLGTNTMASGSGAPMADNNEGADGVGNSSGNWHCDSTWMGDRVITTSTRTWALPTYNNHLYKQISSQSGASNDNHYFGYSTPWGYFDFNRFHCHFSPRDWQRLINNNWGFRPKRLNFKLFNIQVKEVTQNDGTTTIANNLTSTVQVFTDSEYQLPYVLGSAHQGCLPPFPADVFMVPQYGYLTLNNGSQAVGRSSFYCLEYFPSQMLRTGNNFTFSYTFEDVPFHSSYAHSQSLDRLMNPLIDQYLYYLSRTNTPSGTTTQSRLQFSQAGASDIRDQSRNWLPGPCYRQQRVSKTAADNNNSDYSWTGATKYHLNGRDSLVNPGTAMASHKDDEEKYFPQSGVLIFGKQDSGKTNVDIEKVMITDEEEIRTTNPVATEQYGSVSTNLQSGNTQAATSDVNTQGVLPGMVWQDRDVYLQGPIWAKIPHTDGHFHPSPLMGGFGPKHPPPQILIKNTPVPANPSTTFSAAKFASFITQYSTGQVSVEIEWELQKENSKRWNPEIQYTSNYNKSVNVDFTVDANGVYSEPRPIGTRYLTRNL

SEQ ID NO: 11160 - protein, 735 aa, Artificial Sequence
  source: /note="Description of Artificial Sequence: Synthetic polypeptide"
MAADGYLPDWLEDTLSEGIRQWWKLKPGPPPPKPAERHKDDSRGLVLPGYKYLGPFNGLDKGEPVNEADAAALEHDKAYDRQLDSGDNPYLKYNHADAEFQERLKEDTSFGGNLARAVFQAKKRVLEPLGLVEEPVKTAPGKKRPVEHSPAELDSSSGTGKSGQQPARKRLNFGQTGDADSVPDPQPLGQPPAAPSGLGTNTMASGSGAPMADNNEGADGVGNSSGNWHCDSTWMGDRVITTSTRTWALPTYNNHLYKQISSQSGASNDNHYFGYSTPWGYFDFNRFHCHFSPRDWQRLINNNWGFRPKRLNFKLFNIQVKEVTQNDGTTTIANNLTSTVQVFTDSEYQLPYVLGSAHQGCLPPFPADVFMVPQYGYLTLNNGSQAVGRSSFYCLEYFPSQMLRTGNNFTFSYTFEDVPFHSSYAHSQSLDRLMNPLIDQYLYYLSRTNTPSGTTTQSRLQFSQAGASDIRDQSRNWLPGPCYRQQRVSKTAADNNNSDYSWTGATKYHLNGRDSLVNPGTAMASHKDDEEKYFPQSGVLIFGKQDSGKTNVDIEKVMITDEEEIRTTNPVATEQYGSVSTNLRSGNTQAATSDVNTQGVLPGMVWQDRDVYLQGPIWAKIPHTDGHFHPSPLMGGFGPKHPPPQILIKNTPVPANPSTTFSAAKFASFITQYSTGQVSVEIEWELQKENSKRWNPEIQYTSNYNKSVNVDFTVDTNGVYSEPRPIGTRYLTRNL

SEQ ID NO: 11161 - protein, 735 aa, Artificial Sequence
  source: /note="Description of Artificial Sequence: Synthetic polypeptide"
MAADGYLPDWLEDTLSEGIRQWWKLKPGPPPPKPAERHKDDSRGLVLPGYKYLGPFNGLDKGEPVNEADAAALEHDKAYDRQLDSGDNPYLKYNHADAEFQERLKEDTPFGGNLARAVFQAKKRVLEPLGLVEEPVKTAPGKKRPVEHSPAELDSSSGTGKSGQQPARKRLNFGQTGDADSVPDPQPLGQPPAAPSGLGTNTMASGSGAPMADNNEGADGVGNSSGNWHCDSTWMGDRVITTSTRTWALPTYNNHLYKQISSQSGASNDNHYFGYSTPWGYFDFNRFHCHFSPRDWQRLINNNWGFRPKGLNFKLFNIQVKEVTQNDGTTTIANNLTSTVQVFTDSEYQLPYVLGSAHQGCLPPFPADVFMVPQYGYLTLNNGSQAVGRSSFYCLEYFPSQMLRTGNNFTFSYTFEDVPFHSSYAHSQSLDRLMNPLIDQYLYYLSRTNTPSGTTTQSRLQFSQAGASDIRDQSRNWLPGPCYRQQRVSKTAADNNNSDYSWTGATKYHLNGRDSLVNPGTAMASHKDDEEKYFPQSGVLIFGKQDSGKTNVDIEKVMITDEEEIRTTNPVATEQYGSVSTNLQSGNTQAATSDVNTQGVLPGMVWQDRDVYLQGPIWAKIPHTDGHFHPSPLMGGFGPKHPPPQILIKNTPVPANPSTTFSAAKFASFITQYSTGQVSVEIEWELQKENSKRWNPEIQYTSNYNKSVNVDFTVDTNGVYSEPRPIGTRYLTRNL

SEQ ID NO: 11162 - protein, 735 aa, Artificial Sequence
  source: /note="Description of Artificial Sequence: Synthetic polypeptide"
MAADGYLPDWLEDTLSEGIRQWWKLKPGPPPPKPAERHKDDSRGLVLPGYKYLGPFNGLDKGEPVNEADAAALEHDKAYDRQLDSGDNPYLKYNHADAEFQERLKEDTSFGGNLARAVFQAKKRVLEPLGLVEEPVKTAPGKKRPVEHSPAELDSSSGTGKSGQQPARKRLNFGQTGDADSVPDPQPLGQPPAAPSGLGTNTMASGSGAPMADNNEGADGVGNSSGNWHCDSTWMGDRVITTSTRTWALPTYNNHLYKQISSQSGASNDNHYLGYSTPWGYFDFNRFHCHFSPRDWQRLINNNWGFRPKRLNFKLFNIQVKEVTQNDGTTTIANNLTSTVQVFTDSEYQLPYVLGSAHQGCLPPFPADVFMVPQYGYLTLNNGSQAVGRSSFYCLEYFPSQMLRTGNNFTFSYTFEDVPFHSSYAHSQSLDRLMNPLIDQYLYYLSRTNTPSGTTTQSRLQFSQAGASGIRDQSRNWLPGPCYRQQRVSKTAADNNNSDYSWTGATKYHLNGRDSLVNPGTAMASHKDDEEKYFPQSGVLIFGKQDSGKTNVDIEKVMITDEEEIRTTNPVATEQYGSVSTNLQSGNTQAATSDVNTQGVLPGMVWQDRDVYLQGPIWAKIPHTDGHFHPSPLMGGFGPKHPPPQILIKNTPVPANPSTTFSAAKFASFITQYSTGQVSVEIEWELQKGNSKRWNPEIQYTSNYNKSVNVDFTVDTNGVYSEPRPIGTRYLTRNL

SEQ ID NO: 11163 - protein, 735 aa, Artificial Sequence
  source: /note="Description of Artificial Sequence: Synthetic polypeptide"
MAADGYLPDWLEDTLSEGIRQWWKLKPGPPPPKPAERHKDDSRGLVLPGYKYLGPFNGLDKGEPVNEADAAALEHDKAYDRQLDSGDNPYLKYNHADAEFQERLKEDTSFGGNLARAVFQAKKRVLEPLGLVEEPVKTAPGKKRPVEHSPAELDSSSGTGKSGQQPARKRLNFGQTGDADSVPDPQPLGQPPAAPSGLGTNTMASGSGAPMADNNEGADGVGNSSGNWHCDSTWMGDRVITTSTRTWALPTYNNHLYKQISSQSGASNDNHYFGYSTPWGYFDFNRFHCHFSPRDWQRLINNNWGFRPKRLNFKLFNIQVKEVTQNDGTTTIANNLTSTVQVFTDSEYQLPYVLGSAHQGCLPPFPADVFMVPQYGYLTLNNGSQAVGRSSFYCLEYFPSQMLRTGNNFTFSYTFEDVPFHSSYAHSQSLDRLMNPLIDQYLYYLSRTNTPSGTTTQSRLQFSQAGASDIRDQSRNWLPGPCYRQQRVSKTAADNNNSDYSWTGATKYHLNGRDSLVNPGTAMASHKDDEEKYFPQSGVLIFGKQDSGKTNVDIEKVMITDEEEIRTTNPVATEQYGSVSTNLQSGNTQAATSDVNTQGVLPGMVWQDRDVYLQGPIWAKIPHTDGHFHPSPLMGGFGPKHPPPQILIKNTPVPANPSTTFSAAKFASFITQYSTGQVSVEIEWELQKENSKRWNPEIQYTSNYNKSVNVDFTVDTNGVYSEPRPIGTRYPTRNL

SEQ ID NO: 11164 - protein, 735 aa, Artificial Sequence
  source: /note="Description of Artificial Sequence: Synthetic polypeptide"
MAADGYLPDWLEDTLSEGIRQWWKLKPGPPPPKPAERHKDDSRGLVLPGYKYLGPFNGLDKGEPVNEADAAALEHDKAYDRQLDSGDNPYLKYNHADAEFQERLKEDTSFGGNLARAVFQAKKRVLEPLGLVEEPVKTAPGKKRPVEHSPAELDSSSGTGKSGQQPARKRLNFGQTGDADSVPDPQPLGQPPAAPSGLGTNTMASGSGAPMADNNEGADGVGNSSGNWHCDSTWMGDRVITTSTRTWALPTYNNHLYKQISSQSGASNDNHYFGYSTPWGYFDFNRFHCHFSPRDWQRLINNNWGFRPKRLNFKLFNIQVKEVTQNDGTTTIANNLTSTVQVFTDSEYQLPYVLGSAHQGCLPPFPADVFMVPQYGYLTLNNGSQAVGRSSFYCLEYFPSQMLRTGNNFTFSYTFEDVPFHSSYAHSQSLDRLMNPLIDQYLYYLSRTNTPSGTTTQSRLQFSQAGASDIRDQSRNWLPGPCYRQQRVSKTAADNNNSDYSWTGATKYHLNGRDSLVNPGTAMASHKDDEEKYFPQSGVLIFGKQDSGKTNVDIEKVMITDEEEIRTTNPVATEQYGSVSTNLQSGNTQAATSDVNTQGVLPGMVWQDRDVYLQGPIWAKIPHTDGHFHPSPLMGGFGPKHPPPQILIKNTPVPANPSTTFSAAKLASFITQYSTGQVSVEIEWELQKENSKRWNPEIQYTSNYNKSVNVDFTVDTNGVYSEPRPIGTRYLTRNL

SEQ ID NO: 11165 - protein, 735 aa, Artificial Sequence
  source: /note="Description of Artificial Sequence: Synthetic polypeptide"
MAADGYLPDWLEDTLSEGIRQWWKLKPGPPPPKPAERHKDDSRGLVLPGYKYLGPFNGLDKGEPVNEADAAALEHDKAYDRQLDSGDNPYLKYNHADAEFQERLKEDTSFGGNLARAVFQAKKRVLEPLGLVEEPVKTAPGKKRPVEHSPAELDSSSGTGKSGQQPARKRLNFGQTGDADSVPDPQPLGQPPAAPSGLGTNTMASGSGAPMADNNEGADGVGNSSGNWHCDSTWMGDRVITTSTRTWALPTYNNHLYKQISSQSGASNDNHYFGYSTPWGYFDFNRFHCHFSPRDWQRLINNNWGFRPKRLNFKLFNIQVKEVTQNDGTTTIANNLTSTVQVFTDSEYQLPYVLGSAHQGCLPPFPADVFMVPQYGYLTLNNGSQAVGRSSFYCLEYFPSQMLRTGNNFTFSYTFEDVPFHSSYAHSQSLDRLMNPLIDQYLYYLSRTNTPSGTTTQSRLQFSQAGASDIRDQSRNWLPGPCYRQQRVSKTAADNNNSDYSWTGATKYHLNGRDSLVNPGTAMASHKDDEEKYFPQSGVLIFGKQDSGKTNVDIEKVMITDEEEIRTTNPVATEQYGSVSTNLQSGNTQAATSDVNTQGVLPGMVWQDRDVYLQGPIWAKIPHTDGHFHPSPLMGGFGPKHPPPQILIKNTPVPANPSTTFSAAKFASFTTQYSTGQVSVEIEWELQKENSKRWNPEIQYTSNYNKSVNVDFTVDTNGVYSEPRPIGTRYLTRNL

SEQ ID NO: 11166 - protein, 735 aa, Artificial Sequence
  source: /note="Description of Artificial Sequence: Synthetic polypeptide"
MAADGYLPDWLEDTLSEGIRQWWKLKPGPPPPKPAERHKDDSRGLVLPGYKYLGPFNGLDKGEPVNEADAAALEHDKAYDRQLDSGDNPYLKYNHADAEFQERLKEDTSFGGNLARAVFQAKKRVLEPLGLVEEPVKTAPGKKRPVEHSPAELDSSSGTGKSGQQPARKRLNFGQTGDADSVPDPQPLGQPPAAPSGLGTNTMASGSGAPMADNNEGADGVGNSSGNWHCDSTWMGDRVITTSTRTWALPTYNNHLYKQISSQSGASNDNHYFGYSTPWGYFDFNRFHCHFSPRDWQRLINNNWGFRPKRLNFKLFNIQVKEVTQNDGTTTIANNLTSTVQVFTDSEYQLPYVLGSAHQGCLPPFPADVFMVPQYGYLTLNNGSQAVGRSSFYCLEYFPSQMLRTGNNFTFSYTFEDVPFHSSYAHSQSLDRLMNPLIDQYLYYLSRTNTPSGTTTQSRLQFSQAGASDIRDQSRNWLPGPCYRQQRVSKTAADNNNSDYSWTGATKYHLNGRDSLVNPGTAMASHKDDEEKYFPRSGVLIFGKQDSGKTNVDIEKVMITDEEEIRTTNPVATEQYGSVSTNLQSGNTQAATSDVNTQGVLPGMVWQDRDVYLQGPIWAKIPHTDGHFHPSPLMGGFGPKHPPPQILIKNTPVPANPSTTFSAAKFASFITQYSTGQVSVEIEWELQKENSKRWNPEIQYTSNYNKSVNVDFTVDTNGVYSEPRPIGTRYLTRNL

SEQ ID NO: 11167 - protein, 735 aa, Artificial Sequence
  source: /note="Description of Artificial Sequence: Synthetic polypeptide"
MAADGYLPDWLEDTLSEGIRQWWKLKPGPPPPKPAERHKDDSRGLVLPGYKYLGPFNGLDKGEPVNEADAAALEHDKAYDRQLDSGDNPYLKYNHADAEFQERLKEDTSFGGNLARAVFQAKKRVLEPLGLVEEPVKTAPGKKRPVEHSPAELDSSSGTGKSGQQPARKRLNFGQTGDADSVPDPQPLGQPPAAPSGLGTNTMASGSGAPMADNNEGADGVGNSSGNWHCDSTWMGDRVITTSTRTWALPTYNNHLYKQISSQSGASNDNHYFGYSTPWGYFDFNRFHCHFSPRDWQRLINNNWGFRPKRLNFKLFNIQVKEVTQNDGTATIANNLTSTVQVFTDSEYQLPYVLGSAHQGCLPPFPADVFMVPQYGYLTLNNGSQAVGRSSFYCLEYFPSQMLRTGNNFTFSYTFEDVPFHSSYAHSQSLDRLMNPLIDQYLYYLSRTNTPSGTTTQSRLQFSQAGASDIRDQSRNWLPGPCYRQQRVSKTAADNNNSDYSWTGATKYHLNGRDSLVNPGTAMASHKDDEEKYFPQSGVLIFGKQDSGKTNVDIEKVMITDEEEIRTTNPVATEQYGSVSTNLQSGNTQAATSDVNTQGVLPGMVWQDRDVYLQGPIWAKIPHTDGHFHPSPLMGGFGPKHPPPQILIKNTPVPANPSTTFSAAKFASFITQYSTGQVSVEIEWELQKENSKRWNPEIQYTSNYNKSVNVDFTVDTNGVYSEPRPIGTRYLTRNL

SEQ ID NO: 11168 - protein, 735 aa, Artificial Sequence
  source: /note="Description of Artificial Sequence: Synthetic polypeptide"
MAADGYLPDWLEDTLSEGIRQWWKLKPGPPPPKPAERHKDDSRGLVLPGYKYLGPFNGLDKGEPVNEADAAALEHDKAYDRQPDSGDNPYLKYNHADAEFQERLKEDTSFGGNLARAVFQAKKRVLEPLGLVEEPVKTAPGKKRPVEHSPAELDSSSGTGKSGQQPARKRLNFGQTGDADSVPDPQPLGQPPAAPSGLGTNTMASGSGAPMADNNEGADGVGNSSGNWHCDSTWMGDRVITTSTRTWALPTYNNHLYKQISSQSGASNDNHYFGYSTPWGYFDFNRFHCHFSPRDWQRLINNNWGFRPKRLNFKLFNIQVKEVTQNDGTTTIANNLTSTVQVFTDSEYQLPYVLGSAHQGCLPPFPADVFMVPQYGYLTLNNGSQAVGRSSFYCLEYFPSQMLRTGNNFTFSYTFEDVPFHSSYAHSQSLDRLMNPLIDQYLYYLSRTNTPSGTTTQSRLQFSQAGASDIRDQSRNWLPGPCYRQQRVSKTAADNNNSDYSWTGATKYHLNGRDSLVNPGTAMASHKDDEEKYFPQSGVLIFGKQDSGKTNVDIEKVMITDEEEIRTTNPVATEQYGSVSTNLQSGNTQAATSDVNTQGVLPGMVWQDRDVYLQGPIWAKIPHTDGHFHPSPLMGGFGPKHPPPQILIKNTPVPANPSTTFSAAKFASFITQYSTGQVSVEIEWELQKENSKRWNPEIQYTSNYNKSVNVDFTVDTNGVYSEPRPIGTRYLTRNL

SEQ ID NO: 11169 - protein, 735 aa, Artificial Sequence
  source: /note="Description of Artificial Sequence: Synthetic polypeptide"
MAADGYLPDWLEDTLSEGIRQWWKLEPGPPPPKPAERHKDDSRGLVLPGYKYLGPFNGLDKGEPVNEADAAALEHDKAYDRQLDSGDNPYLKYNHADAEFQERLKEDTPFGGNLARAVFQAKKRVLEPLGLVEEPVKTAPGKKRPVEHSPAELDSSSGTGKSGQQPARKRLNFGQTGDADSVPDPQPLGQPPAAPSGLGTNTMASGSGAPMADNNEGADGVGNSSGNWHCDSTWMGDRVITTSTRTWALPTYNNHLYKQISSQSGASNDNHYFGYSTPWGYFDFNRFHCHFSPRDWQRLINNNWGFRPKRLNFKLFNIQVKEVTQNDGTTTIANNLTSTVQVFTDSEYQLPYVLGSAHQGCLPPFPADVFMVPQYGYLTLNNGSQAVGRSSFYCLEYFPSQMLRTGNNFTFSYTFEDVPFHSSYAHSQSLDRLMNPLIDQYLYYLSRTNTPSGTTTQSRLQFSQAGASDIRDQSRNWLPGPCYRQQRVSKTAADNNNSDYSWTGATKYHLNGRDSLVNPGTAMASHEDDEEKYFPQSGVLIFGKQDSGKTNVDIEKVMITDEEEIRTTNPVATEQYGSVSTNLQSGNTQAATSDVNTQGVLPGMVWQDRDVYLQGPIWAKIPHTDGHFHPSPLMGGFGPKHPPPQILIKNTPVPANPSTTFSAAKFASFITQYSTGQVSVEIEWELQKENSKRWNPEIQYTSNYNKSVNVDFTVDTNGVYSEPRPIGTRYLTRNL

SEQ ID NO: 11170 - protein, 734 aa, Artificial Sequence
  source: /note="Description of Artificial Sequence: Synthetic polypeptide"
MAADGYLPDWLEDTLSEGIRQWWKLKPGPPPPKPAERHKDDSRGLVLPGYKYLGPFNGLDKGEPVNEADAAALEHDKAYDRQLDSGDNPYLKYNHADAEFQERLKEDTSFGGNLARAVFQAKKRVLEPLGLVEEPVKTAPGKKRPVEHSPAELDSSSGTGKSGQQPARKRLNFGQTGDADSVPDPQPLGQPPAAPSGLGTNTMASGSGAPMADNNEGADGVGNSSGNWHCDSTWMGDRVITTSTRTWALPTYNNHLYKQISSQSGASNDNHYFGYSTPWGYFDFNRFHCHFSPRDWQRLINNNWGFRPKRLNFKLFNIQVKEVTQNDGTTTIANNLTSTVQVFTDSEYQLPYVLGSAHQGCLPPFPADVFMVPQYGYLTLNNGSQAVGRSSFYCLEYFPSQMLRTGNNFTFSYTFEDVPFHSSYAHSQSLDRLMNPLIDQYLYYLSRTNTPSGTTTQSRLQFSQAGASDIRDQSRNWLPGPCYRQQRVSKTAADNNSDYSWTGATKYHLNGRDSLVNPGTAMASHKDDEEKYFPQSGVLIFGKQDSGKTNVDIEKVMITDEEEIRTTNPVATEQYGSVSTNLQSGNTQAATSDVNTQGVLPGMVWQDRDVYLQGPIWAKIPHTDGHFHPSPLMGGFGPKHPPPQILIKNTPVPANPSTTFSAAKFASFITQYSTGQVSVEIEWELQKENSKRWNPEIQYTSNYNKSVNVDFTVDTNGVYSEPRPIGTRYLTRNL

SEQ ID NO: 11171 - protein, 735 aa, Artificial Sequence
  source: /note="Description of Artificial Sequence: Synthetic polypeptide"
MAADGYLPDWLEDTLSEGIRQWWKLKPGPPPPKPAERHKDDSRGLVLPGYKYLGPFNGLDKGEPVNEADAAALEHDKAYDRQLDSGDNPYLKYNHADAEFQERLKEDTPFGGNLARAVFQAKKRVLEPLGLVEEPVKTAPGKKRPVEHSPAELDSSSGTGKSGQQPARKRLNFGQTGDADSVPDPQPLGQPPAAPSGLGTNTMASGSGAPMADNNEGADGVGNSSGNWHCDSTWMGDRVITTSTRTWALPTYNNHLYKQISSQSGASNDNHYFGYSTPWGYFDFNRFHCHFSPRDWQRLINNNWGFRPKRLNFKLFNIQVKEVTQNGGTTTIANNLTSTVQVFTDSEYQLPYVLGSAHQGCLPPFPADVFMVPQYGYLTLNNGSQAVGRSSFYCLEYFPSQMLRTGNNFTFSYTFEDVPFHSSYAHSQSLDRLMNPLIDQYLYYLSRTNTPSGTTTQSRLQFSQAGASDIRDQSRNWLPGPCYRQQRVSKTAADNNNSDYSWTGATKYHLNGRDSLVNPGTAMASHKDDEEKYFPQSGVLIFGKQDSGKTNVDIEKVMITDEEEIRTTNPVATEQYGSVSTNLQSGNTQAATSDVNTQGVLPGMVWQDRDVYLQGPIWAKIPHTDGHFHPSPLMGGFGPKHPPPQILIKNTPVPANPSTTFSAAKFASFITQYSTGQVSVEIEWELQKENSKRWNPEIQYTSNYNKSVNVDFTVDTNGVYSEPRPIGTRYLTRNL

SEQ ID NO: 11172 - protein, 735 aa, Artificial Sequence
  source: /note="Description of Artificial Sequence: Synthetic polypeptide"
MAADGYLPDWLEDTLSEGIRQWWKLKPGPPPPKPAERHKDDSRGLVLPGYKYLGPFNGLDKGEPVNEADAAALEHDKAYDRQLDSGDNPYLKYNHADAEFQERLKEDTSFGGNLARAVFQAKKGVLEPLGLVEEPVKTAPGKKRPVEHSPAELDSSSGTGKSGQQPARKRLNFGQTGDADSVPDPQPLGQPPAAPSGLGTNTMASGSGAPMADNNEGADGVGNSSGNWHCDSTWMGDRVITTSTRTWALPTYNNHLYKQISSQSGASNDNHYFGYSTPWGYFDFNRFHCHFSPRDWQRLINNNWGFRPKRLNFKLFNIQVKEVTQNDGTTTIANNLTSTVQVFTDSEYQLPYVLGSAHQGCLPPFPADVFMVPQYGYLTLNNGSQAVGRSSFYCLEYFPSQMLRTGNNFTFSYTFEDVPFHSSYAHSQSLDRLMNPLIDQYLYYLSRTNTPSGTTTQSRLQFSQAGASDIRDQSRNWLPGPCYRQQRVSKTAADNNNSDYSWTGATKYHLNGRDSLVNPGTAMASHKDDEEKYFPQSGVLIFGKQDSGKTNVDIEKVMITDEEEIRTTNPVATEQYGSVSTNLQSGNTQAATSDVNTQGVLPGMVWQDRDVYLQGPIWAKIPHTDGHFHPSPLMGGFGPKHPPPQILIKNTPVPANPSTTFSAAKFASFITQYSTGQVSVEIEWELQKENSKRWNPEIQYTSNYNKSVNVDFTVDTNGVYSEPRPIGTRYLTRNL

SEQ ID NO: 11173 - protein, 735 aa, Artificial Sequence
  source: /note="Description of Artificial Sequence: Synthetic polypeptide"
MAADGYLPDWLEDTLSEGIRQWWKLKPGPPPPKPAERHKDDSRGLVLPGYKYLGPFNGLDKGEPVNEADAAALEHDKAYDRQLDSGDNPYLKYNHADAEFQERLKEDTSFGGNLARAVFQAKKRVLEPLGLVEEPVKTAPGKKRPVEHSPAELDSSSGTGKSGQQPARKRLNFGQTGDADSVPDPQPLGQPPAAPSGLGTNTMASGSGAPMADNNEGADGVGNSSGNWHCDSTWMGDRVITTSTRTWALPTYNNHLYKQISSQSGASNDNHYFGYSTPWGYFDFNRFHCHFSPRDWQRLINNNWGFRPKRLNFKLFNIQVKEVTQNDGTTTIANNLTSTVQVFTDSEYQLPYVLGSAHQGCLPPFPADVFMVPQYGYLTLNNGSQAVGRSSFYCLEYFPSQMLRTGNNFTFSYTFEDVPFHSSYAHSQSLDRLMNPLIDQYLYYLSRTNTPSGTTTQSRLQFSQAGASDIRDQSRNWLPGPCYRQQRVSKTAADNNNSDYSWTGATKYHLNGRDSLVNPGTAMASHKDDEEKYFPQSGVLIFGKQDSGKTNVDIEKVMITDEEEIRTTNPVATEQYGSVSTNLQSGNTQAATSDVNTQGVLPGMVWQDRDVYLQGPIWARIPHTDGHFHPSPLMGGFGPKHPPPQILIKNTPVPANPSTTFSAAKFASFITQYSTGQVSVEIEWELQKENSKRWNPEIQYTSNYNKSVNVDFTVDTNGVYSEPRPIGTRYLTRNL

SEQ ID NO: 11174 - protein, 735 aa, Artificial Sequence
  source: /note="Description of Artificial Sequence: Synthetic polypeptide"
MAADGYLPDWLEDTLSEGIRQWWKLKPGPPPPKPAERHKDDSRGLVLPGYKYLGPFNGLDKGEPVNEADAAALEHDKAYDRQLDSGDNPYLKYNHADAEFQERLKEDTSFGGNLARAVFQAKKRVLEPLGLVEEPVKTAPGKKRPVGHSPAELDSSSGTGKSGQQPARKRLNFGQTGDADSVPDPQPLGQPPAAPSGLGTNTMASGSGAPMADNNEGADGVGNSSGNWHCDSTWMGDRVITTSTRTWALPTYNNHLYKQISSQSGASNDNHYFGYSTPWGYFDFNRFHCHFSPRDWQRLINNNWGFRPKRLNFKLFNIQVKEVTQNDGTTTIANNLTSTVQVFTDSEYQLPYVLGSAHQGCLPPFPADVFMVPQYGYLTLNNGSQAVGRSSFYCLEYFPSQMLRTGNNFTFSYTFEDVPFHSSYAHSQSLDRLMNPLIDQYLYYLSRTNTPSGTTTQSRLQFSQAGASDIRDQSRNWLPGPCYRQQRVSKTAADNNNSDYSWTGATKYHLNGRDSLVNPGTAMASHKDDEEKYFPQSGVLIFGKQDSGKTNVDIEKVMITDEEEIRTTNPVATEQYGSVSTNLQSGNTQAATSDVNTQGVLPGMVWQDRDVYLQGPIWAKIPHTDGHFHPSPLMGGFGPKHPPPQILIKNTPVPANPSTTFSAAKFASFITQYSTGQVSVEIEWELQKENSKRWNPEIQYTSNYNKSVNVDFTVDTNGVYSEPRPIGTRYLTRNL

SEQ ID NO: 11175 - protein, 735 aa, Artificial Sequence
  source: /note="Description of Artificial Sequence: Synthetic polypeptide"
MAADGYLPDWLEDTLSEGIRQWWKLKPGPPPPKPAERHKDDSRGLVLPGYKYLGPFNGLDKGEPVNEADAAALEHDKAYDRQLDSGDNPYLKYNHADAEFQERLKEDTSFGGNLARAVFQAKKRVLEPLGLVEEPVKTAPGKKRPVEHSPAELDSSSGTGKSGQQPARKRLNFGQTGDADSVPDPQPLGQPPAAPSGLGTNTMASGSGAPMADNNEGADGVGNSSGNWHCDSTWMGDRVITTSTRTWALPTYNNHLYKQISSQSGASNDNHYFGYSTPWGYFDFNRFHCHFSPRDWQRLINNNWGFRPKRLNFKLFNIQVKEVTQNDGTTTIANNLTSTVQVFTDSEYQLPYVLGSAHQGCLPPFPADVFMVPQYGYLTLNNGSQAVGRSSFYCLEYFPSQMLRTGNNFTFSYTFEDVPFHSSYAHSQSLDRLMNPLIDQYLYYLSRTNTPSGTTTQSRLQFSQAGASDIRDQSRNWLPGPCYRQQRVSKTAADNNNSDYSWTGATKYHLNGRDSLVNPGTAMASHKDDEEKYFPQSGVLIFGKQDSGKTNVDIEKVMITDEEEIRTTNPVATEQYGSVSTNLQSGNTQAATSDVNTQGVLPGMVWQDRDVYLQGPIWAKIPHTDGHFHPSPLMGGFGPKHPPPQILIKNTPVPANPSTTFSAAKFASFITQYSTGQVSVEIEWELQKGNSKRWNPEIQYTSNYNKSVNVDFTVDTNGVYSEPRPIGTRYLTRNL

SEQ ID NO: 11176 - protein, 735 aa, Artificial Sequence
  source: /note="Description of Artificial Sequence: Synthetic polypeptide"
MAADGYLPDWLEDTLSEGIRQWWKLKPGPPPPKPAERHKDDSRGLVLPGYKYLGPFNGLDKGEPVNEADAAALEHDKAYDRQLDSGDNPYLKYNHADAEFQERLKEDTPFGGNLARAVFQAKKRVLEPLGLVEEPVKTAPGKKGPVEHSPAELDSSSGTGKSGQQPARKRLNFGQTGDADSVPDPQPLGQPPAAPSGLGTNTMASGSGAPMADNNEGADGVGNSSGNWHCDSTWMGDRVITTSTRTWALPTYNNHLYKQISSQSGASNDNHYFGYSTPWGYFDFNRFHCHFSPRDWQRLINNNWGFRPKRLNFKLFNIQVKEVTQNDGTTTIANNLTSTVQVFTDSEYQLPYVLGSAHQGCLPPFPADVFMVPQYGYLTLNNGSQAVGRSSFYCLEYFPSQMLRTGNNFTFSYTFEDVPFHSSYAHSQSLDRLMNPLIDQYLYYLSRTNTPSGTTTQSRLQFSQAGASDIRDQSRSWLPGPCYRQQRVSKTAADNNNSDYSWTGATKYHLNGRDSLVNPGTAMASHKDDEEKYFPQSGVLIFGKQDSGKTNVDIEKVMITDEEEIRTTNPVATEQYGSVSTNLQSGNTQAATSDVNTQGVLPGMVWQDRDVYLQGPIWAKIPHTDGHFHPSPLMGGFGPKHPPPQILIKNTPVPANPSTTFSAAKFASFITQYSTGQVSVEIEWELQKENSKRWNPEIQYTSNYNKSVNVDFTMDTNGVYSEPRPIGTRYLTRNL

SEQ ID NO: 11177 - protein, 735 aa, Artificial Sequence
  source: /note="Description of Artificial Sequence: Synthetic polypeptide"
MAADGYLPDWLEDTLSEGIRQWWKLKPGPPPPKPAERHKDDSRGLVLPGYKYLGPFNGLDKGEPVNEADAAALEHDKAYDRQLDSGDNPYLKYNHADAEFQERLKEDTSFGGNLARAVFQAKKRVLEPLGLVEEPVKTAPGKKRPVEHSPAELDSSSGTGKSGQQPARKRLNFGQTGDADSVPDPQPLGQPPAAPSGLGTNTMASGSGAPMADNNEGADGVGNSSGNWHCDSTWMGDRVITTSTRTWALPTYNNHLYKQISSQSGASNDNHYFGYSTPWGYFDFNRFHCHFSPRDWQRLINNNWGFRPKRLNFKLFNIQVKEVTQNDGTTTIANNLTSTVQVFTDSEYQLPYVLGSAHQGCLPPFPADVFMVPQYGYLTLNNGSQAVGRSSFYCLEYFPSQMLRTGNNFTFSYTFEDVPFHSSYAHSQSLDRLMNPLIDQYLYYLSRTNTPSGTTTQSRLQFSQAGASDIRDQSRNWLPGPCYRQQRVSKTAADNNNSDYSWTGATKYHLNGRDSLVNPGTAMASHKDDEEKYFPQSGVLIFGKQDSGKTNADIEKVMITDEEEIRTTNPVATEQYGSVSTNLQSGNTQAATSDVNTQGVLPGMVWQDRDVYLQGPIWAKIPHTDGHFHPSPLMGGFGPKHPPPQILIKNTPVPANPSTTFSAAKFASFITQYSTGQVSVEIEWELQKENSKRWNPEIQYTSNYNKSVNVDFTVDTNGVYSEPRPIGTRYLTRNL

SEQ ID NO: 11178 - protein, 735 aa, Artificial Sequence
  source: /note="Description of Artificial Sequence: Synthetic polypeptide"
MAADGYLPDWLEDTLSEGIRQWWKLKPGPPPPKPAERHKDDSRGLVLPGYKYLGPFNGLDKGEPVNEADAAALEHDKAYDRQLDSGDNPYLKYNHADAEFQERLKEDTSFGGNLARAVFQAKKRVLEPLGLVEEPVKTAPGKKRPVEHSPAELDSSSGTGKSGQQPARKRLNFGQTGDADSVPDPQPLGQPPAAPSGLGTNTMASGSGAPMADNNEGGDGVGNSSGNWHCDSTWMGDRVITTSTRTWALPTYNNHLYKQISSQSGASNDNHYFGYSTPWGYFDFNRFHCHFSPRDWQRLINNNWGFRPKRLNFKLFNIQVKEVTQNDGTTTIANNLTSTVQVFTDSEYQLPYVLGSAHQGCLPPFPADVFMVPQYGYLTLNNGSQAVGRSSFYCLEYFPSQMLRTGNNFTFSYTFEDVPFHSSYAHSQSLDRLMNPLIDQYLYYLSRTNTPSGTTTQSRLQFSQAGASDIRDQSRNWLPGPCYRQQRVSKTAADNNNSDYSWTGATKYHLNGRDSLVNPGTAMASHKDDEEKYFPQSGVLIFGKQDSGKTNVDIEKVMITDEEEIRTTNPVATEQYGSVSTNLQSGNTQAATSDVNTQGVLPGMVWQDRDVYLQGPIWAKIPHTDGHFHPSPLMGGFGPKHPPPQILIKNTPVPANPSTTFSAAKFASFITQYSTGQVSVEIEWELQKENSKRWNPEIQYTSNYNKSVNVDFTVDTNGVYSEPRPIGTRYLTRNL

SEQ ID NO: 11179 - protein, 735 aa, Artificial Sequence
  source: /note="Description of Artificial Sequence: Synthetic polypeptide"
MAADGYLPDWLEDTLSEGIRQWWKLKPGPPPPKPAERHKDDSRGLVLPGYKYLGPFNGLDKGEPVNEADAAALEHDKAYDRQLDSGDNPYLKYNHADAEFQERLKEDTSFGGNLARAVFQAKKRVLEPLGLVEEPVKTAPGKKRPVEHSPAELDSSSGTGKSGQQPARKRLNFGQTGDADSVPDPQPLGQPPAAPSGLGTNTMASGSGAPMADNNEGADGVGNSSGNWHCDSTWMGDRVITTSTRTWALPTYNNHLYKQISSQSGASNDNHYFGYSTPWGYFDFNRFHCHFPPRDWQRLINNNWGFRPKRLNFKLFNIQVKEVTQNDGTTTIANNLTSTVQVFTDSEYQLPYVLGSAHQGCLPPFPADVFMVPQYGYLTLNNGSQAVGRSSFYCLEYFPSQMLRTGNNFTFSYTFEDVPFHSSYAHSQSLDRLMNPLIDQYLYYLSRTNTPSGTTTQSRLQFSQAGASDIRDQSRNWLPGPCYRQQRVSKTAADNNNSDYSWTGATKYHLNGRDSLVNPGTAMASHKDDEEKYFPQSGVLIFGKQDSGKTNVDIEKVMITDEEEIRTTNPVATEQYGSVSTNLQSGNTQAATSDVNTQGVLPGMVWQDRDVYLQGPIWAKIPHTDGHFHPSPLMGGFGPKHPPPQILIKNTPVPANPSTTFSAAKFASFITQYSTGQVSVEIEWELQKENSKRWNPEIQYTSNYNKSVNVDFTVDTNGVYSEPRPIGTRYLTRNL

SEQ ID NO: 11180 - protein, 735 aa, Artificial Sequence
  source: /note="Description of Artificial Sequence: Synthetic polypeptide"
MAADGYLPDWLEDTLSEGIRQWWKLKPGPPPPKPAERHKDDSRGLVLPGYKYLGPFNGLDKGEPVNEADAAALEHDKAYDRQLDSGDNPYLKYNHADAEFQERLKEDTSFGGNLARAVFQAKKRVLEPLGLVEEPVKTAPGKKRPVEHSPAELDSSSGAGKSGQQPARKRLNFGQTGDADSVPDPQPLGQPPAAPSGLGTNTMASGSGAPMADNNEGADGVGNSSGNWHCDSTWMGDRVITTSTRTWALPTYNNHLYKQISSQSGASNDNHYLGYSTPWGYFDFNRFHCHFSPRDWQRLINNNWGFRPKRLNFKLFNIQVKEVTQNDGTTTIANNLTSTVQVFTDSEYQLPYVLGSAHQGCLPPFPADVFMVPQYGYLTLNNGSQAVGRSSFYCLEYFPSQMLRTGNNFTFSYTFEDVPFHSSYAHSQSLDRLMNPLIDQYLYYLSRTNTPSGTTTQSRLQFSQAGASDIRDQSRNWLPGPCYRQQRVSKTAADNNNSDYSWTGATKYHLNGRDSLVNPGTAMASHKDDEEKYFPQSGVLIFGKQDSGKTNVDIEKVMITDEEEIRTTNPVATEQYGSVSTNLQSGNTQAATSDVNTQGVLPGMVWQDRDVYLQGPIWAKIPHTDGHFHPSPLMGGFGPKHPPPQILIKNTPVPANPSTTFSAAKFASFITQYSTGQVSVEIEWELQKENSKRWNPEIQYTSNYNKSVNVDFTVDTNGVYSEPRPIGTRYLTRNL

SEQ ID NO: 11181 - protein, 735 aa, Artificial Sequence
  source: /note="Description of Artificial Sequence: Synthetic polypeptide"
MAADGYLPDWLEDTLSEGIRQWWKLKPGPPPPKPAERHKDDSRGLVLPGYKYLGPFNGLDKGEPVNEADAAALEHDKAYDRQLDSGDNPYLKYNHADAEFQERLKEDTPFGGNLARAVFQAKKRVLEPLGLVEEPVKTAPGKKRPVEHSPAELDSSSGTGKSGQQPARKRLNFGQTGDADSVPDPQPLGQPPAAPSGLGTNTMVSGSGAPMADNNEGADGVGNSSGNWHCDSTWMGDRVITTSTRTWALPTYNNHLYKQISSQSGASNDNHYFGYSTPWGYFDFNRFHCHFSPRDWQRLINNNWGFRPKRLNFKLFNIQVKEVTQNDGTTTIANNLTSTVQVFTDSEYQLPYVLGSAHQGCLPPFPADVFMVPQYGYLTLNNGSQAVGRSSFYCLEYFPSQMLRTGNNFTFSYTFEDVPFHSSYAHSQSLDRLMNPLIDQYLYYLSRTNTPSGTTTQSRLQFSQAGASDIRDQSRNWLPGPCYRQQRVSKTAADNNNSDYSWTGATKYHLNGRDSLVNPGTAMASHKDDEEKYFPQSGVLIFGKQDSGKTNVDIEKVMITDEEEIRTTNPVATEQYGSVSTNLQSGNTQAATSDVNTQGVLPGMVWQDRDVYLQGPIWAKIPHTDGHFHPSPLMGGFGPKHPPPQILIKNTPVPANPSTTFSAAKFASFITQYSTGQVSVEIEWELQKENSKRWNPEIQYTSNYNKSVNVDFTVDTNGVYSEPRPIGTRYLTRNL

SEQ ID NO: 11182 - protein, 735 aa, Artificial Sequence
  source: /note="Description of Artificial Sequence: Synthetic polypeptide"
MAADGYLPDWLEDTLSEGIRQWWELKPGPPPPKPAERHKDDSRGLVLPGYKYLGPFNGLDKGEPVNEADAAALEHDKAYDRQLDSGDNPYLKYNHADAEFQERLKEDTSFGGNLARAVFQAKKRVLEPLGLVEEPVKTAPGKKRPVEHSPAELDSSSGTGKSGQQPARKRLNFGQTGDADSVPDPQPLGQPPAAPSGLGTNTMASGSGAPMADNNEGADGVGNSSGNWHCDSTWMGDRVITTSTRTWALPTYNNHLYKQISSQSGASNDNHYFGYSTPWGYFDFNRFHCHFSPRDWQRLINNNWGFRPKRLNFKLFNIQVKEVTQNDGTTTIANNLTSTVQVFTDSEYQLPYVLGSAHQGCLPPFPADVFMVPQYGYLTLNNGSQAVGRSSFYCLEYFPSQMLRTGNNFTFSYTFEDVPFHSSYAHSQSLDRLMNPLIDQYLYYLSRTNTPSGTTTQSRLQFSQAGASDIRDQSRNWLPGPCYRQQRVSKTAADNNNSDYSWTGATKYHLNGRDSLVNPGTAMASHKDDEEKYFPQSGVLIFGKQDSGKTNVDIEKVMITDEEEIRTTNPVATEQYGSVSTNLQSGNTQAATSDVNTQGVLPGMVWQDRDVYLQGPIWAKIPHTDGHFHPSPLMGGFGPKHPPPQILIKNTPVPANPSTTFSAAKFASFITQYSTGQVSVEIEWELQKENSKRWNPEIQYTSNYNKSVNVDFTVDTNGVYSEPRPIGTRYLTRNL

SEQ ID NO: 11183 - protein, 735 aa, Artificial Sequence
  source: /note="Description of Artificial Sequence: Synthetic polypeptide"
MAADGYLPDWLEDTLSEGIRQWWKLKPGPPPPKPAERHKDDSRGLVLPGYKYLGPFNGLDKGEPVNEADAAALEHDKAYDRQLDSGDNPYLKYNHADAEFQERLKEDTPFGGNLARAVFQAKKRVLEPLGLVEEPVKTAPGKKRPVGHSPAELDSSSGTGKSGQQPARKRLNFGQTGDADSVPDPQPLGQPPAAPSGLGTNTMASGSGAPMADNNEGVDGVGNSSGNWHCDSTWMGDRVITTSTRTWALPTYNNHLYKQISSQSGASNDNHYFGYSTPWGYFDFNRFHCHFSPRDWQRLINNNWGFRPKRLNFKLFNIQVKEVTQNDGTTTIANNLTSTVQVFTDSEYQLPYVLGSAHQGCLPPFPADVFMVPQYGYLTLNNGSQAVGRSSFYCLEYFPSQMLRTGNNFTFSYTFEDVPFHSSYAHSQSLDRLMNPLIDQYLYYLSRTNTPSGTTTQSRLQFSQAGASDIRDQSRNWLPGPCYRQQRVSKTAADNNNSDYSWTGATKYHLNGRDSLVNPGTAMASHKDDEEKYFPQSGVLIFGKQDSGKTNVDIEKVMITDEEEIRTTNPVATEQYGSVSTNLQSGNTQAATSDVNTQGVLPGMVWQDRDVYLQGPIWAKIPHTDGHFHPSPLMGGFGPKHPPPQILIKNTPVPANPSTTFSAAKFASFITQYSTGQVSVEIEWELQKENSKRWNPEIQYTSNYNKSVNVDFTVDTNGVYSEPRPIGTRYLTRNL

SEQ ID NO: 11184 - protein, 735 aa, Artificial Sequence
  source: /note="Description of Artificial Sequence: Synthetic polypeptide"
MAADGYLPDWLEDTLSEGIRQWWELKPGPPPPKPAERHKDDSRGLVLPGYKYLGPFNGLDKGEPVNEADAAALEHDKAYDRQLDSGDNPYLKYNHADAEFQERLKEDTSFGGNLARAVFQAKKRVLEPLGLVEEPVKTAPGKKRPVEHSPAELDSSSGTGKSGQQPARKRLNFGQTGDADSVPDPQPLGQPPAAPSGLGTNTMASGSGAPMADNNEGADGVGNSSGNWHCDSTWMGDRVITTSTRTWALPTYNNHLYKQISSQSGASNDNHYFGYSTPWGYFDFNRFHCHFSPRDWQRLINNNWGFRPKRLNFKLFNIQVKEVTQNDGTTTIANNLTSTVQVFTDSEYQLPYVLGSAHQGCLPPFPADVFMVPQYGYLTLNNGSQAVGRSSFYCLEYFPSQMLRTGNNFTFSYTFEDVPFHSSYAHSQSLDRLMNPLIDQYLYYFSRTNTPSGTTTQSRLQFSQAGASDIRDQSRNWLPGPCYRQQRVSKTAADNNNSDYSWTGATKYHLNGRDSLVNPGTAMASHKDDEEKYFPQSGVLIFGKQDSGKTNVDIEKVMITDEEEIRTTNPVATEQYGSVSTNLQSGNTQAATSDVNTQGVLPGMVWQDRDVYLQGPIWAKIPHTDGHFHPSPLMGGFGPKHPPPQILIKNTPVPANPSTTFSAAKFASFITQYSTGQVSVEIEWELQKENSKRWNPEIQYTSNYNKSVNVDFTVDTNGVYSEPRPIGTRYLTRNL

SEQ ID NO: 11185 - protein, 735 aa, Artificial Sequence
  source: /note="Description of Artificial Sequence: Synthetic polypeptide"
MAADGYLPDWLEDTLSEGIRQWWKLKPGPPPPKPAERHKDDSRGLVLPGYKYLGPFNGLDKGEPVNEADAAALEHDKAYDRQLDSGDNPYLKYNHADAEFQERLKEDTSFGGNLARAVFQAKKRVLEPLGLVEEPVKTAPGKKRPVEHSPAELDSSSGTGKSGQQPARKRLNFGQTGDADSVPDPQPLGQPPAAPSGLGTNTMASGSGAPMADNNEGADGVGNSSGNWHCDSTWMGDRVITTSTRTWALPTYNNHLYKQISSQSGASNDNHYFGYSTPWGYFDFNRFHCHFSPRDWQRLINNNWGFRPKRLNFKLFNIQVKEVTQNDGTTTIANNLTSTVQVFTDSEYQLPYVLGSAHQGCLPPFPADVFMVPQYGYLTLNNGSQAVGRSSFYRLEYFPSQMLRTGNNFTFSYTFEDVPFHSSYAHSQSLDRLMNPLIDQYLYYLSRTNTPSGTTTQSRLQFSQAGASDIRDQSRNWLPGPCYRQQRVSKTAADNNNSDYSWTGATKYHLNGRDSLVNPGTAMASHKDDEEKYFPQSGVLIFGKQDSGKTNVDIEKVMITDEEEIRTTNPVATEQYGSVSTNLQSGNTQAATSDVNTQGVLPGMVWQDRDVYLQGPIWAKIPHTDGHFHPSPLMGGFGPKHPPPQILIKNTPVPANPSTTFSAAKFASFITQYSTGQVSVEIEWELQKENSKRWNPEIQYTSNYNKSVNVDFTVDTNGVYSEPRPIGTRYLTRNL

SEQ ID NO: 11186 - protein, 735 aa, Artificial Sequence
  source: /note="Description of Artificial Sequence: Synthetic polypeptide"
MAADGYLPDWLEDTLSEGIRQWWKLKPGPPPPKPAERHKDDSRGLVLPGYKYLGPFNGLDKGEPVNEADAAALEHDKAYDRQLDSGDNPYLKYNHADAEFQERLKEDTSFGGNLARAVFQAKKRVLEPLGLVEEPVKTAPGKKRPVEHSPAELDSSSGTGKSGQQPARKRLNFGQTGDADSVPDPQPLGQPPAAPSGLGTNTMASGSGAPMADNNEGADGVGNSSGNWHCDSTWMGDRVITTSTRTWALPTYNNHLYKQISSQSGASNDNHYLGYSTPWGYFDFNRFHCHFSPRDWQRLINNNWGFRPKRLNFKLFNIQVKEVTQNDGTTTIANNLTSTVQVFTDSEYQLPYVLGSAHQGCLPPFPADVFMVPQYGYLTLNNGSQAVGRSSFYCLEYFPSQMLRTGNNFTFSYTFEDVPFHSSYAHSQSLDRLMNPLIDQYLYYLSRTNTPSGTTTQSRLQFSQAGASDIRDQSRNWLPGPCYRQQRVSKTAADNNNSDYSWTGATKYHLNGRDSLVNPGTAMASHKDDEEKYFPQSGVLIFGKQDSGKTNVDIEKVMITDEEEIRTTNPVATEQYGSVSTNLQSGNTQAATSDVNTQGVLPGMVWQDGDVYLQGPIWAKIPHTDGHFHPSPLMGGFGPKHPPPQILIKNTPVPANPSTTFSAAKFASFITQYSTGQVSVEIEWELQKENSKRWNPEIQYTSNYNKSVNVDFTVDTNGVYSEPRPIGTRYLTRNL

SEQ ID NO: 11187 - protein, 735 aa, Artificial Sequence
  source: /note="Description of Artificial Sequence: Synthetic polypeptide"
MAADGYLPDWLEDTLSEGIRQWWKLKPGPPPPKPAERHKDDSRGLVLPGYKYLGPFNGLDKGEPVNEADAAALEHDKAYDRQLDSGDNPYLKYNHADAEFQERLKEDTSFGGNLARAVFQAKKRVLEPLGLVEEPVKTAPGKKRPVEHSPAELDSSSGTGKSGQQPARKRLNFGQTGDADSVPDPQPLGQPPAAPSGLGTNTMASGSGAPMADNNEGADGVGNSSGNWHCDSTWMGDRVITTSTRTWALPTYNNHLYKQISSQSGASNDNHYFGYSTPWGYFDFNRFHCHFSPRDWQRLINNNWGFRPKRLNFKLFNIQVKEVTQNDGTTTIANNLTSTVQVFTDSEYQLPYVLGSAHQGCLPPFPADVFMVPQYGYLTLNNGSQAVGRSSFYCLEYFPPQMLRTGNNFTFSYTFEDVPFHSSYAHSQSLDRLMNPLIDQYLYYLSRTNTPSGTTTQSRLQFSQAGASDIRDQSRNWLPGPCYRQQRVSKTAADNNNSDYSWTGATKYHLNGRDSLVNPGTAMASHKDDEEKYFPQSGVLIFGKQDSGKTNVDIEKVMITDEEEIRTTNPVATEQYGSVSTNLQSGNTQAATSDVNTQGVLPGMVWQDRDVYLQGPIWAKIPHTDGHFHPSPLMGGFGPKHPPPQILIKNTPVPANPSTTFSAAKFASFITQYSTGQVSVEIEWELQKENSKRWNPEIQYTSNYNKSVNVDFTVDTNGVYSEPRPIGTRYLTRNL

SEQ ID NO: 11188 - protein, 735 aa, Artificial Sequence
  source: /note="Description of Artificial Sequence: Synthetic polypeptide"
MAADGYLPDWLEDTLSEGIRQWWKLKPGPPPPKPAERHKDDSRGLVLPGYKYLGPFNGLDKGEPVNEADAAALEHDKAYDRQLDSGDNPYLKYNHADAEFQERLKEDTSFGGNLARAVFQAKKRVLEPLGLVEEPVKTAPGKKRPVEHSPAELDSSSGTGKSGQQPARKRLNFGQTGDADSVPDPQPLGQPPAAPSGLGTNTMASGSGAPMADNNEGADGVGNSSGNWHCDSTWMGDRVITTSTRAWALPTYNNHLYKQISSQSGASNDNHYLGYSTPWGYFDFNRFHCHFSPRDWQRLINNNWGFRPKRLNFKLFNIQVKEVTQNDGTTTIANNLTSTVQVFTDSEYQLPYVLGSAHQGCPPPFPADVFMVPQYGYLTLNNGSQAVGRSSFYCLEYFPSQMLRTGNNFTFSYTFEDVPFHSSYAHSQSLDRLMNPLIDQYLYYLSRTNTPSGTTTQSRLQFSQAGASDIRDQSRNWLPGPCYRQQRVSKTAADNNNSDYSWTGATKYHLNGRDSLVNPGTAMASHKDDEEKYFPQSGVLIFGKQDSGKTNVDIEKVMITDEEEIRTTNPVATEQYGSVSTNLQSGNTQAATSDVNTQGVLPGMVWQDRDVYLQGPIWAKIPHTDGHFHPSPLMGGFGPKHPPPQILIKNTPVPANPSTTFSAAKFASFITQYSTGQVSVEIEWELQKENSKRWNPEIQYTSNYNKSVNVDFTVDTNGVYSEPRPIGTRYLTRNL

SEQ ID NO: 11189 - protein, 735 aa, Artificial Sequence
  source: /note="Description of Artificial Sequence: Synthetic polypeptide"
MAADGYLPDWLEDTLSEGIRQWWKLKPGPPPPKPAERHKDDSRGLVLPGYKYLGPFNGLDKGEPVNEADAAALEHDKAYDRQLDSGDNPYLKYNHADAEFQERLKEDTSFGGNLARAVFQAKKRVLEPLGLVEEPVKTAPGKKRPVEHSPAELDSSSGTGKSGQQPARKRLNFGQTGDADSVPDPQPLGQPPAAPSGLGTNTMASGSGAPMADNNEGADGVGNSSGNWHCDSTWMGDRVITTSTRTWALPTYNNHLYKQISSQSGASNDNHYFGYSTPWGYFDFNRFHCHFSPRDWQRLINNNWGFRPKRLNFKLFNIQVKEVTQNDGTTTIANNLTSTVQVFTDSEYQLPYVLGSAHQGCLPPFPADVFMVPQYGYLTLNNGSQAVGRSSFYCLEYFPSQMLRTGNNFTFSYTFEDVPFHSSYAHSQSLDRLMNPLIDQYLYYLSRTNTPSGTTTQSRLQFSQAGASDIRDQSRNWLPGPCYRQQRVSKTAADNNNSDYSWTGATKYHLNGRDSLVNPGTAMASHKDDEEKYFPQSGVLIFGKQDSGKTNVDIEKVMITDEEEIRTTNPVATEQYGSVSTNLQSGNTQAATSDVNTQGVLPGMVWQDRDVYLQGPIWAKIPHTDGHFHPSPLMGGFGPKHPPPQILIKNTPVPANPSTTFSAAKFAFFITQYSTGQVSVEIEWELQKENSKRWNPEIQYTSNYNKSVNVDFTVDTNGVYSEPRPIGTRYLTRNL

SEQ ID NO: 11190 - protein, 735 aa, Artificial Sequence
  source: /note="Description of Artificial Sequence: Synthetic polypeptide"
MAADGYLPDWLEDTLSEGIRQWWKLKPGPPPPKPAERHKDDSRGLVLPGYKYLGPFNGLDKGEPVNEADAAALEHDKAYDRQLDSGDNPYLKYNHADAEFQERLKEDTSFGGNLARAVFQAKKRVLEPLGLVEEPVKTAPGKKRPVEHSPAELDSSSGTGKSGQQPARKRLNFGQTGDADSVPDPQPLGQPPAAPSGLGTNTMASGSGAPMADNNEGADGVGNSSGNWHCDSTWMGDRVITTSTRTWALPTYNNHLYKQISSQSGASNDNHYLGYSTPWGYFDFNRFHCHFSPRDWQRLINNNWGFRPKRLNFKLFNIQVKEVTQNDGTTTIANNLTSTVQVFTDSEYQLPYVLGSAHQGCLPPFPADVFMVPQYGYLTLNNGSQAVGRSSFYRLEYFPSQMLRTGNNFTFSYTFEDVPFHSSYAHSQSLDRLMNPLIDQYLYYLSRTNTPSGTTTQSRLQFSQAGASDIRDQSRNWLPGPCYRQQRVSKTAADNNNSDYSWTGATKYHLNGRDSLVNPGTAMASHKDDEEKYFPQSGVLIFGKQDSGKTNVDIEKVMITDEEEIRTTNPVATEQYGSVSTNLQSGNTQAATSDVNTQGVLPGMVWQDRDVYLQGPIWAKIPHTDGHFHPSPLMGGFGPKHPPPQILIKNTPVPANPSTTFSAAKFASFITQYSTGQVSVEIEWELQKENSKRWNPEIQYTSNYNKSVNVDFTVDTNGVYSEPRPIGTRYLTRNL

SEQ ID NO: 11191 - protein, 734 aa, Artificial Sequence
  source: /note="Description of Artificial Sequence: Synthetic polypeptide"
MAADGYLPDWLEDTLSEGIRQWWKLKPGPPPPKPAERHKDDSRGLVLPGYKYLGPFNGLDKGEPVNEADAAALEHDKAYDRQLDSGDNPYLKYNHADAEFQERLKEDTSFGGNLARAVFQAKKRVLEPLGLVEEPVKTAPGKKRPVEHSPAELDSSSGTGKSGQQPARKRLNFGQTGDADSVPDPQPLGQPPAAPSGLGTNTMASGSGAPMADNNEGADGVGNSSGNWHCDSTWMGDRVITTSTRTWALPTYNNHLYKQISSQSGASNDNHYLGYSTPWGYFDFNRFHCHFSPRDWQRLINNNWGFRPKRLNFKLFNIQVKEVTQNDGTTTIANNLTSTVQVFTDSEYQLPYVLGSAHQGCLPPFPADVFMVPQYGYLTLNNGSQAVGRSSFYCLEYFPSQMLRTGNNFTFSYTFEDVPFHSSYAHSQSLDRLMNPLIDQYLYYLSRTNTPSGTTTQSRLQFSQAGASDIRDQSRNWLPGPCYRQQRVSKTAADNNSDYSWTGATKYHLNGRDSLVNPGTAMASHKDDEEKYFPQSGVLIFGKQDSGKTNVDIEKVMITDEEEIRTTNPVATEQYGSVSTNLQSGNTQAATSDVNTQGVLPGMVWQDRDVYLQGPIWAKIPHTDGHFHPSPLMGGFGPKHPPPQILIKNTPVPANPSTTFSAAKFASFITQYSTGQVSVEIEWELQKENSKRWNPEIQYTSNYNKSVNVDFTVDTNGVYSEPRPIGTRYLTRNL

SEQ ID NO: 11192 - protein, 734 aa, Artificial Sequence
  source: /note="Description of Artificial Sequence: Synthetic polypeptide"
MAADGYLPDWLEDTLSEGIRQWWKLKPGPPPPKPAERHKDDSRGLVLPGYKYLGPFNGLDKGEPVNEADAAALEHDKAYDRQLDSGDNPYLKYNHADAEFQERLKEDTSLGNLARAVFQAKKRVLEPLGLVEEPVKTAPGKKRPVEHSPAELDSSSGTGKSGQQPARKRLNFGQTGDADSVPDPQPLGQPPAAPSGLGTNTMASGSGAPMADNNEGADGVGNSSGNWHCDSTWMGDRVITTSTRTWALPTYNNHLYKQISSQSGASNDNHYFGYSTPWGYFDFNRFHCHFSPRDWQRLINNNWGFRPKRLNFKLFNIQVKEVTQNDGTTTIANNLTSTVQVFTDSEYQLPYVLGSAHQGCLPPFPADVFMVPQYGYLTLNNGSQAVGRSSFYCLEYFPSQMLRTGNNFTFSYTFEDVPFHSSYAHSQSLDRLMNPLIDQYLYYLSRTNTPSGTTTQSRLQFSQAGASDIRDQSRNWLPGPCYRQQRVSKTAADNNNSDYSWTGATKYHLNGRDSLVNPGTAMASHKDDEEKYFPQSGVLIFGKQDSGKTNVDIEKVMITDEEEIRTTNPVATEQYGSVSTNLQSGNTQAATSDVNTQGVLPGMVWQDRDVYLQGPIWAKIPHTDGHFHPSPLMGGFGPKHPPPQILIKNTPVPANPSTTFSAAKFASFITQYSTGQVSVEIEWELQKENSKRWNPEIQYTSNYNKSVNVDFTVDTNGVYSEPRPIGTRYLTRNL

SEQ ID NO: 11193 - protein, 735 aa, Artificial Sequence
  source: /note="Description of Artificial Sequence: Synthetic polypeptide"
MAADGYLPDWLEDTLSEGIRQWWKLKPGPPPPKPAERHKDDSRGLVLPGYKYLGPFNGLDKGEPVNEADAAALEHDKAYDRQLDSGDNPYLKYNHADAEFQERLKEDTSFGGNLARAVFQAKKRVLEPLGLVEEPVKTAPGKKRPVEHSPAELDSSSGTGKSGQQPARKRLNFGQTGDADSVPDPQPLGQPPAAPSGLGTNTMASGSGAPMADNNEGADGVGNSSGNWHCDSTWMGDRVITTSTRTWALPTYNNHLYKQISSQSGASNDNHYFGYSTPWGYFDFNRFHCHFSPRDWQRLINNNWGFRPKRLNFKLFNIQVKEVTQNDGTTTIANNLTSTVQVFTDSEYQLPYVLGSAHQGCLPPFPADVFMVPQYGYLTLNNGSQAVGRSSFYCLEYFPSQMLRTGNNFTFSYTFEDVPFHSSYAHSQSLDRLMNPLIDQYLYYLSRTNTPSGTTTQSRLQFSQAGASDIRDQSRNWLPGPCYRQQRVSKTAADNNNSDYSWTGATKYHLNGRDSLVNPGTAMASHKDDEEKYFPQSGVLIFGKQDSGKTNVDIEKVMITDEEEIRTTNPVATEQYGSVSTNLQSGNTQAATSDVNTQGVLPGMVWQDRDVYLQGPIWAKIPHTDGHFHPSPLMGGFGPKHPPPQILIKNTPVPANPSTTFSAAKFASFITQYSTGQVGVEIEWELQKENSKRWNPEIQYTSNYNKSVNVDFTVDTNGVYSEPRPIGTRYLTRNL

SEQ ID NO: 11194 - protein, 735 aa, Artificial Sequence
  source: /note="Description of Artificial Sequence: Synthetic polypeptide"
MAADGYLPDWLEDTLSEGIRQWWKLKPGPPPPKPAERHKDDSRGLVLPGYKYLGPFNGLDKGEPVNEADAAALEHDKAYDRQLDSGDNPYLKYNHADAEFQERLKEDTSFGGNLARAVFQAKKRVLEPLGLVEEPVKTAPGKKRPVEHSPAELDSSSGTGKSGQQPARKRLNFGQTGDADSVPDPQPLGQPPAAPSGLGTNTMASGSGAPMADNNEGADGVGNSSGNWHCDSTWMGDRVITTSTRTWALPTYNNHLYKQISSQSGASNDNHYFGYSTPWGYFDFNRFHCHFSPRDWQRLINNNWGFRPKRLNFKLFNIQVKEVTQNDSTTTIANNLTSTVQVFTDSEYQLPYVLGSAHQGCLPPFPADVFMVPQYGYLTLNNGSQAVGRSSFYCLEYFPSQMLRTGNNFTFSYTFEDVPFHSSYAHSQSLDRLMNPLIDQYLYYLSRTNTPSGTTTQSRLQFSQAGASDIRDQSRNWLPGPCYRQQRVSKTAADNNNSDYSWTGATKYHLNGRDSLVNPGTAMASHKDDEEKYFPQSGVLIFGKQDSGKTNVDIEKVMITDEEEIRTTNPVATEQYGSVSTNLQSGNTQAATSDVNTQGVLPGMVWQDRDVYLQGPIWAKIPHTDGHFHPSPLMGGFGPKHPPPQILIKNTPVPANPSTTFSAAKFASFITQYSTGQVSVEIEWELQKENSKRWNPEIQYTSNYNKSVNVDFTVDTNGVYSEPRPIGTRYLTRNL

SEQ ID NO: 11195 - protein, 735 aa, Artificial Sequence
  source: /note="Description of Artificial Sequence: Synthetic polypeptide"
MAADGYLPDWLEDTLSEGIRQWWKLKPGPPPPKPAERHKDDSRGLVLPGYKYLGPFNGLDKGEPVNEADAAALEHDKAYDRQLDSGDNPYLKYNHADAEFQERLKEDTSFGGNLARAVFQAKKRVLEPLGLVEEPVKTAPGKKRPVEHSPAELDSSSGTGKSGQQPARKRLNFGQTGDADSVPDPQPLGQPPAAPSGLGTNTMASGSGAPMADNNEGADGVGNSSGNWHCDSTWMGDRVITTSTRTWALPTYNNHLYKQISSQSGASNDNHYFGYSTPWGYFDFNRFHCHFSPRDWQRLINNNWGFRPKRLNFKLFNIQVKEVTQNDGTTTIANNLTSTVQVFTDSEYQLPYVLGSAHQGCLPPFPADVFMVPQYGYLTLNNGSQAVGRSSFYCLEYFPSQMLRTGNNFTFSYTFEDVPFHSSYAHSQSLDRLMNPLIDQYLYYLSRTNTPSGTTTQSRLQFSQAGASDIRDQSRNWLPGPCYRQQRVSKTAADNNNSDYSWTGATKYHLNGRDSLVNPGTAMASHKDDEEKYFPQSGVLIFRKQDSGKTNVDIEKVMITDEEEIRTTNPVATEQYGSVSTNLQSGNTQAATSDVNTQGVLPGMVWQDRDVYLQGPIWAKIPHTDGHFHPSPLMGGFGPKHPPPQILIKNTPVPANPSTTFSAAKFAYFITQYSTGQVSVEIEWELQKENSKRWNPEIQYTSNYNKSVNVDFTVDTNGVYSEPRPIGTRYLTRNL

SEQ ID NO: 11196 - protein, 735 aa, Artificial Sequence
  source: /note="Description of Artificial Sequence: Synthetic polypeptide"
MAADGYLPDWLEDTLSEGIRQWWKLKPGPPPPKPAERHKDDSRGLVLPGYKYLGPFNGLDKGEPVNEADAAALEHDKAYDRQLDSGDNPYLKYNHADAEFQERLKEDTSFGGNLARAVFQAKKRVLEPLGLVEEPVKTAPGKKRPVEHSPAELDSSSGTGKSGQQPARKRLNFGQTGDADSVPDPQPLGQPPAAPSGLGTNTMASGSGAPMADNNEGADGVGNSSGNWHCDSTWMGDRVITTSTRTWALPTYNNHLYKQISSQSGASNDNHYFGYSTPWGYFDFNRFHCHFSPRDWQRLINNNWGFRPKRLDFKLFNIQVKEVTQNDGTTTIANNLTSTVQVFTDSEYQLPYVLGSAHQGCLPPFPADVFMVPQYGYLTLNNGSQAVGRSSFYCLEYFPSQMLRTGNNFTFSYTFEDVPFHSSYAHSQSLDRLMNPLIDQYLYYLSRTNTPSGTTTQSRLQFSQAGASDIRDQSRNWLPGPCYRQQRVSKTAADNNNSDYSWTGATKYHLNGRDSLVNPGTAMASHKDDEEKYFPQSGVLIFGKQDSGKTNVDIEKVMITDEEEIRTTNPVATEQYGSVSTNLQSGNTQAATSDVNTQGVLPGMVWQDRDVYLQGPIWAKIPHTDGHFHPSPLMGGFGPKHPPPQILIKNTPVPANPSTTFSAAKFASFITQYSTGQVSVEIEWELQKENSKRWNPEIQYTSNYNKSVNVDFTVDTNGVYSEPRPIGTRYLTRNL

SEQ ID NO: 11197 - protein, 735 aa, Artificial Sequence
  source: /note="Description of Artificial Sequence: Synthetic polypeptide"
MAADGYLPDWLEDTLSEGIRQWWKLKPGPPPPKPAERHKDDSRGLVLPGYKYLGPFNGLDKGEPVNEADAAALEHDKAYDRQLDSGDNPYLKYNHADAEFQERLKEDTSFGGNLARAVFQAKKRVLEPLGLVEEPVKTAPGKKRPVEHSPAELDSSSGTGKSGQQPARKRLNFGQTGGADSVPDPQPLGQPPAAPSGLGTNTMASGSGAPMADNNEGADGVGNSSGNWHCDSTWMGDRVITTSTRTWALPTYNNHLYKQISSQSGASNDNHYFGYSTPWGYFDFNRFHCHFSPRDWQRLINNNWGFRPKRLNFKLFNIQVKEVTQNDGTTTIANNLTSTVQVFTDSEYQLPYVLGSAHQGCLPPFPADVFMVPQYGYLTLNNGSQAVGRSSFYCLEYFPSQMLRTGNNFTFSYTFEDVPFHSSYAHSQSLDRLMNPLIDQYLYYLSRTNTPSGTTTQSRLQFSQAGASDIRDQSRNWLPGPCYRQQRVSKTAADNNNSDYSWTGATKYHLNGRDSLVNPGTAMASHKDDEEKYFPQSGVLIFGKQDSGKTNVDIEKVMITDEEEIRTTNPVATEQYGSVSTNLQSGNTQAATSDVNTQGVLPGMVWQDRDVYLQGPIWAKIPHTDGHFHPSPLMGGFGPKHPPPQILIKNTPVPANPSTTFSAAKFASFITQYSTGQVSVEIEWELQKENSKRWNPEIQYTSNYNKSVNVDFTVDTNGVYSEPRPIGTRYLTRNL

SEQ ID NO: 11198 - protein, 735 aa, Artificial Sequence
  source: /note="Description of Artificial Sequence: Synthetic polypeptide"
MAADGYLPDWLEDTLSEGIRQWWKLKPGPPPPKPAERHKDDSRGLVLPGYKYLGPFNGLDKGEPVNEADAAALEHDKAYDRQLDSGDNPYLKYNHADAEFQERLKEDTSFGGNLARAVFQAKKRVLEPLGLVEEPVKTAPGKKRPVEHSPAELDSSSGTGKSGQQPARKRLNFGQTGDADSVPDPQPLGQPPAAPSGLGTNTMASGSGAPMADNNEGADGVGNSSGNWHCDSTWMGDRVITTSTRTWALPTYNNHLYKQISSQSGASNDNHYFGYSTPWGYFDFNRFHCHFSPRDWQRLINNNWGFRPKRLNFKLFNIQVKEVTQNDGTTTIANNLTSTVQVFTDSEYQLPYVLGSAHQGCLPPFPADVFMVPQYGYLTLNNGSQAVGRSSFYCLEYFPSQMLRTGNNLTFSYTFEDVPFHSSYAHSQSLDRLMNPLIDQYLYYLSRTNTPSGTTTQSRLQFSQAGASDIRDQSRNWLPGPCYRQQRVSKTAADNNNSDYSWTGATKYHLNGRDSLVNPGTAMASHKDDEEKYFPQSGVLIFGKQDSGKTNVDIEKVMITDEEEIRTTNPVATEQYGSVSTNLQSGNTQAATSDVNTQGVLPGMVWQDRDVYLQGPIWAKIPHTDGHFHPSPLMGGFGPKHPPPQILIKNTPVPANPSTTFSAAKFASFITQYSTGQVSVEIEWELQKENSKRWNPEIQYTSNYNKSVNVDFTVDTNGVYSEPRPIGTRYLTRNL

SEQ ID NO: 11199 - protein, 735 aa, Artificial Sequence
  source: /note="Description of Artificial Sequence: Synthetic polypeptide"
MAADGYLPDWLEDTLSEGIRQWWKLKPGPPPPKPAERHKDDSRGLVLPGYKYLGPFNGLDKGEPVNEADAAALEHDKAYDRQLDSGDNPYLKYNHADAEFQERLKEDTSFGGNLARAVFQAKKRVLEPLGLVEEPVKTAPGKKRPVEHSPAELDSSSGTGKSGQQPARKRLNFGQTGDADSVPDPQPLGQPPAAPSGLGTNTMASGSGAPMADNNEGADGVGNSSGNWHCDSTWMGDRVITTSTRTWALPTYNNHLYKQISSQSGASNDNHYFGYSTPWGYFDFNRFHCHFSPRDWQRLINNNWGFRPKRLNFKLFNIQVKEVTQNDGTTTIANNLTSTVQVFTDSEYQLPYVLGSAHQGCLPPFPADVFMVPQYGYHTLNNGSQAVGRSSFYCLEYFPSQMLRTGNNFTFSYTFEDVPFHSSYAHSQSLDRLMNPLIDQYLYYLSRTNTPSGTTTQSRLQFSQAGASDIRDQSRNWLPGPCYRQQRVSKTAADNNNSDYSWTGATKYHLNGRDSLVNPGTAMASHKDDEEKYFPQSGVLIFGKQDSGKTNVDIEKVMITDEEEIRTTNPVATEQYGSVSTNLQSGNTQAATSDVNTQGVLPGMVWQDRDVYLQGPIWAKIPHTDGHFHPSPLMGGFGPKHPPPQILIKNTPVPANPSTTFSAAKFASFITQYSTGQVSVEIEWELQKENSKRWNPEIQYTSNYNKSVNVDFTVDTNGVYSEPRPIGTRYLTRNL

SEQ ID NO: 11200 - protein, 735 aa, Artificial Sequence
  source: /note="Description of Artificial Sequence: Synthetic polypeptide"
MAADGYLPDWLEDTLSEGIRQWWKLKPGPPPPKPAERHKDDSRGLVLPGYKYLGPFNGLDKGEPVNEADAAALEHDKAYDRQLDSGDNPYLKYNHADAEFQERLKEDTSFGGNLARAVFQAKKRVLEPLGLVEEPVKTAPGKKRPVEHSPAELDSSSGTGKSGQQPARKRLNFGQTGDADSVPDPQPLGQPPAAPSGLGTNTMASGSGAPMADNNEGADGVGNSSGNWHCDSTWMGDRVITTSTRTWALPTYNNHLYKQISSQSGASNDNHYFGYSTPWGYFDFNRFHCHFSPRDWQRLINNNWGFRPKRLNFKLFNIQVKEVTQNDGTTTIANNLTSTVQVFTDSEYQLPYVLGSAHQGCLPPFPADVFMVPQYGYLTLNNGSQAVGRSSFYCLEYFPSQMLRTGNNFTFSYTFEDVPFHSSYAHSQSLDRLMNPLIDQYPYYLSRTNTPSGTTTQSRLQFSQAGASDIRDQSRNWLPGPCYRQQRVSKTAADNNNSDYSWTGATKYHLNGRDSLVNPGTAMASHKDDEEKYFPQSGVLIFGKQDSGKTNVDIEKVMITDEEEIRTTNPVATEQYGSVSTNLQSGNTQAATSDVNTQGVLPGMVWQDRDVYLQGPIWAKIPHTDGHFHPSPLMGGFGPKHPPPQILIKNTPVPANPSTTFSAAKFASFITQYSTGQVSVEIEWELQKENSKRWNPEIQYTSNYNKSVNVDFTVDTNGVYSEPRPIGTRYLTRNL

SEQ ID NO: 11201 - protein, 735 aa, Artificial Sequence
  source: /note="Description of Artificial Sequence: Synthetic polypeptide"
MAADGYLPDWLEDTLSEGIRQWWKLKPGPPPPKPAERHKDDSRGLVLPGYKYLGPFNGLDKGEPVNEADAAALEHDKAYDRQLDSGDNPYLKYNHADAEFQERLKEDTSFGGNLARAVFQAKKRVLEPLGLVEEPVKTAPGKKRPVEHSPAELDSSSGTGKSGQQPARKRLNFGQTGDADSVPDPQPLGQPPAAPSGLGTNTMASGSGAPMADNNEGADGVGNSSGNWHCDSTWMGDRVITTSTRTWALPTYNNHLYKQISSQSGASNDNHYFGYSTPWGYFDFNRFHCHFSPRDWQRLINNNWGFRPKRLNFKLFNIQVKEVTQNDGTTTIANNLTSTVQVFTDSEYQLPYVLGSAHQGCLPPFPADVFMVPQYGYLTLNNGSQAVGRSSFYCLEYFPSQMLRTGNNFTFSYTFEDVPFHSSYAHSQSLDRLMNPLIDQYLYYLSRTNTPSGTTTQSRLQFSQAGASDIRDQSRNWLPGPCYRQQRVSKTAADNNNSDYSWTGATKYHLNGRDSLVNPGTAMASHKDDEEKYFPQSGVLIFGKQDSGKTNVDIEKVMITDEEEIRTTNPVATEQYGSVSTNLQSGNTQAATSDVNTQGVLPGMVWQDRDVYLQGPIWAKIPHTDGHFHPSPLMGGFGPKHPPPQILIKNTPVPANPPTTFSAAKFASFITQYSTGQVSVEIEWELQKENSKRWNPEIQYTSNYNKSVNVDFTVDTNGVYSEPRPIGTRYLTRNL

SEQ ID NO: 11202 - protein, 735 aa, Artificial Sequence
  source: /note="Description of Artificial Sequence: Synthetic polypeptide"
MAADGYLPDWLEDTLSEGIRQWWKLKPGPPPPKPAERHKDDSRGLVLPGYKYLGPFNGLDKGEPVNEADAAALEHDKAYDRQLDSGDNPYLKYNHADAEFQERLKEDTSFGGNLARAVFQAKKRVLEPLGLVEEPVKTAPGKKRPVEHSPAELDSSSGTGKSGQQPARKRLNFGQTGDADSVPDPQPLGQPPAAPSGLGTNTMASGSGAPMADNNEGADGVGNSSGNWHCDSTWMGDRVITTSTRTWALPTYNNHLYKQISSQSGASNDNHYFGYSTPWGYFDFNRFHCHFSPRDWQRLINNNWGFRPKRLNFKLFNIQVKEVTQNDGTTTIANNLTSTVQVFTDSEYQLPYVLGSAHQGCLPPFPADVFMVPQYGYLTLNNGSQAVGRSSFYCLEYFPSQMLRTGNNFTFSYTFEDVPFHSSYAHSQSLDRLMNPLIDQYLYYLSRTNTPSGTTTQSRLQFSQAGASDIRDQSRNWLPGPCYRQQRVPKTAADNNNSDYSWTGATKYHLNGRDSLVNPGTAMASHKDDEEKYFPQSGVLIFGKQDSGKTNVDIEKVMITDEEEIRTTNPVATEQYGSVSTNLQSGNTQAATSDVNTQGVLPGMVWQDRDVYLQGPIWAKIPHTDGHFHPSPLMGGFGPKHPPPQILIKNTPVPANPSTTFSAAKFASFITQYSTGQVSVEIEWELQKENSKRWNPEIQYTSNYNKSVNVDFTVDTNGVYSEPRPIGTRYLTRNL

SEQ ID NO: 11203 - protein, 735 aa, Artificial Sequence
  source: /note="Description of Artificial Sequence: Synthetic polypeptide"
MAADGYLPDWLEDTLSEGIRQWWKLKPGPPPPKPAERHKDDSRGLVLPGYKYLGPFNGLDKGEPVNEADAAALEHDKAYDRQLDSGDNPYLKYNHADAEFQERLKEDTSFGGNLARAVFQAKKRVLEPLGLVEEPVKTAPGKKRPVEHSPAELDSSSGTGKSGQQPARKRLNFGQTGDADSVPDPQPLGQPPAAPSGLGTNTMASGSGAPMADNNEGADGVGNSSGNWHCDSTWMGDRVITTSTRTWALPTYNNHLYKQISSQSGASNDNHYFGYSTPWGYFDFNRFHCHFSPRDWQRLINNNWGFRPKRLNFKLFNIQVKEVTQNDGTTTIANNLTSTVQVFTDSEYQLPYVLGSAHQGCLPPFPADVFMVPQYGYLTLNNGSQAVGRSSFYCLEYFPSQMLRTGNNFTFSYTFEDVPFHSSYAHSQSLDRLMNPLIDQYLYYLSRTNTPSGTTTQSRLQFSQAGASDIRDQSRNWLPGPCYRQQRVSKTAADNNNSDYSWTGATKYHLNGRDSLVNPGTAMASHKDDEEKYFPQSGVLIFGKQDSGKTNVDIEKVMITDEEEIRTTNPVATEQYGSVSTNLQSGNTQAATSDVNTQGVLPGMVWQDRDVYLQGPIWAKIPHTDGHFHPSPLMGGFGPKHPPPQILIKNTPVPANPSTTFSAAKFASFITQYSTGQVSVEIEWELQKENSKRWNPEIQYTSNYNKSVNVDFTVDTNGVYSEPRPIGTRYLTRNL

SEQ ID NO: 11204 - protein, 735 aa, Artificial Sequence
  source: /note="Description of Artificial Sequence: Synthetic polypeptide"
MAADGYLPDWLEDTLSEGIRQWWKLKPGPPPPKPAERHKDDSRGLVLPGYKYLGPFNGLDKGEPVNEADAAALEHDKAYDRQLDSGDNPYLKYNHADAEFQERLKEDTPFGGNLARAVFQAKKRVLEPLGLVEEPVKTAPGKKRPVEHSPAELDSSSGTGKSGQQPARKRLNFGQTGDADSVPDPQPLGQPPAAPSGLGTNTMASGSGAPMADNNEGADGVGNSSGNWHCDSTWMGDRVITTSTRTWALPTYNNHLYKQISSQSGASNDNHYFGYSTPWGYFDFNRFHCHFSPRDWQRLINNNWGFRPKRLNFKLFNIQVKEVTQNDGTTTIANNLTSTVQVFTDSEYQLPYVLGSAHQGCLPPFPADVFMVPQYGYLTLNNGSQAVGRSSFYCLEYFPSQMLRTGNNFTFSYTFEDVPFHSSYAHSQSLDRLMNPLIDQYLYYLSRTNTPSGTTTQSRLQFSQAGASDIRDQSRNWLPGPCYRQQRVSKTAADNNNSDYSWTGATKYHLNGRDSLVNPGTAMASHKDDEEKYFPQSGVLIFGKQDSGKTNVDIEKVMITDEEEIRTTNPVATEQYGSVSTNLQSGNTQAATSDVNTQGVLPGMVWQDRDVYLQGPIWAKIPHTDGHFHPSPLMGGFGPKHPPPQILIKNTPVPANPSTTFSAAKFASFITQYSTGQVSVEIEWELQKENSKRWNPEIQYTSNYNKSVNVDFTVDTNGVYSEPRPIGTRYLTRNL

SEQ ID NO: 11205 - protein, 735 aa, Artificial Sequence
  source: /note="Description of Artificial Sequence: Synthetic polypeptide"
MAADGYLPDWLEDTLSEGIRQWWKLKPGPPPPKPAERHKDDSRGLVLPGYKYLGPFNGLDKGEPVNEADAAALEHDKAYDRQLDSGDNPYLKYNHADAEFQERLKEDTSFGGNLARAVFQAKKRVLEPLGLVEEPVKTAPGKKRPVEHSPAELDSSSGTGKSGQQPARKRLNFGQTGDADSVPDPQPLGQPPAAPSGLGTNTMASGSGAPMADNNEGADGVGNSSGNWHCDSTWMGDRVITTSTRTWALPTYNNHLYKQISSQSGASNDNHYFGYSTPWGYFDFNRFHCHFSPRDWQRLINNNWGFRPKRLNSKLFNIQVKEVTQNDGTTTIANNLTSTVQVFTDSEYQLPYVLGSAHQGCLPPFPADVFMVPQYGYLTLNNGSQAVGRSSFYCLEYFPSQMLRTGNNFTFSYTFEDVPFHSSYAHSQSLDRLMNPLIDQYLYYLSRTNTPSGTTTQSRLQFSQAGASDIRDQSRNWLPGPCYRQQRVSKTAADNNNSDYSWTGATKYHLNGRDSLVNPGTAMASHKDDEEKYFPQSGVLIFGKQDSGKTNVDIEKVMITDEEEIRTTNPVATEQYGSVSTNLQSGNTQAATSDVNTQGVLPGMVWQDRDVYLQGPIWAKIPHTDGHFHPSPLMGGFGPKHPPPQILIKNTPVPANPSTTFSAAKFASFITQYSTGQVSVEIEWELQKENSKRWNPEIQYTSNYNKSVNVDFTVDTNGVYSEPRPIGTRYLTRNL

SEQ ID NO: 11206 - protein, 735 aa, Artificial Sequence
  source: /note="Description of Artificial Sequence: Synthetic polypeptide"
MAADGYLPDWLEDTLSEGIRQWWKLKPGPPPPKPAERHKDDSRGLVLPGYKYLGPFNGLDKGEPVNEADAAALEHDKAYDRQLDSGDNPYLKYNHADAEFQERLKEDTSFGGNLARAVFQAKKRVLEPLGLVEEPVKTAPGKKRPVEHSPAELDSSSGTGKSGQQPARKRLNFGQTGDADSVPDPQPLGQPPAAPSGLGTNTMASGSGAPMADNNEGADGVGNSSGNWHCDSTWMGDRVITTSTRTWALPTYNNHLYKQISSQSGASNDNHYFGYSTPWGYFDFNRFHCHFSPRDWQRLINNNWGFRPKRLNFKLFNIQVKEVTQNDGTTTIANNLTSTVQVFTDSEYQLPYVLGSAHQGCLPPFPADVFMVPQYGYLTLNNGSQAVGRSSFYCLEYFPSQMLRTGNNFTFSYTFEDVPFHSSYAHSQGLDRLMNPLIDQYLYYLSRTNTPSGTTTQSRLQFSQAGASDIRDQSRNWLPGPCYRQQRVSKTAADNNNSDYSWTGATKYHLNGRDSLVNPGTAMASHKDDEEKYFPQSGVLIFGKQDSGKTNVDIEKVMITDEEEIRTTNPVATEQYGSVSTNLQSGNTQAATSDVNTQGVLPGMVWQDRDVYLQGPIWAKIPHTDGHFHPSPLMGGFGPKHPPPQILIKNTPVPANPSTTFSAAKFASFITQYSTGQVSVEIEWELQKENSKRWNPEIQYTSNYNKSVNVDFTVDTNGVYSEPRPIGTRYLTRNL

SEQ ID NO: 11207 - protein, 735 aa, Artificial Sequence
  source: /note="Description of Artificial Sequence: Synthetic polypeptide"
MAADGYLPDWLEDTLSEGIRQWWKLKPGPPPPKPAERHKDDSRGLVLPGYKYLGPFNGLDKGEPVNEADAAALEHDKAYDRQLDSGDNPYLKYNHADAEFQERLKEDTSFGGNLARAVFQAKKRVLEPLGLVEEPVKTAPGKKRPVEHSPAELDSSSGTGKSGQQPARKRLNFGQTGDADSVPDPQPLGQPPAAPSGLGTNTMASGSGAPMADNNEGADGVGNSSGNWHCDSTWMGDRVITTSTRTWALPTYNNHLYKQISSQSGASNDNHYFGYSTPWGYFDFNRFHCHFSPRDWQRLINNNWGFRPKRLNFKLFNIQVKEVTQNDGTTTIANNLTSTVQVFTDSEYQLPYVLGSAHQGCLPPLPADVFMVPQYGYLTLNNGSQAVGRSSFYCLEYFPSQMLRTGNNFTFSYTFEDVPFHSSYAHSQSLDRLMNPLIDQYLYYLSRTNTPSGTTTQSRLQFSQAGASDIRDQSRNWLPGPCYRQQRVSKTAADNNNSDYSWTGATKYHLNGRDSLVNPGTAMASHKDDEEKYFPQSGVLIFGKQDSGKTNVDIEKVMITDEEEIRTTNPVATEQYGSVSTNLQSGNTQAATSDVNTQGVLPGMVWQDRDVYLQGPIWAKIPHTDGHFHPSPLMGGFGPKHPPPQILIKNTPVPANPSTTFSAAKFASFITQYSTGQVSVEIEWELQKENSKRWNPEIQYTSNYNKSVNVDFTVDTNGVYSEPRPIGTRYLTRNL

SEQ ID NO: 11208 - protein, 735 aa, Artificial Sequence
  source: /note="Description of Artificial Sequence: Synthetic polypeptide"
MAADGYLPDWLEDTLSEGIRQWWKLKPGPPPPKPAERHKDDSRGLVLPGYKYLGPFNGLDKGEPVNEADAAALEHDKAYDRQLDSGDNPYLKYNHADAEFQERLKEDTSFGGNLARAVFQAKKRVLEPLGLVEEPVKTAPGKKRPVEHSPAELDSSSGTGKSGQQPARKRLNFGQTGDADSVPDPQPLGQPPAAPSGLGTNTMASGSGAPMADNNEGADGVGNSSGNWHCDSTWMGDRVITTSTRTWALPTYNNHLYKQISSQSGASNDNHYFGYSTPWGYFDFNRFHCHFSPRDWQRPINNNWGFRPKRLNFKLFNIQVKEVTQNDGTTTIANNLTSTVQVFTDSEYQLPYVLGSAHQGCLPPFPADVFMVPQYGYLTLNNGSQAVGRSSFYCLEYFPSQMLRTGNNFTFSYTFEDVPFHSSYAHSQSLDRLMNPLIDQYLYYLSRTNTPSGTTTQSRLQFSQAGASDIRDQSRNWLPGPCYRQQRVSKTAADNNNSDYSWTGATKYHLNGRDSLVNPGTAMASHKDDEEKYFPQSGVLIFGKQDSGKTNVDIEKVMITDEEEIRTTNPVATEQYGSVSTNLQSGNTQAATSDVNTQGVLPGMVWQDRDVYLQGPIWAKIPHTDGHFHPSPLMGGFGPKHPPPQILIKNTPVPANPSTTFSAAKFASFITQYSTGQVSVEIEWELQKENSKRWNPEIQYTSNYNKSVNVDFTVDTNGVYSEPRPIGTRYLTRNL

SEQ ID NO: 11209 - protein, 735 aa, Artificial Sequence
  source: /note="Description of Artificial Sequence: Synthetic polypeptide"
MAADGYLPDWLEDTLSEGIRQWWKLKPGPPPPKPAERHKDDSRGLVLPGYKYLGPFNGLDKGEPVNEADAAALEHDEAYDRQLDSGDNPYLKYNHADAEFQERLKEDTSFGGNLARAVFQAKKRVLEPLGLVEEPVKTAPGKKRPVEHSPAELDSSSGTGKSGQQPARKRLNFGQTGDADSVPDPQPLGQPPAAPSGLGTNTMASGSGAPMADNNEGADGVGNSSGNWHCDSTWMGDRVITTSTRTWALPTYNNHLYKQISSQSGASNDNHYFGYSTPWGYFDFNRFHCHFSPRDWQRLINNNWGFRPKRLNFKLFNIQVKEVTQNDGTTTIVNNLTSTVQVFTDSEYQLPYVLGSAHQGCLPPFPADVFMVPQYGYLTLNNGSQAVGRSSFYCLEYFPSQMLRTGNNFTFSYTFEDVPFHSSYAHSQSLDRLMNPLIDQYLYYLSRTNTPSGTTTQSRLQFSQAGASDIRDQSRNWLPGPCYRQQRVSKTAADNNNSDYSWTGATKYHLNGRDSLVNPGTAMASHKDDEEKYFPQSGVLIFGKQDSGKTNVDIEKVMITDEEEIRTTNPVATEQYGSVSTNLQSGNTQAATSDVNTQGVLPGMVWQDRDVYLQGPIWAKIPHTDGHFHPSPLMGGFGPKHPPPQILIKNTPVPANPSTTFSAAKFAYFITQYSTGQVSVEIEWELQKGNSKRWNPEIQYTSNYNKSVNVDFTVDTNGVYSEPRPIGTRYLTRNL

SEQ ID NO: 11210 - protein, 735 aa, Artificial Sequence
  source: /note="Description of Artificial Sequence: Synthetic polypeptide"
MAADGYLPDWLEDTLSEGIRQWWKLKPGPPPPKPAERHKDDSRGLVLPGYKYLGPFNGLDKGEPVNEADAAALEHDKAYDRQLDSGDNPYLKYNHADAEFQERLKEDTSFGGNLARAVFQAKKRVLEPLGLVEEPVKTAPGKKRPVEHSPAELDSSSGTGKSGQQPARKRLNFGQTGDADSVPDPQPLGQPPAAPSGLGTNTMASGSGAPMADNNEGADGVGNSSGNWHCDSTWMGDRVITTSTRTWALPTYNNHLYKQISSQSGASNDNHYFGYSTPWGYFDFNRFHCHFSPRDWQRLINNNWGFRPKRLNFKLFNIQVKEVTQNDGTTTIANNLTSTVQVFTDSEYQLPYVLGSAHQGCLPPFPADVFMVPQYGYLTLNNGSQAVGRSSFYCLEYFPSQMLRTGNNCTFSYTFEDVPFHSSYAHSQSLDRLMNPLIDQYLYYLSRTNTPSGTTTQSRLQFSQAGASDIRDQSRNWLPGPCYRQQRVSKTAADNNNSDYSWTGATKYHLNGRDSLVNPGTAMASHKDDEEKYFPQSGVLIFGKQDSGKTNVDIEKVMITDEEEIRTTNPVATEQYGSVSTNLQSGNTQAATSDVNTQGVLPGMVWQDRDVYLQGPIWAKIPHTDGHFHPSPLMGGFGPKHPPPQILIKNTPVPANPSTTFSAAKFASFITQYSTGQVSVEIEWELQKENSKRWNPEIQYTSNYNKSVNVDFTVDTNGVYSEPRPIGTRYLTRNL

SEQ ID NO: 11211 - protein, 735 aa, Artificial Sequence
  source: /note="Description of Artificial Sequence: Synthetic polypeptide"
MAADGYLPDWLEDTLSEGIRQWWKLKPGPPPPKPAERHKDDSRGLVLPGYKYLGPFNGLDKGEPVNEADAAALEHDKAYDRQLDSGDNPYLKYNHADAEFQERLKEDTSFGGNLARAVFQAKKRVLEPLGLVEEPVKTAPGKKRPVEHSPAELDSSSGTGKSGQQPARKRLNFGQTGDADSVPDPQPLGQPPAAPSGLGTNTMASGSGAPMADNNEGADGVGNSSGNWHCDSTWMGDRVITTSTRTWALPTYNNHLYKQISSQSGASNDNHYFGYSTPWGYFDFNRFHCHFSPRDWQRLINNNWGFRPKRPNFKLFNIQVKEVTQNDGTTTIANNLTSTVQVFTDSEYQLPYVLGSAHQGCLPPFPADVFMVPQYGYLTLNNGSQAVGRSSFYCLEYFPSQMLRTGNNFTFSYTFEDVPFHSSYAHSQSLDRLMNPLIDQYLYYLSRTNTPSGTTTQSRLQFSQAGASDIRDQSRNWLPGPCYRQQRVSKTAADNNNSDYSWTGATKYHLNGRDSLVNPGTAMASHKDDEEKYFPQSGVLIFGKQDSGKTNVDIEKVMITDEEEIRTTNPVATEQYGSVSTNLQSGNTQAATSDVNTQGVLPGMVWQDRDVYLQGPIWAKIPHTDGHFHPSPLMGGFGPKHPPPQILIKNTPVPANPSTTFSAAKFASFITQYSTGQVSVEIEWELQKENSKRWNPEIQYTSNYNKSVNVDFTVDTNGVYSEPRPIGTRYLTRNL

SEQ ID NO: 11212 - protein, 735 aa, Artificial Sequence
  source: /note="Description of Artificial Sequence: Synthetic polypeptide"
MAADGYLPDWLEDTLSEGIRQWWKLKPGPPPPKPAERHKDDSRGLVLPGYKYLGPFNGLDKGEPVNEADAAALEHDKAYDRQLDSGDNPYLKYNHADAEFQERLKEDTSFGGNLARAVFQAKKRVLEPLGLVEEPVKTAPGKKRPVEHSPAELDSSSGTGKSGQQPARKRLNFGQTGDADSVPDPQPLGQPPAAPSGLGTNTMASGSGAPMAGNNEGADGVGNSSGNWHCDSTWMGDRVITTSTRTWALPTYNNHLYKQISSQSGASNDNHYFGYSTPWGYFDFNRFHCHFSPRDWQRLINNNWGFRPKRLNFKLFNIQVKEVTQNDGTTTIANNLTSTVQVFTDSEYQLPYVLGSAHQGCLPPFPADVFMVPQYGYLTLNNGSQAVGRSSFYCLEYFPSQMLRTGNNFTFSYTFEDVPFHSSYAHSQSLDRLMNPLIDQYLYYLSRTNTPSGTTTQSRLQFSQAGASDIRDQSRNWLPGPCYRQQRVSKTAADNNNSDYSWTGATKYHLNGRDSLVNPGTAMASHKDDEEKYFPQSGVLIFGKQDSGKTNVDIEKVMITDEEEIRTTNPVATEQYGSVSTNLQSGNTQAATSDVNTQGVLPGMVWQDRDVYLQGPIWAKIPHTDGHFHPSPLMGGFGPKHPPPQILIKNTPVPANPSTTFSAAKFASFITQYSTGQVSVEIEWELQKENSKRWNPEIQYTSNYNKSVNVDFTVDTNGVYSEPRPIGTRYLTRNL

SEQ ID NO: 11213 - protein, 735 aa, Artificial Sequence
  source: /note="Description of Artificial Sequence: Synthetic polypeptide"
MAADGYLPDWLEDTLSEGIRQWWKLKPGPPPPKPAERHKDDSRGLVLPGYKYLGPFNGLDKGEPVNEADAAALEHDKAYDRQLDSGDNPYLKYNHADAEFQERLKEDTPFGGNLARAVFQAKKRVLEPLGLVEEPVKTAPGKKRPVEHSPAELDSSSGTGKSGQQPARKRLNFGQTGDADSVPDPQPLGQPPAAPSGLGTNTMASGSGAPMADNNEGADGVGNSSGNWHCDSTWMGDRVITTSTRTWALPTYNNHLYKQISSQSGASNDNHYFGYSTPWGYFDFNRFHCHFSPRDWQRLINNNWGFRPKRLNFKLFNIQVKEVTQNDGTTTIANNLTSTVQVFTDSEYQLPYVLGSAHQGCLPPFPADVFMVPQYGYLTLNNGSQAVGRSSFYCLEYFPSQMLRTGNNFTFSYTFEDVPFHSSYAHSQSLDRLMNPLIDQYLYYLSRTNTPSGTTTQSRLQFSQAGASDIRDQSRNWLPGPCYRQQRVSKTAADNNNSDYSWTGATKYHLNGRDSLVNPGTAMASHKDDEEKYFPQSGVLIFGKQDSGKTNVDIEKVMITDEEEIRTTNPVATEQYGSVSTNLQSGNTQAATSDVNTQGVLPGMVWQDRDVYLQGPIWAKIPHTDGHFHPSPLMGGFGPKHPPPQILIKNTPVPANPSTTFSAAKFASFITQYSTGQVSVEIEWELQKENSKRWNPEIQYTSNYNKSVNVDFTMDTNGVYSEPRPIGTRYLTRNL

SEQ ID NO: 11214 - protein, 735 aa, Artificial Sequence
  source: /note="Description of Artificial Sequence: Synthetic polypeptide"
MAADGYLPDWLEDTLSEGIRQWWKLKPGPPPPKPAERHKDDSRGLVLPGYKYLGPFNGLDKGEPVNEADAAALEHDKAYDRQLDSGDNPYLKYNHADAEFQERLKEDTSFGGNLARAVFQAKKRVLEPLGLVEEPVKTAPGKKRPVEHSPAELDSSSGTGKSGQQPARKRLNFGQTGDADSVPDPQPLGQPPAAPSGLGTNTMASGSGAPMADNNEGADGVGNSSGNWHCDSTWMGDRVITTSTRTWALPTYNNHLYKQISSQSGASNDNHYFGYSTPWGYFDFNRFHCHFSPRDWQRLINNNWGFRPKRLNFKLFNIQVKEVTQNDGTTTIANNLTSTVQVFTDSEYQLPYVLGSAHQGCLPPFPADVFMVPQYGYLTLNNGSQAVGRSSFYCLEYFPSQMLRTGNNFTFSYTFEDVPFHSSYAHSQSLDRLMNPLIDQYLYYLSRTNTPSGTTTQPRLQFSQAGASDIRDQSRNWLPGPCYRQQRVSKTAADNNNSDYSWTGATKYHLNGRDSLVNPGTAMASHKDDEEKYFPQSGVLIFGKQDSGKTNVDIEKVMITDEEEIRTTNPVATEQYGSVSTNLQSGNTQAATSDVNTQGVLPGMVWQDRDVYLQGPIWAKIPHTDGHFHPSPLMGGFGPKHPPPQILIKNTPVPANPSTTFSAAKFASFITQYSTGQVSVEIEWELQKENSKRWNPEIQYTSNYNKSVNVDFTVDTNGVYSEPRPIGTRYLTRNL

SEQ ID NO: 11215 - protein, 735 aa, Artificial Sequence
  source: /note="Description of Artificial Sequence: Synthetic polypeptide"
MAADGYLPDWLEDTLSEGIRQWWKLKPGPPPPKPAERHKDDSRGLVLPGYKYLGPFNGLDKGEPVNEADAAALEHDKAYDRQLDSGDNPYLKYNHADAEFQERLKEDTSFGGNLARAVFQAKKRVLEPLGLVEEPVKTAPGKKRPVEHSPAELDSSSGTGKSGQQPARKRLNFGQTGDADSVPDPQPLGQPPAAPSGLGTNTMASGSGAPMADNNEGADGVGNSSGNWHCDSTWMGDRVITTSTRTWALPTYNNHLYKQISSQSGASNDNHYFGYSTPWGYFDFNRFHCHFSPRDWQRLINNNWGFRPKRLNFKLFNIQVKEVTQNDGTTTIANNLTSTVQVFTDSEYQLPYVLGSAHQGCLPPFPADVFMVPQYGYLTLNNGSQAVGRSSFYCLEYFPSQMLRTGNNFTFSYTFEDVPFHSSYAHSQSLDRLMNPLIDQYLYYLSRTNTPSGTTTQSRLQFSQAGASDIRDQSRNWLPGPCYRQQRVSKTAADNNNSDYSWTGATKHHLNGRDSLVNPGTAMASHKDDEEKYFPQSGVLIFGKQDSGKTNVDIEKVMITDEEEIRTTNPVATEQYGSVSTNLQSGNTQAATSDVNTQGVLPGMVWQDRDVYLQGPIWAKIPHTDGHFHPSPLMGGFGPKHPPPQILIKNTPVPANPSTTFSAAKFASFITQYSTGQVSVEIEWELQKENSKRWNPEIQYTSNYNKSVNVDFTVDTNGVYSEPRPIGTRYLTRNL

SEQ ID NO: 11216 - protein, 735 aa, Artificial Sequence
  source: /note="Description of Artificial Sequence: Synthetic polypeptide"
MAADGYLPDWLEDTLSEGIRQWWKLKPGPPPPKPAERHKDDSRGLVLPGYKYLGPFNGLDKGEPVNEADAAALEHDKAYDRQLDSGDNPYLKYNHADAEFQERLKEDTSFGGNLARAVFQAKKRVLEPLGLVEEPVKTAPGKKRPVEHSPAELDSSSGTGKSGQQPARKRLNFGQTGDADSVPDPQPLGQPPAAPSGLGTNTMASGSGAPMADNNEGADGVGNSSGNWHCDSTWMGDRVITTSTRTWALPTYNNHLYKQISSQSGASNDNHYFGYSTPWGYFDLNRFHCHFSPRDWQRLINNNWGFRPKRLNFKLFNIQVKEVTQNDGTTTIANNLTSTVQVFTDSEYQLPYVLGSAHQGCLPPFPADVFMVPQYGYLTLNNGSQAVGRSSFYCLEYFPSQMLRTGNNFTFSYTFEDVPFHSSYAHSQSLDRLMNPLIDQYLYYLSRTNTPSGTTTQSRLQFSQAGASDIRDQSRNWLPGPCYRQQRVSKTAADNNNSDYSWTGATKYHLNGRDSLVNPGTAMASHKDDEEKYFPQSGVLIFGKQDSGKTNVDIEKVMITDEEEIRTTNPVATEQYGSVSTNLQSGNTQAATSDVNTQGVLPGMVWQDRDVYLQGPIWAKIPHTDGHFHPSPLMGGFGPKHPPPQILIKNTPVPANPSTTFSAAKFASFITQYSTGQVSVEIEWELQKENSKRWNPEIQYTSNYNKSVNVDFTVDTNGVYSEPRPIGTRYLTRNL

SEQ ID NO: 11217 - protein, 735 aa, Artificial Sequence
  source: /note="Description of Artificial Sequence: Synthetic polypeptide"
MAADGYLPDWLEDTLSEGIRQWWKLKPGPPPPKPAERHKDDSRGLVLPGYKYLGPLNGLDKGEPVNEADAAALEHDKAYDRQLDSGDNPYLKYNHADAEFQERLKEDTSFGGNLARAVFQAKKRVLEPLGLVEEPVKTAPGKKRPVEHSPAELDSSSGTGKSGQQPARKRLNFGQTGDADSVPDPQPLGQPPAAPSGLGTNTMASGSGAPMADNNEGADGVGNSSGNWHCDSTWMGDRVITTSTRTWALPTYNNHLYKQISSQSGASNDNHYFGYSTPWGYFDFNRFHCHFSPRDWQRLINNNWGFRPKRLNFKLFNIQVKEVTQNDGTTTIANNLTSTVQVFTDSEYQLPYVLGSAHQGCLPPFPADVFMVPQYGYLTLNNGSQAVGRSSFYCLEYFPSQMLRTGNNFTFSYTFEDVPFHSSYAHSQSLDRLMNPLIDQYLYYLSRTNTPSGTTTQSRLQFSQAGASDIRDQSRNWLPGPCYRQQRVSKTAADNNNSDYSWTGATKYHLNGRDSLVNPGTAMASHKDDEEKYFPQSGVLIFGKQDSGKTNVDIEKVMITDEEEIRTTNPVATEQYGSVSTNLQSGNTQAATSDVNTQGVLPGMVWQDRDVYLQGPIWAKIPHTDGHFHPSPLMGGFGPKHPPPQILIKNTPVPANPSTTFSAAKFASFITQYSTGQVSVEIEWELQKENSKRWNPEIQYTSNYNKSVNVDFTVDTNGVYSEPRPIGTRYLTRNL

SEQ ID NO: 11218 - protein, 735 aa, Artificial Sequence
  source: /note="Description of Artificial Sequence: Synthetic polypeptide"
MAADGYLPDWLEDTLSEGIRQWWKLKPGPPPPKPAERHKDDSRGLVLPGYKYLGPFNGLDKGEPVNEADAAALEHDKAYDRQLDSGDNPYLKYNHADAEFQERLKEDTSFGGNLARAVFQAKKRVLEPLGLVEEPVKTAPGKKRPVEHSPAELDSSSGTGKSGQQPARKRLNFGQTGDADSVPDPQPLGQPPAAPSGLGTNTMASGSGAPMADNNEGADGVGNSSGNWHCDSTWMGDRVITTSTRTWALPTYNNHLYKQISSQSGASNDNHYFGYSTPWGYFDFNRFHCHFSPRDWQRLINNNWGFRPKRLNFKLFNIQVKEVTQNDGTTTIANNLTSTVQVFTDSEYQLPYVLGSAHQGCLPPFPADVFMVPQYGYLTLNNGSQAVGRSSFYCLEYFPSQMLRTGNNFTFSYTFEDVPFHSSYAHSQSLDRLMNPLIDQYLYYLSRTNTPSGTTTQSRLQFSQAGASDIRDQSRNWLPGPCYRQQRVSKTAADNNNSDYSWTGATKYHLNGRDSLVNPGTAMASHKDDEEKYFPQSGVLIFGKQDSGKTNVDIEKVMITDEEEIRTTNPVATEQYGSVSTNLQSGNTQAATSDVNTQGVLPGMVWQDRDVYLQGPIWAKIPHTDGHFHPSPLMGGFGPKHPPPQILIKNTPVPANPSTTFSAAKFASFITQYSTGQVSVEIEWELQKENSKRWNPEIQYTSNYNKSVNVDFTVDTNGVYSEPRPIGTRYLARNL

SEQ ID NO: 11219 - protein, 735 aa, Artificial Sequence
  source: /note="Description of Artificial Sequence: Synthetic polypeptide"
MAADGYLPDWLEDTLSEGIRQWWKLKPGPPPPKPAERHKDDSRGLVLPGYKYLGPFNGLDKGEPVNEADAAALEHDKAYDRQLDSGDNPYLKYNHADAEFQERLKEDTSFGGNLARAVFQAKKRVLEPLGLVEEPVKTAPGKKRPVEHSPAELDSSSGTGKSGQQPARKRLNFGQTGDADSVPDPQPLGQPPAAPSGLGTNTMASGSGAPMADNNEGADGVGNSSGNWHCDSTWMGDRVITTSTRTWALPTYNNHLYKQISSQSGASNDNHYFGYSTPWGYFDFNRFHCHFSPRDWQRLINNNWGFRPKRLNFKLFNIQVKEVTQNDGTTTIANNLTSTVQVFTDSEYQLPYVLGSAHQGCLPPFPADVFMVPQYGYLTLNNGSQAVGRSSFYCLEYFPSQMLRTGNNFTLSYTFEDVPFHSSYAHSQSLDRLMNPLIDQYLYYLSRTNTPSGTTTQSRLQFSQAGASDIRDQSRNWLPGPCYRQQRVSKTAADNNNSDYSWTGATKYHLNGRDSLVNPGTAMASHKDDEEKYFPQSGVLIFGKQDSGKTNVDIEKVMITDEEEIRTTNPVATEQYGSVSTNLQSGNTQAATSDVNTQGVLPGMVWQDRDVYLQGPIWAKIPHTDGHFHPSPLMGGFGPKHPPPQILIKNTPVPANPSTTFSAAKFASFITQYSTGQVSVEIEWELQKENSKRWNPEIQYTSNYNKSVNVDFTVDTNGVYSEPRPIGTRYLTRNL

SEQ ID NO: 11220 - protein, 735 aa, Artificial Sequence
  source: /note="Description of Artificial Sequence: Synthetic polypeptide"
MAADGYLPDWLEDTLSEGIRQWWKLKPGPPPPKPAERHKDDSRGLVLPGYKYLGPFNGLDKGEPVNEADAAALEHDKAYDRQLDSGDNPYLKYNHADAEFQERLKEDTSFGGNLARAVFQAKKRVLEPLGLVEEPVKTAPGKKRPVEHSPAELDSSSGTGKSGQQPARKRLNFGQTGDADSVPDPQPLGQPPAAPSGLGTNTMASGSGAPMADNNEGADGVGNSSGNWHCDSTWMGDRVITTSTRTWALPTYNNHLYKQISSQSGASNDNHYFGYSTPWGYFDFNRFHCHFSPRDWQRLINNNWGFRPKRLNFKLFNIQVKEVTQNDGTTTIANNLTSTVQVFTDSEYQLPYVLGSAHQGCLPPFPADVFMVPQYGYLTLNNGSQAVGRSSFYCLEYFPSQMLRTGNNFTFSYTFEDVPFHSSYAHSQSLDRLMNPLIDQYLYYLSRTNTPSGTTTQSRLQFSQAGASDIRDQSRNWLPGPCYRQQRVSKTAADNNNSDYSWTGATKYHLNGRDSLVNPGTAMASHKDDEEKYFPQSGVLIFRKQDSGKTNVDIEKVMITDEEEIRTTNPVATEQYGSVSTNLQSGNTQAATSDVNTQGVLPGMVWQDRDVYLQGPIWAKIPHTDGHFHPSPLMGGFGPKHPPPQILIKNTPVPANPSTTFSAAKFASFITQYSTGQVSVEIEWELQKENSKRWNPEIQYTSNYNKSVNVDFTVDTNGVYSEPRPIGTRYLTRNL

SEQ ID NO: 11221 - protein, 735 aa, Artificial Sequence
  source: /note="Description of Artificial Sequence: Synthetic polypeptide"
MAADGYLPDWLEDTLSEGIRQWWKLKPGPPPPKPAERHKDDSRGLVLPGYKYLGPFNGLDKGEPVNEADAAALEHDKAYDRQLDSGDNPYLKYNHADAEFQERLKEDTSFGGNLARAVFQAKKRVLEPLGLVEEPVKTAPGKKRPVEHSPAELDSSSGTGKSGQQPARKRLNFGQTGDADSVPDPQPLGQPPAAPSGLGTNTMASGSGAPMADNNEGADGVGNSSGNWHCDSTWMGDRVITTSTRTWALPTYNNHLYKQISSQSGASNDNHYFGYSTPWGYFDFNRFHCHFSPRDWQRLINNNWGFRPKRLNFKLFNIQVKEVTQNDGTTTIANNLTSTVQVFTDSEYQLPYVLGSAHQGCLPPFPADVFMVPQYGYLTLNNGSQAVGRSSFYCLEYFPSQMLRTGNNFTFSYTFEDVPFHSSYAHSQSLDRLMNPLIDQYLYYLSRTNTPSGTTTQSRLQFSQAGASDIRDQSRNWLPGPCYRQQRVSKTAADNNNSDYSWTGATKYHLNGRDSLVNPGTAMASHKDDEEKYFPQSGVLIFGKRDSGKTNVDIEKVMITDEEEIRTTNPVATEQYGSVSTNLQSGNTQAATSDVNTQGVLPGMVWQDRDVYLQGPIWAKIPHTDGHFHPSPLMGGFGPKHPPPQILIKNTPVPANPSTTFSAAKFASFITQYSTGQVSVEIEWELQKENSKRWNPEIQYTSNYNKSVNVDFTVDTNGVYSEPRPIGTRYLTRNL

SEQ ID NO: 11222 - protein, 735 aa, Artificial Sequence
  source: /note="Description of Artificial Sequence: Synthetic polypeptide"
MAADGYLPDWLEDTLSEGIRQWWKLKPGPPPPKPAERHKDDSRGLVLPGYKYLGPFNGLDKGEPVNEADAAALEHDKAYDRQLDSGDNPYLKYNHADAEFQERLKEDTSFGGNLARAVFQAKKRVLEPLGLVEEPVKTAPGKKRPVEHSPAELDSSSGTGKSGQQPARKRLNFGQTGDADSVPDPQPLGQPPAAPSGLGTNTMASGSGAPMADNNEGADGVGNSSGNWHCDSTWMGDRAITTSTRTWALPTYNNHLYKQISSQSGASNDNHYFGYSTPWGYFDFNRFHCHFSPRDWQRLINNNWGFRPKRLNFKLFNIQVKEVTQNDGTTTIANNLTSTVQVFTDSEYQLPYVLGSAHQGCLPPFPADVFMVPQYGYLTLNNGSQAVGRSSFYCLEYFPSQMLRTGNNFTFSYTFEDVPFHSSYAHSQSLDRLMNPLIDQYLYYLSRTNTPSGTTTQSRLQFSQAGASDIRDQSRNWLPGPCYRQQRVSKTAADNNNSDYSWTGATKYHLNGRDSLVNPGTAMASHKDDEEKYFPQSGVLIFGKQDSGKTNVDIEKVMITDEEEIRTTNPVATEQYGSVSTNLQSGNTQAATSDVNTQGVLPGMVWQDRDVYLQGPIWAKIPHTDGHFHPSPLMGGFGPKHPPPQILIKNTPVPANPSTTFSAAKFASFITQYSTGQVSVEIEWELQKENSKRWNPEIQYTSNYNKSVNVDFTVDTNGVYSEPRPIGTRYLTRNL

SEQ ID NO: 11223 - protein, 735 aa, Artificial Sequence
  source: /note="Description of Artificial Sequence: Synthetic polypeptide"
MAADGYLPDWLEDTLSEGIRQWWKLKPGPPPPKPAERHKDDSRGLVLPGYKYLGPFNGLDKGEPVNEADAAALEHDKAYDRQLDSGDNPYLKYNHADAEFQERLKEDTSFGGNLARAVFQAKKRVLEPLGLVEEPVKTAPGKKRPVEHSPAELDSSSGTGKSGQQPARKRLNFGQTGDADSVPDPQPLGQPPAAPSGLGTNTMASGSGAPMADNNEGADGVGNSSGNWHCDSTWMGDRVITTSTRTWALPTYNNHLYKQISSQSGASNDNHYFGYSTPWGYFDFNRFHCHFSPRDWQRLINNNWGFRPKRLNFKLFNIQVKEVTQNDGTTTIANNLTSTVQVFTDSEYQLPYVLGSAHQGCLPPFPADVFMVPQYGYLTLNNGSQAVGRSSFYCLEYFPSQMLRTGNNFTFSYTFEDVPFHSSYAHSQSLDRLMNPLIDQYLYYLSRTNTPSGTTTQSRLQFSQAGASDIRDQSRNWLPGPCYRQQRVSKTAADNNNSDYSWTGATKYHLNGRDSLVNPGTAMASHKDDEEKYFPQSGVLIFGKQDSGKTNVDIEKVMITDEEEIRTTNPVATEQYGSVSTNLQSGNTQAATSDVNTQGVLPGMVWQDRDVYLQGPIWAKIPHTDGHFHPSPLMGGFGPKHPPPQILIKNTPVPANPSTTFSAAKFAYFITQYSTGQVSVEIEWELQKENSKRWNPEIQYTSNYNKSVNVDFTVDTNGVYSEPRPIGTRYLTRNL

SEQ ID NO: 11224 - protein, 735 aa, Artificial Sequence
  source: /note="Description of Artificial Sequence: Synthetic polypeptide"
MAADGYLPDWLEDTLSEGIRQWWKLKPGPPPPKPAERHKDDSRGLVLPGYKYLGPFNGLDKGEPVNEADAAALEHDKAYDRQLDSGDNPYLKYNHADAEFQERLKEDTSFGGNLARAVFQAKKRVLEPLGLVEEPVKTAPGKKRPVEHSPAELDSSSGTGKSGQQPARKRLNFGQTGDADSVPDPQPLGQPPAAPSGLGTNTMASGSGAPMADNNEGADGVGNSSGNWHCDSTWMGDRVITTSTRTWALPTYNNHLYKQISSQSGASNDNHYFGYSTPWGYFGFNRFHCHFSPRDWQRLINNNWGFRPKRLNFKLFNIQVKEVTQNDGTTTIANNLTSTVQVFTDSEYQLPYVLGSAHQGCLPPFPADVFMVPQYGYLTLNNGSQAVGRSSFYCLEYFPSQMLRTGNNFTFSYTFEDVPFHSSYAHSQSLDRLMNPLIDQYLYYLSRTNTPSGTTTQSRLQFSQAGASDIRDQSRNWLPGPCYRQQRVSKTAADNNNSDYSWTGATKYHLNGRDSLVNPGTAMASHKDDEEKYFPQSGVLIFGKQDSGKTNVDIEKVMITDEEEIRTTNPVATEQYGSVSTNLQSGNTQAATSDVNTQGVLPGMVWQDRDVYLQGPIWAKIPHTDGHFHPSPLMGGFGPKHPPPQILIKNTPVPANPSTTFSAAKFAYFITQYSTGQVSVEIEWELQKENSKRWNPEIQYTSNYNKSVNVDFTVDTNGVYSEPRPIGTRYLTRNL

SEQ ID NO: 11225 - protein, 735 aa, Artificial Sequence
  source: /note="Description of Artificial Sequence: Synthetic polypeptide"
MAADGYLPDWLEDTLSEGIRQWWKLKPGPPPPKPAERHKDDSRGLVLPGYKYLGPFNGLDKGEPVNEADAAALEHDKAYDRQLDSGDNPYLKYNHADAEFQERLKEDTSFGGNLARAVFQAKKRVLEPLGLVEEPVKTAPGKKRPVEHSPAELDSSSGTGKSGQQPARKRLNFGQTGDADSVPDPQPLGQPPAAPSGLGTNTMASGSGAPMADNNEGADGVGNSSGNWHCDSTWMGDRVITTSTRTWALPTYNNHLYKQISSQSGASNDNRYFGYSTPWGYFDFNRFHCHFSPRDWQRLINNNWGFRPKRLNFKLFNIQVKEVTQNDGTTTIANNLTSTVQVFTDSEYQLPYVLGSAHQGCLPPFPADVFMVPQYGYLTLNNGSQAVGRSSFYCLEYFPSQMLRTGNNFTFSYTFEDVPFHSSYAHSQSLDRLMNPLIDQYLYYLSRTNTPSGTTTQSRLQFSQAGASDIRDQSRNWLPGPCYRQQRVSKTAADNNNSDYSWTGATKYHLNGRDSLVNPGTAMASHKDDEEKYFPQSGVLIFGKQDSGKTNVDIEKVMITDEEEIRTTNPVATEQYGSVSTNLQSGNTQAATSDVNTQGVLPGMVWQDRDVYLQGPIWAKIPHTDGHFHPSPLMGGFGPKHPPPQILIKNTPVPANPSTTFSAAKFASFITQYSTGQVSVEIEWELQKENSKRWNPEIQYTSNYNKSVNVDFTVDTNGVYSEPRPIGTRYLTRNL

SEQ ID NO: 11226 - protein, 735 aa, Artificial Sequence
  source: /note="Description of Artificial Sequence: Synthetic polypeptide"
MAADGYLPDWLEDTLSEGIRQWWKLKPGPPPPKPAERHKDDSRGLVLPGYKYLGPFNGLDKGEPVNEADAAALEHDKAYDRQLDSGDNPYLKYNHADAEFQERLKEDTPFGGNLARAVFQAKKRVLEPLGLVEEPVKTAPGKKRPVEHSPAELDSSSGTGKSGQQPARKRLNFGQTGDADSVPDPQPLGQPPAAPSGLGTNTMASGSGAPMADNNEGADGVGNSSGNWHCDSTWMGDRVITTSTRTWALPTYNNHLYKQISSQSGASNDNHYFGYSTPWGYFDFNRFHCHFSPRDWQRLINNNWGFRPKRLNFKLFNIQVKEVTQNDGTTTIANNLTSTVQVFTDSEYQLPYVLGSAHQGCLPPFPADVFMVPQYGYLTLNNGSQAVGRSSFYCLEYFPSQMLRTGNNFTFSYTFEDVPFHSSYAHSRSLDRLMNPLIDQYLYYLSRTNTPSGTTTQSRLQFSQAGASDIRDQSRNWLPGPCYRQQRVSKTAADNNNSDYSWTGATKYHLNGRDSLVNPGTAMASHKDDEEKYFPQSGVLIFGKQDSGKTNVDIEKVMITDEEEIRTTNPVATEQYGSVSTNLQSGNTQAATSDVNTQGVLPGMVWQDRDVYLQGPIWAKIPHTDGHFHPSPLMGGFGPKHPPPQILIKNTPVPANPSTTFSAAKFASFITQYSTGQVSVEIEWELQKENSKRWNPEIQYTSNYNKSVNVDFTVDTNGVYSEPRPIGTRYLTRNL

SEQ ID NO: 11227 - protein, 735 aa, Artificial Sequence
  source: /note="Description of Artificial Sequence: Synthetic polypeptide"
MAADGYLPDWLEDTLSEGIRQWWKLKPGPPPPKPAERHKDGSRGLVLPGYKYLGPFNGLDKGEPVNEADAAALEHDKAYDRQLDSGDNPYLKYNHADAEFQERLKEDTSFGGNLARAVFQAKKRVLEPLGLVEEPVKTAPGKKRPVEHSPAELDSSSGTGKSGQQPARKRLNFGQTGDADSVPDPQPLGQPPAAPSGLGTNTMASGSGAPMADNNEGADGVGNSSGNWHCDSTWMGDRVITTSTRTWALPTYNNHLYKQISSQSGASNDNHYFGYSTPWGYFDFNRFHCHFSPRDWQRLINNNWGFRPKRLNFKLFNIQVKEVTQNDGTTTIANNLTSTVQVFTDSEYQLPYVLGSAHQGCLPPFPADVFMVPQYGYLTLNNGSQAVGRSSFYCLEYFPSQMLRTGNNFTFSYTFEDVPFHSSYAHSQSLDRLMNPLIDQYLYYLSRTNTPSGTTTQSRLQFSQAGASDIRDQSRNWLPGPCYRQQRVSKTAADNNNSDYSWTGATKYHLNGRDSLVNPGTAMASHKDDEEKYFPQSGVLIFGKQDSGKTNVDIEKVMITDEEEIRTTNPVATEQYGSVSTNLQSGNTQAATSDVNTQGVLPGMVWQDRDVYLQGPIWAKIPHTDGHFHPSPLMGGFGPKHPPPQILIKNTPVPANPSTTFSAAKFASFITQYSTGQVSVEIEWELQKENSKRWNPEIQYTSNYNKSVNVDFTVDTNGVYSEPRPIGTRYLTRNL

SEQ ID NO: 11228 - protein, 735 aa, Artificial Sequence
  source: /note="Description of Artificial Sequence: Synthetic polypeptide"
MAADGYLPDWLEDTLSEGIRQWWKLKPGPPPPKPAERHKDDSRGLVLPGYKYLGPFNGLDKGEPVNEADAAALEHDKAYDRQLDSGDNPYLKYNHADAGFQERLKEDTSFGGNLARAVFQAKKRVLEPLGLVEEPVKTAPGKKRPVEHSPAELDSSSGTGKSGQQPARKRLNFGQTGDADSVPDPQPLGQPPAAPSGLGTNTMASGSGAPMADNNEGADGVGNSSGNWHCDSTWMGDRVITTSTRTWALPTYNNHLYKQISSQSGASNDNHYFGYSTPWGYFDFNRFHCHFSPRDWQRLINNNWGFRPKRLNFKLFNIQVKEVTQNDGTTTIANNLTSTVQVFTDSEYQLPYVLGSAHQGCLPPFPADVFMVPQYGYLTLNNGSQAVGRSSFYCLEYFPSQMLRTGNNFTFSYTFEDVPFHSSYAHSQSLDRLMNPLIDQYLYYLSRTNTPSGTTTQSRLQFSQAGASDIRDQSRNWLPGPCYRQQRVSKTAADNNNSDYSWTGATKYHLNGRDSLVNPGTAMASHKDDEEKYFPQSGVLIFGKQDSGKTNVDIEKVMITDEEEIRTTNPVATEQYGSVSTNLQSGNTQAATSDVNTQGVLPGMVWQDRDVYLQGPIWAKIPHTDGHFHPSPLMGGFGPKHPPPQILIKNTPVPANPSTTFSAAKFASFITQYSTGQVSVEIEWELQKENSKRWNPEIQYTSNYNKSVNVDFTVDTNGVYSEPRPIGTRYLTRNL

SEQ ID NO: 11229 - protein, 735 aa, Artificial Sequence
  source: /note="Description of Artificial Sequence: Synthetic polypeptide"
MAADGYLPDWLEDTLSEGIRQWWKLKPGPPPPKPAERHKDDSRGLVLPGYKYLGPFNGLDKGEPVNEADAAALEHDKAYDRQLDSGDNPYLKYNHADAEFQERLKEDTSFGGNLARAVFQAKKRVLEPLGLVEEPVKTAPGKKRPVEHSPAELDSSSGTGKSGQQPARKRLNFGQTGDADSVPDPQPLGQPPAAPSGLGTNTMASGSGAPMADNNEGADGVGNSSGNWHCDSTWMGDRVITTSTRTWALPTYNNHLYKQISSQSGASNDNHYLGYSTPWGYFDFNRFHCHFSPRDWQRLINNNWGFRPKRLNFKLFNIQVKEVTQNDGTTTIANNLTSTVQVFTDSEYQLPYVLGSAHQGCLPPFPADVFMVPQYGYLTLNNGSQAVGRSSFYCLEYFPSQMLRTGNNFTFSYTFEDVPFHSSYAHSQSLDRLMNPLIDQYLYYLSRTNTPSGTTTQSRLQFSQAGASDIRDQSRNWLPGPCYRQQRVSKTAADNNNSDYSWTGATKYHLNGRDSLVNPGTAMASHKDDEEKYFPQSGVLIFGKQDSGKTNVDIEKVMITDEEEIRTTNPVATEQYGSVSTNLQSGNTQAATSDVNTQGVLPGMVWQDRDVYLQGPIWAKIPHTDGHFHPSPLMGGFGPKHPPPQILIKNTPVPANPSTTFSAAKFASFITQYSTGQVSVEIERELQKENSKRWNPEIQYTSNYNKSVNVDFTVDTNGVYSEPRPIGTRYLTRNL

SEQ ID NO: 11230 - protein, 735 aa, Artificial Sequence
  source: /note="Description of Artificial Sequence: Synthetic polypeptide"
MAADGYLPDWLEDTLSEGIRQWWKLKPGPPPPKPAERHKDDSRGLVLPGYKYLGPFNGLDKGEPVNEADAAALEHDKAYDRQLDSGDNPYLKYNHADAEFQERLKEDTSFGGNLARAVFQAKKRVLEPLGLVEEPVKTAPGKKRPVEHSPAELDSSSGTGKSGQQPARKRLNFGQTGDADSVPDPQPLGQPPAAPSGLGTNTMASGSGAPMADNNEGADGVGNSSGNWHCDSTWMGDRVITTSTRTWALPTYNNHLYKQISSQSGASNDNHYFGYSTPWGYFDFNRFHCHFSPRDWQRLINNNWGFRPKRLNFKLFNIQVKEVTQNDGTTTIANNLTSTVQVFTDSEYQLPYVLGSAHQGCLPPFPADVFMVPQYGYLTLNNGSQAVGRSSFYCLEYFPSQMLRTGNNFTFSYTFEDVPFHSSYAHSQSLDRLMNPLIDQYLYYLSRTNTPSGTTTQSRLQFSQAGASDIRDQSRNWLPGPCYRQQRVSKTAADNNNSDYSWTGATKYHLNGRDSLVNPGTAMASHKDDEEKYFPQSGVLIFGKQDSGKANVDIEKVMITDEEEIRTTNPVATEQYGSVSTNLQSGNTQAATSDVNTQGVLPGMVWQDRDVYLQGPIWAKIPHTDGHFHPSPLMGGFGPKHPPPQILIKNTPVPANPSTTFSAAKFASFITQYSTGQVSVEIEWELQKENSKRWNPEIQYTSNYNKSVNVDFTVDTNGVYSEPRPIGTRYLTRNL

SEQ ID NO: 11231 - protein, 735 aa, Artificial Sequence
  source: /note="Description of Artificial Sequence: Synthetic polypeptide"
MAADGYLPDWLEDTLSEGIRQWWKLKPGPPPPKPAERHKDDSRGLVLPGYKYLGPFNGLDKGEPVNEADAAALEHDKAYDRQLDSGDNPYLKYNHADAEFQERLKEDTSFGGNLARAVFQAKKRVLEPLGLVEEPVKTAPGKKRPVEHSPAELDSSSGTGKSGQQPARKRLNFGQTGDADSVPDPQPLGQPPAAPSGLGTNTMASGSGAPMADNNEGADGVGNSSGNWHCDSTWMGDRVITTSTRTWALPTYNNHLYKQISSQSGASNDNHYFGYSTPWGYFDFNRFHCHFSPRDWQRLTNNNWGFRPKRLNFKLFNIQVKEVTQNDGTTTIANNLTSTVQVFTDSEYQLPYVLGSAHQGCLPPFPADVFMVPQYGYLTLNNGSQAVGRSSFYCLEYFPSQMLRTGNNFTFSYTFEDVPFHSSYAHSQSLDRLMNPLIDQYLYYLSRTNTPSGTTTQSRLQFSQAGASDIRDQSRNWLPGPCYRQQRVSKTAADNNNSDYSWTGATKYHLNGRDSLVNPGTAMASHKDDEEKYFPQSGVLIFGKQDSGKTNVDIEKVMITDEEEIRTTNPVATEQYGSVSTNLQSGNTQAATSDVNTQGVLPGMVWQDRDVYLQGPIWAKIPHTDGHFHPSPLMGGFGPKHPPPQILIKNTPVPANPSTTFSAAKFASFITQYSTGQVSVEIEWELQKENSKRWNPEIQYTSNYNKSVNVDFTVDTNGVYSEPRPIGTRYLTRNL

SEQ ID NO: 11232 - protein, 735 aa, Artificial Sequence
  source: /note="Description of Artificial Sequence: Synthetic polypeptide"
MAADGYLPDWLEDTLSEGIRQWWKLKPGPPPPKPAERHKDDSRGLVLPGYKYLGPFNGLDKGEPVNEADAAALEHDKAYDRQLDSGDNPYLKYNHADAEFQERLKEDTSFGGNLARAVFQAKKRVLEPLGLVEEPVKTAPGKKRPVEHSPAELDSSSGTGKSGQQPARKRLNFGQTGDADSVPDPQPLGQPPAAPSGLGTNTMASGSGAPMADNNEGADGVGNSSGNWHCDSTWMGDRVITTSTRTWALPTYNNHLYKQISSQSGASNDNHYFGYSTPWGYFDFNRFHCHFSPRDWQRLINNNWGFRPKRLNFKLFNIQVKEVTQNDGTTTIANNLTSTVRVFTDSEYQLPYVLGSAHQGCLPPFPADVFMVPQYGYLTLNNGSQAVGRSSFYCLEYFPSQMLRTGNNFTFSYTFEDVPFHSSYAHSQSLDRLMNPLIDQYLYYLSRTNTPSGTTTQSRLQFSQAGASDIRDQSRNWLPGPCYRQQRVSKTAADNNNSDYSWTGATKYHLNGRDSLVNPGTAMASHKDDEEKYFPQSGVLIFGKQDSGKTNVDIEKVMITDEEEIRTTNPVATEQYGSVSTNLQSGNTQAATSDVNTQGVLPGMVWQDRDVYLQGPIWAKIPHTDGHFHPSPLMGGFGPKHPPPQILIKNTPVPANPSTTFSAAKFASFITQYSTGQVSVEIEWELQKENSKRWNPEIQYTSNYNKSVNVDFTVDTNGVYSEPRPIGTRYLTRNL

SEQ ID NO: 11233 - protein, 735 aa, Artificial Sequence
  source: /note="Description of Artificial Sequence: Synthetic polypeptide"
MAADGYLPDWLEDTLSEGIRQWWKLKPGPPPPKPAERHKDDSRGLVLPGYKYLGPFNGLDKGEPVNEADAAALEHDKAYDRQLDSGDNPYLKYNHADAEFQERLKEDTSFGGNLARAVFQAKKRVLEPLGLVGEPVKTAPGKKRPVEHSPAELDSSSGTGKSGQQPARKRLNFGQTGDADSVPDPQPLGQPPAAPSGLGTNTMASGSGAPMADNNEGADGVGNSSGNWHCDSTWMGDRVITTSTRTWALPTYNNHLYKQISSQSGASNDNHYFGYSTPWGYFDFNRFHCHFSPRDWQRLINNNWGFRPKRLNFKLFNIQVKEVTQNDGTTTIANNLTSTVQVFTDSEYQLPYVLGSAHQGCLPPFPADVFMVPQYGYLTLNNGSQAVGRSSFYCLEYFPSQMLRTGNNFTFSYTFEDVPFHSSYAHSQSLDRLMNPLIDQYLYYLSRTNTPSGTTTQSRLQFSQAGASDIRDQSRNWLPGPCYRQQRVSKTAADNNNSDYSWTGATKYHLNGRDSLVNPGTAMASHKDDEEKYFPQSGVLIFGKQDSGKTNVDIEKVMITDEEEIRTTNPVATEQYGSVSTNLQSGNTQAATSDVNTQGVLPGMVWQDRDVYLQGPIWAKIPHTDGHFHPSPLMGGFGPKHPPPQILIKNTPVPANPSTTFSAAKFASFITQYSTGQVSVEIEWELQKENSKRWNPEIQYTSNYNKSVNVDFTVDTNGVYSEPRPIGTRYLTRNL

SEQ ID NO: 11234 - protein, 735 aa, Artificial Sequence
  source: /note="Description of Artificial Sequence: Synthetic polypeptide"
MAADGYLPDWLEDTLSEGIRQWWKLKPGPPPPKPAERHKDDSRGLVLPGYKYLGPFNGLDKGEPVNEADAAALEHDKAYDRQLDSGDNPYLKYNHADAEFQERLKEDTSFGGNLARAVFQAKKRVLEPLGLVEEPVKTAPGKKRPVEHSPAELDSSSGTGKSGQQPARKRLNFGQTGDADSVPGPQPLGQPPAAPSGPGTNTMASGSGAPMADNNEGADGVGNSSGNWHCDSTWMGDRVVTTSTRTWALPTYNNHLYKQISSQSGASNDNHYFGYSTPWGYFDFNRFHCHFSPRDWQRLINNNWGFRPKRLNFKLFNIQVKEVTQNDGTTTIANNLTSTVQVFTDSEYQLPYVLGSAHQGCLPPFPADVFMVPQYGYLTLNNGSQAVGRSSFYCLEYFPSQMLRTGNNFTFSYTFEDVPFHSSYAHSQSLDRLMNPLIDQYLYYLSRTNTPSGTTTQSRLQFSQAGASDIRDQSRNWLPGPCYRQQRVPKTAADNNNSDYSWTGATKYHLNGRDSLVNPGTAMASHKDDEEKYFPQSGVLIFGKQDSGKTNVDIEKVMITDEEEIRTTNPVATEQYGSVSTNLQSGNTQAATSDVNTQGVLPGMVWQDRDVYLQGPIWAKIPHTDGHFHPSPLMGGFGPKHPPPQILIKNTPVPANPSTTFSAAKFASFITQYSTGQVSVEIEWELQKENSKRWNPEIQYTSNYNKSVNVDFTVDTNGVYSEPRPIGTRYLTRNL

SEQ ID NO: 11235 - protein, 735 aa, Artificial Sequence
  source: /note="Description of Artificial Sequence: Synthetic polypeptide"
MAADGYLPDWLEDTLSEGIRQWWKLKPGPPPPKPAERHKDDSRGLVLPGYKYLGPFNGLDKGEPVNEADAAALEHDKAYDRQLDSGDNPYLKYNHADAEFQERLKEDTSFGGNLARAVFQAKKRVLEPLGLVEGPVKTAPGKKRPVEHSPAELDSSSGTGKSGQQPARKRLNFGQTGDADSVPDPQPLGQPPAAPSGLGTNTMASGSGAPMADNNEGADGVGNSSGNWHCDSTWMGDRVITTSTRTWALPTYNNHLYKQISSQSGASNDNHYFGYSTPWGYFDFNRFHCHFSPRDWQRLINNNWGFRPKRLNFKLFNIQVKEVTQNDGTTTIANNLTSTVQVFTDSEYQLPYVLGSAHQGCLPPFPADVFMVPQYGYLTLNNGSQAVGRSSFYCLEYFPSQMLRTGNNFTFSYTFEDVPFHSSYAHSQSLDRLMNPLIDQYLYYLSRTNTPSGTTTQSRLQFSQAGASDIRDQSRNWLPGPCYRQQRVSKTAADNNNSDYSWTGATKYHLNGRDSLVNPGTAMASHKDDEEKYFPQSGVLIFGKQDSGKTNVDIEKVMITDEEEIRTTNPVATEQYGSVSTNLQSGNTQAATSDVNTQGVLPGMVWQDRDVYLQGPIWAKIPHTDGHFHPSPLMGGFGPKHPPPQILIKNTPVPANPSTTFSAAKFASFITQYSTGQVSVEIEWELQKENSKRWNPEIQYTSNYNKSVNVDFTVDTNGVYSEPRPIGTRYLTRNL

SEQ ID NO: 11236 - protein, 735 aa, Artificial Sequence
  source: /note="Description of Artificial Sequence: Synthetic polypeptide"
MAADGYLPDWLEDTLSEGIRQWWKLKPGPPPPKPAERHKDDSRGLVLPGYKYLGPFNGLDKGEPVNEADAAALEHDKAYDRQLDSGDNPYLKYNHADAEFQERLKEDTSFGGNLARAVFQAKKRVLEPLGLVEEPVKTAPGKKRPVEHSPAELDSSSGTGKSGQQPARKRLNFGQTGDADSVPDPQPLGQPPAAPSGLGTNTMASGSGAPMADNNEGADGVGNSSGNWHCDSTWMGDRVITTSTRTWALPTYNNHLYKQISSQSGASNDNHYLGYSTPWGYFDFNRFHCHFSPRDWQRLINNNWGFRPKRLNFKLFNIQVKEVTQNDGTTTIANNLTSTVQVFTDSEYQLPYVLGSAHQGCLPPFPADVFMVPQYGYLTLNNGSQAVGRSSFYCLEYFPSQMLRTGNNFTFSYTFEDVPFHSSYAHSQSLDRLMNPLIDQYLYYLSRTNTPSGTTTQSRLQFSQAGASDIRDQSRNWLPGPCYRQQRVSKTAADNNNSDYSWTGATKYHLNGRDSLVNPGTAMASHKDDEEKYFPQSGVLIFGKQDSGKTNVDIEKVMITDEEEIRTTNPVATEQYGSVSTNLQSGNTQAATSDVNTQGVLPGMVWQDRDVYLQGPIWAKIPHTDGHFHPSPLMGGFGPKHPPPQILIKNTPVPANPSTTFSAAKFASFITQYSTGQVSVEIEWELQKENSKRWNPEIQYTSNYNKSVNVDFTVDTNGVYSEPRPIGTRYLTRNL

SEQ ID NO: 11237 - protein, 735 aa, Artificial Sequence
  source: /note="Description of Artificial Sequence: Synthetic polypeptide"
MAADGYLPDWLEDTLSEGIRQWWKLKPGPPPPKPAERHKDDSRGLVLPGYKYLGPFNGLDKGEPVNEADAAALEHDKAYDRQLDSGDNPYLKYNHADAEFQERLKEDTSFGGNLARAVFQAKKRVLEPLGLVEEPVKTAPGKKGPVEHSPAELDSSSGTGKSGQQPARKRLNFGQTGDADSVPDPQPLGQPPAAPSGLGTNTMASGSGAPMADNNEGADGVGNSSGNWHCDSTWMGDRVITTSTRTWALPTYNNHLYKQISSQSGASNDNHYFGYSTPWGYFDFNRFHCHFSPRDWQRLINNNWGFRPKRLNFKLFNIQVKEVTQNDGTTTIANNLTSTVQVFTDSEYQLPYVLGSAHQGCLPPFPADVFMVPQYGYLTLNNGSQAVGRSSFYCLEYFPSQMLRTGNNFTFSYTFEDVPFHSSYAHSQSLDRLMNPLIDQYLYYLSRTNTPSGTTTQSRLQFSQAGASDIRDQSRNWLPGPCYRQQRVSKTAADNNNSDYSWTGATKYHLNGRDSLVNPGTAMASHKDDEEKYFPQSGVLIFGKQDSGKTNVDIEKVMITDEEEIRTTNPVATEQYGSVSTNLQSGNTQAATSDVNTQGVLPGMVWQDRDVYLQGPIWAKIPHTDGHFHPSPLMGGFGPKHPPPQILIKNTPVPANPSTTFSAAKFASFITQYSTGQVSVEIEWELQKENSKRWNPEIQYTSNYNKSVNVDFTVDTNGVYSEPRPIGTRYLTRNL

SEQ ID NO: 11238 - protein, 735 aa, Artificial Sequence
  source: /note="Description of Artificial Sequence: Synthetic polypeptide"
MAADGYLPDWLEDTLSEGIRQWWKLKPGPPPPKPAERHKDDSRGLVLPGYKYLGPFNGLDKGEPVNEADAAALEHDKAYDRQLDSGDNPYLKYNHADAEFQERLKEDTPFGGNLARAVFQAKKRVLEPLGLVEEPVKTAPGKKRPVEHSPAELDSSSGTGKSGQQPARKRLNFGQTGDADSVPDPQPLGQPPAAPSGLGTNTMASGSGAPMADNNEGADGVGNSSGNWHCDSTWMGDRVITTSTRTWALPTYNNHLYKQISSQSGASNDNHYFGYSTPWGYFDFNRFHCHFSPRDWQRLINNNWGFRPKRLNFKLFNIQVKEVTQNDGTTTIANNLTSTVQVFTDSEYQLPYVLGSAHQGCLPPFPADVFMVPQYGYLTLNNGSQAVGRSSFYCLEYFPSQMLRTGNNFTFSYTFEDVPFHSSYAHSQSLDRLMNPLIDQYLYYLSRANTPSGTTTQSRLQFSQAGASDIRDQSRNWLPGPCYRQQRVSKTAADNNNSDYSWTGATKYHLNGRDSLVNPGTAMASHKDDEEKYFPQSGVLIFGKQDSGKTNVDIEKVMITDEEEIRTTNPVATEQYGSVSTNLQSGNTQAATSDVNTQGVLPGMVWQDRDVYLQGPIWAKIPHTDGHFHPSPLMGGFGPKHPPPQILIKNTPVPANPSTTFSAAKFASFITQYSTGQVSVEIEWELQKENSKRWNPEIQYTSNYNKSVNVDFTVDTNGVYSEPRPIGTRYLTRNL

SEQ ID NO: 11239 - protein, 735 aa, Artificial Sequence
  source: /note="Description of Artificial Sequence: Synthetic polypeptide"
MAADGYLPDWLEDTLSEGIRQWWKLKPGPPPPKPAERHKDDSRGLVLPGYKYLGPFNGLDKGEPVNEADAAALEHDKAYDRQLDSGDNPYLKYNHADAEFQERLKEDTSFGGNLARAVFQAKKRVLEPLGLVEEPVKTAPGKKRPVEHSPAELDSSSGTGKSGQQPARKRLNFGQTGDADSVPDPQPLGQPPAAPSGLGTNTMASGSGAPMADNNEGADGVGNSSGNWHCDSTWMGDRVITTSTRTWALPTYNNHLYKQISSQSGASNDNHYFGYSAPWGYFDFNRFHCHFSPRDWQRLINNNWGFRPKRLNFKLFNIQVKEVTQNDGTTTIANNLTSTVQVFTDSEYQLPYVLGSAHQGCLPPFPADVFMVPQYGYLTLNNGSQAVGRSSFYCLEYFPSQMLRTGNNFTFSYTFEDVPFHSSYAHSQSLDRLMNPLIDQYLYYLSRTNTPSGTTTQSRLQFSQAGASDIRDQSRNWLPGPCYRQQRVSKTAADNNNSDYSWTGATKYHLNGRDSLVNPGTAMASHKDDEEKYFPQSGVLIFGKQDSGKTNVDIEKVMITDEEEIRTTNPVATEQYGSVSTNLQSGNTQAATSDVNTQGVLPGMVWQDRDVYLQGPIWAKIPHTDGHFHPSPLMGGFGPKHPPPQILIKNTPVPANPSTTFSAAKFASFITQYSTGQVSVEIEWELQKENSKRWNPEIQYTSNYNKSVNVDFTVDTNGVYSEPRPIGTRYLTRNL

SEQ ID NO: 11240 - protein, 735 aa, Artificial Sequence
  source: /note="Description of Artificial Sequence: Synthetic polypeptide"
MAADGYLPDWLEDTLSEGIRQWWKLKPGPPPPKPAERHKDDSRGLVLPGYKYLGPFNGLDKGEPVNEADAAALEHDKAYDRQLDSGDNPYLKYNHADAEFQERLKEDTSFGGNLARAVFQAKKRVLEPLGLVEEPVKTAPGKKRPVEHSPAELDSSSGTGKSGQQPARKRLNFGQTGDADSVPDPQPLGQPPAAPSGLGTNTMASGSGAPMADNNEGADGVGNSSGNWHCDSTWMGDRVITTSTRTWALPTYNNHLYKQISSQSGASNDNHYFGYSTPWGYFDFNRFHCHFSPRDWQRLINNNWGFRPKRLNFKLFNIQVKEVTQNDGTTTIANNLTSTVQVFTDSEYQLPYVLGSAHQGCLPPFPADVFMVPQYGYLTLNNGSQAVGRSSFYCLEYFPSQMLRTGNNFTFSYTFEDVPFHSSYAHSQSLDRLMNPLIDQYLYYLSRTNTPSGTTTQSRLQFSQAGASDIRDQSRNWLPGPCYRQQRVSKTAADNNNSDYSWTGATKYHLNGRDSLVNPGTAMASHKDDEEKYFPQSGVLIFGKQDSGKTNVDIEKVMITDEEEIRTTNPVATEQYGSVSTNLQSGNTQAATSDVNTQGVLPGMVWQDRDVYLQGPIWAKIPHTDGHFHPSPLMGGFGPKHPPPQILIKNTPVPANPSTTFSAAKFASLITQYSTGQVSVEIEWELQKENSKRWNPEIQYTSNYNKSVNVDFTVDTNGVYSEPRPIGTRYLTRNL

SEQ ID NO: 11241 - protein, 735 aa, Artificial Sequence
  source: /note="Description of Artificial Sequence: Synthetic polypeptide"
MAADGYLPDWLEDTLSEGIRQWWKLKPGPPPPKPAERHKDDSRGLVLPGYKYLGPFNGLDKGEPVNEADAAALEHDKAYDRQLDSGDNPYLKYNHADAEFQERLKEDTSFGGNLARAVFQAKKRVLEPLGLVEEPVKTAPGKKRPVEHSPAELDSSSGTGKSGQQPARKGLNFGQTGDADSVPDPQPLGQPPAAPSGLGTNTMASGSGAPMADNNEGADGVGNSSGNWHCDSTWMGDRVITTSTRTWALPTYNNHLYKQISSQSGASNDNHYFGYSTPWGYFDFNRFHCHFSPRDWQRLINNNWGFRPKRLNFKLFNIQVKEVTQNDGTTTIANNLTSTVQVFTDSEYQLPYVLGSAHQGCLPPFPADVFMVPQYGYLTLNNGSQAVGRSSFYCLEYFPSQMLRTGNNFTFSYTFEDVPFHSSYAHSQSLDRLMNPLIDQYLYYLSRTNTPSGTTTQSRLQFSQAGASDIRDQSRNWLPGPCYRQQRVSKTAADNNNSDYSWTGATKYHLNGRDSLVNPGTAMASHKDDEEKYFPQSGVLIFGKQDSGKTNVDIEKVMITDEEEIRTTNPVATEQYGSVSTNLQSGNTQAATSDVNTQGVLPGMVWQDRDVYLQGPIWAKIPHTDGHFHPSPLMGGFGPKHPPPQILIKNTPVPANPSTTFSAAKFASFITQYSTGQVSVEIEWELQKENSKRWNPEIQYTSNYNKSVNVDFTVDTNGVYSEPRPIGTRYLTRNL

SEQ ID NO: 11242 - protein, 735 aa, Artificial Sequence
  source: /note="Description of Artificial Sequence: Synthetic polypeptide"
MAADGYLPDWLEDTLSEGIRQWWKLKPGPPPPKPAERHKDDSRGLVLPGYKYLGPFNGLDKGEPVNEADAAALEHDEAYDRQLDSGDNPYLKYNHADAEFQERLKEDTSFGGNLARAVFQAKKRVLEPLGLVEEPVKTAPGKKRPVEHSPAELDSSSGTGKSGQQPARKRLNFGQTGDADSVPDPQPLGQPPAAPSGLGTNTMASGSGAPMADNNEGADGVGNSSGNWHCDSTWMGDRVITTSTRTWALPTYNNHLYKQISSQSGASNDNHYFGYSTPWGYFDFNRFHCHFSPRDWQRLINNNWGFRPKRLNFKLFNIQVKEVTQNDGTTTIVNNLTSTVQVFTDSEYQLPYVLGSAHQGCLPPFPADVFMVPQYGYLTLNNGSQAVGRSSFYCLEYFPSQMLRTGNNFTFSYTFEDVPFHSSYAHSQSLDRLMNPLIDQYLYYLSRTNTPSGTTTQSRLQFSQAGASDIRDQSRNWLPGPCYRQQRVSKTAADNNNSDYSWTGATKYHLNGRDSLVNPGTAMASHKDDEEKYFPQSGVLIFGKQDSGKTNVDIEKVMITDEEEIRTTNPVATEQYGSVSTNLQSGNTQAATSDVNTQGVLPGMVWQDRDVYLQGPIWAKIPHTDGHFHPSPLMGGFGPKHPPPQILIKNTPVPANPSTTFSAAKFAYFITQYSTGQVSVEIEWELQKENSKRWNPEIQYTSNYNKSVNVDFTVDTNGVYSEPRPIGTRYLTRNL

SEQ ID NO: 11243 - protein, 735 aa, Artificial Sequence
  source: /note="Description of Artificial Sequence: Synthetic polypeptide"
MAADGYLPDWLEDTLSEGIRQWWKLKPGPPPPKPAERHKDDSRGLVLPGYKYLGPFNGLDKGEPVNEADAAALEHDKAYDRQLDSGDNPYLKYNHADAEFQERLKEDTSFGGNLARAVFQAKKRVLEPLGLVEEPVKTAPGKKRPVEHSPAELDSSSGTGKSGQQPARKRLNFGQTGDADSVPDPQPLGQPPAAPSGLGTNTMASGSGAPMADNNEGADGVGNSSGNWHCDSTWMGDRVITTSTRTWALPTYNNHLYKQISSQSGASNDNHYFGYSTPWGYFDFNRFHCHFSPRDWQRLINNNWGFRPKRLNFKLFNIQVKEVTQNDGTTTIANNLTSTVQVFTDSEYQLPYVLGSAHQGCLPPFPADVFMVPQYGYLTLNNGSQAVGRSSFYCLEYFPSQMLRTGNNFTFSYTFEDVPFHSSYAHSQSLDRLMNPLIDQYLYYLSRTNTPSGTTTQSRLQFSQAGASGIRDQSRNWLPGPCYRQQRVSKTAADNNNSDYSWTGATKYHLNGRDSLVNPGTAMASHKDDEEKYFPQSGVLIFGKQDSGKTNVDIEKVMITDEEEIRTTNPVATEQYGSVSTNLQSGNTQAATSDVNTQGVLPGMVWQDRDVYLQGPIWAKIPHTDGHFHPSPLMGGFGPKHPPPQILIKNTPVPANPSTTFSAAKFASFITQYSTGQVSVEIEWELQKENSKRWNPEIQYTSNYNKSVNVDFTVDTNGVYSEPRPIGTRYLTRNL

SEQ ID NO: 11244 - protein, 735 aa, Artificial Sequence
  source: /note="Description of Artificial Sequence: Synthetic polypeptide"
MAADGYLPDWLEDTLSEGIRQWWKLKPGPPPPKPAERHKDDSRGLVLPGYKYLGPFNGLDKGEPVNEADAAALEHDKAYDRQLDSGDNPYLKYNHADAEFQERLKEDTSFGGNLARAVFQAKKRVLEPLGLVEEPVKTAPGKKRPVEHSPAELDSSSGTGKSGQQPARKRLNFGQTGDADSVPDPQPLGQPPAAPSGLGTNTMASGSGAPMADNNEGADGVGNSSGNWHCDSTWMGDRVITTSTRTWALPTYNNHLYKQISSQSGASNDNHYFGYSTPWGYFDFNRFHCHFSPRDWQRLINNNWGFRPKRLNFKLFNIQVKEVTQNDGTTTIANNLTSTVQVFTDSEYQLPYVLGSAHQGCLPPFPADVFMVPQYGYLTLNNGSQAVGRSSFYCLEYFPSQMLRTGNNFTFSYTFEDVPFHSSYAHSQSLDRLMNPLIDQYLYYLSRTNTPSGTTTQSRLQFSQAGASDIRDQSRNWLPGPCYRQQRVSKTAADNNNSDYSWTGATKYHLNGRDSLVNPGTAMASHKDDEEKYFPQSGVLIFGKQDSGKTNVDIEKVVITDEEEIRTTNPVATEQYGSVSTNLQSGNTQAATSDVNTQGVLPGMVWQDRDVYLQGPIWAKIPHTDGHFHPSPLMGGFGPKHPPPQILIKNTPVPANPSTTFSAAKFASFITQYSTGQVSVEIEWELQKENSKRWNPEIQYTSNYNKSVNVDFTVDTNGVYSEPRPIGTRYLTRNL

SEQ ID NO: 11245 - protein, 735 aa, Artificial Sequence
  source: /note="Description of Artificial Sequence: Synthetic polypeptide"
MAADGYLPDWLEDTLSEGIRQWWKLKPGPPPPKPAERHKDDSRGLVLPGYKYLGPFNGLDKGEPVNEADAAALEHDKAYDRQLDSGDNPYLKYNHADAEFQERLKEDTSFGGNLARAVFQAKKRVLEPLGLVEEPVKTAPGKKRPVEHSPAELDSSSGTGKSGQQPARKRLNFGQTGDADSVPDPQPLGQPPAAPSGLGTNTMASGSGAPMADNNEGADGVGNSSGNWHCDSTWMGDRVITTSTRTWALPTYNNHLYKQISSQSGASNDNHYFGYSTPWGYFDFNRFHCHFSPRDWQRLINNNWGFRPKRLNFKLFNIQVKEVTQNDGTTTIANNLTSTVQVFTDSEYQLPYVLGSAHQGCLPPFPADVFMVPQYGYLTLNNGSQAVGRSSFYCLEYFPSQMLRTGNNFTFSYTFEDVPFHSSYAHSQSLDRLMNPLIDQYLYYLSRTNTPSGTTTQSRLQFSQAGASDIRDQSRNWLPGPCYRQQRVSKTAADNNNSDYSWTGATKYHLNGRDSLVNPGTAMASHKDDEEKYFPQSGVLIFGKQDSGKTNVDIEKVMITDEEEIRTTNPVATEQYGSVSTNLQSGDTQAATSDVNTQGVLPGMVWQDRDVYLQGPIWAKIPHTDGHFHPSPLMGGFGPKHPPPQILIKNTPVPANPSTTFSAAKFASFITQYSTGQVSVEIEWELQKENSKRWNPEIQYTSNYNKSVNVDFTVDTNGVYSEPRPIGTRYLTRNL

SEQ ID NO: 11246 - protein, 735 aa, Artificial Sequence
  source: /note="Description of Artificial Sequence: Synthetic polypeptide"
MAADGYLPDWLEDTLSEGIRQWWKLKPGPPPPKPAERHKDDSRGLVLPGYKYLGPFNGLDKGEPVNEADAAALEHDKAYDRQLDSGDNPYLKYNHADAEFQERLKEDTSFGGNLARAVFQAKKRVLEPLGLVEEPVKTAPGKKRPVEHSPAELDSSSGTGKSGQQPARKRLNFGQTGDADSVPDPQPLGQPPAAPSGLGTNTMASGSGAPMADNNEGADGVGNSSGNWHCDSTWMGDRVITTSTRTWALPTYNNHLYKQISSQSGASNDNHYFGYSTPWGYFDFNRFHCHFSPRDWQRLINNNWGFRPKRLNFRLFNIQVKEVTQNDGTTTIANNLTSTVQVFTDSEYQLPYVLGSAHQGCLPPFPADVFMVPQYGYLTLNNGSQAVGRSSFYCLEYFPSQMLRTGNNFTFSYTFEDVPFHSSYAHSQSLDRLMNPLIDQYLYYLSRTNTPSGTTTQSRLQFSQAGASDIRDQSRNWLPGPCYRQQRVSKTAADNNNSDYSWTGATKYHLNGRDSLVNPGTAMASHKDDEEKYFPQSGVLIFGKQDSGKTNVDIEKVMITDEEEIRTTNPVATEQYGSVSTNLQSGNTQAATSDVNTQGVLPGMVWQDRDVYLQGPIWAKIPHTDGHFHPSPLMGGFGPKHPPPQILIKNTPVPANPSTTFSAAKFASFITQYSTGQVSVEIEWELQKENSKRWNPEIQYTSNYNKSVNVDFTVDTNGVYSEPRPIGTRYLTRNL

SEQ ID NO: 11247 - protein, 735 aa, Artificial Sequence
  source: /note="Description of Artificial Sequence: Synthetic polypeptide"
MAADGYLPDWLEDTLSEGIRQWWKLKPGPPPPKPAERHKDDSRGLVLPGYKYLGPFNGLDKGEPVNEADAAALEHGKAYDRQLDSGDNPYLKYNHADAEFQERLKEDTSFGGNLARAVFQAKKRVLEPLGLVEEPVKTAPGKKRPVEHSPAELDSSSGTGKSGQQPARKRLNFGQTGDADSVPDPQPLGQPPAAPSGLGTNTMASGSGAPMADNNEGADGVGNSSGNWHCDSTWMGDRVITTSTRTWALPTYNNHLYKQISSQSGASNDNHYFGYSTPWGYFDFNRFHCHFSPRDWQRLINNNWGFRPKRLNFKLFNIQVKEVTQNDGTTTIANNLTSTVQVFTDSEYQLPYVLGSAHQGCLPPFPADVFMVPQYGYLTLNNGSQAVGRSSFYCLEYFPSQMLRTGNNFTFSYTFEDVPFHSSYAHSQSLDRLMNPLIDQYLYYLSRTNTPSGTTTQSRLQFSQAGASDIRDQSRNWLPGPCYRQQRVSKTAADNNNSDYSWTGATKYHLNGRDSLVNPGTAMASHKDDEEKYFPQSGVLIFGKQDSGKTNVDIEKVMITDEEEIRTTNPVATEQYGSVSTNLQSGNTQAATSDVNTQGVLPGMVWQDRDVYLQGPIWAKIPHTDGHFHPSPLMGGFGPKHPPPQILIKNTPVPANPSTTFSAAKFASFITQYSTGQVSVEIEWELQKENSKRWNPEIQYTSNYNKSVNVDFTVDTNGVYSEPRPIGTRYLTRNL

SEQ ID NO: 11248 - protein, 735 aa, Artificial Sequence
  source: /note="Description of Artificial Sequence: Synthetic polypeptide"
MAADGYLPDWLEDTLSEGIRQWWKLKPGPPPPKPAERHKDDSRGLVLPGYKYLGPFNGLDKGEPVNEADAAALEHDKAYDRQLDSGDNPYLKYNHADAEFQERLKEDTSFGGNLARAVFQAKKRVLEPLGLVEEPVKTAPGKKRPVEHSPAELDSSSGTGKSGQQPARKRLNFGQTGDADSVPDPQPLGQPPAAPSGPGTNTMASGSGAPMADNNEGADGVGNSSGNWHCDSTWMGDRVITTSTRTWALPTYNNHLYKQISSQSGASNDNHYFGYSTPWGYFDFNRFHCHFSPRDWQRLINNNWGFRPKRLNFKLFNIQVKEVTQNDGTTTIANNLTSTVQVFTDSEYQLPYVLGSAHQGCLPPFPADVFMVPQYGYLTLNNGSQAVGRSSFYCLEYFPSQMLRTGNNFTFSYTFEDVPFHSSYAHSQSLDRLMNPLIDQYLYYLSRTNTPSGTTTQSRLQFSQAGASDIRDQSRNWLPGPCYRQQRVSKTAADNNNSDYSWTGATKYHLNGRDSLVNPGTAMASHKDDEEKYFPQSGVLIFGKQDSGKTNVDIEKVMITDEEEIRTTNPVATEQYGSVSTNLQSGNTQAATSDVNTQGVLPGMVWQDRDVYLQGPIWAKIPHTDGHFHPSPLMGGFGPKHPPPQILIKNTPVPANPSTTFSAAKFASFITQYSTGQVSVEIEWELQKENSKRWNPEIQYTSNYNKSVNVDFTVDTNGVYSEPRPIGTRYLTRNL

SEQ ID NO: 11249 - protein, 735 aa, Artificial Sequence
  source: /note="Description of Artificial Sequence: Synthetic polypeptide"
MAADGYLPDWLEDTLSEGIRQWWKLKPGPPPPKPAERHKDDSRGLVLPGYKYLGPFNGLDKGEPVNEADAAALEHDKAYDRQLDSGDNPYLKYNHADAEFQERLKEDTSFGGNLARAVFQAKKRVLEPLGLVEEPVKTAPGKKRPVEHSPAGPDSSSGTGKSGQQPARKRLNFGQTGDADSVPDPQPLGQPPAAPSGLGTNTMASGSGAPMADNNEGADGVGNSSGNWHCDSTWMGDRVITTSTRTWALPTYNNHLYKQISSQSGASNDNHYFGYSTPWGYFDFNRFHCHFSPRDWQRLINNNWGFRPKRLNFELFNIQVKEVTQNDGTTTIANNLTSTVQVFTDSEYQLPYVLGSAHQGCLPPFPADVFMVPQYGYLTLNNGSQAVGRSSFYCLEYFPSQMLRTGNNFTFSYTFEDVPFHSSYAHSQSLDRLMNPLIDQYLYYLSRTNTPSGTTTQSRLQFSQAGASDIRDQSRNWLPGPCYRQQRVSKTAADNNNSDYSWTGATKYHLNGRDSLVNPGTAMASHKDDEEKYFPQSGVLIFGKQDSEKTNVDIEKVMITDEEEIRTTNPVATEQYGSVSTNLQSGNTQAATSDVNTQGVLPGMVWQDRDVYLQGPIWAKIPHTDGHFHPSPLMGGFGLKHPPPQILIKSTPVPANPSTTFSAAKFASFITQYSTGQVSVEIEWELQKENSKRWNPEIQYTSNYNKSVNVDFTVDTNGVYSEPRPIGTRYLTRNL

SEQ ID NO: 11250 - protein, 735 aa, Artificial Sequence
  source: /note="Description of Artificial Sequence: Synthetic polypeptide"
MAADGYLPDWLEDTLSEGIRQWWKLKPGPPPPKPAERHKDDSRGLVLPGYKYLGPFNGLDKGEPVNEADAAALEHDKAYDRQLDSGDNPYLKYNHADAEFQERLKEDTSFGGNLARAVFQAKKRVLEPLGLVEEPVKTAPGKKRPVEHSPAGPDSSSGTGKSGQQPARKRLNFGQTGDADSVPDPQPLGQPPAAPSGLGTNTMASGSGAPMADNNEGADGVGNSSGNWHCDSTWMGDRVITTSTRTWALPTYNNHLYKQISSQSGASNDNHYFGYSTPWGYFDFNRFHCHFSPRDWQRLINNNWGFRPKRLNFELFNIQVKEVTQNDGTTTIANNLTSTVQVFTDSEYQLPYVLGSAHQGCLPPFPADVFMVPQYGYLTLNNGSQAVGRSSFYCLEYFPSQMLRTGNNFTFSYTFEDVPFHSSYAHSQSLDRLMNPLIDQYLYYLSRTNTPSGTTTQSRLQFSQAGASDIRDQSRNWLPGPCYRQQRVSKTAADNNNSDYSWTGATKYHLNGRDSLVNPGTAMASHKDDEEKYFPQSGVLIFGKQDSGKTNVDIEKVMITDEEEIRTTNPVATEQYGSVSTNLQSGNTQAATSDVNTQGVLPGMVWQDRDVYLQGPIWAKIPHTDGHFHPSPLMGGFGLKHPPPQILIKSTPVPANPSTTLSAAKFASFITQYSTGQVSVEIEWELQKENSKRWNPEIQYTSNYNKSVNVDFTVDTNGVYSEPRPIGTRYLTRNL

SEQ ID NO: 11251 - protein, 734 aa, Artificial Sequence
  source: /note="Description of Artificial Sequence: Synthetic polypeptide"
MAADGYLPDWLEDTLSEGIRQWWKLKPGPPPPKPAERHKDDSRGLVLPGYKYLGPFNGLDKGEPVNEADAAALEHDKAYDRQLDSGDNPYLKYNHADAEFQERLKEDTSFGGNLARAVFQAKKRVLEPLGLVEEPVKTAPGKKRPVEHSPAGPDSSSGTGKSGQQPARKRLNFGQTGDADSVPDPQPLGQPPAAPSGLGTNTMASGSGAPMADNNEGADGVGNSSGNWHCDSTWMGDRVITTSTRTWALPTYNNHLYKQISSQSGASNDNHYFGYSTPWGYFDFNRFHCHFSPRDWQRLINNNWGFRPKRLNFELFNIQVKEVTQNDGTTTIANNLTSTVQVFTDSEYQLPYVLGSAHQGCLPPFPADVFMVPQYGYLTLNNGSQAVGRSSFYCLEYFPSQMLRTGNNFTFSYTFEDVPFHSSYAHSQSLDRLMNPLIDQYLYYLSRTNTPSGTTTQSRLQFSQAGASDIRDQSRNWLPGPCYRQQRVSKTAADNNSDYSWTGATKYHLNGRDSLVNPGTAMASHKDDEEKYFPQSGVLIFGKQDSGKTNVDIEKVMITDEEEIRTTNPVATEQYGSVSTNLQSGNTQAATSDVNTQGVLPGMVWQDRDVYLQGPIWAKIPHTDGHFHPSPLMGGFGLKHPPPQILIKSTPVPANPSTTFSAAKFASFITQYSTGQVSVEIEWELQKENSKRWNPEIQYTSNYNKSVNVDFTVDTNGVYSEPRPIGTRYLTRNL

SEQ ID NO: 11252 - protein, 735 aa, Artificial Sequence
  source: /note="Description of Artificial Sequence: Synthetic polypeptide"
MAADGYLPDWLEDTLSEGIRQWWKLKPGPPPPKPAERHKDDSRGLVLPGYKYLGPFNGLDKGEPVNEADAAALEHDKAYDRQLDSGDNPYLKYNHADAEFQERLKEDTSFGGNLGRTVFQAKKRVLEPLGLVEEPVKTAPGKKRPVEHSPVEPDSSSGTGKAGQQPARKRLNFGQTGDADSVPDPQPLGQPPAAPSGLGTNTMATGSGAPMADNNEGADGVGNSSGNWHCDSTWMGDRVITTSTRTWALPTYNNHLYKQISSQSGASNDNHYFGYSTPWGYFDFNRFHCHFSPRDWQRLINNNWGFRPKRLSFKLFNIQVKEVTQNDGTTTIANNLTSTVQVFTDSEYQLPYVLGSAHQGCLPPFPADVFMVPQYGYLTLNNGSQAVGRSSFYCLEYFPSQMLRTGNNFTFSYTFEDVPFHSSYAHSQSLDRLMNPLIDQYLYYLSKTNAPSGTTTMSRLQFSQAGASDIRDQSRNWLPGPCYRQQRVSKTAADNNNSDYSWTGATKYHLNGRDSLVNPGPAMASHKDDEEKYFPQSGVLIFGKQGSNKTNVDIEKVMITDEEEIRTTNPVATEQYGSVSTNLQSGNTQAATSDVNTQGVLPGMVWQDRDVYLQGPIWAKIPHTDGHFHPSPLMGGFGLKHPPPQILIKNTPVPANPSTTFSAAKFASFITQYSTGQVSVEIEWELQKENSKRWNPEIQYTSNYNKSVNVDFTVDTNGVYSEPRPIGTRYLTRNL

SEQ ID NO: 11253 - protein, 735 aa, Artificial Sequence
  source: /note="Description of Artificial Sequence: Synthetic polypeptide"
MAADGYLPDWLEDTLSEGIRQWWKLKPGPPPPKPAERHKDDSRGLVLPGYKYLGPFNGLDKGEPVNEADAAALEHDKAYDRQLDSGDNPYLKYNHADAEFQERLKEDTSFGGNLGRAVFQAKKRVLEPLGLVEEPVKTAPGKKRPVEHSPVEPDSSSGTGKAGQQPARKRLNFGQTGDADSVPDPQPLGQPPAAPSGLGTNTMATGSGAPMADNNEGADGVGNSSGNWHCDSTWMGDRVITTSTRTWALPTYNNHLYKQISSQSGASNDNHYFGYSTPWGYFDFNRFHCHFSPRDWQRLINNNWGFRPKRLSFKLFNIQVKEVTQNDGTTTIANNLTSTVQVFTDSEYQLPYVLGSAHQGCLPPFPADVFMVPQYGYLTLNNGSQAVGRSSFYCLEYFPSQMLRTGNNFTFSYTFEDVPFHSSYAHSQSLDRLMNPLIDQYLYYLSKTNAPSGTTTMSRLQFSQAGASDIRDQSRNWLPGPCYRQQRVSKTAADNNNSDYSWTGATKYHLNGRDSLVNPGPAMANHKDDEEKYFPQSGVLIFGKQGSNKTNVDIEKVMITDEEEIRTTNPVATEQYGSVSTNLQSGNTQAATSDVNTQGVLPGMVWQDRDVYLQGPIWAKIPHTDGHFHPSPLMGGFGLKHPPPQILIKNTPVPANPSTTFSAAKFASFITQYSTGQVSVEIEWELQKENSKRWNPEIQYTSNYNKSVNVDFTVDTNGVYSEPRPIGTRYLTRNL

SEQ ID NO: 11254 - protein, 735 aa, Artificial Sequence
  source: /note="Description of Artificial Sequence: Synthetic polypeptide"
MAADGYLPDWLEDTLSEGIRQWWKLKPGPPPPKPAERHKDDSRGLVLPGYKYLGPFNGLDKGEPVNEADAAALEHDKAYDRQLDSGDNPYLKYNHADAEFQERLKEDTSFGGNLGRAVFQAKKRVLEPLGLVEEPVKTAPGKKRPVEHSPVEPDSSSGTGKAGQQPARKRLNFGQTGDADSVPDPQPLGQPPAAPSGLGTNTMATGSGAPMADNNEGADGVGNSSGNWHCDSTWMGDRVITTSTRTWALPTYNNHLYKQISSQSGASNDNHYFGYSTPWGYFDFNRFHCHFSPRDWQRLINNNWGFRPKRLSFKLFNIQVKEVTQNDGTTTIANNLTSTVQVFTDSEYQLPYVLGSAHQGCLPPFPADVFMVPQYGYLTLNNGSQAVGRSSFYCLEYFPSQMLRTGNNFTFSYTFEDVPFHSSYAHSQSLDRLMNPLIDQYLYYLSKTNAPSGTTTMSRLQFSQAGASDIRDQSRNWLPGPCYRQQRVSKTAADNNNSDYSWTGATKYHLNGRDSLVNPGPAMASHKDDEEKYFPQSGVLIFGKQGSNKTNVDIEKVMITDEEEIRTTNPVATEQYGSVSTNLQSGNTQAATSDVNTQGVLPGMVWQDRDVYLQGPIWAKIPHTDGHFHPSPLMGGFGLKHPPPQILIKNTPVPANPSTTFSAAKFASFITQYSTGQVSVEIEWELQKENSKRWNPEIQYTSNYNKSVNVDFTVDTNGVYSEPRPIGTRYPTRNL

SEQ ID NO: 11255 - protein, 735 aa, Artificial Sequence
  source: /note="Description of Artificial Sequence: Synthetic polypeptide"
MAADGYLPDWLEDTLSEGIRQWWKLKPGPPPPKPAERHKDDSRGLVLPGYKYLGPFNGLDKGEPVNEADAAALEHDKAYDRQLDSGDNPYLKYNHADAEFQERLKEDTSFGGNLGRAVFQAKKRVLEPLGLVEEPVKTAPGKKRPVEHSPVEPDSSSGTGKAGQQPARKRLNFGQTGDADSVPDPQPLGQPPAAPSGLGTNTMATGSGAPMADNNEGADGVGNSSGNWHCDSTWMGDRVITTSTRTWALPTYNNHLYKQISSQSGASNDNHYFGYSTPWGYFDFNRFHCHFSPRDWQRLINNNWGFRPKRLSFKLFNIQVKEVTQNDGTTTIANNLTSTVQVFTDSEYQLPYVLGSAHQGCLPPFPADVFMVPQYGYLTLNNGSQAVGRSSFYCLEYFPSQMLRTGNNFTFSYTFEDVPFHSSYAHSQSLDRLMNPLIDQYLYYLSKTNAPSGTTTMSRLQFSQAGASDIRDQSRNWLPGPCYRQQRVSKTAADNNNSDYSWTGATKYHLNGRDSLVNPGPAMASHKDDEEKYFPQSGVLIFGKQGSNKTNVDIEKVMITDEEEIRTTNPVATEQYGSVSTNLQSGNTQAATSDVNTQGVLPGMVWQDRDVYLQGPIWAKIPHTDGHFHPSPLMGGFGLKHPPPQILIKNTPVPANPSTTFSAAKFASFITQYSTGQVSVEIEWELQKENSKRWNPEIQYTSNYNKSVNVDFTVGTNGVYSEPRPIGTRYLTRNL

SEQ ID NO: 11256 - protein, 735 aa, Artificial Sequence
  source: /note="Description of Artificial Sequence: Synthetic polypeptide"
MAADGYLPDWLEDTLSEGIRQWWKLKPGPPPPKPAERHKDDSRGLVLPGYKYLGPFNGLDKGEPVNEADAAALEHDKAYDRQLDSGDNPYLKYNHADAEFQERLKEDTSFGGNLGRAVFQAKKRVLEPLGLVEEPVKTAPGKKRPVEHSPVEPDSSSGTGKAGQQPARKRLNFGQTGDADSVPDPQPLGQPPAAPSGLGTNTMATGSGAPMADNNEGADGVGNSSGNWHCDSTWMGDRVITTSTRTWALPTYNNHLYKQISSQSGASNDNHYFGYSTPWGYFDFNRFHCHFSPRDWQRLINNNWGFRPKRLSFKLFNIQVKEVTQNDGTTTIANNLTSTVQVFTDSEYQLPYVLGSAHQGCLPPFPADVFMVPQYGYLTLNNGSQAVGRSSFYCLEYFPSQMLRTGNNFTFSYTFEDVPFHSSYAHSQSLDRLMNPLIDQYLYYLSKTNAPSGTTTMSRLQFSQAGASDIRDQSRNWLPGPCYRQQRVSKTAADNNNSDYSWTGATKYHLNGRDSLVNPGPAMASHKDDEEKYFPQSGVLIFGKQGSNKTNVDIEKVMITDEEEIRTTNPVATEQYGSVSTNLQSGNTQAATSDVNTQGVLPGMVWQDRDVYLQGPIWAKIPHTDGHFHPSPLMGGFGLKYPPPQILIKNTPVPANPSTTFSAAKFASFITQYSTGQVSVEIEWELQKENSKRWNPEIQYTSNYNKSVNVDFTVDTNGVYSEPRPIGTRYLTRNL

SEQ ID NO: 11257 - protein, 735 aa, Artificial Sequence
  source: /note="Description of Artificial Sequence: Synthetic polypeptide"
MAADGYLPDWLEDTLSEGIRQWWKLKPGPPPPKPAERHKDDSRGLVLPGYKYLGPFNGLDKGEPVNEADAAALEHDKAYDRQLDSGDNPYLKYNHADAEFQERLKEDTSFGGNLGRAVFQAKKRVLEPLGLVEEPVKTAPGKKRPVEHSPVEPDSSSGTGKAGQQPARKRLNFGQTGDADSVPDPQPLGQPPAAPSGLGTNTMATGSGAPMADNNEGADGVGNSSGNWHCDSTWMGDRVITTSTRTWALPTYNNHLYKQISGQSGASNDNHYFGYSTPWGYFDFNRFHCHFSPRDWQRLINNNWGFRPKRLSFKLFNIQVKEVTQNDGTTTIANNLTSTVQVFTDSEYQLPYVLGSAHQGCLPPFPADVFMVPQYGYLTLNNGSQAVGRSSFYCLEYFPSQMLRTGNNFTFSYTFEDVPFHSSYAHSQSLDRLMNPLIDQYLYYLSKTNAPSGTTTMSRLQFSQAGASDIRDQSRNWLPGPCYRQQRVSKTAADNNNSDYSWTGATKYHLNGRDSLVNPGPAMASHKDDEEKYFPQSGVLIFGKQGSNKTNVDIEKVMITDEEEIRTTNPVATEQYGSVSTNLQSGNTQAATSDVNTQGVLPGMVWQDRDVYLQGPIWAKIPHTDGHFHPSPLMGGFGLKHPPPQILIKNTPVPANPSTTFSAAKFASFITQYSTGQVSVEIEWELQKENSKRWNPEIQYTSNYNKSVNVDFTVDTNGVYSEPRPIGTRYLTRNL

SEQ ID NO: 11258 - protein, 735 aa, Artificial Sequence
  source: /note="Description of Artificial Sequence: Synthetic polypeptide"
MAADGYLPDWLEDTLSEGIRQWWKLKPGPPPPKPAERHKDDSRGLVLPGYKYLGPFNGLDKGEPVNEADAAALEHDKAYDRQLDSGDNPYLKYNHADAEFQERLKEDTSFGGNLGRAVFQAKKRVLEPLGLVEEPVKTAPGKKRPVEHSPVEPDSSSGTGKAGQQPARKRLNFGQTGDADSVPDPQPLGQPPAAPSGLGTNTMATGSGAPMADNNEGADGVGNSSGNWHCDSTWMGDRVITTSTRTWALPTYNNHLYKQISSQSGASNDNHYFGYSTPWGYFDFNRFHCHFSPRDWQRLINNNWGFRPKRLSFKLFNIQVKEVTQNDGTTTIANNLTSTVQVFTDSEYRLPYVLGSAHQGCLPPFPADVFMVPQYGYLTLNNGSQAVGRSSFYCLEYFPSQMLRTGNNFTFSYTFEDVPFHSSYAHSQSLDRLMNPLIDQYLYYLSKTNAPSGTTTMSRLQFSQAGASDIRDQSRNWLPGPCYRQQRVSKTAADNNNSDYSWTGATKYHLNGRDSLVNPGPAMASHKDDEEKYFPQSGVLIFGKQGSNKTNVDIEKVMITDEEEIRTTNPVATEQYGSVSTNLQSGNTQAATSDVNTQGVLPGMVWQDRDVYLQGPIWAKIPHTDGHFHPSPLMGGFGLKHPPPQILIKNTPVPANPSTTFSAAKFASFITQYSTGQVSVEIEWELQKENSKRWNPEIQYTSNYNKSVNVDFTVDTNGVYSEPRPIGTRYLTRNL

SEQ ID NO: 11259 - protein, 735 aa, Artificial Sequence
  source: /note="Description of Artificial Sequence: Synthetic polypeptide"
MAADGYLPDWLEDTLSEGIRQWWKLKPGPPPPKPAERHKDDSRGLVLPGYKYLGPFNGLDKGEPVNEADAAALEHDKAYDRQLDSGDNPYLKYNHADAEFQERLKEDTSFGGNLGRAVFQAKKRVLEPLGLVEEPVKTAPGKKRPVEHSPVEPDSSSGTGKAGQQPARKRLNFGQTGDADSVPDPQPLGQPPAAPSGLGTNTMATGSGAPMADNNEGADGVGNSSGNWHCDSTWMGDRVITTSTRTWALPTYNNHLYKQISSQSGASNDNHYFGYSTPWGYFDFNRFHCHFSPRDWQRLINNNWGFRPKRLSFKLFNIQVKEVTQNDGTTTIANNLTSTVQVFTDSEYQLPYVLGSAHRGCLPPFPADVFMVPQYGYLTLNNGSQAVGRSSFYCLEYFPSQMLRTGNNFTFSYTFEDVPFHSSYAHSQSLDRLMNPLIDQYLYYLSKTNAPSGTTTMSRLQFSQAGASDIRDQSRNWLPGPCYRQQRVSKTAADNNNSDYSWTGATKYHLNGRDSLVNPGPAMASHKDDEEKYFPQSGVLIFGKQGSNKTNVDIEKVMITDEEEIRTTNPVATEQYGSVSTNLQSGNTQAATSDVNTQGVLPGMVWQDRDVYLQGPIWAKIPHTDGHFHPSPLMGGFGLKHPPPQILIKNTPVPANPSTTFSAAKFASFITQYSTGQVSVEIEWELQKENSKRWNPEIQYTSNYNKSVNVDFTVDTNGVYSEPRPIGTRYLTRNL

SEQ ID NO: 11260 - protein, 735 aa, Artificial Sequence
  source: /note="Description of Artificial Sequence: Synthetic polypeptide"
MAADGYLPDWLEDTLSEGIRQWWKLKPGPPPPKPAERHKDDSRGLVLPGYKYLGPFNGLDKGEPVNEADAAALEHDKAYDRQLDSGDNPYLKYNHADAEFQERLKEDTSFGGNLGRAVFQAKKRVLEPLGLVEEPVKTAPGKKRPVEHSPVEPDSSSGTGKAGQQPARKRLNFGQTGDADSVPDPQPLGQPPAAPSGLGTNTMATGSGAPMADNNEGADGVGNSSGNWHCDSTWMGDRVITTSTRTWALPTYNNHLYKQISSQSGASNDNHYFGYSTPWGYFDFNRFHCHFSPRDWQRLINNNWGFRPKRLSFKLFNIQVKEVTQNDGTTTIANNLTSTVQVFTDSEYQLPYVLGSAHQGCLPPFPADVFMVPQYGYLTLNNGSQAVGRSSFYCLEYFPSQMLRAGNNFTFSYTFEDVPFHSSYAHSQSLDRLMNPLIDQYLYYLSKTNAPSGTTTMSRLQFSQAGASDIRDQSRNWLPGPCYRQQRVSKTAADNNNSDYSWTGATKYHLNGRDSLVNPGPAMASHKDDEEKYFPQSGVLIFGKQGSNKTNVDIEKVMITDEEEIRTTNPVATEQYGSVSTNLQSGNTQAATSDVNTQGVLPGMVWQDRDVYLQGPIWAKIPHTDGHFHPSPLMGGFGLKHPPPQILIKNTPVPANPSTTFSAAKFASFITQYSTGQVSVEIEWELQKENSKRWNPEIQYTSNYNKSVNVDFTVDTNGVYSEPRPIGTRYLTRNL

SEQ ID NO: 11261 - protein, 735 aa, Artificial Sequence
  source: /note="Description of Artificial Sequence: Synthetic polypeptide"
MAADGYLPDWLEDTLSEGIRQWWKLKPGPPPPKPAERHKDDSRGLVLPGYKYLGPFNGLDKGEPVNEADAAALEHDKAYDRQLDSGDNPYLKYNHADAEFQERLKEDTSFGGNLGRAVFQAKKRVLEPLGLVEEPVKTAPGKKRPVEHSPVEPDSSSGTGKAGQQPARKRLNFGQTGDADSVPDPQPLGQPPAAPSGLGTNTMATGSGAPMADNNEGADGVGNSSGNWHCDSTWMGDRVITTSTRTWALPTYNNHLYKQISSQSGASNDNHYFGYSTPWGYFDFNRFHCHFSPRDWQRLINNNWGFRPKRLGFKLFNIQVKEVTQNDGTTTIANNLTSTVQVFTDSEYQLPYVLGSAHQGCLPPFPADVFMVPQYGYLTLNNGSQAVGRSSFYCLEYFPSQMLRTGNNFTFSYTFEDVPFHSSYAHSQSLDRLMNPLIDQYLYYLSKTNAPSGTTTMSRLQFSQAGASDIRDQSRNWLPGPCYRQQRVSKTAADNNNSDYSWTGATKYHLNGRDSLVNPGPAMASHKDDEEKYFPQSGVLIFGKQGSNKTNVDIEKVMITDEEEIRTTNPVATEQYGSVSTNLQSGNTQAATSDVNTQGVLPGMVWQDRDVYLQGPIWAKIPHTDGHFHPSPLMGGFGLKHPPPQILIKNTPVPANPSTTFSAAKFASFITQYSTGQVSVEIEWELQKENSKRWNPEIQYTSNYNKSVNVDFTVDTNGVYSEPRPIGTRYLTRNL

SEQ ID NO: 11262 - protein, 735 aa, Artificial Sequence
  source: /note="Description of Artificial Sequence: Synthetic polypeptide"
MAADGYLPDWLEDTLSEGIRQWWKLKPGPPPPKPAERHKDDSRGLVLPGYKYLGPFNGLDKGEPVNEADAAALEHDKAYDRQLDSGDNPYLKYNHADAEFQERLKEDTSFGGNLGRAVFQAKKRVLEPLGLVEEPVKTAPGKKRPVEHSPVEPDSSSGTGKAGQQPARKRLNFGQTGDADSVPDPQPLGQPPAAPSGLGTNTMATGSGAPMADNNEGADGVGNSSGNWHCDSTWMGDRVITTSTRTWALPTYNNHLYKQISSQSGVSNDNHYFGYSTPWGYFDFNRFHCHFSPRDWQRLINNNWGFRPKRLSFKLFNIQVKEVTQNDGTTTIANNLTSTVQVFTDSEYQLPYVLGSAHQGCLPPFPADVFMVPQYGYLTLNNGSQAVGRSSFYCLEYFPSQMLRTGNNFTFSYTFEDVPFHSSYAHSQSLDRLMNPLIDQYLYYLSKTNAPSGTTTMSRLQFSQAGASDIRDQSRNWLPGPCYRQQRVSKTAADNNNSDYSWTGATKYHLNGRDSLVNPGPAMASHKDDEEKYFPQSGVLIFGKQGSNKTNVDIEKVMITDEEEIRTTNPVATEQYGSVSTNLQSGNTQAATSDVNTQGVLPGMVWQDRDVYLQGPIWAKIPHTDGHFHPSPLMGGFGLKHPPPQILIKNTPVPANPSTTFSAAKFASFITQYSTGQVSVEIEWELQKENSKRWNPEIQYTSNYNKSVNVDFTVDTNGVYSEPRPIGTRYLTRNL

SEQ ID NO: 11263 - protein, 735 aa, Artificial Sequence
  source: /note="Description of Artificial Sequence: Synthetic polypeptide"
MAADGYLPDWLEDTLSEGIRQWWKLKPGPPPPKPAERHKDDSRGLVLPGYKYLGPFNGLDKGEPVNEADAAALEHDKAYDRQLDSGDNPYLKYNHADAEFQERLKEDTSFGGNLGRAVFQAKKRVLEPLGLVEEPVKTAPGKKRPVEHSPVEPDSSSGTGKAGQQPARKRLNFGQTGDADSVPDPQPLGQPPAAPSGLGTNTMATGSGAPMADNNEGADGVGNSSGNWHCDSTWMGDRVITTSTRTWALPTYNNHLYKQISSQSGASNDNHYFGYSTPWGYFDFNRFHCHFSPRDWQRLINNNWGFRPKRLSFKLFNIQVKEVTQNDGTTTIANNLTSTVQVFTDSEYQLPYVLGSAHQGCLPPFPADVFMVPQYGYLTLNNGSQAVGRSSFYCLEYFPSQMLRTGNNFTFSYTFEDVPFHSSYAHSQSLDRLMNPLIDQYLYYLSKTNAPSGTTTMSRLQFSQAGASDIRDQSRNWLPGPCYRQQRVSKTAADNNNSDYSWTGATKYHLNGRDSLVNPGPAMASHKDDEEKYFPQSGVLIFGKQGSNKTNVDIEKVMITDEEEIRTTNPMATEQYGSVSTNLQSGNTQAATSDVNTQGVLPGMVWQDRDVYLQGPIWAKIPHTDGHFHPSPLMGGFGLKHPPPQILIKNTPVPANPSTTFSAAKFASFITQYSTGQVSVEIEWELQKENSKRWNPEIQYTSNYNKSVNVDFTVDTNGVYSEPRPIGTRYLTRNL

SEQ ID NO: 11264 - protein, 735 aa, Artificial Sequence
  source: /note="Description of Artificial Sequence: Synthetic polypeptide"
MAADGYLPDWLEDTLSEGIRQWWKLKPGPPPPKPAERHKDDSRGLVLPGYKYLGPFNGLDKGEPVNEADAAALEHDKAYDRQLDSGDNPYLKYNHADAEFQERLKEDTSFGGNLGRAVFQAKKRVLEPLGLVEEPVKTAPGKKRPIEHSPVEPDSSSGTGKAGQQPARKRLNFGQTGDADSVPDPQPLGQPPAAPSGLGTNTMATGSGAPMADNNEGADGVGNSSGNWHCDSTWMGDRVITTSTRTWALPTYNNHLYKQISSQSGASNDNHYFGYSTPWGYFDFNRFHCHFSPRDWQRLINNNWGFRPKRLSFKLFNIQVKEVTQNDGTTTIANNLTSTVQVFTDSEYQLPYVLGSAHQGCLPPFPVDVFMVPQYGYLTLNNGSQAVGRSSFYCLEYFPSQMLRTGNNFTFSYTFEDVPFHSSYAHSQSLDRLMNPLIDQYLYYLSKTNAPSGTTTMSRLQFSQAGASDIRDQSRNWLPGPCYRQQRVSKTAADNNNSDYSWTGATKYHLNGRDSLVNPGPAMASHKDDEEKYFPQSGVLIFGKQGSNKTNVDIEKVMITDEEEIRTTNPVATEQYGSVSTNLQSGNTQAATSDVNTQGVLPGMVWQDRDVYLQGPIWAKIPHTDGHFHPSPLMGGFGLKHPPPQILIKNTPVPANPSTTFSAAKFASFITQYSTGQVSVEIEWELQKENSKRWNPEIQYTSNYNKSVNVDFTVDTNGVYSEPRPIGTRYLTRNL

SEQ ID NO: 11265 - protein, 735 aa, Artificial Sequence
  source: /note="Description of Artificial Sequence: Synthetic polypeptide"
MAADGYLPDWLEDTLSEGIRQWWKLKPGPPPPKPAERHKDDSRGLVLPGYKYLGPFNGLDKGEPVNEADAAALEHDKAYDRQLDSGDNPYLKYNHADAEFQERLKEDTSFGGNLGRAVFQAKKRVLEPLGLVEEPVKTAPGKKRPVEHSPVEPDSSSGTGKAGQQPARKRLNFGQTGDADSVPDPQPLGQPPAAPSGLGTNTMTTGSGAPMADNNEGADGVGNSSGNWHCDSTWMGDRVITTSTRTWALPTYNNHLYKQISSQSGASNDNHYFGYSTPWGYFDFNRFHCHFSPRDWQRLINNNWGFRPKRLSFKLFNIQVKEVTQNDGTTTIANNLTSTVQVFTDSEYQLPYVLGSAHQGCLPPFPADVFMVPQYGYLTLNNGSQAVGRSSFYCLEYFPSQMLRTGNNFTFSYTFEDVPFHSSYAHSQSLDRLMNPLIDQYLYYLSKTNAPSGTTTMSRLQFSQAGASDIRDQSRNWLPGPCYRQQRVSKTAADNNNSDYSWTGATKYHLNGRDSLVNPGPAMASHKDDEEKYFPQSGVLIFGKQGSNKTNVDIEKVMITDEEEIRTTNPVATEQYGSVSTNLQSGNTQAATSDVNTQGVLPGMVWQDRDVYLQGPIWAKIPHTDGHFHPSPLMGGFGLKHPPPQILIKNTPVPANPSTTFSAAKFASFITQYSTGQVSVEIEWELQKENSKRWNPEIQYTSNYNKSVNVDFTVDTNGVYSEPRPIGTRYLTRNL

SEQ ID NO: 11266 - protein, 735 aa, Artificial Sequence
  source: /note="Description of Artificial Sequence: Synthetic polypeptide"
MAADGYLPDWLEDTLSEGIRQWWKLKPGPPPPKPAERHKDDSRGLVLPGYKYLGPFNGLDKGEPVNEADAAALEHDKAYDRQLDSGDNPYLKYNHADAEFQERLKEDTSFGGNLGRAVFQAKKRVLEPLGLVEEPVKTAPGKKRSVEHSPVEPDSSSGTGKAGQQPARKRLNFGQTGDADSVPDPQPLGQPPAAPSGLGTNTMATGSGAPMADNNEGADGVGNSSGNWHCDSTWMGDRVITTSTRTWALPTYNNHLYKQISSQSGASNDNHYFGYSTPWGYFDFNRFHCHFSPRDWQRLINNNWGFRPKRLSFKLFNIQVKEVTQNDGTTTIANNLTSTVQVFTDSEYQLPYVLGSAHQGCLPPFPADVFMVPQYGYLTLNNGSQAVGRSSFYCLEYFPSQMLRTGNNFTFSYTFEDVPFHSSYAHSQSLDRLMNPLIDQYLYYLSKTNAPSGTTTMSRLQFSQAGASDIRDQSRNWLPGPCYRQQRVSKTAADNNNSDYSWTGATKYHLNGRDSLVNPGPAMASHKDDEEKYFPQSGVLIFGKQGSNKTNVDIEKVMITDEEEIRTTNPVATEQYGSVSTNLQSGNTQAATSDVNTQGVLPGMVWQDRDVYLQGPIWAKIPHTDGHFHPSPLMGGFGLKHPPPQILIKNTPVPANPSTTFSAAKFASFITQYSTGQVSVEIEWELQKENSKRWNPEIQYTSNYNKSVNVDFTVDTNGVYSEPRPIGTRYLTRNL

SEQ ID NO: 11267 - protein, 735 aa, Artificial Sequence
  source: /note="Description of Artificial Sequence: Synthetic polypeptide"
MAADGYLPDWLEDTLSEGIRQWWKLKPGPPPPKPAERHKDDSRGLVLPGYKYLGPFNGLDKGEPVNEADAAALEHDKAYDRQLDSGDNPYLKYNHADAEFQERLKEDTSFGGNLGRAVFQAKKRVLEPLGLVEEPVKTAPGKKRPVEHSPVEPDSSSGTGKAGQQPARKRLNFGQTGDADSVPDPQPLGQPPAAPSGLGTNTMATGSGAPMADNNEGADGVGNSSGNWHCDSTWMGDRVITTSTRTWALPTYNNHLYKQISSQSGASNDNHYFGYSTPWGYFDFNRFHCHFSPRDWQRLINNNWGFRPKRLSFKLFNIQVKEVTQNDGTTTIANNLTSTVQVFTDSEYQLPYVLGSAHQGCLPPFPADVFVVPQYGYLTLNNGSQAVGRSSFYCLEYFPSQMLRTGNNFTFSYTFEDVPFHSSYAHSQSLDRLMNPLIDQYLYYLSKTNAPSGTTTMSRLQFSQAGASDIRDQSRNWLPGPCYRQQRVSKTAADNNNSDYSWTGATKYHLNGRDSLVNPGPAMASHKDDEEKYFPQSGVLIFGKQGSNKTNVDIEKVMITDEEEIRTTNPVATEQYGSVSTNLQSGNTQAATSDVNTQGVLPGMVWQDRDVYLQGPIWAKIPHTDGHFHPSPLMGGFGLKHPPPQILIKNTPVPANPSTTFSAAKFASFITQYSTGQVGVEIEWELQKENSKRWNPEIQYTSNYNKSVNVDFTVDTNGVYSEPRPIGTRYLTRNL

SEQ ID NO: 11268 - protein, 735 aa, Artificial Sequence
  source: /note="Description of Artificial Sequence: Synthetic polypeptide"
MAADGYLPDWLEDTLSEGIRQWWKLKPGPPPPKPAERHKDDSRGLVLPGYKYLGPFNGLDKGEPVNEADAAALEHDKAYDRQLDSGDNPYLKYNHADAEFQERLKEDTSFGGNLGRAVFQAKKRVLEPLGLVEEPVKTAPGKKRPVEHSPVEPDSSSGTGKAGQQPARKRLNFGQTGDADSVPDPQPLGQPPAAPSGLGTNTMATGSGAPMADNNEGADGVGNSSGNWHCDSTWMGDRVITTSTRTWALPTYNNHLYKQISSQSGASNDNHYFGYSTPWGYFDFNRFHCHFSPRDWQRLINNNWGFRPKRLSFKLFNIQVKEVTQNDGTTTIANNLTSTVQVFTDSEYQLPYVLGSAHQGCLPPFPADVFMVPQYGYLTLNNGSQAVGRSSFYCLEYFPSQMLRTGNNFTFSYTFEDVPFHSSYAHSQSLDRLMNPLIDQYLYYLSKTNAPSGTTAMSRLQFSQAGASDIRDQSRNWLPGPCYRQQRVSKTAADNNNSDYSWTGATKYHLNGRDSLVNPGPAMASHKDDEEKYFPQSGVLIFGKQGSNKTNVDIEKVMITDEEEIRTTNPVATEQYGSVSTNLQSGNTQAATSDVNTQGVLPGMVWQDRDVYLQGPIWAKIPHTDGHFHPSPLMGGFGLKHPPPQILIKNTPVPANPSTTFSAAKFASFITQYSTGQVSVEIEWELQKENSKRWNPEIQYTSNYNKSVNVDFTVDTNGVYSEPRPIGTRYLTRNL

SEQ ID NO: 11269 - protein, 735 aa, Artificial Sequence
  source: /note="Description of Artificial Sequence: Synthetic polypeptide"
MAADGYLPDWLEDTLSEGIRQWWKLKPGPPPPKPAERHKDDSRGLVLPGYKYLGPFNGLDKGEPVNEADAAALEHDKAYDRQLDSGDNPYLKYNHADAEFQERLKEDTSFGGNLGRAVFQAKKRVLEPLGLVEEPVKTAPGKKRPVEHSPVEPDSSSGTGKAGQQPARKRLNFGQTGDADSVPDPQPLGQPPAAPSGLGTNTMATGSGAPMADNNEGADGVGNSSGNWHCDSTWMGDRVITTSTRTWALPTYNNHLYKQISSQSGASNDNHYFGYSTPWGYFDFNRFHCHFSPRDWQRLINNNWGFRPKRLSFKLFNIQVKEVTQNDGTTTIANNLTSTVQVFTDSEYQLPYVLGSAHQGCLPPFPADVFMVPQYGYLTLNNGSQAVGRSSFYCLEYFPSQMLRTGNNFTFSYTFEDVPFHSSYAHSQSLDRLMNPPIDQYLYYLSKTNAPSGTTTMSRLQFSQAGASDIRDQSRNWLPGPCYRQQRVSKTAADNNNSDYSWTGATKYHLNGRDSLVNPGPAMASHKDDEEKYFPQSGVLIFGKQGSNKTNVDIEKVMITDEEEIRTTNPVATEQYGSVSTNLQSGNTQAATSDVNTQGVLPGMVWQDRDVYLQGPIWAKIPHTDGHFHPSPLMGGFGLKHPPPQILIKNTPVPANPSTTFSAAKFASFITQYSTGQVSVEIEWELQKENSKRWNPEIQYTSNYNKSVNVDFTVDTNGVYSEPRPIGTRYLTRNL

SEQ ID NO: 11270 - protein, 735 aa, Artificial Sequence
  source: /note="Description of Artificial Sequence: Synthetic polypeptide"
MAADGYLPDWLEDTLSEGIRQWWKLKPGPPPPKPAERHKDDSRGLVLPGYKYLGPFNGLDKGEPVNEADAAALEHDKAYDRQLDSGDNPYLKYNHADAEFQERLKEDTSFGGNLGRAVFQAKKRVLEPLGLVEEPVKTAPGKKRPVEHSPVEPDSSSGTGKAGQQPARKRLNFGQTGDADSVPDPQPLGQPPAAPSGLGTNTMATGSGAPMADNNEGADGVGNSSGNWHCDSTWMGDRVITTSTRTWALPTYNNHLYKQISSQSGASNDNHYFGYSTPWGYFDFNRFHCHFSPRDWQRLINNNWGFRPKRLSFKLFNIQVKEVTQNDGTTTIANNLTSTVQVFTDSEYQLPYVLGSAHQGCLPPFPADVFMVPQYGYLTLNNGSQAVGRSSFYCLEYFPSQMLRTGNNFTFSYTFEDVPFHSSYAHGQSLDRLMNPLIDQYLYYLSKTNAPSGTTTMSRLQFSQAGASDIRDQSRNWLPGPCYRQQRVSKTAADNNNSDYSWTGATKYHLNGRDSLVNPGPAMASHKDDEEKYFPQSGVLIFGKQGSNKTNVDIEKVMITDEEEIRTTNPVATEQYGSVSTNLQSGNTQAATSDVNTQGVLPGMVWQDRDVYLQGPIWAKIPHTDGHFHPSPLMGGFGLKHPPPQILIKNTPVPANPSTTFSAAKFASFITQYSTGQVSVEIEWELQKENSKRWNPEIQYTSNYNKSVNVDFTVDTNGVYSEPRPIGTRYLTRNL

SEQ ID NO: 11271 - protein, 735 aa, Artificial Sequence
  source: /note="Description of Artificial Sequence: Synthetic polypeptide"
MAADGYLPDWLEDTLSEGIRQWWKLKPGPPPPKPAERHKDDSRGLVLPGYKYLGPFNGLDKGEPVNEADAAALEHDKAYDRQLDSGDNPYLKYNHADAEFQERLKEDTSFGGNLGRAVFQAKKRVLEPLGLVEEPVKTAPGKKRPVEHSPVEPDSSSGTGKAGQQPARKRLNFGQTGDADSVPDPQPLGQPPAAPSGLGTNTMATGSGAPMADNNEGADGVGNSSGNWHCDSTWMGDRVITTSTRTWALPTYNNHLYKQISSQSGASNDNHYFGYSTPWGYFDFNRFHCHFSPRDWQRLINNNWGFRPKRLSFKLFNIQVKEVTQNDGTTTIANNLTSTVQVFTDSEYQLPYVLGSAHQGCLPPFPADVFMVPQYGYLTLNNGSQAVGRSSFYCLEYFPSQMLRTGNNFTFSYTFEDVPFHSSYAHSQSLDRLMNPLIDQYLYYLSKTNAPSGTTTMSRPQFSQAGASDIRDQSRNWLPGPCYRQQRVSKTAADNNNSDYSWTGATKYHLNGRDSLVNPGPAMASHKDDEEKYFPQSGVLIFGKQGSNKTNVDIEKVMITDEEEIRTTNPVATEQYGSVSTNLQSGNTQAATSDVNTQGVLPGMVWQDRDVYLQGPIWAKIPHTDGHFHPSPLMGGFGLKHPPPQILIKNTPVPANPSTTFSAAKFASFITQYSTGQVSVEIEWELQKENSKRWNPEIQYTSNYNKSVNVDFTVDTNGVYSEPRPIGTRYLTRNL

SEQ ID NO: 11272 - protein, 735 aa, Artificial Sequence
  source: /note="Description of Artificial Sequence: Synthetic polypeptide"
MAADGYLPDWLEDTLSEGIRQWWKLKPGPPPPKPAERHKDDSRGLVLPGYKYLGPFNGLDKGEPVNEADAAALEHDKAYDRQLDSGDNPYLKYNHADAEFQERLKEDTSFGGNLGRAVFQAKKRVLEPLGLVEEPVKTAPGKKRPVEHSPVEPDSSSGTGKAGQQPARKRLNFGQTGDADSVPDPQPLGQPPAAPSGLGTNTMATGSGAPMADNNEGADGVGNSSGNWHCDSTWMGDRVITTSTRTWALPTYNNHLYKQISSQSGTSNDNHYFGYSTPWGYFDFNRFHCHFSPRDWQRLINNNWGFRPKRLSFKLFNIQVKEVTQNDGTTTIANNLTSTVQVFTDSEYQLPYVLGSAHQGCLPPFPADVFMVPQYGYLTLNNGSQAVGRSSFYCLEYFPSQMLRTGNNFTFSYTFEDVPFHSSYAHSQSLDRLMNPLIDQYLYYLSKTNAPSGTTTMSRLQFSQAGASDIRDQSRNWLPGPCYRQQRVSKTAADNNNSDYSWTGATKYHLNGRDSLVNPGPAMASHKDDEEKYFPQSGVLIFGKQGSNKTNVDIEKVMITDEEEIRTTNPVATEQYGSVSTNLQSGNTQAATSDVNTQGVLPGMVWQDRDVYLQGPIWAKIPHTDGHFHPSPLMGGFGLKHPPPQILIKNTPVPANPSTTFSAAKFASFITQYSTGQVSVEIEWELQKENSKRWNPEIQYTSNYNKSVNVDFTVDTNGVYSEPRPIGTRYLTRNL

SEQ ID NO: 11273 - protein, 735 aa, Artificial Sequence
  source: /note="Description of Artificial Sequence: Synthetic polypeptide"
MAADGYLPDWLEDTLSEGIRQWWKLKPGPPPPKPAERHKDDSRGLVLPGYKYLGPFNGLDKGEPVNEADAAALEHDKAYDRQLDSGDNPYLKYNHADAEFQERLKEDTSFGGNLGRAVFQAKKRVLEPLGLVEEPVKTAPGKKRPVEHSPVEPDSSSGTGKAGQQPARKRLNFGQTGDADSVPDPQPLGQPPAAPSGLGTNTMATGSGAPMADNNEGADGVGNSSGNWHCDSTWMGDRVITTSTRTWALPTYNNHLYKQISSQSGASNDNHYFGYSTPWGYFDFNRFHCHFSPRDWQRLINNNWGFRPKRLSFKLFNIQVKEVTQNDGTTTIANNLTSTVQVFTDSEYQLPYVLGSAHQGCLPPFPADVFMVPQYGYLTLNNGSQAVGRSSFYCLEYFPSQMLRTGNNFTFSYTFEDVPFHSSYAHSQSLDRLMNPLIDQYLYYLSKTNAPSGTTTMSRLQFSQAGASDIRDQSRNWLPGPCYRQQRVSKTAADNNNSDYSWTGATKYHLNGRDSLVNPGPAMASHKDDEEKYFPQSGVLIFGKQGSNKTNVDIEKVMITDEEEIRTTNPVATEQYGSVSTNLQSGNTQAATSDVNTQGVLPGMVWQDRDVYLQGPIWAKIPHTDGHFHPSPLMGGFGLKHPPPQILIKNTPVPANPSTTFSAAKFASFITQYSTGQVSVEIEWELQKENSKRWNPEIQYTSNYNKSVNVDFTVDTNGVYSEPHPIGTRYLTRNL

SEQ ID NO: 11274 - protein, 735 aa, Artificial Sequence
  source: /note="Description of Artificial Sequence: Synthetic polypeptide"
MAADGYLPDWLEDTLSEGIRQWWKFKPGPPPPKPAERHKDDSRGLVLPGYKYLGPFNGLDKGEPVNEADAAALEHDKAYDRQLDSGDNPYLKYNHADAEFQERLKEDTSFGGNLGRAVFQAKKRVLEPLGLVEEPVKTAPGKKRPVEHSPVEPDSSSGTGKAGQQPARKRLNFGQTGDADSVPDPQPLGQPPAAPSGLGTNTMATGSGAPMADNNEGADGVGNSSGNWHCDSTWMGDRVITTSTRTWALPTYNNHLYKQISSQSGASNDNHYFGYSTPWGYFDFNRFHCHFSPRDWQRLINNNWGFRPKRLSFKLFNIQVKEVTQNDGTTTIANNLTSTVQVFTDSEYQLPYVLGSAHQGCLPPFPADVFMVPQYGYLTLNNGSQAVGRSSFYCLEYFPSQMLRTGNNFTFSYTFEDVPFHSSYAHSQSLDRLMNPLIDQYLYYLSKTNAPSGTTTMSRLQFSQAGASDIRDQSRNWLPGPCYRQQRVSKTAADNNNSDYSWTGATKYHLNGRDSLVNPGPAMASHKDDEEKYFPQSGVLIFGKQGSNKTNVDIEKVMITDEEEIRTTNPVATEQYGSVSTNLQSGNTQAATSDVNTQGVLPGMVWQDRDVYLQGPIWAKIPHTDGHFHPSPLMGGFGLKHPPPQILIKNTPVPANPSTTFSAAKFASFITQYSTGQVSVEIEWELQKENSKRWNPEIQYTSNYNKSVNVDFTVDTNGVYSEPRPIGTRYLTRNL

SEQ ID NO: 11275 - protein, 735 aa, Artificial Sequence
  source: /note="Description of Artificial Sequence: Synthetic polypeptide"
MAADGYLPDWLEDTLSEGIRQWWKLKPGPPPPKPAERHKDDSRGLVLPGYKYLGPFNGLDKGEPVNEADAAALEHDKAYDRQLDSGDNPYLKYNHADAEFQERLKEDTSFGGNLGRAVFQAKKRVLEPLGLVEEPVKTAPGKKRPVEHSPVEPDSSSGTGKAGQQPARKRLNFGQTGDADSVPDPQPLGQPPAAPSGLGTNTMATGSGAPMADNNEGADGVGNSSGNWHCDSTWMGDRVITTSTRTWALPTYNNHLYKQISSQSGASNDNHYFGYSTPWGYFDFNRFHCHFSSRDWQRLINNNWGFRPKRLSFKLFNIQVKEVTQNDGTTTIANNLTSTVQVFTDSEYQLPYVLGSAHQGCLPPFPADVFMVPQYGYLTLNNGSQAVGRSSFYCLEYFPSQMLRTGNNFTFSYTFEDVPFHSSYAHSQSLDRLMNPLIDQYLYYLSKTNAPSGTTTMSRLQFSQAGASDIRDQSRNWLPGPCYRQQRVSKTAADNNNSDYSWTGATKYHLNGRDSLVNPGPAMASHKDDEEKYFPQSGVLIFGKQGSNKTNVDIEKVMITDEEEIRTTNPVATEQYGSVSTNLQSGNTQAATSDVNTQGVLPGMVWQDRDVYLQGPIWAKIPHTDGHFHPSPLMGGFGLKHPPPQILIKNTPVPANPSTTFSAAKFASFITQYSTGQVSVEIEWELQKENSKRWNPEIQYTSNYNKSVNVDFTVDTNGVYSEPRPIGTRYLTRNL

SEQ ID NO: 11276 - protein, 735 aa, Artificial Sequence
  source: /note="Description of Artificial Sequence: Synthetic polypeptide"
MAADGYLPDWLEDTLSEGIRQWWKLKPGPPPPKPAERHEDDSRGLVLPGYKYLGPFNGLDKGEPVNEADAAALEHDKAYDRQLDSGDNPYLKYNHADAEFQERLKEDTSFGGNLGRAVFQAKKRVLEPLGLVEEPVKTAPGKKRPVEHSPVEPDSSSGTGKAGQQPARKRLNFGQTGDADSVPDPQPLGQPPAAPSGLGTNTMATGSGAPMADNNEGADGVGNSSGNWHCDSTWMGDRVITTSTRTWALPTYNNHLYKQISSQSGASNDNHYFGYSTPWGYFDFNRFHCHFSPRDWQRLINNNWGFRPKRLSFKLFNIQVKEVTQNDGTTTIANNLTSTVQVFTDSEYQLPYVLGSAHQGCLPPFPADVFMVPQYGYLTLNNGSQAVGRSSFYCLEYFPSQMLRTGNNFTFSYTFEDVPFHSSYAHSQSLDRLMNPLIDQYLYYLSKTNAPSGTTTMSRLQFSQAGASDIRDQSRNWLPGPCYRQQRVSKTAADNNNSDYSWTGATKYHLNGRDSLVNPGPAMASHKDDEEKYFPQSGVLIFGKQGSNKTNVDIEKVMITDEEEIRTTNPVATEQYGSVSTNLQSGNTQAATSDVNTQGVLPGMVWQDRDVYLQGPIWAKIPHTDGHFHPSPLMGGFGLKHPPPQILIKNTPVPANPSTTFSAAKFASFITQYSTGQVSVEIEWELQKENSKRWNPEIQYTSNYNKSVNVDFTVDTNGVYSEPRPIGTRYLTRNL

SEQ ID NO: 11277 - protein, 734 aa, Artificial Sequence
  source: /note="Description of Artificial Sequence: Synthetic polypeptide"
MAADGYLPDWLEDTLSEGIRQWWKLKPGPPPPKPAERHKDDSRGLVLPGYKYLGPFNGLDKGEPVNEADAAALEHDKAYDRQLDSGDNPYLKYNHADAEFQERLKEDTSFGGNLGRAVFQAKKRVLEPLGLVEEPVKTAPGKKRPVEHSPVEPDSSSGTGKAGQQPARKRLNFGQTGDADSVPDPQPLGQPPAAPSGLGTNTMATGSGAPMADNNEGADGVGNSSGNWHCDSTWMGDRVITTSTRTWALPTYNNHLYKQISSQSGASNDNHYFGYSTPWGYFDFNRFHCHFSPRDWQRLINNNWGFRPKRLSFKLFNIQVKEVTQNDGTTTIANNLTSTVQVFTDSEYQLPYVLGSAHQGCLPPFPADVFMVPQYGYLTLNNGSQAVGRSSFYCLEYFPSQMLRTGNNFTFSYTFEDVPFHSSYAHSQSLDRLMNPLIDQYLYYLSKTNAPSGTTTMSRLQFSQAGASDIRDQSRNWLPGPCYRQQRVSKTAADNNSDYSWTGATKYHLNGRDSLVNPGPAMASHKDDEEKYFPQSGVLIFGKQGSNKTNVDIEKVMITDEEEIRTTNPVATEQYGSVSTNLQSGNTQAATSDVNTQGVLPGMVWQDRDVYLQGPIWAKIPHTDGHFHPSPLMGGFGLKHPPPQILIKNTPVPANPSTTFSAAKFASFITQYSTGQVSVEIEWELQKENSKRWNPEIQYTSNYNKSVNVDFTVDTNGVYSEPRPIGTRYLTRNL

SEQ ID NO: 11278 - protein, 735 aa, Artificial Sequence
  source: /note="Description of Artificial Sequence: Synthetic polypeptide"
MAADGYLPDWLEDTLSEGIRQWWKLKPGPPPPKPAEWHKDDSRGLVLPGYKYLGPFNGLDKGEPVNEADAAALEHDKAYDRQLDSGDNPYLKYNHADAEFQERLKEDTSFGGNLGRAVFQAKKRVLEPLGLVEEPVKTAPGKKRPVEHSPVEPDSSSGTGKAGQQPARKRLNFGQTGDADSVPDPQPLGQPPAAPSGLGTNTMATGSGAPMADNNEGADGVGNSSGNWHCDSTWMGDRVITTSTRTWALPTYNNHLYKQISSQSGASNDNHYFGYSTPWGYFDFNRFHCHFSPRDWQRLINNNWGFRPKRLSFKLFNIQVKEVTQNDGTTTIANNLTSTVQVFTDSEYQLPYVLGSAHQGCLPPFPADVFMVPQYGYLTLNNGSQAVGRSSFYCLEYFPSQMLRTGNNFTFSYTFEDVPFHSSYAHSQSLDRLMNPLIDQYLYYLSKTNAPSGTTTMSRLQFSQAGASDIRDQSRNWLPGPCYRQQRVSKTAADNNNSDYSWTGATKYHLNGRDSLVNPGPAMASHKDDEEKYFPQSGVLIFGKQGSNKTNVDIEKVMITDEEEIRTTNPVATEQYGSVSTNLQSGNTQAATSDVNTQGVLPGMVWQDRDVYLQGPIWAKIPHTDGHFHPSPLMGGFGLKHPPPQILIKNTPVPANPSTTFSAAKFASFITQYSTGQVSVEIEWELQKENSKRWNPEIQYTSNYNKSVNVDFTVDTNGVYSEPRPIGTRYLTRNL

SEQ ID NO: 11279 - protein, 735 aa, Artificial Sequence
  source: /note="Description of Artificial Sequence: Synthetic polypeptide"
MAADGYLPDWLEDTLSEGIRQWWKLKPGPPPPKPAERHKDDSRGLVLPGYKYLGPFNGLDKGEPVNEADAAALEHDKAYDRQLDSGDNPYLKYNHADAEFQERLKEDTSFGGNLGRAVFQAKKRVLEPLGLVEEPVKTAPGKKRPVEHSPVEPDSSSGTGKAGQQPARKRLNFGQTGDADSVPDPQPLGQPPAAPSGLGTNTMATGSGAPMADNNEGADGVGNSSGNWHCDSTWMGDRVITTSTRTWALPTYNNHLYKQISSQSGASNDNHYFGYSTPWGYFDFNRFHCHFSPRDWQRLINNNWGFRPKRLSFKLFNIQVKEVTQNDGTTTIANNLTSTVQVFTDSEYQLPYVLGSAHQGCLPPFPADVFMVPQYGYLTLNNGSQAVGRSSFYCLEYFPSQMLRTGNNFTFSYTFEDVPFHSSYAHSQSLDRLMNPLIDQYLYYLSKTNAPSGTTTMSRLQFSQAGASDIRDQSRNWLPGPCYRQQRVSKTAADNNNSDYSWTGATKYHLNGRDSLVNPGPAMASHKDDEEKYFPQSGVLIFGKQGSNKTNVDIEKVMITDEEEIRTTNPVATEQYGSVSTNLQSGNTQAATSDVNTQGVLPDMVWQDRDVYLQGPIWAKIPHTDGHFHPSPLMGGFGLKHPPPQILIKNTPVPANPSTTFSAAKFASFITQYSTGQVSVEIEWELQKENSKRWNPEIQYTSNYNKSVNVDFTVDTNGVYSEPRPIGTRYLTRNL

SEQ ID NO: 11280 - protein, 735 aa, Artificial Sequence
  source: /note="Description of Artificial Sequence: Synthetic polypeptide"
MAADGYLPDWLEDTLSEGIRQWWKLKPGPPPPKPAERHKDDSRGLVLPGYKYLGPFNGLDKGEPVNEADAAALEHDKAYDRQLDSGDNPYLKYNHADAEFQERLKEDTSFGDNLGRAVFQAKKRVLEPLGLVEEPVKTAPGKKRPVEHSPVEPDSSSGTGKAGQQPARKRLNFGQTGDADSVPDPQPLGQPPAAPSGLGTNTMATGSGAPMADNNEGADGVGNSSGNWHCDSTWMGDRVITTSTRTWALPTYNNHLYKQISSQSGASNDNHYFGYSTPWGYFDFNRFHCHFSPRDWQRLINNNWGFRPKRLSFKLFNIQVKEVTQNDGTTTIANNLTSTVQVFTDSEYQLPYVLGSAHQGCLPPFPADVFMVPQYGYLTLNNGSQAVGRSSFYCLEYFPSQMLRTGNNFTFSYTFEDVPFHSSYAHSQSLDRLMNPLIDQYLYYLSKTNAPSGTTTMSRLQFSQAGASDIRDQSRNWLPGPCYRQQRVSKTAADNNNSDYSWTGATKYHLNGRDSLVNPGPAMASHKDDEEKYFPQSGVLIFGKQGSNKTNVDIEKVMITDEEEIRTTNPVATEQYGSVSTNLQSGNTQAATSDVNTQGVLPGMVWQDRDVYLQGPIWAKIPHTDGHFHPSPLMGGFGLKHPPPQILIKNTPVPANPSTTFSAAKFASFITQYSTGQVSVEIEWELQKENSKRWNPEIQYTSNYNKSVNVDFTVDTNGVYSEPRPIGTRYLTRNL

SEQ ID NO: 11281 - protein, 735 aa, Artificial Sequence
  source: /note="Description of Artificial Sequence: Synthetic polypeptide"
MAADGYLPDWLEDTLSEGIRQWWKLKPGPPPPKPAERHKDDSRGLVLPGYKYLGPFNGLDKGEPVNEADAAALEHDKAYDRQLDSGDNPYLKYNHADAEFQERLKEDTSFGGNLGRAVFQAKKRVLEPLGLVEEPVKTAPGKKRPVEHSPVEPDSSSGTGKAGQQPARKRLNFGQTGDADSVPDPQPLGQPPAAPSGLGTNTMATGSGAPMADNNEGADGVGNSSGNWHCDSTWMGDRVITTSTRTWALPTYNNHLYKQISSQSGASNDNHYFGYSTPWGYFDFNRFHCHFSPRDWQRLINNNWGFRPKRLSFKLFNIQVKEVTQNDGTTTIANNLTSTVQVFTDSEYQLPYVLDSAHQGCLPPFPADVFMVPQYGYLTLNNGSQAVGRSSFYCLEYFPSQMLRTGNNFTFSYTFEDVPFHSSYAHSQSLDRLMNPLIDQYLYYLSKTNAPSGTTTMSRLQFSQAGASDIRDQSRNWLPGPCYRQQRVSKTAADNNNSDYSWTGATKYHLNGRDSLVNPGPAMASHKDDEEKYFPQSGVLIFGKQGSNKTNVDIEKVMITDEEEIRTTNPVATEQYGSVSTNLQSGNTQAATSDVNTQGVLPGMVWQDRDVYLQGPIWAKIPHTDGHFHPSPLMGGFGLKHPPPQILIKNTPVPANPSTTFSAAKFASFITQYSTGQVSVEIEWELQKENSKRWNPEIQYTSNYNKSVNVDFTVDTNGVYSEPRPIGTRYLTRNL

SEQ ID NO: 11282 - protein, 735 aa, Artificial Sequence
  source: /note="Description of Artificial Sequence: Synthetic polypeptide"
MAADGYLPDWLEDTLSEGIRQWWKLKPGPPPPKPAERHKDDSRGLVLPGYKYLGPFNGLDKGEPVNEADAAALEHDKAYDRQLDSGDNPYLKYNHADAEFQERLKEDTSFGGNLGRAVFQAKKRVLEPLGLVEEPVKTAPGKKRPVEHSPVEPDSSSGTGKAGQQPARKRLNFGQTGDADSVPDPQPLGQPPAAPSGLGTNTMATGSGAPMADNNEGADGVGNSSGNWHCDSTWMGDRVITTSTRTWALPTYNNHLYKQISSQSGASNDNHYFGYSTPWGYFDFNRFHCHFSPRDWQRLINNNWGFRPKRLSFKLFNIQVKEVTQNDGTTTIANNLTSTVQVFTDSEYQLPYVLGSAHQGCLPPFPADVFMVPQYGYLTLNNGSQAVGRSSFYCLEYFPSQMLRTGNNFTFSYTFEDVPFHSSYAHSQSLDRLMNPLIDQYLYYLSKTNAPSGTTTMSRLQFSQAGASDIRDQSRNWLPGPCYRQQRVSKTAADNNNSDYSWTGATKYHLNGRDSLVNPGPAMASHKDDEEKYFPQSGVLIFGKQGSNKTNVDIEKVMITDEEEIRTTNPVATEQYGSVSTNLQSGNTQAATSDVNTQGVLPGMVWQDRDVYLQGPIWAKIPHTDGHFHPSPLMGGFGLKHPPPQILIKNTPVPANPSTTFSATKFASFITQYSTGQVSVEIEWELQKENSKRWNPEIQYTSNYNKSVNVDFTVDTNGVYSEPRPIGTRYLTRNL

SEQ ID NO: 11283 - protein, 735 aa, Artificial Sequence
  source: /note="Description of Artificial Sequence: Synthetic polypeptide"
MAADGYLPDWLEDTLSEGIRQWWKLKPGPPPPKPAERHKDDSRGLVLPGYKYLGPFNGLDKGESVNEADAAALEHDKAYDRQLDSGDNPYLKYNHADAEFQERLKEDTSFGGNLGRAVFQAKKRVLEPLGLVEEPVKTAPGKKRPVEHSPVEPDSSSGTGKAGQQPARKRLNFGQTGDADSVPDPQPLGQPPAAPSGLGTNTMATGSGAPMADNNEGADGVGNSSGNWHCDSTWMGDRVITTSTRTWALPTYNNHLYKQISSQSGASNDNHYFGYSTPWGYFDFNRFHCHFSPRDWQRLINNNWGFRPKRLSFKLFNIQVKEVTQNDGTTTIANNLTSTVQVFTDSEYQLPYVLGSAHQGCLPPFPADVFMVPQYGYLTLNNGSQAVGRSSFYCLEYFPSQMLRTGNNFTFSYTFEDVPFHSSYAHSQSLDRLMNPLIDQYLYYLSKTNAPSGTTTMSRLQFSQAGASDIRDQSRNWLPGPCYRQQRVSKTAADNNNSDYSWTGATKYHLNGRDSLVNPGPAMASHKDDEEKYFPQSGVLIFGKQGSNKTNVDIEKVMITDEEEIRTTNPVATEQYGSVSTNLQSGNTQAATSDVNTQGVLPGMVWQDRDVYLQGPIWAKIPHTDGHFHPSPLMGGFGLKHPPPQILIKNTPVPANPSTTFSAAKFASFITQYSTGQVSVEIEWELQKENSKRWNPEIQYTSNYNKSVNVDFTVDTNGVYSEPRPIGTRYLTRNL

SEQ ID NO: 11284 - protein, 735 aa, Artificial Sequence
  source: /note="Description of Artificial Sequence: Synthetic polypeptide"
MAADGYLPDWLEDTLSEGIRQWWKLKPGPPPPKPAERHKDDSRGLVLPGYKYLGPFNGLDKGEPVNEADAAALEHDKAYDRQLDSGDNPYLKYNHADAEFQERLKEDTSFGGNLGRAVFQAKKRVLEPLGLVEEPVKTAPGKKRPVEHSPVEPDSSSGTGKAGQQPARKRLNFGQTGDADSVPDPQPLGQPPAAPSGLGTNTMATGSGAPMADNNEGADGVGNSSGNWHCDSTWMGDRVITTSTRTWALPTYNNHLYKQISSQSGASNDNHYFGYSTPWGYFDFNRFHCHFSPRDWQRLINNNWGFRPKRLSFKLFNIQVKEVTQNDGTTTIANNLTSTVQVFTDSEYQLPYVLGSVHQGCLPPFPADVFMVPQYGYLTLNNGSQAVGRSSFYCLEYFPSQMLRTGNNFTFSYTFEDVPFHSSYAHSQSLDRLMNPLIDQYLYYLSKTNAPSGTTTMSRLQFSQAGASDIRDQSRNWLPGPCYRQQRVSKTAADNNNSDYSWTGATKYHLNGRDSLVNPGPAMASHKDDEEKYFPQSGVLIFGKQGSNKTNVDIEKVMITDEEEIRTTNPVATEQYGSVSTNLQSGNTQAATSDVNTQGVLPGMVWQDRDVYLQGPIWAKIPHTDGHFHPSPLMGGFGLKHPPPQILIKNTPVPANPSTTFSAAKFASFITQYSTGQVSVEIEWELQKENSKRWNPEIQYTSNYNKSVNVDFTVDTNGVYSEPRPIGTRYLTRNL

SEQ ID NO: 11285 - protein, 735 aa, Artificial Sequence
  source: /note="Description of Artificial Sequence: Synthetic polypeptide"
MAADGYLPDWLEDTLSEGIRQWWKLKPGPPPPKPAERHKDDSRGLVLPGYKYLGPFNGLDKGEPVNEADAAALEHDKAYDRQLDSGDNPYLKYNHADAEFQERLKEDTSFGGNLGRAVFQAKKRVLEPLGLVEEPVKTAPGKKRPVEHSPVESDSSSGTGKAGQQPARKRLNFGQTGDADSVPDPQPLGQPPAAPSGLGTNTMATGSGAPMADNNEGADGVGNSSGNWHCDSTWMGDRVITTSTRTWALPTYNNHLYKQISSQSGASNDNHYFGYSTPWGYFDFNRFHCHFSPRDWQRLINNNWGFRPKRLSFKLFNIQVKEVTQNDGTTTIANNLTSTVQVFTDSEYQLPYVLGSAHQGCLPPFPADVFMVPQYGYLTLNNGSQAVGRSSFYCLEYFPSQMLRTGNNFTFSYTFEDVPFHSSYAHSQSLDRLMNPLIDQYLYYLSKTNAPSGTTTMSRLQFSQAGASDIRDQSRNWLPGPCYRQQRVSKTAADNNNSDYSWTGATKYHLNGRDSLVNPGPAMASHKDDEEKYFPQSGVLIFGKQGSNKTNVDIEKVMITDEEEIRTTNPVATEQYGSVSTNLQSGNTQAATSDVNTQGVLPGMVWQDRDVYLQGPIWAKIPHTDGHFHPSPLMGGFGLKHPPPQILIKNTPVPANPSTTFSAAKFASFITQYSTGQVSVEIEWELQKENSKRWNPEIQYTSNYNKSVNVDFTVDTNGVYSEPRPIGTRYLTRNL

SEQ ID NO: 11286 - protein, 735 aa, Artificial Sequence
  source: /note="Description of Artificial Sequence: Synthetic polypeptide"
MAADGYLPDWLEDTLSEGIRQWWKLKPGPPPPKPAERHKDDSRGLVLPGYKYLGPFNGLDKGEPVNEADAAALEHDKAYDRQLDSGDNPYLKYNHADAEFQERLKEDTSFGGNLGRAVFQAKKRVLEPLGLVEEPVKTAPGKKRPVEHSPVEPDSSSGTGKAGQQPARKRLNFGQTGDADSVPDPQPLGQPPAAPSGLGTNTMATGSGAPMADNNEGADGVGNSSGNWHCDSTWMGDRVITTSTRTWALPTYNNHLYKQISSQSGASNDNHYFGYSTPWGYFDFNRFHCHFSPRDWQRLINNNWGFRPKRLSFKLFNIQVKEVTQNDGTTTIANNLTSTVQVFTDSEYQLPYVLGSAHQGCLPPFPADVFMVPQYGYLTLNNGSQAVGRSSFYCLEYFPSQMLRTGNNFTFSYTFEDVPFHSSYAHSQSMDRLMNPLIDQYLYYLSKTNAPSGTTTMSRLQFSQAGASDIRDQSRNWLPGPCYRQQRVSKTAADNNNSDYSWTGATKYHLNGRDSLVNPGPAMASHKDDEEKYFPQSGVLIFGKQGSNKTNVDIEKVMITDEEEIRTTNPVATEQYGSVSTNLQSGNTQAATSDVNTQGVLPGMVWQDRDVYLQGPIWAKIPHTDGHFHPSPLMGGFGLKHPPPQILIKNTPVPANPSTTFSAAKFASFITQYSTGQVSVEIEWELQKENSKRWNPEIQYTSNYNKSVNVDFTVDTNGVYSEPRPIGTRYLTRNL

SEQ ID NO: 11287 - protein, 735 aa, Artificial Sequence
  source: /note="Description of Artificial Sequence: Synthetic polypeptide"
MAADGYLPDWLEDTLSEGIRQWWKLKPGPPPPKPAERHKDDSRGLVLPGYKYLGPFNGLDKGEPVNEADAAALEHDKAYDRQLDSGDNPYLKYNHADAEFQERLKEDTSFGGNLGRAVFQAKKRVLEPLGLVEEPVKTAPGKKRPVEHSPVEPDSSSGTGKAGQQPARKRLNFGQTGDADSVPDPQPLGQPPAAPSGLGTNTMATGSGAPMADNNEGADGVGNSSGNWHCDSTWMGDRVITTSTRTWALPTYNNHLYKQISSQSGASNDNHYFGYSTPWGYFDFNRFHCHFSPRDWQRLINNNWGFRPKRLSFKLFNIQVKEVTQNDGTTTIANNLTSTVQVFTDSEYQLPYVLGSAHQGCLPPFPADVFMVPQYGYLTLNNGSQAVGRSSFYCLEYFPSQMLRTGNNFTFSYTFEDVPFHSSYAHSQSLDRLMNPLIDQYLYYLSKTNAPSGTTTMSRLQFSQAGASDIRDQSRNWLPGPCYRQQRVSKTAADNNNSDYSWTGATKYHLNGRDSLVNPGPAMASHKDDEEKYFPQSGVLIFRKQGSNKTNVDIEKVMITDEEEIRTTNPVATEQYGSVSTNLQSGNTQAATSDVNTQGVLPGMVWQDRDVYLQGPIWAKIPHTDGHFHPSPLMGGFGLKHPPPQILIKNTPVPANPSTTFSAAKFASFITQYSTGQVSVEIEWELQKENSKRWNPEIQYTSNYNKSVNVDFTVDTNGVYSEPRPIGTRYLTRNL

SEQ ID NO: 11288 - protein, 735 aa, Artificial Sequence
  source: /note="Description of Artificial Sequence: Synthetic polypeptide"
MAADGYLPDWLEDTLSEGIRQWWKLKPGPPPPKPAERHKDDSRGLVLPGYKYLGPFNGLDKGEPVNEADTAALEHDKAYDRQLDSGDNPYLKYNHADAEFQERLKEDTSFGGNLGRAVFQAKKRVLEPLGLVEEPVKTAPGKKRPVEHSPVEPDSSSGTGKAGQQPARKRLNFGQTGDADSVPDPQPLGQPPAAPSGLGTNTMATGSGAPMADNNEGADGVGNSSGNWHCDSTWMGDRVITTSTRTWALPTYNNHLYKQISSQSGASNDNHYFGYSTPWGYFDFNRFHCHFSPRDWQRLINNNWGFRPKRLSFKLFNIQVKEVTQNDGTTTIANNLTSTVQVFTDSEYQLPYVLGSAHQGCLPPFPADVFMVPQYGYLTLNNGSQAVGRSSFYCLEYFPSQMLRTGNNFTFSYTFEDVPFHSSYAHSQSLDRLMNPLIDQYLYYLSKTNAPSGTTTMSRLQFSQAGASDIRDQSRNWLPGPCYRQQRVSKTAADNNNSDYSWTGATKYHLNGRDSLVNPGPAMASHKDDEEKYFPQSGVLIFGKQGSNKTNVDIEKVMITDEEEIRTTNPVATEQYGSVSTNLQSGNTQAATSDVNTQGVLPGMVWQDRDVYLQGPIWAKIPHTDGHFHPSPLMGGFGLKHPPPQILIKNTPVPANPSTTFSAAKFASFITQYSTGQVSVEIEWELQKENSKRWNPEIQYTSNYNKSVNVDFTVDTNGVYSEPRPIGTRYLTRNL

SEQ ID NO: 11289 - protein, 735 aa, Artificial Sequence
  source: /note="Description of Artificial Sequence: Synthetic polypeptide"
MAADGYLPDWLEDTLSEGIRQWWKLKPGPPPPKPAERHKDDSRGLVLPGYKYLGPFNGLDKGEPVNEADAAALEHDKAYDRQLDSGDNPYLKYNHADAEFQERLKEDTSFGGNLGRAVFQAKKRVLEPLGLVEEPVKTAPGKKRPVEHSPVEPDSSSGTGKAGQQPARKRLNFGQTGDADSVPDPQPLGQPPAAPSGLGTNTMATGSGTPMADNNEGADGVGNSSGNWHCDSTWMGDRVITTSTRTWALPTYNNHLYKQISSQSGASNDNHYFGYSTPWGYFDFNRFHCHFSPRDWQRLINNNWGFRPKRLSFKLFNIQVKEVTQNDGTTTIANNLTSTVQVFTDSEYQLPYVLGSAHQGCLPPFPADVFMVPQYGYLTLNNGSQAVGRSSFYCLEYFPSQMLRTGNNFTFSYTFEDVPFHSSYAHSQSLDRLMNPLIDQYLYYLSKTNAPSGTTTMSRLQFSQAGASDIRDQSRNWLPGPCYRQQRVSKTAADNNNSDYSWTGATKYHLNGRDSLVNPGPAMASHKDDEEKYFPQSGVLIFGKQGSNKTNVDIEKVMITDEEEIRTTNPVATEQYGSVSTNLQSGNTQAATSDVNTQGVLPGMVWQDRDVYLQGPIWAKIPHTDGHFHPSPLMGGFGLKHPPPQILIKNTPVPANPSTTFSAAKFASFITQYSTGQVSVEIEWELQKENSKRWNPEIQYTSNYNKSVNVDFTVDTNGVYSEPRPIGTRYLTRNL

SEQ ID NO: 11290 - protein, 735 aa, Artificial Sequence
  source: /note="Description of Artificial Sequence: Synthetic polypeptide"
MAADGYLPDWLEDTLSEGIRQWWKLKPGPPPPKPAERHKDDSRGLVLPGYKYLGPFNGLDKGEPVNEADAAALEHDKAYDRQLDSGDNPYLKYNHADAEFQERLKEDTSFGGNLGRAVFQAKKRVLEPLGLVEEPVKTAPGKKRPVEHSPVEPDSSSGTGKAGQQPARKRLNFGQTGDADSVPDPQPLGQPPAAPSGLGTNTMATGSGAPMADNNEGADGVGNSSGNWHCDSTWMGDRVITTSTRTWALSTYNNHLYKQISSQSGASNDNHYFGYSTPWGYFDFNRFHCHFSPRDWQRLINNNWGFRPKRLSFKLFNIQVKEVTQNDGTTTIANNLTSTVQVFTDSEYQLPYVLGSAHQGCLPPFPADVFMVPQYGYLTLNNGSQAVGRSSFYCLEYFPSQMLRTGNNFTFSYTFEDVPFHSSYAHSQSLDRLMNPLIDQYLYYLSKTNAPSGTTTMSRLQFSQAGASDIRDQSRNWLPGPCYRQQRVSKTAADNNNSDYSWTGATKYHLNGRDSLVNPGPAMASHKDDEEKYFPQSGVLIFGKQGSNKTNVDIEKVMITDEEEIRTTNPVATEQYGSVSTNLQSGNTQAATSDVNTQGVLPGMVWQDRDVYLQGPIWAKIPHTDGHFHPSPLMGGFGLKHPPPQILIKNTPVPANPSTTFSAAKFASFITQYSTGQVSVEIEWELQKENSKRWNPEIQYTSNYNKSVNVDFTVDTNGVYSEPRPIGTRYLTRNL

SEQ ID NO: 11291 - protein, 735 aa, Artificial Sequence
  source: /note="Description of Artificial Sequence: Synthetic polypeptide"
MAADGYLPDWLEDTLSEGIRQWWKLKPGPPPPKPAERHKDDSRGLVLPGYKYLGPFNGLDKGEPVNEADAAALEHDKAYDRQLDSGDNPYLKYNHADAEFQERLKEDTSFGGNLGRAVFQAKKRVLEPLGLVEEPVKTAPGKKRPVEHSPVEPDSSSGTGKAGQQPARKRLNFGQTGDADSVPDPQPLGQPPAAPSGLGTNTMATGSGAPMADNNEGADGVGNSSGNWHCDSTWMGDRVITTSTRTWALPTYNNHLYKQISSQSGASNDNHYFGYSTPWGYFDFNRFHCHFSPRDWQRLINNNWGFRPKRLSFKLFNIQVKEVTQNDGTTTIANNLTSTVQVFTDSEYQLPYVLGSAHQGCLPPFPADVFMVPQYGYLTLNNGSQAVGRSSFYCLEYFPSQMLRTGNNFTFSYTFEDVPFHSSYAHSQSLDRLMNPLIDQYLYYLSKTNAPSGTTTMSRLQFSQAGASDIRDQSRNWLPGPCYRQQRVSKTAVDNNNSDYSWTGATKYHLNGRDSLVNPGPAMASHKDDEEKYFPQSGVLIFGKQGSNKTNVDIEKVMITDEEEIRTTNPVATEQYGSVSTNLQSGNTQAATSDVNTQGVLPGMVWQDRDVYLQGPIWAKIPHTDGHFHPSPLMGGFGLKHPPPQILIKNTPVPANPSTTFSAAKFASFITQYSTGQVSVEIEWELQKENSKRWNPEIQYTSNYNKSVNVDFTVDTNGVYSEPRPIGTRYLTRNL

SEQ ID NO: 11292 - protein, 735 aa, Artificial Sequence
  source: /note="Description of Artificial Sequence: Synthetic polypeptide"
MAADGYLPDWLEDTLSEGIRQWWKLKPGPPPPKPAERHKDDSRGLVLPGYKYLGPFNGLDKGEPVNEADAAALEHDKAYDRQLDSGDNPYLKYNHADAEFQERLKEDTSFGGNLGRAVFQAKKRVLEPLGLVEEPVKTAPGKKRPVEHSPVEPDSSSGTGKAGQQPARKRLNFGQTGDADSVPDPQPLGQPPAAPSGLGTNTMATGSGAPMADNNEGADGVGNSSGNWHCDSTWMGDRVITTSTRTWALPTYNNHLYKQISSQSGASNDNHYFGYSTPWGYFDFNRFHCHFSPRDWQRLINNNWGFRPKRLSFKLFNIQVKEVTQNDGTTTIANNLTSTVQVFTDSEYQLPYVLGSAHQGCLPPFPADVFMVPQYGYLTLNNGSQAVGRSSFYCLEYFPSQILRTGNNFTFSYTFEDVPFHSSYAHSQSLDRLMNPLIDQYLYYLSKTNAPSGTTTMSRLQFSQAGASDIRDQSRNWLPGPCYRQQRVSKTAADNNNSDYSWTGATKYHLNGRDSLVNPGPAMASHKDDEEKYFPQSGVLIFGKQGSNKTNVDIEKVMITDEEEIRTTNPVATEQYGSVSTNLQSGNTQAATSDVNTQGVLPGMVWQDRDVYLQGPIWAKIPHTDGHFHPSPLMGGFGLKHPPPQILIKNTPVPANPSTTFSAAKFASFITQYSTGQVSVEIEWELQKENSKRWNPEIQYTSNYNKSVNVDFTVDTNGVYSEPRPIGTRYLTRNL

SEQ ID NO: 11293 - protein, 735 aa, Artificial Sequence
  source: /note="Description of Artificial Sequence: Synthetic polypeptide"
MAADGYLPDWLEDTLSEGIRQWWKLKPGPPPPKPAERHKDDSRGLVLPGYKYLGPFNGLDKGEPVNEADAAALEHDKAYDRQLDSGDNPYLKYNHADAEFQERLKEDTSFGGNLGRAVFQAKKRVLEPLGLVEEPVKTAPGKKRPVEHSPVEPDSSSGTGKVGQQPARKRLNFGQTGDADSVPDPQPLGQPPAAPSGLGTNTMATGSGAPMADNNEGADGVGNSSGNWHCDSTWMGDRVITTSTRTWALPTYNNHLYKQISSQSGASNDNHYFGYSTPWGYFDFNRFHCHFSPRDWQRLINNNWGFRPKRLSFKLFNIQVKEVTQNDGTTTIANNLTSTVQVFTDSEYQLPYVLGSAHQGCLPPFPADVFMVPQYGYLTLNNGSQAVGRSSFYCLEYFPSQMLRTGNNFTFSYTFEDVPFHSSYAHSQSLDRLMNPLIDQYLYYLSKTNAPSGTTTMSRLQFSQAGASDIRDQSRNWLPGPCYRQQRVSKTAADNNNSDYSWTGATKYHLNGRDSLVNPGPAMASHKDDEEKYFPQSGVLIFGKQGSNKTNVDIEKVMITDEEEIRTTNPVATEQYGSVSTNLQSGNTQAATSDVNTQGVLPGMVWQDRDVYLQGPIWAKIPHTDGHFHPSPLMGGFGLKHPPPQILIKNTPVPANPSTTFSAAKFASFITQYSTGQVSVEIEWELQKENSKRWNPEIQYTSNYNKSVNVDFTVDTNGVYSEPRPIGTRYLTRNL

SEQ ID NO: 11294 - protein, 735 aa, Artificial Sequence
  source: /note="Description of Artificial Sequence: Synthetic polypeptide"
MAADGYLPDWLEDTLSEGIRQWWKLKPGPPPPKPAERHKDDSRGLVLPGYKYLGPFNGLDKGEPVNEADAAALEHDKAYDRQLDSGDNPYLKYNHADAEFQERLKEDTSFGGNLGRAVFQAKKRVLEPLGLVEEPVKTAPGKKRPVEHSPVEPDSSSGTGKAGQQPARKRLNFGQTGDADSVPDPQPLGQPPAAPSGLGTNTMAAGSGAPMADNNEGADGVGNSSGNWHCDSTWMGDRVITTSTRTWALPTYNNHLYKQISSQSGASNDNHYFGYSTPWGYFDFNRFHCHFSPRDWQRLINNNWGFRPKRLSFKLFNIQVKEVTQNDGTTTIANNLTSTVQVFTDSEYQLPYVLGSAHQGCLPPFPADVFMVPQYGYLTLNNGSQAVGRSSFYCLEYFPSQMLRTGNNFTFSYTFEDVPFHSSYAHSQSLDRLMNPLIDQYLYYLSKTNAPSGTTTMSRLQFSQAGASDIRDQSRNWLPGPCYRQQRVSKTAADNNNSDYSWTGATKYHLNGRDSLVNPGPAMASHKDDEEKYFPQSGVLIFGKQGSNKTNVDIEKVMITDEEEIRTTNPVATEQYGSVSTNLQSGNTQAATSDVNTQGVLPGMVWQDRDVYLQGPIWAKIPHTDGHFHPSPLMGGFGLKHPPPQILIKNTPVPANPSTTFSAAKFASFITQYSTGQVSVEIEWELQKENSKRWNPEIQYTSNYNKSVNVDFTVDTNGVYSEPRPIGTRYLTRNL

SEQ ID NO: 11295 - protein, 735 aa, Artificial Sequence
  source: /note="Description of Artificial Sequence: Synthetic polypeptide"
MAADGYLPDWLEDTLSEGIRQWWKLKPGPPPPKPAERHKDDSRGLVLPGYKYLGPFNGLDKGEPVNEADAAALEHDKAYDRQLDSGDNPYLKYNHADAEFQERLKEDTSFGGNLGRAVFQAKKRVLEPLGLVEEPVKTAPGKKRPVEHSPVEPDSSSGTGKAGQQPARKRLNFGQTGDADSVPDPQPLGQPPAAPSGLGTNTMATGSGAPMADNNEGADGVGNSSGNWHCDSTWMGDRVITTSTRTWALPTYNNHLYKQISSQSGASNDNHYFGYSTPWGYFDFNRFHCHFSPRDWQRLINNNWGFRPKRLSFKLFNIQVKEVTQNDGTTTIANNLTSTVQVFTDSEYQLPYVLGSAHQGCLPPFPADVFMVPQYGYLTLNNGSQAVGRSSFYCLEYFPSQMLRTGNNFTFSYTFEDVPFHSSYAHSQSLDRLMNPLIDQYLYYLSKTNAPSGTTTMSRLQFSQAGASDIRDQSRNWLPGPCYRQQRVSKTAADNNNSDYSWTGATKYHLNGRDSLVNPGPAMASHKDDEEKYFPQSGVLIFGKQGSNKTNVDIEKVMITDEEEIRTTNPVATEQYGSVSTNLQSDNTQAATSDVNTQGVLPGMVWQDRDVYLQGPIWAKIPHTDGHFHPSPLMGGFGLKHPPPQILIKNTPVPANPSTTFSAAKFASFITQYSTGQVSVEIEWELQKENSKRWNPEIQYTSNYNKSVNVDFTVDTNGVYSEPRPIGTRYLTRNL

SEQ ID NO: 11296 - protein, 735 aa, Artificial Sequence
  source: /note="Description of Artificial Sequence: Synthetic polypeptide"
MAADGYLPDWLEDTLSEGIRQWWKLKPGPPPPKPAERHKDDSRGLVLPGYKYLGPFNGLDKGEPVNEADAAALEHDKAYDRQLDSGDNPYLKYNHADAEFQERLKEDTSFGGNLGRAVFQAKKRVLEPLGLVEEPVKTAPGKKRPVEHSPVEPDSSSGTGKAGQQPARKRLNFGQTGDADSVPDPQPLGQPPAAPSGLGTNTMATGSGAPMADNNEGADGVGNSSGNWHCDSTWMGDRVITTSTRTWALPTYNNHLYKQISSQSGASNDNHYFGYSTPWGYFDFNRFHCHFSPRDWQRLINNNWGFRPKRLSFKLFNIQVKEVTQNDGTTTIANNLTSTVQVFTDSEYQLPYVLGSAHQGCLPPFPADVFMVPQYGYLTLNNGSQAVGRSSFYCLEYFPSQMLRTGNNFTFSYTFEDVPFHSSYAHSQSLDRLMNPLIDQYLYYLSKTNAPSGTTTMSRLQFSQAGASDIRDQSRNWLPGPCYRQQRVSKTAADNNNSDYSWTGATKYHLNGRDSLVNPGPAMASHKDDEEKYFPQSGVLIFGKQGSNKTNVDIEKVMITDEEEIRTTNPVATEQYGSVSTNLQSGNTQAATSDVNTQGVLPGMVWQDRDVYLQGPIWAKIPHTDGHFHPSPLMGGFGLKHPPPQILIKNTPVPANPSTTFSAAKFASFITQYSTGQVSVEIEWELQKENSKRWNPEIQYTSNYNKSVNVDFTVDTNGVYSEPRPIGTRYLTRNL

SEQ ID NO: 11297 - protein, 735 aa, Artificial Sequence
  source: /note="Description of Artificial Sequence: Synthetic polypeptide"
MAADGYLPDWLEDTLSEGIRQWWKLKPGPPPPKPAERHKDDSRGLVLPGYKYLGPFNGLDKGEPVNEADAAALEHDKAYDRQLDSGDNPYLKYNHADAEFQERLKEDTSFGGNLGRAVFQAKKRVLEPLGLVEEPVKTAPGKKRPVEHSPVEPDSSSGTGKAGQQPARKRLNFGQTGDADSVPDPQPLGQPPAAPSGLGTNTMATGSGAPMADNNEGADGVGNSSGNWHCDSTWMGDRVITTSTRTWALPTYNNHLYKQISSQSGASNDNHYFGYSTPWGYFDFNRFHCHFSPRDWQRLINNNWGFRPKRLSFKLFNIQVKEVTQNDGTTTIANNLTSTVQVFTDSEYQLPYVLGSAHQGCLPPFPADVFMVPQYGYLTLNNGSQAVGRSSFYCLEYFPSQMLRTGNNFTFSYTFEDVPFHSSYAHSQSLDRLMNPLIDQYLYYLSKTNAPSGTTTMSRLQFSQAGASDIRDQSRNWLPGPCYRQQRVSKTAADNNNSDYSWTGATKYHLNGRDSLVNPGPAMASHKDDEEKYFPQSGVLIFGKQGSNKTNVDIEKVMITDEEEIRTTNPVATEQYGSVSTNLQSGNTQAATSDVNTQGVLPGMVWQDRDVYLQGPIWAKIPHTDGHFHPSPLMGGFGLKHPPPQILIKNTPVPANPSTTFSAAKFASFITQYSTGQVSVEIEWELQKENSKRWNPEIQYTSNYNKSVNVDFTVDTNGVYSEPRPIDTRYLTRNL

SEQ ID NO: 11298 - protein, 735 aa, Artificial Sequence
  source: /note="Description of Artificial Sequence: Synthetic polypeptide"
MAADGYLPDWLEDTLSEGIRQWWKLKPGPPPPKPAERHKDDSRGLVLPGYKYLGPFNGLDKGEPVNEADAAALEHDKAYDRQLDSGDNPYLKYNHADAEFQERLKEDTSFGGNLGRAVFQAKKRVLEPLGLVEEPVKTAPGKKRPVEHSPVEPDSSSGTGKAGQQPARKRLNFGQTGDTDSVPDPQPLGQPPAAPSGLGTNTMATGSGAPMADNNEGADGVGNSSGNWHCDSTWMGDRVITTSTRTWALPTYNNHLYKQISSQSGASNDNHYFGYSTPWGYFDFNRFHCHFSPRDWQRLINNNWGFRPKRLSFKLFNIQVKEVTQNDGTTTIANNLTSTVQVFTDSEYQLPYVLGSAHQGCLPPFPADVFMVPQYGYLTLNNGSQAVGRSSFYCLEYFPSQMLRTGNNFTFSYTFEDVPFHSSYAHSQSLDRLMNPLIDQYLYYLSKTNAPSGTTTMSRLQFSQAGASDIRDQSRNWLPGPCYRQQRVSKTAADNNNSDYSWTGATKYHLNGRDSLVNPGPAMASHKDDEEKYFPQSGVLIFGKQGSNKTNVDIEKVMITDEEEIRTTNPVATEQYGSVSTNLQSGNTQAATSDVNTQGVLPGMVWQDRDVYLQGPIWAKIPHTDGHFHPSPLMGGFGLKHPPPQILIKNTPVPANPSTTFSAAKFASFITQYSTGQVSVEIEWELQKENSKRWNPEIQYTSNYNKSVNVDFTVDTNGVYSEPRPIGTRYLTRNL

SEQ ID NO: 11299 - protein, 735 aa, Artificial Sequence
  source: /note="Description of Artificial Sequence: Synthetic polypeptide"
MAADGYLPDWLEDTLSEGIRQWWKLKPGPPPPKPAERHKDDSRGLVLPGYKYLGPFNGLDKGEPVNEADAAALEHDKAYDRQLDSGDNPYLKYNHADAEFQERLKEDTSFGGNLGRAVFQAKKRVLEPLGLVEEPVKTTPGKKRPVEHSPVEPDSSSGTGKAGQQPARKRLNFGQTGDADSVPDPQPLGQPPAAPSGLGTNTMATGSGAPMADNNEGADGVGNSSGNWHCDSTWMGDRVITTSTRTWALPTYNNHLYKQISSQSGASNDNHYFGYSTPWGYFDFNRFHCHFSPRDWQRLINNNWGFRPKRLSFKLFNIQVKEVTQNDGTTTIANNLTSTVQVFTDSEYQLPYVLGSAHQGCLPPFPADVFMVPQYGYLTLNNGSQAVGRSSFYCLEYFPSQMLRTGNNFTFSYTFEDVPFHSSYAHSQSLDRLMNPLIDQYLYYLSKTNAPSGTTTMSRLQFSQAGASDIRDQSRNWLPGPCYRQQRVSKTAADNNNSDYSWTGATKYHLNGRDSLVNPGPAMASHKDDEEKYFPQSGVLIFGKQGSNKTNVDIEKVMITDEEEIRTTNPVATEQYGSVSTNLQSGNTQAATSDVNTQGVLPGMVWQDRDVYLQGPIWAKIPHTDGHFHPSPLMGGFGLKHPPPQILIKNTPVPANPSTTFSAAKFASFITQYSTGQVSVEIEWELQKENSKRWNPEIQYTSNYNKSVNVDFTVDTNGVYSEPRPIGTRYLTRNL

SEQ ID NO: 11300 - protein, 735 aa, Artificial Sequence
  source: /note="Description of Artificial Sequence: Synthetic polypeptide"
MAADGYLPDWLEDTLSEGIRQWWKLKPGPPPPKPAERHKDDSRGLVLPGYKYLGPFNGLDKGEPVNEADAAALEHDKAYDRQLDSGDNPYLKYNHADAEFQERLKEDTSFGGNLGRAVFQAKKRVLEPLGLVEEPVKTAPGKKRPVEHSPVEPDSSSGTGKAGQQPARKRLNFGQTGDADSVPDPQPLGQSPAAPSGLGTNTMATGSGAPMADNNEGADGVGNSSGNWHCDSTWMGDRVITTSTRTWALPTYNNHLYKQISSQSGASNDNHYFGYSTPWGYFDFNRFHCHFSPRDWQRLINNNWGFRPKRLSFKLFNIQVKEVTQNDGTTTIANNLTSTVQVFTDSEYQLPYVLGSAHQGCLPPFPADVFMVPQYGYLTLNNGSQAVGRSSFYCLEYFPSQMLRTGNNFTFSYTFEDVPFHSSYAHSQSLDRLMNPLIDQYLYYLSKTNAPSGTTTMSRLQFSQAGASDIRDQSRNWLPGPCYRQQRVSKTAADNNNSDYSWTGATKYHLNGRDSLVNPGPAMASHKDDEEKYFPQSGVLIFGKQGSNKTNVDIEKVMITDEEEIRTTNPVATEQYGSVSTNLQSGNTQAATSDVNTQGVLPGMVWQDRDVYLQGPIWAKIPHTDGHFHPSPLMGGFGLKHPPPQILIKNTPVPANPSTTFSAAKFASFITQYSTGQVSVEIEWELQKENSKRWNPEIQYTSNYNKSVNVDFTVDTNGVYSEPRPIGTRYLTRNL

SEQ ID NO: 11301 - protein, 735 aa, Artificial Sequence
  source: /note="Description of Artificial Sequence: Synthetic polypeptide"
MAADGYLPDWLEDTLSEGIRQWWKLKPGPPPPKPAERHKDDSRGLVLPGYKYLGPFNGLDKGEPVNEADAAALEHDKAYDRQLDSGDNPYLKYNHADAEFQERLKEDTSFGGNLGRAVFQAKKRVLEPLGLVEEPVKTAPGKKRPVEHSPVEPDSSSGTGKAGQQPARKRLNFGQTGDADSVPDPQPLGQPPAAPSGLGTNTMATGSGAPMADNNEGADGVGNSSGNWHCDSTWMGDRVITTSTRTWALPTYNNHLYKQISSQSGASNDNHYFGYSTPWGYFDFNRFHCHFSPRDWQRLINNNWGFRPKRLSFKLFNIQVKEVTQNDGTTTIANNLTSTVQVFTDSEYQLPYVLGSAHQGCLPPFPADVFMVPQYGYLTLNNGSQAVGRSSFYCLEYFPSQMLRTGNNFTFSYTFEDVPFHSSYAHSQSLDRLMNPLIDQYLYYLSKTNAPSGTTTMSRLQFSQAGASDIRDQSRNWLPGPCYRQQRVSKTAADNNNSDYSWTGATKYHLNGRDSLVNPGPAMVSHKDDEEKYFPQSGVLIFGKQGSNKTNVDIEKVMITDEEEIRTTNPVATEQYGSVSTNLQSGNTQAATSDVNTQGVLPGMVWQDRDVYLQGPIWAKIPHTDGHFHPSPLMGGFGLKHPPPQILIKNTPVPANPSTTFSAAKFASFITQYSTGQVSVEIEWELQKENSKRWNPEIQYTSNYNKSVNVDFTVDTNGVYSEPRPIGTRYLTRNL

SEQ ID NO: 11302 - protein, 735 aa, Artificial Sequence
  source: /note="Description of Artificial Sequence: Synthetic polypeptide"
MAADGYLPDWLEDTLSEGIRQWWKLKPGPPPPKPAERHKDDSRGLVLPGYKYLGPFNGLDKGEPVNEADAAALEHDKAYDRQLDSGDNPYLKYNHADAEFQERLKEDTSFGGNLGRAVFQAKKRVLEPLGLVEEPVKTAPGKKRPVEHSPVEPDSSSGTGKAGQQPARKRLNFGQTGDADSVPDPQPLGQPPAAPSGLGTNTMATGSGAPMADNNEGADGVGNSSGNWHCDSTWMGDRVITTSTRTWALPTYNNHLYKQISSQSGASNDNHYFGYSTPWGYFDFNRFHCHFSPRDWQRLINNNWGFRPKRLSFKLFNIQVKEVTQNDGTTTIANNLTSTVQVFTDSEYQLPYVLGSAHQGCLPPFPADVFMVPQYGYLTLNNGSQAVGRSSFYCLEYFPSQMLRTGNNFTFSYTFEDVPFHSSYAHSQSLDRLMNPLIDQYLYYLSKTNAPSGTTTMSRLQFSQAGASDIRDQSRNWLPGPCYRQQRVSKTAADNNNSDYSWTGATKYHLNGRDSLVNPGPAMASHKDDEEKYFPQSGVLIFGKQGSNKTNVDIEKVMITDEEEIRTTNPVATEQYGSVSTNLQSGNTQAATSDVNTQGVLPGMVWQDRDVYLQGPIWAKIPHTDGHFHPSPLMGGFGLKHPPPQILIKNTPVPANPSTTFSAAKFASFITQYSMGQVSVEIEWELQKENSKRWNPEIQYTSNYNKSVNVDFTVDTNGVYSEPRPIGTRYLTRNL

SEQ ID NO: 11303 - protein, 735 aa, Artificial Sequence
  source: /note="Description of Artificial Sequence: Synthetic polypeptide"
MAADGYLPDWLEDTLSEGIRQWWKLKPGPPPPKPAERHKDDSRGLVLPGYKYLGPFNGLDKGEPVNEADAAALEHDKVYDRQLDSGDNPYLKYNHADAEFQERLKEDTSFGGNLGRAVFQAKKRVLEPLGLVEEPVKTAPGKKRPVEHSPVEPDSSSGTGKAGQQPARKRLNFGQTGDADSVPDPQPLGQPPAAPSGLGTNTMATGSGAPMADNNEGADGVGNSSGNWHCDSTWMGDRVITTSTRTWALPTYNNHLYKQISSQSGASNDNHYFGYSTPWGYFDFNRFHCHFSPRDWQRLINNNWGFRPKRLSFKLFNIQVKEVTQNDGTTTIANNLTSTVQVFTDSEYQLPYVLGSAHQGCLPPFPADVFMVPQYGYLTLNNGSQAVGRSSFYCLEYFPSQMLRTGNNFTFSYTFEDVPFHSSYAHSQSLDRLMNPLIDQYLYYLSKTNAPSGTTTMSRLQFSQAGASDIRDQSRNWLPGPCYRQQRVSKTAADNNNSDYSWTGATKYHLNGRDSLVNPGPAMASHKDDEEKYFPQSGVLIFGKQGSNKTNVDIEKVMITDEEEIRTTNPVATEQYGSVSTNLQSGNTQAATSDVNTQGVLPGMVWQDRDVYLQGPIWAKIPHTDGHFHPSPLMGGFGLKHPPPQILIKNTPVPANPSTTFSAAKFASFITQYSTGQVSVEIEWELQKENSKRWNPEIQYTSNYNKSVNVDFTVDTNGVYSEPRPIGTRYLTRNL

SEQ ID NO: 11304 - protein, 735 aa, Artificial Sequence
  source: /note="Description of Artificial Sequence: Synthetic polypeptide"
MAADGYLPDWLEDTLSEGIRQWWKLKPGPPPPKPAERHKDDSRGLVLPGYKYLGPFNGLDKGEPVNEADAAALEHDKAYDRQLDSGDNPYLKYNHADAEFQERLKEDTSFGGNLGRAVFQAKKRVLEPLGLVEEPVKTAPGKKRPVEHSPVEPDSSSGTGKAGQQPARKRLNFGQTGDADSVPDPQPLGQPPAAPSGLGTNTMATGSGAPMADNNEGADGVGNSSGNWHCDSTWMGDRVITTSTRTWALPTYNNHLYKQISSQSGASNDNHYFGYSTPWGYFDFNRFHCHFSPRDWQRLINNNWGFRPKRLSFKLFNIQVKEVTQNDGTTTIANNLTSTVQVFTDSEYQLPYVLGSAHQGCLPPFPADVFMVPQYGYLTLNNGSQAVGRSSFYCLEYFPSQMLRTGNNFTFSYTFEDVPFHSSYAHSQSLDRLMNPLIDQYLYYLSKTNAPSGTTTMSRLQFSQAGASDIRDQSRNWLPGPCYRQQRVSKTAADNNNSDYSWTGATKYHLNGRDSLVNPGPAMASHKDDEEKYFPQSGVLIFGKQGSNKTNVDIEKVMITDEEEIRTTNPVATEQYGSVSTNLQSGNTQAATSDVNTQGVLPGMVWQDRDVYLQGPIWAKIPHTDGHFHPSPLMGGFGLKHPPPQILIKNTPVPANPSTTFSAAKFASFITQYSTGQVSVEIEWELQKENNKRWNPEIQYTSNYNKSVNVDFTVDTNGVYSEPRPIGTRYLTRNL

SEQ ID NO: 11305 - protein, 735 aa, Artificial Sequence
  source: /note="Description of Artificial Sequence: Synthetic polypeptide"
MAADGYLPDWLEDTLSEGIRQWWKLKPGPPPPKPAERHKDDSRGLVLPGYKYLGPFNGLDKGEPVNEADAAALEHDKAYDRQLDSGDNPYLKYNHADAEFQERLKEDTSFGGNLGRAVFQAKKRVLEPLGLVEEPVKTAPGKKRPVEHSPVEPDSSSGTGKAGQQPTRKRLNFGQTGDADSVPDPQPLGQPPAAPSGLGTNTMATGSGAPMADNNEGADGVGNSSGNWHCDSTWMGDRVITTSTRTWALPTYNNHLYKQISSQSGASNDNHYFGYSTPWGYFDFNRFHCHFSPRDWQRLINNNWGFRPKRLSFKLFNIQVKEVTQNDGTTTIANNLTSTVQVFTDSEYQLPYVLGSAHQGCLPPFPADVFMVPQYGYLTLNNGSQAVGRSSFYCLEYFPSQMLRTGNNFTFSYTFEDVPFHSSYAHSQSLDRLMNPLIDQYLYYLSKTNAPSGTTTMSRLQFSQAGASDIRDQSRNWLPGPCYRQQRVSKTAADNNNSDYSWTGATKYHLNGRDSLVNPGPAMASHKDDEEKYFPQSGVLIFGKQGSNKTNVDIEKVMITDEEEIRTTNPVATEQYGSVSTNLQSGNTQAATSDVNTQGVLPGMVWQDRDVYLQGPIWAKIPHTDGHFHPSPLMGGFGLKHPPPQILIKNTPVPANPSTTFSAAKFASFITQYSTGQVSVEIEWELQKENSKRWNPEIQYTSNYNKSVNVDFTVDTNGVYSEPRPIGTRYLTRNL

SEQ ID NO: 11306 - protein, 735 aa, Artificial Sequence
  source: /note="Description of Artificial Sequence: Synthetic polypeptide"
MAADGYLPDWLEDTLSEGIRQWWKLKPGPPPPKPAERHKDDSRGLVLPGYKYLGPFNGLDKGEPVNEADAAALEHDKAYDRQLDSGDNPYLKYNHADAEFQERLKEDTSFGGNLGRAVFQAKKRVLEPLGLVEEPVKTAPGKKRPVEHSPVEPDSSSGTGKAGQQPARKRLNFGQTGDADSVPDPQPLGQPPAAPSGLGTNTMATGSGAPMADNNEGADGVGNSSGNWHCDSTWMGDRVITTSTRTWALPTYNNHLYKQISSQSGASNDNHYFGYSTPWGYFDFNRFHCHFSPRDWQRLINNNWGFRPKRLSFKLFNIQVKEVTQNDGTTTIANNLTSTVQVFTDSEYQLPYVLGSAHQGCLPPFPADVFMVPQYGYLTLNNGSQAVGRSSFYCLEYFPSQMLRTGNNFTFSYTFEDVPFHSSYAHSQSLDRLMNPLIDQYLYYLSKTNAPSGTTTMSRLQFSQAGASDIRDQSRNWLPGPCYRQQRVSKTAADNNNSDYSWTGATKYHLNGRDSLVNPGPAMASHKDDEEKYFPQSGVLIFGKQGSNKTNVDIERVMITDEEEIRTTNPVATEQYGSVSTNLQSGNTQAATSDVNTQGVLPGMVWQDRDVYLQGPIWAKIPHTDGHFHPSPLMGGFGLKHPPPQILIKNTPVPANPSTTFSAAKFASFITQYSTGQVSVEIEWELQKENSKRWNPEIQYTSNYNKSVNVDFTVDTNGVYSEPRPIGTRYLTRNL

SEQ ID NO: 11307 - protein, 735 aa, Artificial Sequence
  source: /note="Description of Artificial Sequence: Synthetic polypeptide"
MAADGYLPDWLEDTLSEGIRQWWKLKPGPPPPKPAERHKDDSRGLVLPGYKYLGPFNGLDKGEPVNEADAAALEHDKAYDRQLDSGDNPYLKYNHADAEFQERLKEDTSFGGNLGRAVFQAKKRVLEPLGLVEEPVKTAPGKKRPVEHSPVEPDSSSGTGKAGQQPVRKRLNFGQTGDADSVPDPQPLGQPPAAPSGLGTNTMATGSGAPMADNNEGADGVGNSSGNWHCDSTWMGDRVITTSTRTWALPTYNNHLYKQISSQSGASNDNHYFGYSTPWGYFDFNRFHCHFSPRDWQRLINNNWGFRPKRLSFKLFNIQVKEVTQNDGTTTIANNLTSTVQVFTDSEYQLPYVLGSAHQGCLPPFPADVFMVPQYGYLTLNNGSQAVGRSSFYCLEYFPSQMLRTGNNFTFSYTFEDVPFHSSYAHSQSLDRLMNPLIDQYLYYLSKTNAPSGTTTMSRLQFSQAGASDIRDQSRNWLPGPCYRQQRVSKTAADNNNSDYSWTGATKYHLNGRDSLVNPGPAMASHKDDEEKYFPQSGVLIFGKQGSNKTNVDIEKVMITDEEEIRTTNPVATEQYGSVSTNLQSGNTQAATSDVNTQGVLPGMVWQDRDVYLQGPIWAKIPHTDGHFHPSPLMGGFGLKHPPPQILIKNTPVPANPSTTFSAAKFASFITQYSTGQVSVEIEWELQKENSKRWNPEIQYTSNYNKSVNVDFTVDTNGVYSEPRPIGTRYLTRNL

SEQ ID NO: 11308 - protein, 735 aa, Artificial Sequence
  source: /note="Description of Artificial Sequence: Synthetic polypeptide"
MAADGYLPDWLEDTLSEGIRQWWKLKPGPPPPKPAERHKDDSRGLVLPGYKYLGPFNGLDKGEPVNEADAAALEHDKAYDRQLDSGDNPYLKYNHADAEFQERLKEDTSFGGNLGRAVFQAKKRVLEPLGLVEEPVKTAPGKKRPVEHSPVEPDSSSGTGKAGQQPARKRLNFGQTGDADSVPDPQPLGQPPAAPSGLGTNTMATGSGAPMADNNEGADGVGNSSGNWHCDSTWMGDRVITTSTRTWALPTYNNHLYKQISSQSGASNDNHYFGYSTPWGYFDFNRFHCHFSPRDWQRLINNNWGFRPKRLSFKLFNIQVKEVTQNDGTTTIANNLTSTVQVFTDSEYQLPYVLGSAHQGCLPPFPADVFMVPQYGYPTLNNGSQAVGRSSFYCLEYFPSQMLRTGNNFTFSYTFEDVPFHSSYAHSQSLDRLMNPLIDQYLYYLSKTNAPSGTTTMSRLQFSQAGASDIRDQSRNWLPGPCYRQQRVSKTAADNNNSDYSWTGATKYHLNGRDSLVNPGPAMASHKDDEEKYFPQSGVLIFGKQGSNKTNVDIEKVMITDEEEIRTTNPVATEQYGSVSTNLQSGNTQAATSDVNTQGVLPGMVWQDRDVYLQGPIWAKIPHTDGHFHPSPLMGGFGLKHPPPQILIKNTPVPANPSTTFSAAKFASFITQYSTGQVSVEIEWELQKENSKRWNPEIQYTSNYNKSVNVDFTVDTNGVYSEPRPIGTRYLTRNL

SEQ ID NO: 11309 - protein, 735 aa, Artificial Sequence
  source: /note="Description of Artificial Sequence: Synthetic polypeptide"
MAADGYLPDWLEDTLSEGIRQWWKLKPGPPPPKPAERHKDDSRGLVLPGYKYLGPFNGLDKGEPVNEADAAALEHDKAYDRQLDSGDNPYLKYNHADAEFQERLKEDTSFGGNLGRAVFQAKKRVLEPLGLVEEPVKTAPGKKRPVEHSPVEPDSSSGTGKAGQQPARKRLNFGQTGDADSVPDPQSLGQPPAAPSGLGTNTMATGSGAPMADNNEGADGVGNSSGNWHCDSTWMGDRVITTSTRTWALPTYNNHLYKQISSQSGASNDNHYFGYSTPWGYFDFNRFHCHFSPRDWQRLINNNWGFRPKRLSFKLFNIQVKEVTQNDGTTTIANNLTSTVQVFTDSEYQLPYVLGSAHQGCLPPFPADVFMVPQYGYLTLNNGSQAVGRSSFYCLEYFPSQMLRTGNNFTFSYTFEDVPFHSSYAHSQSLDRLMNPLIDQYLYYLSKTNAPSGTTTMSRLQFSQAGASDIRDQSRNWLPGPCYRQQRVSKTAADNNNSDYSWTGATKYHLNGRDSLVNPGPAMASHKDDEEKYFPQSGVLIFGKQGSNKTNVDIEKVMITDEEEIRTTNPVATEQYGSVSTNLQSGNTQAATSDVNTQGVLPGMVWQDRDVYLQGPIWAKIPHTDGHFHPSPLMGGFGLKHPPPQILIKNTPVPANPSTTFSAAKFASFITQYSTGQVSVEIEWELQKENSKRWNPEIQYTSNYNKSVNVDFTVDTNGVYSEPRPIGTRYLTRNL

SEQ ID NO: 11310 - protein, 735 aa, Artificial Sequence
  source: /note="Description of Artificial Sequence: Synthetic polypeptide"
MAADGYLPDWLEDTLSEGIRQWWKLKPGPPPPKPAERHKDDSRGLVLPGYKYLGPFNGLDKGEPVNEADAAALEHDKAYDRQLDSGDNPYLKYNHADAEFQERLKEDTSFGGNLGRAVFQAKKRVLEPLGLVEEPVKTAPGKKRPVEHSPVEPDSSSGTGKAGQQPARKRLNFGQTGDADSVPDPQPLGQPPAAPSGLGTNTMATGSGAPMADNNEGADGVGNSSGNWHCDSTWMGDRVITTSTRTWALPTYNNHLYKQISSQSGASNDNHYFGYSTPWGYFDFNRFHCHFSPRDWQRLINNNWGFRPKRLSFKLFNIQVKEVTQNGGTTTIANNLTSTVQVFTDSEYQLPYVLGSAHQGCLPPFPADVFMVPQYGYLTLNNGSQAVGRSSFYCLEYFPSQMLRTGNNFTFSYTFEDVPFHSSYAHSQSLDRLMNPLIDQYLYYLSKTNAPSGTTTMSRLQFSQAGASDIRDQSRNWLPGPCYRQQRVSKTAADNNNSDYSWTGATKYHLNGRDSLVNPGPAMASHKDDEEKYFPQSGVLIFGKQGSNKTNVDIEKVMITDEEEIRTTNPVATEQYGSVSTNLQSGNTQAATSDVNTQGVLPGMVWQDRDVYLQGPIWAKIPHTDGHFHPSPLMGGFGLKHPPPQILIKNTPVPANPSTTFSAAKFASFITQYSTGQVSVEIEWELQKENSKRWNPEIQYTSNYNKSVNVDFTVDTNGVYSEPRPIGTRYLTRNL

SEQ ID NO: 11311 - protein, 735 aa, Artificial Sequence
  source: /note="Description of Artificial Sequence: Synthetic polypeptide"
MAADGYLPDWLEDTLSEGIRQWWKLKPGPPPPKPAERHKDDSRGLVLPGYKYLGPFNGLDKGEPVNEADAAALEHDKAYDRQLDSGDNPYLKYNHADAEFQERLKEDTSFGGNLGRAVFQAKKRVLEPLGLVEEPVKTAPGKKRPVEHSPVEPDSSSGTGKAGQQPARKRLNFGQTGDADSVPDPQPLGQPPAAPSGLGTNTMATGSGAPMADNNEGADGVGNSSGNWHCDSTWMGDRVITTSTRTWALPTYNNHLYKQISSQSGASNDNHYFGYSTPWGYFDFNRFHCHFSPRDWQRLINNNWGFRPKRLSFKLFNIQVKEVTQNDGTTTIANNLTSTVQVFTDSEYQLPYVLGSAHQGCLPPFPADVFMVPQYGYLTLNNGSQAVGRSSFYCLEYFPSQMLRTGNNFTFSYTFEDVPFHSSYAHSQSLDRLMNPLIDQYLYYLSKTNAPSGTTTMSGLQFSQAGASDIRDQSRNWLPGPCYRQQRVSKTAADNNNSDYSWTGATKYHLNGRDSLVNPGPAMASHKDDEEKYFPQSGVLIFGKQGSNKTNVDIEKVMITDEEEIRTTNPVATEQYGSVSTNLQSGNTQAATSDVNTQGVLPGMVWQDRDVYLQGPIWAKIPHTDGHFHPSPLMGGFGLKHPPPQILIKNTPVPVNPSTTFSAAKFASFITQYSTGQVSVEIEWELQKENSKRWNPEIQYTSNYNKSVNVDFTVDTNGVYSEPRPIGTRYLTRNL

SEQ ID NO: 11312 - protein, 735 aa, Artificial Sequence
  source: /note="Description of Artificial Sequence: Synthetic polypeptide"
MAADGYLPDWLEDTLSEGIRQWWKLKPGPPPPKPAERHKDDSRGLVLPGYKYLGPFNGLDKGEPVNEADAAALEHDKAYDRQLDSGDNPYLKYNHADAEFQERLKEDTSFGGNLGRAVFQAKKRVLEPLGLVEEPVKTAPGKKRPVEHSPVEPDSSSGTGKAGQQPARKRLNFGQTGDADSVPDPQPLGQPPAAPSGLGTNTMATGSGAPMADNNEGADGVGNSSGNWHCDSTWMGDRVITTSTRTWALPTYNNHLYKQISSQSGASNDNHYFGYSTPWGYFDFNRFHCHFSPRDWQRLINNNWGFRPKRLSFKLFNIQVKEVTQNDGTTTIANNLTSTVQVFTDSEYQLPYVLGSAHQGCLPPFPADVFMVPQYGYLTLNNGSQAVGRSSFYCLEYFPSQMLRTGNNFTFSYTFEDVPFHSSYAHSQSLDRLMNPLIDQYLYYLSKTNAPSGTTTMSRLQFSQAGASDIRDQSRNWLPGPCYRQQRVSKTAADNNNSDYSWTGATKYHLNGRDSLVNPGPTMASHKDDEEKYFPQSGVLIFGKQGSNKTNVDIEKVMITDEEEIRTTNPVATEQYGSVSTNLQSGNTQAATSDVNTQGVLPGMVWQDRDVYLQGPIWAKIPHTDGHFHPSPLMGGFGLKHPPPQILIKNTPVPANPSTTFSAAKFASFITQYSTGQVSVEIEWELQKENSKRWNPEIQYTSNYNKSVNVDFTVDTNGVYSEPRPIGTRYLTRNL

SEQ ID NO: 11313 - protein, 735 aa, Artificial Sequence
  source: /note="Description of Artificial Sequence: Synthetic polypeptide"
MAADGYLPDWLEDTLSEGIRQWWKLKPGPPPPKPAERHKDDSRGLVLPGYKYLGPLNGLDKGEPVNEADAAALEHDKAYDRQLDSGDNPYLKYNHADAEFQERLKEDTSFGGNLGRAVFQAKKRVLEPLGLVEEPVKTAPGKKRPVEHSPVEPDSSSGTGKAGQQPARKRLNFGQTGDADSVPDPQPLGQPPAAPSGLGTNTMATGSGAPMADNNEGADGVGNSSGNWHCDSTWMGDRVITTSTRTWALPTYNNHLYKQISSQSGASNDNHYFGYSTPWGYFDFNRFHCHFSPRDWQRLINNNWGFRPKRLSFKLFNIQVKEVTQNDGTTTIANNLTSTVQVFTDSEYQLPYVLGSAHQGCLPPFPADVFMVPQYGYLTLNNGSQAVGRSSFYCLEYFPSQMLRTGNNFTFSYTFEDVPFHSSYAHSQSLDRLMNPLIDQYLYYLSKTNAPSGTTTMSRLQFSQAGASDIRDQSRNWLPGPCYRQQRVSKTAADNNNSDYSWTGATKYHLNGRDSLVNPGPAMASHKDDEEKYFPQSGVLIFGKQGSNKTNVDIEKVMITDEEEIRTTNPVATEQYGSVSTNLQSGNTQAATSDVNTQGVLPGMVWQDRDVYLQGPIWAKIPHTDGHFHPSPLMGGFGLKHPPPQILIKNTPVPANPSTTFSAAKFASFITQYSTGQVSVEIEWELQKENSKRWNPEIQYTSNYNKSVNVDFTVDTNGVYSEPRPIGTRYLTRNL

SEQ ID NO: 11314 - protein, 735 aa, Artificial Sequence
  source: /note="Description of Artificial Sequence: Synthetic polypeptide"
MAADGYLPDWLEDTLSEGIRQWWKLKPGPPPPKPAERHKDDSRGLVLPGYKYLGPFNGLDKGEPVNEADAAALEHDKAYDRQLDSGDNPYLKYNHADAEFQERLKEDTSFGGNLGRAVFQAKKRVLEPLGLVEEPVKTAPGKKRPVEHSPVEPDSSSGTGKAGQQPARKRLNFGQTGDADSVPDPQPLGQPPAAPSGLGTNTMATGSGAPMADNNEGADGVGNSSGNWHCDSTWMGDRVITTSTRTWALPTYNNHLYKQISSQSGASNDNHYFGYSTPWGYFDFNRFHCHFSPRDWQRLINNNWGFRPKRLSFKLFNIQVKEVTQNDGTTTIANNLTSTVQVFTDSEYQLPYVLGSAHQGCLPPFPADVFMVPQYGYLTLNNGSQAVGRSSFYCLEYFPSQMLRTGNNFTFSYTFEDVPFHSSYAHSQSLDRLMNPLIDQYLYYLSKTNAPSGTTTMSRLQFSQAGASDIRDQSRNWLPGPCYRQQRVSKTAADNNNSDYSWTGATKYHLNGRDSLVNPGPAMTSHKDDEEKYFPQSGVLIFGKQGSNKTNVDIEKVMITDEEEIRTTNPVATEQYGSVSTNLQSGNTQAATSDVNTQGVLPGMVWQDRDVYLQGPIWAKIPHTDGHFHPSPLMGGFGLKHPPPQILIKNTPVPANPSTTFSAAKFASFITQYSTGQVSVEIEWELQKENSKRWNPEIQYTSNYNKSVNVDFTVDTNGVYSEPRPIGTRYLTRNL

SEQ ID NO: 11315 - protein, 735 aa, Artificial Sequence
  source: /note="Description of Artificial Sequence: Synthetic polypeptide"
MAADGYLPDWLEDTLSEGIRQWWKLKPGPPPPKPAERHKDDSRGLVLPGYKYLGPFNGLDKGEPVNEADAAALEHDKAYDRQLDSGDNPYLKYNHADAEFQERLKEDTSFGGNLGRAVFQAKKRVLEPLGLVEEPVKTAPGKKRPVEHSPVEPDSSSGTGKAGQQPARKRLNFGQTGDADSVPDPQPLGQPPAAPSGLGTNTMATGSGAPMADNNEGADGVGNSSGNWHCDSTWMGDRVITTSTRTWALPTYNNHLYKQISSQSGASNDNHYFGYSTPWGYFDFNRFHCHFSPRDWQRLINNNWGFRPKRLSFKLFNIQVKEVTQNDGTTTIANNLTSTVQVFTDSEYQLPYVLGSAHQGCLPPFPADVFMVPQYGYLTLNNGSQAVGRSSFYCLEYFPSQMLRTGNNFTFSYTFEDVPFHSSYAHSQSLDRLMNPLIDQYLYYLSKTNAPSGTTTMSRLQFSQAGASDIRDQSRNWLPGPCYRQQRVSKTAADNNNSDYSWTGATKYHLNGRDSLVNPGPAMASHKDDEEKYFPQSGVLIFGKQGSNKTNVDIEKVMITDEEEIRTTNPVATEQYGSVSTNLQSGNTQAATSDVNTQGVLPGMVWQDRDVYLQGPIWTKIPHTDGHFHPSPLMGGFGLKHPPPQILIKNTPVPANPSTTFSAAKFASFITQYSTGQVSVEIEWELQKENSKRWNPEIQYTSNYNKSVNVDFTVDTNGVYSEPRPIGTRYLTRNL

SEQ ID NO: 11316 - protein, 735 aa, Artificial Sequence
  source: /note="Description of Artificial Sequence: Synthetic polypeptide"
MAADGYLPDWLEDTLSEGIRQWWKLKPGPPPPKPAERHKDDSRGLVLPGYKYLGPFNGLDKGEPVNEADAAALEHDKAYDRQLDSGDNPYLKYNHADAEFQERLKEDTSFGGNLGRAVFQAKKRVLEPLGLVEEPVKTAPGKKRPVEHSPVEPDSSSGTGKAGQQPARKRLNFGQTGDADSVPDPQPLGQPPVAPSGLGTNTMATGSGAPMADNNEGADGVGNSSGNWHCDSTWMGDRVITTSTRTWALPTYNNHLYKQISSQSGASNDNHYFGYSTPWGYFDFNRFHCHFSPRDWQRLINNNWGFRPKRLSFKLFNIQVKEVTQNDGTTTIANNLTSTVQVFTDSEYQLPYVLGSAHQGCLPPFPADVFMVPQYGYLTLNNGSQAVGRSSFYCLEYFPSQMLRTGNNFTFSYTFEDVPFHSSYAHSQSLDRLMNPLIDQYLYYLSKTNAPSGTTTMSRLQFSQAGASDIRDQSRNWLPGPCYRQQRVSKTAADNNNSDYSWTGATKYHLNGRDSLVNPGPAMASHKDDEEKYFPQSGVLIFGKQGSNKTNVDIEKVMITDEEEIRTTNPVATEQYGSVSTNLQSGNTQAATSDVNTQGVLPGMVWQDRDVYLQGPIWAKIPHTDGHFHPSPLMGGFGLKHPPPQILIKNTPVPANPSTTFSAAKFASFITQYSTGQVSVEIEWELQKENSKRWNPEIQYTSNYNKSVNVDFTVDTNGVYSEPRPIGTRYLTRNL

SEQ ID NO: 11317 - protein, 735 aa, Artificial Sequence
  source: /note="Description of Artificial Sequence: Synthetic polypeptide"
MAADGYLPDWLEDTLSEGIRQWWKLKPGPPPPKPAERHKDDSRGLVLPGYKYLGPFNGLDKGEPVNEADAAALEHDKAYDRQLDSGDNPYLKYNHADAEFQERLKEDTSFGGNLGRAVFQAKKRVLEPLGLVEEPVKTAPGKKRPVEHSPVEPDSSSGTGKAGQQPARKRLNFGQTGDADSVPDPQPLGQPPAAPSGLGTNTMATGSGAPMADNNEGADGVGNSSGNWHCDSTWMGDRVITTSTRTWALPTYNNHLYKQISSQSGASNDNHYFGYSTPWGYFDFNRFHCHFSPRDWQRLINNNWGFRPKRLSFKLFNIQVKEVTQNDGTTTIANNLTSTVQVFTDSEYQLPYVLGSAHQGCLPPFPADVFMVPQYGYLTLNNGSQAVGRSSFYCLEYFPSQMLRTGNNFTFSYTFEDVPFHSSYAHSQSLDRLMNPLIDQYLYYLSKTNAPSGTTTMSRLQFSQAGASDIRDQSRNWLPGPCYRQQRVSKTAADNNNSDYSWTGATKYHLNGRDSLVNPGPAMASHKDDEEKYFPQSGVLIFGKQGSNKTNVDIEKVMITDEEEIRTTNPVATEQYGSVSTNLQSGNTQAATSDVNTQGVLPGMVWQDRDVYLQGPIWAKIPHTDGHFHPSPLMGGFGLKHPPPQILIKNTPVPANPSTTFSAAKFASFITQYSTGQVSVEIEWEPQKENSKRWNPEIQYTSNYNKSVNVDFTVDTNGVYSEPRPIGTRYLTRNL

SEQ ID NO: 11318 - protein, 735 aa, Artificial Sequence
  source: /note="Description of Artificial Sequence: Synthetic polypeptide"
MAADGYLPDWLEDTLSEGIRQWWKLKPGPPPPKPAERHKDDSRGLVLPGYKYLGPFNGLDKGEPVNEADAAALEHDKAYDRQLDSGDNPYLKYNHADAEFQERLKEDTSFGGNLGRAVFQAKKRVLEPLGLVEEPVKTAPGKKRPVEHSPVEPDSSSGTGKAGQQPARKRLNFGQTGDADSVPDPQPLGQPPAAPSGLGTNTMATGSGAPMADNNEGADGVGNSSGNWHCDSTWMGDRVITTSTRTWALPTYNNHLYKQISSQSGASNDNHYFGYSTPWGYFDFNRFHCHFSPRDWQRLINNNWGFRPKRLSFKLFNIQVKEVTQNDGTTTIANNLTSTVQVFTDSEYQLPYVLGSAHQGCLPPFPADVFMVPQYGYLTLNNGSQAVGRSSFYCLEYFPSQMLRTGNNFTFSYTFEDVPFHSSYAHSQSLDRLMNPLIDQYLYYLSKTNAPSGTTTMSRLQFSQAGASDIRDQSRNWLPGPCYRQQRVSKTVADNNNSDYSWTGATKYHLNGRDSLVNPGPAMASHKDDEEKYFPQSGVLIFGKQGSNKTNVDIEKVMITDEEEIRTTNPVATEQYGSVSTNLQSGNTQAATSDVNTQGVLPGMVWQDRDVYLQGPIWAKIPHTDGHFHPSPLMGGFGLKHPPPQILIKNTPVPANPSTTFSAAKFASFITQYSTGQVSVEIEWELQKENSKRWNPEIQYTSNYNKSVNVDFTVDTNGVYSEPRPIGTRYLTRNL

SEQ ID NO: 11319 - protein, 735 aa, Artificial Sequence
  source: /note="Description of Artificial Sequence: Synthetic polypeptide"
MAADGYLPDWLEDTLSEGIRQWWKLKPGPPPPKPAERHKDDSRGLVLPGYKYLGPFNGLDKGEPVNEADAAALEHDKAYDRQLDSGDNPYLKYNHADAEFQERLKEDTSFGGNLGRAVFQAKKRVLEPLGLVEEPVKTAPGKKRPVEHSPVEPDSSSGTGKAGQQPARKRLNFGQTGDADSVPDPQPLGQPPAAPSGLGTNTMATGSGAPMADNNEGADGVGNSSGNWHCDSTWMGDRVITTSTRTWALPTYNNHLYKQISSQSGASNDNHYFGYSTPWGYFDFNRFHCHFSPRDWQRLINNNWGFRPKRLSFKLFNIQVKEVTQNDGTTTIANNLTSTVQVFTDSEYQLPYVLGSAHQGCLPPFPADVFMVPQYGYLTLNNGSQAVGRSSFYCLEYFPSQMLRTGNNFTFSYTFEDVPFHSSYAHSQSLDRLMNPLIDQYPYYLSKTNAPSGTTTMSRLQFSQAGASDIRDQSRNWLPGPCYRQQRVSKTAADNNNSDYSWTGATKYHLNGRDSLVNPGPAMASHKDDEEKYFPQSGVLIFGKQGSNKTNVDIEKVMITDEEEIRTTNPVATEQYGSVSTNLQSGNTQAATSDVNTQGVLPGMVWQDRDVYLQGPIWAKIPHTDGHFHPSPLMGGFGLKHPPPQILIKNTPVPANPSTTFSAAKFASFITQYSTGQVSVEIEWELQKENSKRWNPEIQYTSNYNKSVNVDFTVDTNGVYSEPRPIGTRYLTRNL

SEQ ID NO: 11320 - protein, 735 aa, Artificial Sequence
  source: /note="Description of Artificial Sequence: Synthetic polypeptide"
MAADGYLPDWLEDTLSEGIRQWWKLKPGPPPPKPAERHKDDSRGLVLPGYKYLGPFNGLDKGEPVNEADAAALEHDKAYDRQLDSGDNPYLKYNHTDAEFQERLKEDTSFGGNLGRAVFQAKKRVLEPLGLVEEPVKTAPGKKRPVEHSPVEPDSSSGTGKAGQQPARKRLNFGQTGDADSVPDPQPLGQPPAAPSGLGTNTMATGSGAPMADNNEGADGVGNSSGNWHCDSTWMGDRVITTSTRTWALPTYNNHLYKQISSQSGASNDNHYFGYSTPWGYFDFNRFHCHFSPRDWQRLINNNWGFRPKRLSFKLFNIQVKEVTQNDGTTTIANNLTSTVQVFTDSEYQLPYVLGSAHQGCLPPFPADVFMVPQYGYLTLNNGSQAVGRSSFYCLEYFPSQMLRTGNNFTFSYTFEDVPFHSSYAHSQSLDRLMNPLIDQYLYYLSKTNAPSGTTTMSRLQFSQAGASDIRDQSRNWLPGPCYRQQRVSKTAADNNNSDYSWTGATKYHLNGRDSLVNPGPAMASHKDDEEKYFPQSGVLIFGKQGSNKTNVDIEKVMITDEEEIRTTNPVATEQYGSVSTNLQSGNTQAATSDVNTQGVLPGMVWQDRDVYLQGPIWAKIPHTDGHFHPSPLMGGFGLKHPPPQILIKNTPVPANPSTTFSAAKFASFITQYSTGQVSVEIEWELQKENSKRWNPEIQYTSNYNKSVNVDFTVDTNGVYSEPRPIGTRYLTRNL

SEQ ID NO: 11321 - protein, 735 aa, Artificial Sequence
  source: /note="Description of Artificial Sequence: Synthetic polypeptide"
MAADGYLPDWLEDTLSEGIRQWWKLKPGPPPPKPAERHKDDSRGLVLPGYKYLGPFNGLDKGGPVNEADAAALEHDKAYDRQLDSGDNPYLKYNHADAEFQERLKEDTSFGGNLGRAVFQAKKRVLEPLGLVEEPVKTAPGKKRPVEHSPVEPDSSSGTGKAGQQPARKRLNFGQTGDADSVPDPQPLGQPPAAPSGLGTNTMATGSGAPMADNNEGADGVGNSSGNWHCDSTWMGDRVITTSTRTWALPTYNNHLYKQISSQSGASNDNHYFGYSTPWGYFDFNRFHCHFSPRDWQRLINNNWGFRPKRLSFKLFNIQVKEVTQNDGTTTIANNLTSTVQVFTDSEYQLPYVLGSAHQGCLPPFPADVFMVPQYGYLTLNNGSQAVGRSSFYCLEYFPSQMLRTGNNFTFSYTFEDVPFHSSYAHSQSLDRLMNPLIDQYLYYLSKTNAPSGTTTMSRLQFSQAGASDIRDQSRNWLPGPCYRQQRVSKTAADNNNSDYSWTGATKYHLNGRDSLVNPGPAMASHKDDEEKYFPQSGVLIFGKQGSNKTNVDIEKVMITDEEEIRTTNPVATEQYGSVSTNLQSGNTQAATSDVNTQGVLPGMVWQDRDVYLQGPIWAKIPHTDGHFHPSPLMGGFGLKHPPPQILIKNTPVPANPSTTFSAAKFASFITQYSTGQVSVEIEWELQKENSKRWNPEIQYTSNYNKSVNVDFTVDTNGVYSEPRPIGTRYLTRNL

SEQ ID NO: 11322 - protein, 735 aa, Artificial Sequence
  source: /note="Description of Artificial Sequence: Synthetic polypeptide"
MAADGYLPDWLEDTLSEGIRQWWKLKPGPPPPKPAERHKDDSRGLVLPGYKYLGPFNGLDKGEPVNEADAAALEHDKAYDRQLDSGDNPYLKYNHADAEFQERLKEDTSFGGNLGRAVFQAKKRVLEPLGLVEEPVKTAPGKKRPVEHSPVEPDSSSGTGKAGQQPARKRLNFGQTGDADSVPDPQPLGQPPAAPSGLGTNTMATGSGAPMADNNEGADGVGNSSGNWHCDSTWMGDRVITTSTRTWTLPTYNNHLYKQISSQSGASNDNHYFGYSTPWGYFDFNRFHCHFSPRDWQRLINNNWGFRPKRLSFKLFNIQVKEVTQNDGTTTIANNLTSTVQVFTDSEYQLPYVLGSAHQGCLPPFPADVFMVPQYGYLTLNNGSQAVGRSSFYCLEYFPSQMLRTGNNFTFSYTFEDVPFHSSYAHSQSLDRLMNPLIDQYLYYLSKTNAPSGTTTMSRLQFSQAGASDIRDQSRNWLPGPCYRQQRVSKTAADNNNSDYSWTGATKYHLNGRDSLVNPGPAMASHKDDEEKYFPQSGVLIFGKQGSNKTNVDIEKVMITDEEEIRTTNPVATEQYGSVSTNLQSGNTQAATSDVNTQGVLPGMVWQDRDVYLQGPIWAKIPHTDGHFHPSPLMGGFGLKHPPPQILIKNTPVPANPSTTFSAAKFASFITQYSTGQVSVEIEWELQKENSKRWNPEIQYTSNYNKSVNVDFTVDTNGVYSEPRPIGTRYLTRNL

SEQ ID NO: 11323 - protein, 735 aa, Artificial Sequence
  source: /note="Description of Artificial Sequence: Synthetic polypeptide"
MAADGYLPDWLEDTLSEGIRQWWKLKPGPPPPKPAERHKDDSRGLVLPGYKYLGPFNGLDKGEPVNEADAAVLEHDKAYDRQLDSGDNPYLKYNHADAEFQERLKEDTSFGGNLGRAVFQAKKRVLEPLGLVEEPVKTAPGKKRPVEHSPVEPDSSSGTGKAGQQPARKRLNFGQTGDADSVPDPQPLGQPPAAPSGLGTNTMATGSGAPMADNNEGADGVGNSSGNWHCDSTWMGDRVITTSTRTWALPTYNNHLYKQISSQSGASNDNHYFGYSTPWGYFDFNRFHCHFSPRDWQRLINNNWGFRPKRLSFKLFNIQVKEVTQNDGTTTIANNLTSTVQVFTDSEYQLPYVLGSAHQGCLPPFPADVFMVPQYGYLTLNNGSQAVGRSSFYCLEYFPSQMLRTGNNFTFSYTFEDVPFHSSYAHSQSLDRLMNPLIDQYLYYLSKTNAPSGTTTMSRLQFSQAGASDIRDQSRNWLPGPCYRQQRVSKTAADNNNSDYSWTGATKYHLNGRDSLVNPGPAMASHKDDEEKYFPQSGVLIFGKQGSNKTNVDIEKVMITDEEEIRTTNPVATEQYGSVSTNLQSGNTQAATSDVNTQGVLPGMVWQDRDVYLQGPIWAKIPHTDGHFHPSPLMGGFGLKHPPPQILIKNTPVPANPSTTFSAAKFASFITQYSTGQVSVEIEWELQKENSKRWNPEIQYTSNYNKSVNVDFTVDTNGVYSEPRPIGTRYLTRNL

SEQ ID NO: 11324 - protein, 735 aa, Artificial Sequence
  source: /note="Description of Artificial Sequence: Synthetic polypeptide"
MAADGYLPDWLEDTLSEGIRQWWKLKPGPPPPKPAERHKDDSRGLVLPGYKYLGPFNGLDKGEPVNEADAAALEHDKAYDRQLDSGDNPYLKYNHADAEFQERLKEDTSFGGNLGRAVFQAKKRVLEPLGLVEEPVKTAPGKKRPVEHSPVEPDSSSGTGKAGQQPARKRLNFGQTGDADSVPDPQPLGQPPAAPSGLGTNTMATGSGAPMADNNEGADGVGNSSGNWHCDSTWMGDRVITTSTHTWALPTYNNHLYKQISSQSGASNDNHYFGYSTPWGYFDFNRFHCHFSPRDWQRLINNNWGFRPKRLSFKLFNIQVKEVTQNDGTTTIANNLTSTVQVFTDSEYQLPYVLGSAHQGCLPPFPADVFMVPQYGYLTLNNGSQAVGRSSFYCLEYFPSQMLRTGNNFTFSYTFEDVPFHSSYAHSQSLDRLMNPLIDQYLYYLSKTNAPSGTTTMSRLQFSQAGASDIRDQSRNWLPGPCYRQQRVSKTAADNNNSDYSWTGATKYHLNGRDSLVNPGPAMASHKDDEEKYFPQSGVLIFGKQGSNKTNVDIEKVMITDEEEIRTTNPVATEQYGSVSTNLQSGNTQAATSDVNTQGVLPGMVWQDRDVYLQGPIWAKIPHTDGHFHPSPLMGGFGLKHPPPQILIKNTPVPANPSTTFSAAKFASFITQYSTGQVSVEIEWELQKENSKRWNPEIQYTSNYNKSVNVDFTVDTNGVYSEPRPIGTRYLTRNL

SEQ ID NO: 11325 - protein, 735 aa, Artificial Sequence
  source: /note="Description of Artificial Sequence: Synthetic polypeptide"
MAADGYLPDWLEDTLSEGIRQWWKLKPGPPPPKPAERHKDDSRGLVLPGYKYLGPFNGLDKGEPVNEADAAALEHDKAYDRQLDSGDNPYLKYNHADAEFQERLKEDTSFGGNLGRAVFQAKKRVLEPLGLVEEPVKTAPGKKRPVEHSPVEPDSSSGTGKAGQQPARKRLNFGQTGDADSVPDPQPLGQPPAAPSGLGTNTMATGSGAPMADNNEGADGVGNSSGNWHCDSTWMGDRVITTSTRTWALPTYNNHLYKQISSQSGASNDNHYFGYSTPWGYFDFNRFHCHFSPRDWQRLINNNWGFRPKRLSFKLFNIQVKEVTQNDGTTTIANNLTSTVQVFTDSEYQLPYVLGSAHQGCLPPFPADVFMVPQYGYLTLNNGSQAVGRSSFYCLEYFPSQMLRTGNNFTFSYTFEDVPFHSSYAHSQSLDRLMNPLIDQYLYYLSKTNAPSGTTTMSRLQFSQAGASGIRDQSRNWLPGPCYRQQRVSKTAADNNNSDYSWTGATKYHLNGRDSLVNPGPAMASHKDDEEKYFPQSGVLIFGKQGSNKTNVDIEKVMITDEEEIRTTNPVATEQYGSVSTNLQSGNTQAATSDVNTQGVLPGMVWQDRDVYLQGPIWAKIPHTDGHFHPSPLMGGFGLKHPPPQILIKNTPVPANPSTTFSAAKFASFITQYSTGQVSVEIEWELQKENSKRWNPEIQYTSNYNKSVNVDFTVDTNGVYSEPRPIGTRYLTRNL

SEQ ID NO: 11326 - protein, 735 aa, Artificial Sequence
  source: /note="Description of Artificial Sequence: Synthetic polypeptide"
MAADGYLPDWLEDTLSEGIRQWWKLKPGPPPPKPAERHKDDSRGLVLPGYKYLGPFNGLDKGEPVNEADAAALEHDKAYDRQLDSGDNPYLKYNHADAEFQERLKEDTSFGGNLGRVVFQAKKRVLEPLGLVEEPVKTAPGKKRPVEHSPVEPDSSSGTGKAGQQPARKRLNFGQTGDADSVPDPQPLGQPPAAPSGLGTNTMATGSGAPMADNNEGADGVGNSSGNWHCDSTWMGDRVITTSTRTWALPTYNNHLYKQISSQSGASNDNHYFGYSTPWGYFDFNRFHCHFSPRDWQRLINNNWGFRPKRLSFKLFNIQVKEVTQNDGTTTIANNLTSTVQVFTDSEYQLPYVLGSAHQGCLPPFPADVFMVPQYGYLTLNNGSQAVGRSSFYCLEYFPSQMLRTGNNFTFSYTFEDVPFHSSYAHSQSLDRLMNPLIDQYLYYLSKTNAPSGTTTMSRLQFSQAGASDIRDQSRNWLPGPCYRQQRVSKTAADNNNSDYSWTGATKYHLNGRDSLVNPGPAMASHKDDEEKYFPQSGVLIFGKQGSNKTNVDIEKVMITDEEEIRTTNPVATEQYGSVSTNLQSGNTQAATSDVNTQGVLPGMVWQDRDVYLQGPIWAKIPHTDGHFHPSPLMGGFGLKHPPPQILIKNTPVPANPSTTFSAAKFASFITQYSTGQVSVEIEWELQKENSKRWNPEIQYTSNYNKSVNVDFTVDTNGVYSEPRPIGTRYLTRNL

SEQ ID NO: 11327 - protein, 735 aa, Artificial Sequence
  source: /note="Description of Artificial Sequence: Synthetic polypeptide"
MAADGYLPDWLEDTLSEGIRQWWKLKPGPPPPKPAERHKDDSRGLVLPGYKYLGPFNGLDKGEPVNEADAAALEHDKAYDRQLDSGDNPYLKYNHADAEFQERLKEDTSFGGNLGRAVFQAKKRVLEPLGLVEEPVKTAPGKKRPVEHSPVEPDSSSGTGKAGQQPARKRLNFGQTGDADSVPDPQPLGQPPAAPSGLGTNTMATGSGAPMADNNEGADGVGNSSGNWHCDSTWMGDRVITTSTRTWALPTYNNHLYKQISSQSGASNDNHYFGYSTPWGYFDFNRFHCHFSPRDWQRLINNNWGFRPKRLSFKLFNIQVKEVTQNDGTTTIANNLTSTVQVFTDSEYQLPYILGSAHQGCLPPFPADVFMVPQYGYLTLNNGSQAVGRSSFYCLEYFPSQMLRTGNNFTFSYTFEDVPFHSSYAHSQSLDRLMNPLIDQYLYYLSKTNAPSGTTTMSRLQFSQAGASDIRDQSRNWLPGPCYRQQRVSKTAADNNNSDYSWTGATKYHLNGRDSLVNPGPAMASHKDDEEKYFPQSGVLIFGKQGSNKTNVDIEKVMITDEEEIRTTNPVATEQYGSVSTNLQSGNTQAATSDVNTQGVLPGMVWQDRDVYLQGPIWAKIPHTDGHFHPSPLMGGFGLKHPPPQILIKNTPVPANPSTTFSAAKFASFITQYSTGQVSVEIEWELQKENSKRWNPEIQYTSNYNKSVNVDFTVDTNGVYSEPRPIGTRYLTRNL

SEQ ID NO: 11328 - protein, 735 aa, Artificial Sequence
  source: /note="Description of Artificial Sequence: Synthetic polypeptide"
MAADGYLPDWLEDTLSEGIRQWWKLKPGPPPPKPAERHKDDSRGLVLPGYKYLGPFNGLDKGEPVNEADAAALEHDKAYDRQLDSGDNPYLKYNHADAEFQERLKEDTSFGGNLGRAVFQAKKRVLEPLGLVEEPVKTAPGKKRPVEHSPVEPDSSSGTGKAGQQPARKRLNFGQTGDADSVPDPQPLGQPPAAPSGLGTNTMATGSGAPMADNNEGVDGVGNSSGNWHCDSTWMGDRVITTSTRTWALPTYNNHLYKQISSQSGASNDNHYFGYSTPWGYFDFNRFHCHFSPRDWQRLINNNWGFRPKRLSFKLFNIQVKEVTQNDGTTTIANNLTSTVQVFTDSEYQLPYVLGSAHQGCLPPFPADVFMVPQYGYLTLNNGSQAVGRSSFYCLEYFPSQMLRTGNNFTFSYTFEDVPFHSSYAHSQSLDRLMNPLIDQYLYYLSKTNAPSGTTTMSRLQFSQAGASDIRDQSRNWLPGPCYRQQRVSKTAADNNNSDYSWTGATKYHLNGRDSLVNPGPAMASHKDDEEKYFPQSGVLIFGKQGSNKTNVDIEKVMITDEEEIRTTNPVATEQYGSVSTNLQSGNTQAATSDVNTQGVLPGMVWQDRDVYLQGPIWAKIPHTDGHFHPSPLMGGFGLKHPPPQILIKNTPVPANPSTTFSAAKFASFITQYSTGQVSVEIEWELQKENSKRWNPEIQYTSNYNKSVNVDFTVDTNGVYSEPRPIGTRYLTRNL

SEQ ID NO: 11329 - protein, 735 aa, Artificial Sequence
  source: /note="Description of Artificial Sequence: Synthetic polypeptide"
MAADGYLPDWLEDTLSEGIRQWWKLKPGPPPPKPAERHKDDSRGLVLPGYKYLGPFNGLDKGEPVNEADAAALEHDKAYDRQLDSGDNPYLKYNHADAEFQERLKEDTSFGGNLGRAVFQAKKRVLEPLGLVEEPVKTAPGKKRPVEHSPVEPDSSSGTGKAGQQPARKRLNFGQTGDADSVPDPQPLGQPPAAPSGLGTNTMATGSGAPMADNNEGADGVGNSSGNWHCDSTWMGDRVITTSTRTWALPTYNNHLYKQISSQSGASNDNHYFGYSTPWGYFDFNRFHCHFSPRDWQRLINNNWGFRPKRLSFKLFNIQVKEVTQNDGTTTIANNLTSTVQVFTDSEYQLPYVLGSAHQGCLPPFPADVFMVPQYGYLTLNNGSQAVGRSSFYCLEYFPSQMLRTGNNFTFSYTFEDVPFHSSYAHSQSLDRLMNPLIDQYLYYLSKTNAPSGTTTMSRLQFSQAGASDIRDQSRNWLPGPCYRQQRVSKTAADNNNSDYSWTGATKYHLNGRGSLVNPGPAMASHKDDEEKYFPQSGVLIFGKQGSNKTNVDIEKVMITDEEEIRTTNPVATEQYGSVSTNLQSGNTQAATSDVNTQGVLPGMVWQDRDVYLQGPIWAKIPHTDGHFHPSPLMGGFGLKHPPPQILIKNTPVPANPSTTFSAAKFASFITQYSTGQVSVEIEWELQKENSKRWNPEIQYTSNYNKSVNVDFTVDTNGVYSEPRPIGTRYLTRNL

SEQ ID NO: 11330 - protein, 735 aa, Artificial Sequence
  source: /note="Description of Artificial Sequence: Synthetic polypeptide"
MAADGYLPDWLEDTLSEGIRQWWKLKPGPPPPKPAERHKDDSRGLVLPGYKYLGPFNGLDKGEPVNEADAAALEHDKAYDRQLDSGDNPYLKYNHADAEFQERLKEDTSFGGNLGRAVFQAKKRVLEPLGLVEEPVKTAPGKKRPVEHSPVEPDSSSGTGKAGQQPARKRLNFGQTGDADSVPDPQPLGQPPAAPSGLGTNTMATGSGAPMADNNEGADGVGNSSGNWHCDSTWMGDRVITTSTRTWALPTYNNHLYKQISSQSGASNDNHYFGYSTPWGYFDFNRFHCHFSPRDWQRLINNNWGFRPKRLSFKLFNIQVKEVTQNDGTTTIANNLTSTVQVFTDSEYQLPYVLGSAHQGCLPPFPADVFMVPQYGYLTLNNGSQAVGRSSFYCLEYFPSQMLRTGNNFTFSYTFEDVPFHSSYAHSQSLDRLMNPLIDQYLYYLSKTNAPSGTTTMSRLQFSQAGASDIRDQSRNWLPGPCYRQQRVSKTAADNNNSDYSWTGATKYHLNGRDSLVNPGPAMASHKDDEEKYFPQSGVLIFGKQGSNKTNVDIEKVMITDEEEIRTTNPVATEQYGSVSTNLQSGNTQAATPDVNTQGVLPGMVWQDRDVYLQGPIWAKIPHTDGHFHPSPLMGGFGLKHPPPQILIKNTPVPANPSTTFSAAKFASFITQYSTGQVSVEIEWELQKENSKRWNPEIQYTSNYNKSVNVDFTVDTNGVYSEPRPIGTRYLTRNL

SEQ ID NO: 11331 - protein, 735 aa, Artificial Sequence
  source: /note="Description of Artificial Sequence: Synthetic polypeptide"
MAADGYLPDWLEDTLSEGIRQWWKLKPGPPPPKPAERHKDDSRGLVLPGYKYLGPFNGLDKGEPVNEADAAALEHDKAYDRQLDSGDNPYLKYNHADAEFQERLKEDTSFGGNLGRAVFQAKKRVLEPLGLVEEPVKTAPGKKRPVEHSPVEPDSSSGTGKAGQQPARKRLNFGQTGDADSVPDPQPLGQPPAAPSGLGTNTMATGSGAPMADNNEGADGVGNSSGNWHCDSTWMGDRVITTSTRTWALPTYNNHLYKQISSQSGASNDNHYFGYSTPWGYFDFNRFHCHFSPRDWQRLINNNWGFRPKRLSFKLFNIQVKEVTQNDGTTTIANNLTSTVQVFTDSEYQLPYVLGSAHQGCLPPFPADVFMVPQYGYLTLNNGSQAVGRSSFYCLEYFPSQMLRTGNNFTFSYTFEDVPFHSSYAHSQSLDRLMNPLIDQYLYYLSKTNAPSGTTTMSRLQFSQAGASDIRDQSRNWLPGPCYRQQRVSKTAADNNNSDYSWTGATKYHLNGRDSLVNPGPAMASHKDDEEKYFPQSGVLIFGKQGSNKTNVDIEKVMITDEEEIRTTNPVATEQYGSVSTNLQSGNTQAATSDVNTQGVLPGMVWQDRDVYLQGPIWAKIPHTDGHFHPSPLMGGFGLKHPPPQILIKNTPVPANPSTTFSVAKFASFITQYSTGQVSVEIEWELQKENSKRWNPEIQYTSNYNKSVNVDFTVDTNGVYSEPRPIGTRYLTRNL

SEQ ID NO: 11332 - protein, 735 aa, Artificial Sequence
  source: /note="Description of Artificial Sequence: Synthetic polypeptide"
MAADGYLPDWLEDTLSEGIRQWWKLKPGPPPPKPAERHKDDSRGLVLPGYKYLGPFNGLDKGEPVNEADAAALEHDKAYDRQLDSGDNPYLKYNHADAEFQERLKEDTSFGGNLGRAVFQAKKRVLEPLGLVEEPVKTAPGKKRPVEHSPVEPDSSSGTGKAGQQPARKRLNFGQTGDADSVPDPQPLGQPPAAPSGLGTNTMATGSGAPMADNNEGADGVGNSSGNWHCDSTWMGDRVITTSTRTWALPTYNNHLYKQISSQSGASNDNHYFGYSTPWGYFDFNRFHCHFSPRDWQRLINNNWGFRPKRLSFKLFNIQVKEVTQNDGTTTIANNLTSTVQVFTDSEYQLPYVLGSAHQGCLPPFPADVFMVPQYGYLTLNNGSQAVGRSSFYCLEYFPSQMLRTGNNFTFSYTFEDVPFRSSYAHSQSLDRLMNPLIDQYLYYLSKTNAPSGTTTMSRLQFSQAGASDIRDQSRNWLPGPCYRQQRVSKTAADNNNSDYSWTGATKYHLNGRDSLVNPGPAMASHKDDEEKYFPQSGVLIFGKQGSNKTNVDIEKVMITDEEEIRTTNPVATEQYGSVSTNLQSGNTQAATSDVNTQGVLPGMVWQDRDVYLQGPIWAKIPHTDGHFHPSPLMGGFGLKHPPPQILIKNTPVPANPSTTFSAAKFASFITQYSTGQVSVEIEWELQKENSKRWNPEIQYTSNYNKSVNVDFTVDTNGVYSEPRPIGTRYLTRNL

SEQ ID NO: 11333 - protein, 735 aa, Artificial Sequence
  source: /note="Description of Artificial Sequence: Synthetic polypeptide"
MAADGYLPDWLEDTLSEGIRQWWKLKPGPPPPKPAERHKDDSRGLVLPGYKYLGPFNGLDKGEPVNEADAAALEHDKAYDRQLDSGDNPYLKYNHADAEFQERLKEDTSFGGNLGRAVFQAKKRVLEPLGLVEEPVKTAPGKKRPVEHSPVEPDSSSGTGKADQQPARKRLNFGQTGDADSVPDPQPLGQPPAAPSGLGTNTMATGSGAPMADNNEGADGVGNSSGNWHCDSTWMGDRVITTSTRTWALPTYNNHLYKQISSQSGASNDNHYFGYSTPWGYFDFNRFHCHFSPRDWQRLINNNWGFRPKRLSFKLFNIQVKEVTQNDGTTTIANNLTSTVQVFTDSEYQLPYVLGSAHQGCLPPFPADVFMVPQYGYLTLNNGSQAVGRSSFYCLEYFPSQMLRTGNNFTFSYTFEDVPFHSSYAHSQSLDRLMNPLIDQYLYYLSKTNAPSGTTTMSRLQFSQAGASDIRDQSRNWLPGPCYRQQRVSKTAADNNNSDYSWTGATKYHLNGRDSLVNPGPAMASHKDDEEKYFPQSGVLIFGKQGSNKTNVDIEKVMITDEEEIRTTNPVATEQYGSVSTNLQSGNTQAATSDVNTQGVLPGMVWQDRDVYLQGPIWAKIPHTDGHFHPSPLMGGFGLKHPPPQILIKNTPVPANPSTTFSAAKFASFITQYSTGQVSVEIEWELQKENSKRWNPEIQYTSNYNKSVNVDFTVDTNGVYSEPRPIGTRYLTRNL

SEQ ID NO: 11334 - protein, 735 aa, Artificial Sequence
  source: /note="Description of Artificial Sequence: Synthetic polypeptide"
MAADGYLPDWLEDTLSEGIRQWWKLKPGPPPPKPAERHKDDSRGLVLPGYKYLGPFNGLDKGEPVNEADAAALEHDKAYDRQLDSGDNPYLKYNHADAEFQERLKEDTSFGGNLGRAVFQAKKRVLEPLGLVEEPVKTAPGKKRPVEHSPVEPDSSSGTGKAGQQPARKRLNFGQTGDADSVPDPQPLGQPPAAPSGLGTNTMATGSGAPMADNNEGADGVGNSSGNWHCDSTWMGDRVITTSTRTWALPTYNNHLYKQISSQSGASNDNHYFGYSTPWGYFDFNRFHCHFSPRDWQRLINNNWGFRPKRLSFKLFNIQVKEVTQNDGTTTIANNLTNTVQVFTDSEYQLPYVLGSAHQGCLPPFPADVFMVPQYGYLTLNNGSQAVGRSSFYCLEYFPSQMLRTGNNFTFSYTFEDVPFHSSYAHSQSLDRLMNPLIDQYLYYLSKTNAPSGTTTMSRLQFSQAGASDIRDQSRNWLPGPCYRQQRVSKTAADNNNSDYSWTGATKYHLNGRDSLVNPGPAMASHKDDEEKYFPQSGVLIFGKQGSNKTNVDIEKVMITDEEEIRTTNPVATEQYGSVSTNLQSGNTQAATSDVNTQGVLPGMVWQDRDVYLQGPIWAKIPHTDGHFHPSPLMGGFGLKHPPPQILIKNTPVPANPSTTFSAAKFASFITQYSTGQVSVEIEWELQKENSKRWNPEIQYTSNYNKSVNVDFTVDTNGVYSEPRPIGTRYLTRNL

SEQ ID NO: 11335 - protein, 735 aa, Artificial Sequence
  source: /note="Description of Artificial Sequence: Synthetic polypeptide"
MAADGYLPDWLEDTLSEGIRQWWKLKPGPPPPKPAERHKDDSRGLVLPGYKYLGPFNGLDKGEPVNEADAAALEHDKAYDRQLDSGDNPYLKYNHADAEFQERLKEDTSFGGNLGRAVFQAKKRVLEPLGLVEEPVKTAPGKKRPVEHSPVEPDSSSGTGKAGQQPARKRLNFGQTGDADSVPDPQPLGQPPAAPSGLGTNTMATGSGAPMADNNEGADGVGNSSGNWHCDSTWMGDRVITTSTRTWALPTYNNHLYKQISSQSGASNDNHYFGYNTPWGYFDFNRFHCHFSPRDWQRLINNNWGFRPKRLSFKLFNIQVKEVTQNDGTTTIANNLTSTVQVFTDSEYQLPYVLGSAHQGCLPPFPADVFMVPQYGYLTLNNGSQAVGRSSFYCLEYFPSQMLRTGNNFTFSYTFEDVPFHSSYAHSQSLDRLMNPLIDQYLYYLSKTNAPSGTTTMSRLQFSQAGASDIRDQSRNWLPGPCYRQQRVSKTAADNNNSDYSWTGATKYHLNGRDSLVNPGPAMASHKDDEEKYFPQSGVLIFGKQGSNKTNVDIEKVMITDEEEIRTTNPVATEQYGSVSTNLQSGNTQAATSDVNTQGVLPGMVWQDRDVYLQGPIWAKIPHTDGHFHPSPLMGGFGLKHPPPQILIKNTPVPANPSTTFSAAKFASFITQYSTGQVSVEIEWELQKENSKRWNPEIQYTSNYNKSVNVDFTVDTNGVYSEPRPIGTRYLTRNL

SEQ ID NO: 11336 - protein, 735 aa, Artificial Sequence
  source: /note="Description of Artificial Sequence: Synthetic polypeptide"
MAADGYLPDWLEDTLSEGIRQWWKLKPGPPPPKPAERHKDDSRGLVLPGYKYLGPFNGLDKGEPVNEADAAALEHDKAYDRQLDSGDNPYLKYNHADAEFQERLKEDTSFGGNLGRAVFQAKKRVLEPLGLVEEPVKTAPGKKRPVEHSPVEPDSSSGTGKAGQQPARKRLNFGQTGGADSVPDPQPLGQPPAAPSGLGTNTMATGSGAPMADNNEGADGVGNSSGNWHCDSTWMGDRVITTSTRTWALPTYNNHLYKQISSQSGASNDNHYFGYSTPWGYFDFNRFHCHFSPRDWQRLINNNWGFRPKRLSFKLFNIQVKEVTQNDGTTTIANNLTSTVQVFTDSEYQLPYVLGSAHQGCLPPFPADVFMVPQYGYLTLNNGSQAVGRSSFYCLEYFPSQMLRTGNNFTFSYTFEDVPFHSSYAHSQSLDRLMNPLIDQYLYYLSKTNAPSGTTTMSRLQFSQAGASDIRDQSRNWLPGPCYRQQRVSKTAADNNNSDYSWTGATKYHLNGRDSLVNPGPAMASHKDDEEKYFPQSGVLIFGKQGSNKTNVDIEKVMITDEEEIRTTNPVATEQYGSVSTNLQSGNTQAATSDVNTQGVLPGMVWQDRDVYLQGPIWAKIPHTDGHFHPSPLMGGFGLKHPPPQILIKNTPVPANPSTTFSAAKFASFITQYSTGQVSVEIEWELQKENSKRWNPEIQYTSNYNKSVNVDFTVDTNGVYSEPRPIGTRYLTRNL

SEQ ID NO: 11337 - protein, 735 aa, Artificial Sequence
  source: /note="Description of Artificial Sequence: Synthetic polypeptide"
MAADGYLPDWLEDTLSEGIRQWWKLKPGPPPPRPAERHQDDSRGLVLPGYKYLGPFNGLDKGEPVNEADAAALEHDKAYDRQLDSGDNPYLKYNHADAEFQERLKEDTSFGGNLGRAVFQAKKRVLEPLGLVEEPVKTAPGKKRPVEHSPAEPDSSSGTGKAGQQPARKRLNFGQTGDADSVPDPQPLGQPPAAPTSLGSTTMATGSGAPMADNNEGADGVGNSSGNWHCDSQWLGDRVITTSTRTWALPTYNNHLYKQISSQSGASNDNHYFGYSTPWGYFDFNRFHCHFSPRDWQRLINNNWGFRPKRLNFKLFNIQVKEVTQNDGTTTIANNLTSTVQVFTDSEYQLPYVLGSAHQGCLPPFPADVFMVPQYGYLTLNNGSQAVGRSSLYCLEYFPSQMLRTGNNFTFSYTFEDVPFHSSYAHSQSLDRLMNPLIDQYLYYLNRTQSNSGTLQQSRLLFSQAGPTSMSLQAKNWLPGPCYRQQRLSKQANDNNNSNFPWTAATKYHLNGRDSLVNPGPAMASHKDDEEKFFPMHGTLIFGKQGTNANDADLEHVMITDEEEIRTTNPVATEQYGNVSNNLQNSNTGPTTENVNHQGALPGMVWQDRDVYLQGPIWAKIPHTDGHFHPSPLMGGFGLKHPPPQIMIKNTPVPANPPTNFSAAKFASFITQYSTGQVSVEIEWELQKENSKRWNPEIQYTSNYNKSVNVDFTVDANGVYSEPRPIGTRYLTRNL

SEQ ID NO: 11338 - protein, 735 aa, Artificial Sequence
  source: /note="Description of Artificial Sequence: Synthetic polypeptide"
MAADGYLPDWLEDTLSEGIRQWWKLKPGPPPPRPAERHQDDSRGLVLPGYKYLGPFNGLDKGEPVNEADAAALEHDKAYDRQLDSGDNPYLKYNHADAEFQERLKEDTSFGGNLGRAVFQAKKRVLEPLGLVEEPVKTAPGKKRPVEHSPAEPDSSSGTGKAGQQPARKRLNFGQTGDADSVPDPQPLGQPPAAPTSLGSTTMATGSGAPMADNNEGADGVGNSSGNWHCDPQWLGDRVITTSTRTWALPTYNNHLYKQISSQSGASNDNHYFGYSTPWGYFDFNRFHCHFSPRDWQRLINNNWGFRPKRLNFKLFNIQVKEVTQNDGTTTIANNLTSTVQVFTDSEYQLPYVLGSAHQGCLPPFPADVFMVPQYGYLTLNNGSQAVGRSSFYCLEYFPSQMLRTGNNFTFSYTFEDVPFHSSYAHSQSLDRLMNPLIDQYLYYLNRTQSNSGTLQQSRLLFSQAGPTSMSLQAKNWLPGPCYRQQRLSKQANDNNNSNFPWTAATKYHLNGRDSLVNPGPAMASHKDDEEKFFPMHGTLIFGKQGTNANDADLEHVMITDEEEIRTTNPVATEQYGNVSNNLQNSNTGPTTENVNHQGALPGMVWQDRDVYLQGPIWAKIPHTDGHFHPSPLMGGFGLKHPPPQIMIKNTPVPANPPTNFSAAKFASFITQYSTGQVSVEIEWELQKENSKRWNPEIQYTSNYNKSVNVDFTVDANGVYSEPRPIGTRYLTRNL

SEQ ID NO: 11339 - protein, 735 aa, Artificial Sequence
  source: /note="Description of Artificial Sequence: Synthetic polypeptide"
MAADGYLPDWLEDTLSEGIRQWWKLKPGPPPPRPAERHQDDSRGLVLPGYKYLGPFNGLDKGEPVNEADAAALEHDKAYDRQLDSGDNPYLKYNHADAEFQERLKEDTSFGGNLGRAVSQAKKRVLEPLGLVEEPVKTAPGKKRPVEHSPAEPDSSSGTGKAGQQPARKRLNFGQTGDADSVPDPQPLGQPPAAPTSLGSTTMATGSGAPMADNNEGADGVGNSSGNWHCDSQWLGDRVITTSTRTWALPTYNNHLYKQISSQSGASNDNHYFGYSTPWGYFDFNRFHCHFSPRDWQRLINNNWGFRPKRLNFKLFNIQVKEVTQNDGTTTIANNLTSTVQVFTDSEYQLPYVLGSAHQGCLPPFPADVFMVPQYGYLTLNNGSQAVGRSSFYCLEYFPSQMLRTGNNFTFSYTFEDVPFHSSYAHSQSLDRLMNPLIDQYLYYLNRTQSNSGTLQQSRLLFSQAGPTSMSLQAKNWLPGPCYRQQRLSKQANDNNNSNFPWTAATKYHLNGRDSLVNPGPAMASHKDDEEKFFPMHGTLIFGKQGTNANDADLEHVMITDEEEIRTTNPVATEQYGNVSNNLQNSNTGPTTENVNHQGALPGMVWQDRDVYLQGPIWAKIPHTDGHFHPSPLMGGFGLKHPPPQIMIKNTPVPANPPTNFSAAKFASFITQYSTGQVSVEIEWELQKENSKRWNPEIQYTSNYNKSVNVDFTVDANGVYSEPRPIGTRYLTRNL

SEQ ID NO: 11340 - protein, 735 aa, Artificial Sequence
  source: /note="Description of Artificial Sequence: Synthetic polypeptide"
MAADGYLPDWLEDTLSEGIRQWWKLKPGPPPPRPAERHQDDSRGLVLPGYKYLGPFNGLDKGEPVNEADAAALEHDKAYDRQLDSGDNPYLKYNHADAEFQERLKEDTSFGGNLGRAVFQAKKRVLEPLGLVEEPVKTAPGKKRPVEHSPAEPDSSSGTGKAGQQPARKRLNFGQTGDADSVPDPQPLGQPPAAPTSLGSTTMATGSGAPMADNNEGADGVGNSSGNWHCDSQWLGDRVITTSTRTWALPTYNNHLYKQISSQSGASNDNHYFGYSTPWGYFDFNRFHCHFSPRDWQRLINNNWGFRPKRLNFKLFNIQVKEVTQNDGTTTIANNLTSTVQVFTDSEYQLPYVLGSAHQGCLPPFPADVFMVPQYGYLTLNNGSQAVGRSSFYCLEYFPSQMLRTGNNFTFSYTFEDVPFHSSYAHSQSLDRLMSPLIDQYLYYLNRTQSNSGTLQQSRLLFSQAGPTSMSLQAKNWLPGPCYRQQRLSKQANDNNNSNFPWTAATKYHLNGRDSLVNPGPAMASHKDDEEKFFPMHGTLIFGKQGTNANDADLEHVMITDEEEIRTTNPVATEQYGNVSNNLQNSNTGPTTENVNHQGALPGMVWQDRDVYLQGPIWAKIPHTDGHFHPSPLMGGFGLKHPPPQIMIKNTPVPANPPTNFSAAKFASFITQYSTGQVSVEIEWELQKENSKRWNPEIQYTSNYNKSVNVDFTVDANGVYSEPRPIGTRYLTRNL

SEQ ID NO: 11341 - protein, 735 aa, Artificial Sequence
  source: /note="Description of Artificial Sequence: Synthetic polypeptide"
MAADGYLPDWLEDTLSEGIRQWWKLKPGPPPPRPAERHQDDSRGLVLPGYKYLGPFNGLDKGEPVNEADAAALEHDKAYDRQLDSGDNPYLKYNHADAEFQERLKEDTSFGGNLGRAVFQAKKRVLEPLGLVEEPVKTAPGKKRPVEHSPAEPDSSSGTGKAGQQPARKRLNFGQTGDADSVPDPQPLGQPPAAPTSLGSTTMATGSGAPMAGNNEGADGVGNSSGNWHCDSQWLGDRVITTSTRTWALPTYNNHLYKQISSQSGASNDNHYFGYSTPWGYFDFNRFHCHFSPRDWQRLINNNWGFRPKRLNFKLFNIQVKEVTQNDGTTTIANNLTSTVQVFTDSEYQLPYVLGSAHQGCLPPFPADVFMVPQYGYLTLNNGSQAVGRSSFYCLEYFPSQMLRTGNNFTFSYTFEDVPFHSSYAHSQSLDRLMNPLIDQYLYYLNRTQSNSGTLQQSRLLFSQAGPTSMSLQAKNWLPGPCYRQQRLSKQANDNNNSNFPWTAATKYHLNGRDSLVNPGPAMASHKDDEEKFFPMHGTLIFGKQGTNANDADLEHVMITDEEEIRTTNPVATEQYGNVSNNLQNSNTGPTTENVNHQGALPGMVWQDRDVYLQGPIWAKIPHTDGHFHPSPLMGGFGLKHPPPQIMIKNTPVPANPPTNFSAAKFASFITQYSTGQVSVEIEWELQKENSKRWNPEIQYTSNYNKSVNVDFTVDANGVYSEPRPIGTRYLTRNL

SEQ ID NO: 11342 - protein, 735 aa, Artificial Sequence
  source: /note="Description of Artificial Sequence: Synthetic polypeptide"
MAADGYLPDWLEDTLSEGIRQWWKLKPGPPPPRPAERHQDDSRGLVLPGYKYLGPFNGLDKGEPVNEADAAALEHDKAYDRQLDSGDNPYLKYNHADAEFQERLKEDTSFGGNLGRAVFQAKKRVLEPLGLVEEPVKTAPGKKRPVEHSPAEPDSSSGTGKAGQQPARKRLNFGQTGDADSVPDPQPLGQPPAAPTSLGSTTMATGSGAPMADSNEGADGVGNSSGNWHCDSQWLGDRVITTSTRTWALPTYNNHLYKQISSQSGASNDNHYFGYSTPWGYFDFNRFHCHFSPRDWQRLINNNWGFRPKRLNFKLFNIQVKEVTQNDGTTTIANNLTSTVQVFTDSEYQLPYVLGSAHQGCLPPFPADVFMVPQYGYLTLNNGSQAVGRSSFYCLEYFPSQMLRTGNNFTFSYTFEDVPFHSSYAHSQSLDRLMNPLIDQYLYYLNRTQSNSGTLQQSRLLFSQAGPTSMSLQAKNWLPGPCYRQQRLSKQANDNNNSNFPWTAATKYHLNGRDSLVNPGPAMASHKDDEEKFFPMHGTLIFGKQGTNANDADLEHVMITDEEEIRTTNPVATEQYGNVSNNLQNSNTGPTTENVNHQGALPGMVWQDRDVYLQGPIWAKIPHTDGHFHPSPLMGGFGLKHPPPQIMIKNTPVPANPPTNFSAAKFASFITQYSTGQVSVEIEWELQKENSKRWNPEIQYTSNYNKSVNVDFTVDANGVYSEPRPIGTRYLTRNL

SEQ ID NO: 11343 - protein, 735 aa, Artificial Sequence
  source: /note="Description of Artificial Sequence: Synthetic polypeptide"
MAADGYLPDWLEDTLSEGIRQWWKLKPGPPPPRPAERHQDDSRGLVLPGYKYLGPFNGLDKGEPVNEADAAALEHDKAYDRQLDSGDNPYLKYNHADAEFQERLKEDTSFGGNLGRAVFQAKKRVLEPLGLVEEPVKTAPGKKRPVEHSPAEPDSSSGTGKAGQQPARKRLNFGQTGDADSVPDPQPLGQPPAAPTSLGSTTMATGSGAPMADNNEGADGVGNSSGNWHCDSQWLGDRVITTSTRTWALPTYNNHHYKQISSQSGASNDNHYFGYSTPWGYFDFNRFHCHFSPRDWQRLINNNWGFRPKRLNFKLFNIQVKEVTQNDGTTTIANNLTSTVQVFTDSEYQLPYVLGSAHQGCLPPFPADVFMVPQYGYLTLNNGSQAVGRSSFYCLEYFPSQMLRTGNNFTFSYTFEDVPFHSSYAHSQSLDRLMNPLIDQYLYYLNRTQSNSGTLQQSRLLFSQAGPTSMSLQAKNWLPGPCYRQQRLSKQANDNNNSNFPWTAATKYHLNGRDSLVNPGPAMASHKDDEEKFFPMHGTLIFGKQGTNANDADLEHVMITDEEEIRTTNPVATEQYGNVSNNLQNSNTGPTTENVNHQGALPGMVWQDRDVYLQGPIWAKIPHTDGHFHPSPLMGGFGLKHPPPQIMIKNTPVPANPPTNFSAAKFASFITQYSTGQVSVEIEWELQKENSKRWNPEIQYTSNYNKSVNVDFTVDANGVYSEPRPIGTRYLTRNL

SEQ ID NO: 11344 - protein, 735 aa, Artificial Sequence
  source: /note="Description of Artificial Sequence: Synthetic polypeptide"
MAADGYLPDWLEDTLSEGIRQWWKLKPGPPPPRPAERHQDDSRGLVLPGYKYLGPFNGLDKGEPVNEADAAALEHDKAYDRQLDSGDNPYLKYNHADAEFQERLKEDTSFGGNLGRAVFQAKKRVLEPLGLVEEPVKTAPGKKRPVEHSPAEPDSSSGTGKAGQQPARKRLNFGQTGDADSVPDPQPLGQPPAAPTSLGSTTMATGSGAPMADNNEGADGVGNSSGNWHCDSQWLGDRVITTSTRTWALPTYNNHLYKQISSQSGASNDNHYFGYSTPWGYFDFNRFHCHFSPRDWQRLINNNWGFRPKRLNFKLFNIQVKEVTQNDGTTTIANNLTSTVRVFTDSEYQLPYVLGSAHQGCLPPFPADVFMVPQYGYLTLNNGSQAVGRSSFYCLEYFPSQMLRTGNNFTFSYTFEDVPFHSSYAHSQSLDRLMNPLIDQYLYYLNRTQSNSGTLQQSRLLFSQAGPTSMSLQAKNWLPGPCYRQQRLSKQANDNNNSNFPWTAATKYHLNGRDSLVNPGPAMASHKDDEEKFFPMHGTLIFGKQGTNANDADLEHVMITDEEEIRTTNPVATEQYGNVSNNLQNSNTGPTTENVNHQGALPGMVWQDRDVYLQGPIWAKIPHTDGHFHPSPLMGGFGLKHPPPQIMIKNTPVPANPPTNFSAAKFASFITQYSTGQVSVEIERELQKENSKRWNPEIQYTSNYNKSVNVDFTVDANGVYSEPRPIGTRYLTRNL

SEQ ID NO: 11345 - protein, 735 aa, Artificial Sequence
  source: /note="Description of Artificial Sequence: Synthetic polypeptide"
MAADGYLPDWLEDTLSEGIRQWWKLKPGPPPPRPAERHQDDSRGLVLPGYKYLGPFNGLDKGEPVNEADAAALEHDKAYDRQLDSGDNPYLKYNHADAEFQERLKEDTSFGGNLGRAVFQAKKRVLEPLGLVEEPVKTAPGKKRPVEHSPAEPDSSSGTGKAGQQPARKRLNFGQTGDADSVPDPQPLGQPPAAPTSLGSTTMATGSGAPMADNNEGADGVGNSSGNWHCDSQWLGDRVITTSTRTWALPTYNNHLYKQISSQSGASNDNHYFGYSTPWGYFDFNRFHCHFSPRDWQRLINNNWGFRPKRLNFKLFNIQVKEVTQNDGTTTIANNLTSTVQVFTDSEYQLPYVLGSAHQGCLPPFPADVFMVPQYGYLTLNNGSQAVGRSSFYCLEYFPSQMLRTGNNFTFSYTFEDVPSHSSYAHSQSLDRLMNPLIDQYLYYLNRTQSNSGTLQQSRLLFSQAGPTSMSLQAKNWLPGPCYRQQRLSKQANDNNNSNFPWTAATKYHLNGRDSLVNPGPAMASHKDDEEKFFPMHGTLIFGKQGTNANDADLEHVMITDEEEIRTTNPVATEQYGNVSNNLQNSNTGPTTENVNHQGALPGMVWQDRDVYLQGPIWAKIPHTDGHFHPSPLMGGFGLKHPPPQIMIKNTPVPANPPTNFSAAKFASFITQYSTGQVSVEIEWELQKENSKRWNPEIQYTSNYNKSVNVDFTVDANGVYSEPRPIGTRYLTRNL

SEQ ID NO: 11346 - protein, 735 aa, Artificial Sequence
  source: /note="Description of Artificial Sequence: Synthetic polypeptide"
MAADGYLPDWLEDTLSEGIRQWWKLKPGPPPPRPAERHQDDSRGLVLPGYKYLGPFNGLDKGEPVNEADAAALEHDKAYDRQLDSGDNPYLKYNHADAEFQERLKEDTSFGGNLGRAVFQAKKRVLEPLGLVEEPVKTAPGKKRPVEHSPAEPDSSSGTGKAGQRPARKRLNFGQTGDADSVPDPQPLGQPPAAPTSLGSTTMATGSGAPMADNNEGADGVGNSSGNWHCDSQWLGDRVITTSTRTWALPTYNNHLYKQISSQSGASNDNHYFGYSTPWGYFDFNRFHCHFSPRDWQRLINNNWGFRPKRLNFKLFNIQVKEVTQNDGTTTIANNLTSTVQVFTDSEYQLPYVLGSAHQGCLPPFPADVFMVPQYGYLTLNNGSQAVGRSSFYCLEYFPSQMLRTGNNFTFSYTFEDVPFHSSYAHSQSLDRLMNPLIDQYLYYLNRTQSNSGTLQQSRLLFSQAGPTSMSLQAKNWLPGPCYRQQRLSKQANDNNNSNFPWTAATKYHLNGRDSLVNPGPAMASHKDDEEKFFPMHGTLIFGKQGTNANDADLEHVMITDEEEIRTTNPVATEQYGNVSNNLQNSNTGPTTENVNHQGALPGMVWQDRDVYLQGPIWAKIPHTDGHFHPSPLMGGFGLKHPPPQIMIKNTPVPANPPTNFSAAKFASFITQYSTGQVSVEIEWELQKENSKRWNPEIQYTSNYNKSVNVDFTVDANGVYSEPRPIGTRYLTRNL

SEQ ID NO: 11347 - protein, 735 aa, Artificial Sequence
  source: /note="Description of Artificial Sequence: Synthetic polypeptide"
MAADGYLPDWLEDTLSEGIRQWWKLKPGPPPPKPAERHKDDSRGLVLPGYKYLGPFNGLDKGEPVNEADAAALEHDKAYDRQLDSGDNPYLKYNHADAEFQERLKEDTSFGGNLARAVFQAKKRVLEPLGLVEEPVKTAPGKKRPVEHSPAEPDSSSGTGKSGQQPARKRLNFGQTGDADSVPDPQPLGQPPAAPSGLGTNTMASGSGAPMADNNEGADGVGNSSGNWHCDSTWMGDRVITTSTRTWALPTYNNHLYKQISSQSGAANDNHYFGYSTPWGYFDFNRFHCHFSPRDWQRLINNNWGFRPKRLNFKLFNIQVKEVTQNDGTTTIANNLTSTVQVFTDSEYQLPYVLGSAHQGCLPPFPADVFMVPQYGYLTLNNGSQAVGRSSFYCLEYFPSQMLRTGNNFTFSYTFEDVPFHSSYAHSQSLDRLMNPLIDQYLYYLNRTQSNSGTLQQSRLLFSQAGPTSMSLQAKNWLPGPCYRQQRLSKQANDNNNSNFPWTAATKYHLNGRDSLVNPGPAMASHKDDEEKFFPMHGTLIFGKQGTNANDADLEHVMITDEEEIRTTNPVATEQYGNVSNNLQNSNTGPTTENVNHQGALPGMVWQDRDVYLQGPIWAKIPHTDGHFHPSPLMGGFGLKHPPPQIMIKNTPVPANPPTNFSAAKFASFITQYSTGQVSVEIEWELQKENSKRWNPEIQYTSNYNKSVNVDFTVDANGVYSEPRPIGTRYLTRNL

SEQ ID NO: 11348 - protein, 735 aa, Artificial Sequence
  source: /note="Description of Artificial Sequence: Synthetic polypeptide"
MAADGYLPDWLEDTLSEGIRQWWKLKPGPPPPRPAERHQDDSRGLVLPGYKYLGPFNGLDKGEPVNEADAAALEHDKAYDRQLDSGDNPYLKYNHADAEFQERLKEDTSFGGNLGRAVFQAKKRVLEPLGLVEEPVKTAPGKKRPVEHSPAEPDSSSGTGKAGQQPARKRLNFGQTGDADSVPDPRPLGQPPAAPTSLGSTTMATGSGAPMADNNEGADGVGNSSGNWHCDSQWLGDRVITTSTRTWALPTYNNHLYKQISSQSGASNDNHYFGYSTPWGYFDFNRFHCHFSPRDWQRLINNNWGFRPKRLNFKLFNIQVKEVTQNDGTTTIANNLTSTVQVFTDSEYQLPYVLGSAHQGCLPPFPADVFMVPQYGYLTLNNGSQAVGRSSFYCLEYFPSQMLRTGNNFTFSYTFEDVPFHSSYAHSQSLDRLMNPLIDQYLYYLNRTQSNSGTLQQSRLLFSQAGPTSMSLQAKNWLPGPCYRQQRLSKQANDNNNSNFPWTAATKYHLNGRDSLVNPGPAMASHKDDEEKFFPMHGTLIFGKQGTNANDADLEHVMITDEEEIRTTNPVATEQYGNVSNNLQNSNTGPTTENVNHQGALPGMVWQDRDVYLQGPIWAKIPHTDGHFHPSPLMGGFGLKHPPPQIMIKNTPVPANPPTNFSAAKFASFITQYSTGQVSVEIEWELQKENSKRWNPEIQYTSNYNKSVNVDFTVDANGVYSEPRPIGTRYLTRNL

SEQ ID NO: 11349 - protein, 735 aa, Artificial Sequence
  source: /note="Description of Artificial Sequence: Synthetic polypeptide"
MAADGYLPDWLEDTLSEGIRQWWKLKPGPPPPKPAERHKDDSRGLVLPGYKYLGPFNGLDKGEPVNEADAAALEHDKAYDRQLDSGDNPYLKYNHADAEFQERLKEDTSFGGNLARAVFQAKKRVLEPLGLVEEPVKTAPGKKRPVEHSPAEPDSSSGTGKSGQQPARKRLNFGQTGDADSVPDPQPLGQPPAAPTSLGSTTMATGSGAPMADNNEGADGVGNSSGNWHCDSQWLGDRVITTSTRTWALPTYNNHLYKQISSQSGASNDNHYFGYSTPWGYFDFNRFHCHFSPRDWQRLINNNWGFRPKRLNFKLFNIQVKEVTQNDGTTTIANNLTSTVQVFTDSEYQLPYVLGSAHQGCLPPFPADVFMVPQYGYLTLNNGSQAVGRSSFYCLEYFPSQMLRTGNNFTFSYTFEDVPFHSSYAHSQSLDRLMNPLIDQYLYYLNRTQSNSGTLQQSRLLFSQAGPTSMSLQAKNWLPGPCYRQQRLSKQANDNNNSNFPWTAATKYHLNGRDSLVNPGPAMASHKDDEEKFFPMHGTLIFGKQGTNANDADLEHVMITDEEEIRTTNPVATEQYGNVSNNLQNSNTGPTTENVNHQGALPGMVWQDRDVYLQGPIWAKIPHTDGHFHPSPLMGGFGLKHPPPQIMIKNTPVPANPPTNFSAAKFASFITQYSTGQVSVEIEWELQKENSKRWNPEIQYTSNYNKSVNVDFTVDANGVYSEPRPIGTRYLTRNL

SEQ ID NO: 11350 - protein, 735 aa, Artificial Sequence
  source: /note="Description of Artificial Sequence: Synthetic polypeptide"
MAADGYLPDWLEDTLSEGIRQWWKLKPGPPPPRPAERHQDDSRGLVLPGYKYLGPFNGLDKGEPVNEADAAALEHDKAYDRQLDSGDNPYLKYNHADAEFQERLKEDTSFGGNLGRAVFQAKKRVLEPLGLVEEPVKTAPGKKRPVEHSPAEPDSSSGTGKAGQQPARKRLNFGQTGDADSVPDPQPLGQPPAAPTSLGSTTMATGSGAPMADNNEGADGVGNSSGNWHCDSQWLGDRVITTSTRTWALPTYNNHLYKQISSQSGASNDNHYFGYSTPWGYFDFNRFHCHFSPRDWQRLINNNWGFRPKRLNFKLFNIQVKEVTQNDGTTTIANNLTSTVRVFTDSEYQLPYVLGSAHQGCLPPFPADVFMVPQYGYLTLNNGSQAVGRSSFYCLEYFPSQMLRTGNNFTFSYTFEDVPFHSSYAHSQSLDRLMNPLIDQYLYYLNRTQSNSGTLQQSRLLFSQAGPTSMSLQAKNWLPGPCYRQQRLSKQANDNNNSNFPWTAATKYHLNGRDSLVNPGPAMASHKDDEEKFFPMHGTLIFGKQGTNANDADLEHVMITDEEEIRTTNPVATEQYGNVSNNLQNSNTGPTTENVNHQGALPGMVWQDRDVYLQGPIWAKIPHTDGHFHPSPLMGGFGLKHPPPQIMIKNTPVPANPPTNFSAAKFASFITQYSTGQVSVEIERELQKENSKRWNPEIQYTSNYNKSVNVDFTVGANGVYSEPRPIGTRYLTRNL

SEQ ID NO: 11351 - protein, 735 aa, Artificial Sequence
  source: /note="Description of Artificial Sequence: Synthetic polypeptide"
MAADGYLPDWLEDTLSEGIRQWWKLKPGPPPPKPAERHKDDSRGLVLPGYKYLGPFNGLDKGEPVNEADAAALEHDKAYDRQLDSGDNPYLKYNHADAEFQERLKEDTSFGGNLARAVFQAKKRVLEPLGLVEEPVKTAPGKKRPVEHSPAEPDSSSGTGKSGQQPARKRLNFGQTGDADSVPDPQPLGQPPAAPSGLGTNTMASGSGAPMADNNEGADGVGNSSGNWHCDSQWLGDRVITTSTRTWALPTYNNHLYKQISSQSGASNDNHYFGYSTPWGYFDFNRFHCHFSPRDWQRLINNNWGFRPKRLNFKLFNIQVKEVTQNDGTTTIANNLTSTVQVFTDSEYQLPYVLGSAHQGCLPPFPADVFMVPQYGYLTLNNGSQAVGRSSFYCLEYFPSQMLRTGNNFTFSYTFEDVPFHSSYAHSQSLDRLMNPLIDQYLYYLNRTQSNSGTLQQSRLLFSQAGPTSMSLQAKNWLPGPCYRQQRLSKQANDNNNSNFPWTAATKYHLNGRDSLVNPGPAMASHKDDEEKFFPMHGTLIFGKQGTNANDADLEHVMITDEEEIRTTNPVATEQYGNVSNNLQNSNTGPTTENVNHQGALPGMVWQDRDVYLQGPIWAKIPHTDGHFHPSPLMGGFGLKHPPPQIMIKNTPVPANPPTNFSAAKFASFITQYSTGQVSVEIEWELQKENSKRWNPEIQYTSNYNKSVNVDFTVDANGVYSEPRPIGTRYLTRNL

SEQ ID NO: 11352 - protein, 735 aa, Artificial Sequence
  source: /note="Description of Artificial Sequence: Synthetic polypeptide"
MAADGYLPDWLEDTLSEGIRQWWKLKPGPPPPRPAERHQDDSRGLVLPGYKYLGPFNGLDKGEPVNEADAAALEHDKAYDRQLDSGDNPYLKYNHADAEFQERLKEDTSFGGNLGRAVFQAKKRVLEPLGLVEEPVKTAPGKKRPVEHSPAEPDSSSGTGKAGQQPARKRLNFGQTGDADSVPDPQPLGQPPAAPTSLGSTTMATGSGAPMADNNEGADGVGNSSGNWHCDSQWLGDRVITTSTRTWALPTYNNHLYKQISSQSGASNDNHYFGYSTPWGYFDFNRFHCHFSPRDWQRLINNNWGFRPKRLNFKLFNIQVKEVTQNDGTTTIANNLTSTVQVFTDSEYQLPYVLGSAHQGCLPPFPADVFMVPQYGYLTLNNGSQAVGRSSFYCLEYFPSQMLRTGNNFTFSYTFEDVPFHSSYAHSQSLDRLMNPLIDQYLYYLNRTQSNSGTLQQSRLLFSQAGPTSMSLQAKNWLPGPCYRQQRLSKQANDNNNSNFPWTAATKYHLNGRDSLVNPGPAMASHKDDEEKFFPMHGTLIFGKQGTNANDADLEHVMITDEEEIRTTNPVATEQYGNVSNNLQNSNTGPTTENVNHQGALPGMVWQDRDVYLQGPIWAKIPHTDGHFHPSPLMGGFGLKHPPPQILIKNTPVPANPSTTFSAAKFASFITQYSTGQVSVEIEWELQKENSKRWNPEIQYTSNYNKSVNVDFTVDTNGVYSEPRPIGTRYLTRNL

SEQ ID NO: 11353 - protein, 735 aa, Artificial Sequence
  source: /note="Description of Artificial Sequence: Synthetic polypeptide"
MAADGYLPDWLEDTLSEGIRQWWKLKPGPPPPRPAERHQDDSRGLVLPGYKYLGPFNGLDKGEPVNEADAAALEHDKAYDRQLDSGDNPYLKYNHADAEFQERLKEDTSFGGNLGRAVFQAKKRVLEPLGLVEEPVKTAPGKKRPVEHSPAEPDSSSGTGKAGQQPARKRLNFGQTGDADSVPDPQPLGQPPAAPTSLGSTTMATGSGAPMADNNEGADGVGNSSGNWHCDSQWLGDRVITTSTRTWALPTYNNHLYKQISSQSGASNDNHYFGYSTPWGYFDFNRFHCHFSPRDWQRLINNNWGFRPKRLNFKLFNIQVKEVTQNDGTTTIANNLTSTVQVFTDSEYQLPYVLGSAHQGCLPPFPADVFMVPQYGYLTLNNGSQAVGRSSFYCLEYFPSQMLRTGNNFTFSYTFEDVPFHSSYAHSQSLDRLMNPLIDQYLYYLNRTQSNSGTLQQSRLLFSQAGPTSMSLQAKNWLPGPCYRQQRLSKQANDNNNSNFPWTAATKYHLNGRDSSVNPGPAMASHKDDEEKFFSMHGTLIFGKQGTNANDADLEHVMITDEEEIRTTNPVATEQYGNVSNNLQNSNTGPTTENVNHQGALPGMVWQDRDVYLQGPIWAKIPHTDGHFHPSPLMGGFGLKHPPPQIMIKNTPVPANPPTNFSAAKFASFITQYSTGQVSVEIEWELQKENSKRWNPEIQYTSNYNKSVNVDFTVDANGVYSEPRPIGTRYLTRNL

SEQ ID NO: 11354 - protein, 735 aa, Artificial Sequence
  source: /note="Description of Artificial Sequence: Synthetic polypeptide"
MAADGYLPDWLEDTLSEGIRQWWKLKPGPPPPRPAERHQDDSRGLVLPGYKYLGPFNGLDKGEPVNEADAAALEHDKAYDRQLDSGDNPYLKYNHADAEFQERLKEDTSFGGNLGRAVFQAKKRVLEPLGLVEEPVKTAPGKKRPVEHSPAEPDSSSGTGKAGQQPARKRLNFGQTGDADSVPDPQPLGQPPAAPTSLGSTTMATGSGAPMADNNEGADGVGNSSGNWHCDSQWLGDRVITTSTRTWALPTYNNHLYKQISSQSGASNDNHYFGYSTPWGYFDFNRFHCHFSPRDWQRLINNNWGFRPKRLNFKLFNIQVKEVTQNDGTTTIANNLTSTVQVFTDSEYQLPYVLGSAHQGCLPPFPAGVFMVPQYGYLTLNNGSQAVGRSSFYCLEYFPSQMLRTGNNFTFSYTFEDVPFHSSYAHSQSLDRLMNPLIDQYLYYLNRTQSNSGTLQQSRLLFSQAGPTSMSLQAKNWLPGPCCRQQRLSKQANDNNNSNFPWTAATKYHLNGRDSLVNPGPAMASHKDDEEKFFPMHGTLIFGKQGTNANDADLEHVMITDEEEIRTTNPVATEQYGNVSNNLQNSNTGPTTENVNHQGALPGMVWQDRDVYLQGPIWAKIPHTDGHFHPSPLMGGFGLKHPPPQIMIKNTPVPANPPTNFSAAKFASFITQYSTGQVSVEIEWELQKENSKRWNPEIQYTSNYNKSVNVDFTVDANGVYSEPRPIGTRYLTRNL

SEQ ID NO: 11355 - protein, 735 aa, Artificial Sequence
  source: /note="Description of Artificial Sequence: Synthetic polypeptide"
MAADGYLPDWLEDTLSEGIRQWWKLKPGPPPPRPAERHQDDSRGLVLPGYKYLGPFNGLDKGEPVNEADAAALEHDKAYDRQLDSGDNPYLKYNHADAEFQERLKEDTSFGGNLGRAVFQAKKRVLEPLGLVEEPVKTAPGKKRPVEHSPAEPDSSSGTGKAGQQPARKRLNFGQTGDADSVPDPQPPGQPPAAPTSLGSTTMATGSGAPMADNNEGADGVGNSSGNWHCDSQWLGDRVITTSTRTWALPTYNNHLYKQISSQSGASNDNHYFGYSTPWGYFDFNRFHCHFSPRDWQRLINNNWGFRPKRLNFKLFNIQVKEVTQNDGTTTIANNLTSTVQVFTDSEYQLPYVLGSAHQGCLPPFPADVFMVPQYGYLTLNNGSQAVGRSSFYCLEYFPSQMLRTGNNFTFSYTFEDVPFHSSYAHSQSLDRLMNPLIDQYLYYLNRTQSNSGTLQQSRLLFSQAGPTSMSLQAKNWLPGPCYRQQRLSKQANDNNNSNFPWTAATKYHLNGRDSLVNPGPAMASHKDDEEKFFPMHGTLIFGKQGTNANDADLEHVMITDEEEIRTTNPVATEQYGNVSNNLQNSNTGPTTENVNHQGALPGMVWQDRDVYLQGPIWAKIPHTDGHFHPSPLMGGFGLKHPPPQIMIKNTPVPANPPTNFSAAKFASFITQYSTGQVSVEIEWELQKENSKRWNPEIQYTSNYNKSVNVDFTVDANGVYSEPRPIGTRYLTRNL

SEQ ID NO: 11356 - protein, 735 aa, Artificial Sequence
  source: /note="Description of Artificial Sequence: Synthetic polypeptide"
MAADGYLPDWLEDTLSEGIRQWWKLKPGPPPPRPAERHQDDSRGLVLPGYKYLGPFNGLDKGEPVNEADAAALEHDKAYDRQLDSGDNPYLKYNHADAEFQERLKEDTSFGGNLGRAVFQAKKRVLEPLGLVEEPVKTAPGKKRPVEHSPAEPDSSSGTGKAGQQPARKRLNFGQTGDADSVPDPQPLGQPPAAPTSLGSTTMATGSGAPMADNNEGADGVGNSSGNWHCDSQWLGDRVITTSTRTWALPTYNNHHYKQISSQSGASNDNHYFGYSTPWGYFDFNRFHCHFSPRDWQRLINNNWGFRPKRLNFKLFNIQVKEVTQNDGTTTIANNLTSTVQVFTDSEYQLPYVLGSAHQGCLPPFPADVFMVPQYGYLTLNNGSQAVGRSSFYCLEYFPSQMLRTGNNFTFSYTFEDVPFHSSYAHSQSLDRLMNPLIDQYLYYLNRTQSNSGTLQQSRLLFSQAGPTSMSLQAKNWLPGPCYRQQRLSKQANDNNNSNFPWTAATKYHLNGRDSLVNPGPAMASHKDDEEKFFPMHGTLIFGKQGTNANDADLEHVMITDEEEIRTTNPVATEQYGNVSNNLQNSNTGPTTEDVNHQGALPGMVWQDRDVYLQGPIWAKIPHTDGHFHPSPLMGGFGLKHPPPQIMIKNTPVPANPPTNFSAAKFASFITQYSTGQVSVEIEWELQKENSKRWNPEIQYTSNYNKSVNVDFTVDANGVYSEPRPIGTRYLTRNL

SEQ ID NO: 11357 - protein, 735 aa, Artificial Sequence
  source: /note="Description of Artificial Sequence: Synthetic polypeptide"
MAADGYLPDWLEDTLSEGIRQWWKLKPGPPPPRPAERHQDDSRGLVLPGYKYLGPFNGLDKGEPVNEADAAALEHDKAYDRQLDSGDNPYLKYNHADAEFQERLKEDTSFGGNLGRAVFQAKKRVLEPLGLVEEPVKTAPGKKRPVEHSPAEPDSSSGTGKAGQQPARKRLNFGQTGDADSVPDPRPLGQPPAAPTSLGSTTMATGSGAPMADNNEGADGVGNSSGNWHCDSQWLGDRVITTSTRTWALPTYNNHLYKQISSQSGASNDNHYFGYSTPWGYFDFNRFHCHFSPRDWQRLINNNWGFRPKRLNFKLFNIQVKEVTQNDGTTTIANNLTSTVQVFTDSEYQLPYVLGSAHQGCLPPFPADVFMVPQYGYLTLNNGSQAVGRSSFYCLEYFPSQMLRTGNNFTFSYTFEDVPFHSSYAHSQSLDRLMNPLIDQYLYYLNRTQSNSGTLQQSRLLFSQAGPTSMSLQAKNWLPGPCYRQQRLSKQANDNNNSNFPWTAATKYHLNGRDSLVNPGPAMASHKDDEEKFFPMHGTLIFGKQGTNANDADLEHVMITDEEEIRTTDPVATEQYGNVSNNLQNSNTGPTTENVNHQGALPGMVWQDRDVYLQGPIWAKIPHTDGHFHPSPLMGGFGLKHPPPQIMIKNTPVPANPPTNFSAAKFASFITQYSTGQVSVEIEWELQKENSKRWNPEIQYTSNYNKSVNVDFTVDANGVYSEPRPIGTRYLTRNL

SEQ ID NO: 11358 - protein, 735 aa, Artificial Sequence
  source: /note="Description of Artificial Sequence: Synthetic polypeptide"
MAADGYLPDWLEDTLSEGIRQWWKLKPGPPPPRPAERHQDDSRGLVLPGYKYLGPFNGLDKGEPVNEADAAALEHDKAYDRQLDSGDNPYLKYNHADAEFQERLKEDTSFGGNLGRAVFQAKKRVLEPLGLVEEPVKTAPGKKRPVEHSPAEPDSSSGTGKAGQQPARKRLNFGQTGDADSVPDPQPLGQPPAAPTSLGSTTMATGSGAPMADNNEGADGVGNSSGNWHCDSQWLGDRVITTSTRTWALPTYNNHLYKQISSQSGASNDNHYFGYSTPWGYFDFNRFHCHFSPRDWQRLINNNWGFRPKRLNFKLFNIQVKEVTQNDGTTTIANNLTSTVQVFTDSEYQLPYVLGSAHQGCLPPFPADVFMVPQYGYLTLNNGSQAVGRSSFYCLEYFPSQMLRTGNNFTFSYTFEDVPFHSSYAHSQSLDRLMNPLIDQYLYYLNRTQSNSGTLQQSRLLFSQAGPTSMSLQAKNWLPGPCYRQQRLSKQANDNNNSNFPWTAATKYHLNGRDSLVNPGPAMASHKDDEEKFFPMHGTLIFGKQGTNANDADLEHVMITDEEEIRTTNPVATEQYGNVSNNLQNSNTGPTTGNVNHQGALPGMVWQDRDVYLQGPIWAKIPHTDGHFHPSPLMGGFGLKHPPPQIMIKNTPVPANPPTNFSAAKFASFITQYSTGQVSVEIEWELQKENSKRWNPEIQYTSNYNKSVNVDFTVDANGVYSEPRPIGTRYLTRNL

SEQ ID NO: 11359 - protein, 735 aa, Artificial Sequence
  source: /note="Description of Artificial Sequence: Synthetic polypeptide"
MAADGYLPDWLEDTLSEGIRQWWKLKPGPPPPRPAERHQDDSRGLVLPGYKYLGPFNGLDKGEPVNEADAAALEHDKAYDRQLDSGDNPYLKYNHADAEFQERLKEDTSFGGNLGRAVFQAKKRVLEPLGLVEEPVKTAPGKKRPVEHSPAEPDSSSGTGKAGQQPARKRLNFGQTGDADSVPDPQPLGQPPAAPTSLGSTTMATGSGAPMADNNEGADGVGNSSGDWHCDSQWLGDRVITTSTRTWALPTYNNHLYKQISSQSGASNDNHYFGYSTPWGYFDFNRFHCHFSPRDWQRLINNNWGFRPKRLNFKLFNIQVKEVTQNDGTTTIANNLTSTVQVFTDSEYQLPYVLGSAHQGCLPPFPADVFMVPQYGYLTLNNGSQAVGRSSFYCLEYFPSQMLRTGNNFTFSYTFEDVPFHSSYAHSQSLDRLMNPLIDQYLYYLNRTQSNSGTLQQSRLLFSQAGPTSMSLQAKNWLPGPCYRQQRLSKQANDNNNSNFPWTAATKYHLNGRDSLVNPGPAMASHKDDEEKFFPMHGTLIFGKQGTNANDADLEHVMITDEEEIRTTNPVATEQYGNVSNSLQNSNTGPTTENVNHQGALPGMVWQDRDVYLQGPIWAKIPHTDGHFHPSPLMGGFGLKHPPPQIMIKNTPVPANPPTNFSAAKFASFITQYSTGQVSVEIEWELQKENSKRWNPEIQYTSNYNKSVNVDFTVDANGVYSEPRPIGTRYLTRNL

SEQ ID NO: 11360 - protein, 735 aa, Artificial Sequence
  source: /note="Description of Artificial Sequence: Synthetic polypeptide"
MAADGYLPDWLEDILSEGIRQWWKLKPGPPPPKPAERHKDDSRGLVLPGYKYLGPFNGLDKGEPVNEADAAALEHDKAYDRQLDSGDNPYLKYNHADAEFQERLKEDTSFGGNLGRAVFQAKKRVLEPLGLVEEPVKTTPGKKRPVEQSPAEPDSSSGTGKAGNQPARKRLNFGQTGDADSVPDPQPLGQPPAAPSGLGSTTMATGSGAPMADNNEGADGVGNSSGNWHCDSQWLGDRVITTSTRTWALPTYNNHLYKQISSQSGASNDNHYFGYSTPWGYFDFNRFHCHFSPRDWQRLINNNWGFRPKRLNFKLFNIQVKEVTQNDGTTTIANNLTSTVQVFTDSEYQLPYVLGSAHQGCLPPFPADVFMVPQYGYLTLNNGSQAVGRSSFYCLEYFPSQMLRTGNNFTFSYTFEDVPFHSSYAHSQSLDRLMNPLIDQYLYYLNKTQSNSGTLQQSRLLFSQAGPTSMSLQAKNWLPGPCYRQQRLSKQANDNNNSNFPWTAATKYHLNGRDSLVNPGPAMASHKDDEEKFFPMHGTLIFGKQGTNANDADLDNVMITDEEEIRTTNPVATEQYGTVSNNLQNSNTGPTTGTVNHQGALPGMVWQDRDVYLQGPIWAKIPHTDGHFHPSPLMGGFGLKHPPPQIMIKNTPVPANPPTNFSSAKFASFITQYSTGQVSVEIEWELQKENSKRWNPEIQYTSNYNKSVNVDFTVDTNGVYSEPRPIGTRYLTRNL

SEQ ID NO: 11361 - protein, 735 aa, Artificial Sequence
  source: /note="Description of Artificial Sequence: Synthetic polypeptide"
MAADGYLPDWLEDILSEGIRQWWKLKPGPPPPKPAERHKDDSRGLVLPGYKYLGPFNGLDKGEPVNEADAAALEHDKAYDRQLDSGDNPYLKYNHADAEFQERLKEDTSFGGNLGRAVFQAKKRVLEPLGLVEEPVKTAPGKKRPVEQSPAEPDSSSGTGKAGNQPARKRLNFGQTGDADSVPDPQPLGQPPAAPSGLGSTTMATGSGAPMADNNEGADGVGNSSGNWHCDSQWLGDRVITTSTRTWALPTYNNHLYKQISSQSGASNDNHYFGYSTPWGYFDFNRFHCHFSPRDWQRLINNNWGFRPKRLNFKLFNIQVKEVTQNDGTTTIANNLTSTVQVFTDSEYQLPYVLGSAHQGCLPPFPADVFMVPQYGYLTLNNGSQAVGRSSFYCLEYFPSQMLRTGNNFTFSYTFEDVPFHSSYAHSQSLDRLMNPLIDQYLYYLNKTQSNSGTLQQSRLLFSQAGPTSMSLQAKNWLPGPCYRQQRLSKQANDNNNSNFPWTAATKYHLNGRDSLVNPGPAMASHKDDEEKFFPMHGTLIFGKQGTNANDADLDNVMITDEEEIRTTNPVATEQYGTVSNNLQNSNTGPTTGTVNHQGALPGMVWQDRDVYLQGPIWAKIPHTDGHFHPSPLMGGFGLKHPPPQIMIKNTPVPANPPTNFSSAKFASFITQYSTGQVSVEIEWELQKENSKRWNPEIQYTSNYNKSVNVDFTVDTNGVYSEPRPIGTRYLTRNL

SEQ ID NO: 11362 - protein, 735 aa, Artificial Sequence
  source: /note="Description of Artificial Sequence: Synthetic polypeptide"
MAADGYLPDWLEDILSEGIRQWWKLKPGPPPPKPAERHKDDSRGLVLPGYKYLGPFNGLDKGEPVNEADAAALEHDKAYDRQLDSGDNPYLKYNHADAEFQERLKEDTSFGGNLGRAVFQAKKRVLEPLGLVEEPVKTAPGKKRPVEQSPAEPDSSSGTGKAGNQPARKRLNFGQTGDADSVPDPQPLGQPPAAPSGLGSTTMATGSGAPMADNNEGADGVGNSSGNWHCDSQWLGDRVITTSTRTWALPTYNNHLYKQISSQSGASNDNHYFGYSTPWGYFDFNRFHCHFSPRDWQRLINNNWGFRPKRLNFKLFNIQVKEVTQNDGTTTIANNLTSTVQVFTDSEYQLPYVLGSAHQGCLPPFPADVFMVPQYGYLTLNNGSQAVGRSSFYCLEYFPSQMLRTGNNFTFSYTFEDVPFHSGYAHSQSLDRLMNPLIDQYLYYLNKTQSNSGTLQQSRLLFSQAGPTSMSLQAKNWLPGPCYRQQRLSKQANDNNNSNFPWTAATKYHLNGRDSLVNPGPAMASHKDDEEKFFPMHGTLIFGKQGTNANDADLDNVMITDEEEIRTTNPVATEQYGTVSNNLQNSNTGPTTGTVNHQGALPGMVWQDRDVYLQGPIWAKIPHTDGHFHPSPLMGGFGLKHPPPQIMIKNTPVPANPPTNFSSAKFASFITQYSTGQVSVEIEWELQKENSKRWNPEIQYTSNYNKSVNVDFTVDTNGVYSEPRPIGTRYLTRNL

SEQ ID NO: 11363 - protein, 734 aa, Artificial Sequence
  source: /note="Description of Artificial Sequence: Synthetic polypeptide"
MAADGYLPDWLEDILSEGIRQWWKLKPGPPPKPAERHKDDSRGLVLPGYKYLGPFNGLDKGEPVNEADAAALEHDKAYDRQLDSGDNPYLKYNHADAEFQERLKEDTSFGGNLGRAVFQAKKRVLEPLGLVEEPVKTAPGKKRPVEQSPAEPDSSSGTGKAGNQPARKRLNFGQTGDADSVPDPQPLGQPPAAPSGLGSTTMATGSGAPMADNNEGADGVGNSSGNWHCDSQWLGDRVITTSTRTWALPTYNNHLYKQISSQSGASNDNHYFGYSTPWGYFDFNRFHCHFSPRDWQRLINNNWGFRPKRLNFKLFNIQVKEVTQNDGTTTIANNLTSTVQVFTDSEYQLPYVLGSAHQGCLPPFPADVFMVPQYGYLTLNNGSQAVGRSSFYCLEYFPSQMLRTGNNFTFSYTFEDVPFHSSYAHSQSLDRLMNPLIDQYLYYLNKTQSNSGTLQQSRLLFSQAGPTSMSLQAKNWLPGPCYRQQRLSKQANDNNNSNFPWTAATKYHLNGRDSLVNPGPAMASHKDDEEKFFPMHGTLIFGKQGTNANDADLDNVMITDEEEIRTTNPVATEQYGTVSNNLQNSNTGPTTGTVNHQGALPGMVWQDRDVYLQGPIWAKIPHTDGHFHPSPLMGGFGLKHPPPQIMIKNTPVPANPPTNFSSAKFASFITQYSTGQVSVEIEWELQKENSKRWNPEIQYTSNYNKSVNVDFTVDTNGVYSEPRPIGTRYLTRNL

SEQ ID NO: 11364 - protein, 735 aa, Artificial Sequence
  source: /note="Description of Artificial Sequence: Synthetic polypeptide"
MAADGYLPDWLEDTLSEGIRQWWKLKPGPPPPRPAERHQDDSRGLVLPGYKYLGPFNGLDKGEPVNEADAAALEHDKAYDRQLDSGDNPYLKYNHADAEFQERLKEDTSFGGNLGRAVFQAKKRVLEPLGLVEEPVKTAPGKKRPVEHSPAEPDSSSGTGKAGQQPARKRLNFGQTGDADSVPDPQPLGQPPAAPTSLGSTTMATGSGAPMADNNEGADGVGNSSGNWHCDSQWLGDRVITTSTRTWALPTYNNHLYKQISSQSGASNDNHYFGYSTPWGYFDFNRFHCHFSPRDWQRLINNNWGFRPKRLNFKLFNIQVKEVTQNDGTTTIANNLTSTVQVFTDSEYQLPYVLGSAHQGCLPPFPADVFMVPQYGYLTLNNGSQAVGHSSSYCLEYFPSQMLRTGNNFTFSYTFEDVPFHSSYAHSQSLDRLMNPLIDQYLYYLNRTQSNSGTLQQSRLLFSQAGPTSMSLQAKNWLPGPCYRQQRLSKQANDNNNSNFPWTAATKYHLNGRDSLVNPGPAMASHKDDEEKFFPMHGTLIFGKQGTNANDADLEHVMITDEEEIRTTNPVATEQYGNVSNNLQNSNTGPTTENVNHQGALPGMVWQDRDVYLQGPIWAKIPHTDGHFHPSPLMGGFGLKHPPPQIMIKNTPVPANPPTNFSAAKFASFITQYSTGQVSVEIEWELQKENSKRWNPEIQYTSNYNKSVNVDFTVDTNGVYSEPRPIGTRYLTRNL

SEQ ID NO: 11365 - protein, 735 aa, Artificial Sequence
  source: /note="Description of Artificial Sequence: Synthetic polypeptide"
MAADGYLPDWLEDTLSEGIRQWWKLKPGPPPPKPAERHQDDSRGLVLPGHKYLGPFNGLDKGEPVNEADAAALEHDKAYDRQLDSGDNPYLKYNHADAEFQERLKEDTSFGGNLGRAVFQAKKRVLEPLGLVEEPVKTAPGKKRPVEHSPAEPDSSSGTGKAGQQPARKRLNFGQTGDADSVPDPQPLGQPPAAPTSLGSTTMATGSGAPMADNNEGADGVGNSSGNWHCDSQWLGDRVITTSTRTWALPTYNNHLYKQISSQSGASNDNHYFGYSTPWGYFDFNRFHCHFSPRDWQRLINNNWGFRPKRLNFKLFNIQVKEVTQNDGTTTIANNLTSTVQVFTDSEYQLPYVLGSAHQGCLPPFPADVFMVPQYGYLTLNNGSQAVGRSSFYCLEYFPSQMLRTGNNFTFSYTFEDVPFHSSYAHSQSLDRLMNPLIDQYLYYLNRTQSNSGTLQQSRLLFSQAGPTSMSLQAKNWLPGPCYRQQRLSKQANDNNNSNFPWTAATKYHLNGRDSLVNPGPAMASHKDDEEKFFPMHGTLIFGKQGTNANDADLEHVMITDEEEIRTTNPVATEQYGNVSNNLQNSNTGPTTENVNHQGALPGMVWQDRDVYLQGPIWAKIPHTDGHFHPSPLMGGFGLKHPPPQIMIKNTPVPANPPTNFSAAKFASFITQYSTGQVSVEIEWELQKENSKRWNPEIQYTSNYNKSVNVDFTVDANGVYSEPRPIGTRYLTRNL

SEQ ID NO: 11366 - protein, 735 aa, Artificial Sequence
  source: /note="Description of Artificial Sequence: Synthetic polypeptide"
MAADGYLPDWLEDTLSEGIRQWWKLKPGPPPPKPAERHKDDSRGLVLPGYKYLGPFNGLDKGEPVNEADAAALEHDKAYDRQLDSGDNPYLKYNHADAEFQERLKEDTSFGGNLGRAVFQAKKRVLEPLGLVEEPVKTAPGKKRPVEHSPAEPDSSSGTGKAGQQPARKRLNFGQTGDADSVPDPQPLGQPPAAPTSLGSTTMATGSGAPMADNNEGADGVGNSSGNWHCDSQWLGDRVITTSTRTWALPTYNNHLYKQISSQSGASNDNHYFGYSTPWGYFDFNRFHCHFSPRDWQRLINNNWGFRPKRLNFKLFNIQVKEVTQNDGTTTIANNLTSTVQVFTDSEYQLPYVLGSAHQGCLPPFPADVFMVPQYGYLTLNNGSQAVGRSSFYCLEYFPSQMLRTGNNFTFSYTFEDVPFHSSYAHSQSLDRLMNPLIDQYLYYLNRTQSNSGTLQQSRLLFSQAGPTSMSLQAKNWLPGPCYRQQRLSKQANDNNNSNFPWTAATKYHLNGRDSLVNPGPAMASHKDDEEKFFPMHGTLIFGKQGTNANDADLEHVMITDEEEIRTTNPVATEQYGNVSNNLQNSNTGPTTENVNHQGALPGMVWQDRDVYLQGPIWAKIPHTDGHFHPSPLMGGFGLKHPPPQIMIKNTPVPANPPTNFSAAKFASFITQYSTGQVSVEIEWELQKENSKRWNPEIQYTSNYNKSVNVDFTVDANGVYSEPRPIGTRYLTRNL

SEQ ID NO: 11367 - protein, 735 aa, Artificial Sequence
  source: /note="Description of Artificial Sequence: Synthetic polypeptide"
MAADGYLPDWLEDTLSEGIRQWWKLKPGPPPPRPAERHQDDSRGLVLPGYKYLGPFNGLDKGEPVNEADAAALEHDKAYDRQLDSGDNPYLKYNHADAEFQERLKEDTSFGGNLGRAVFQAKKRVLEPLGLVEEPVKTAPGKKRPVEHSPAEPDSSSGTGKAGQQPARKRLNFGQTGDADSVPDPQPLGQPPAAPTSLGSTTMATGSGAPMADNNEGADGVGNSSGNWHCDSQWLGDRVITTSTRTWALPTYNNHLYKQISSQSGASNDNHYFGYSTPWGYFDFNRFHCHFSPRDWQRLINNNWGFRPKRLNFKLFNIQVKEVTQNDGTTTIANNLTSTVQVFTDSEYQLPYVLGSAHQGCLPPFPADVFMVPQYGYLTLNNGSQAVGRSSSYCLEYFPSQMLRTGNNFTFSYTFEDVPFHSSYAHSQSLDRLMNPLIDQYLYYLNRTQSNSGTLQQSRLLFSQAGPTSMSLQAKNWLPGPCYRQQRLSKQANDNNNSNFPWTAATKYHLNGRDSLVNPGPAMASHKDDEEKFFPMHGTLIFGKQGTNANDADLEHVMITDEEEIRTTNPVATEQYGNVSNNLQNSNTGPTTENVNHQGALPGMVWQDRDVYLQGPIWAKIPHTDGHFHPSPLMGGFGLKHPPPQIMIKNTPVPANPPTNFSAAKFASFITQYSTGQVSVEIEWELQKENSKRWNPEIQYTSNYNKSVNVDFTVDANGVYSEPRPIGTRYLTRNL

SEQ ID NO: 11368 - protein, 735 aa, Artificial Sequence
  source: /note="Description of Artificial Sequence: Synthetic polypeptide"
MAADGYLPDWLEDTLSEGIRQWWKLKPGPPPPRPAERHQDDSRGLVLPGYKYLGPFNGLDKGEPVNEADAAALEHDKAYDRQLDSGDNPYLKYNHADAEFQERLKEDTSFGGNLGRAVFQAKKRVLEPLGLVEEPVKTAPGKKRPVEHSPAEPDSSSGTGKAGQQPARKRLNFGQTGDADSVPDPQPLGQPPAAPTSLGSTTMATGSGAPMADNNEGADGVGNSSGNWHCDSQWLGDRVITTSTRTWALPTYNNHLYKQISSQSGASNDNHYFGYSTPWGYFDFNRFHCHFSPRDWQRLINNNWGFRPKRLNFKLFNIQVKEVTQNDGTTTIANNLTSTVQVFTDSEYQLPYVLGSAHQGCLPPFPADVFMVPQYGYLTLNNGSQAVGRSSFYCLEYFPSQMLRTGNNFTFSYTFEDVPFHSSYAHSQSLDRLMNPLIDQYLYYPNRTQSNSGTLQQSRLLFSQAGPTSMSLQAKNWLPGPCYRQQRLSKQANDNNNSNFPWTAATKYHLNGRDSLVNPGPAMASHKDDEEKFFPMHGTLIFGKQGTNANDADLEHVMITDEEEIRTTNPVATEQYGNVSNNLQNSNTGPTTENVNHQGALPGMVWQDRDVYLQGPIWAKIPHTDGHFHPSPLMGGFGLKHPPPQIMIKNTPVPANPPTNFSAAKFASFITQYSTGQVSVEIEWELQKENSKRWNPEIQYTSNYNKSVNVDFTVDANGVYSEPRPIGTRYLTRNL

SEQ ID NO: 11369 - protein, 735 aa, Artificial Sequence
  source: /note="Description of Artificial Sequence: Synthetic polypeptide"
MAADGYLPDWLEDTLSEGIRQWWKLKPGPPPPRPAERHQDDSRGLVLPGYKYLGPFNGLDKGEPVNEADAAALEHDKAYDRQLDSGDNPYLKYNHADAEFQERLKEDTSFGGNLGRAVFQAKKRVLEPLGLVEEPVKTAPGKKRPVEHSPAEPDSSSGTGKAGQQPARKRLNFGQTGDADSVPDPQPLGQPPAAPTSLGSTTMATGSGAPMADNNEGADGVGNSSGNWHCDSQWLGDRVITTSTRTWALPTYNNHLYKQISSQSGASNDNHYFGYSTPWGYFDFNRFHCHFSPRDWQRLINNNWGFRPKRLNFKLFNIQVKEVTQNDGTTTIANNLTSTVQVFTDSEYQLPYVLGSAHQGCLPPFPADVFMVPQYGYLTLNNGSQAVGRSSFYCLEYFPSQMLRTGNNFTFSYTFEDVPFHSSYAHSQSLDRLMNPLIDQYLYYLNKTQSNSGTLQQSRLLFSQAGPTSMSLQAKNWLPGPCYRQQRLSKQANDNNNSNFPWTAATKYHLNGRDSLVNPGPAMASHKDDEEKFFPMHGTLIFGKQGTNANDADLDNVMITDEEEIRTTNPVATEQYGTVSNNLQNSNTGPTTGTVNHQGALPGMVWQDRDVYLQGPIWAKIPHTDGHFHPSPLMGGFGLKHPPPQIMIKNTPVPANPPTNFSSAKFASFITQYSTGQVSVEIEWELQKENSKRWNPEIQYTSNYNKSVNVDFTVDTNGVYSEPRPIGTRYLTRNL

SEQ ID NO: 11370 - protein, 735 aa, Artificial Sequence
  source: /note="Description of Artificial Sequence: Synthetic polypeptide"
MAADGYLPDWLEDTLSEGIRQWWKLKPGPPPPKPAERHQDDSRGLVLPGHKYLGPFNGLDKGEPVNEADAAALEHDKAYDRQLDSGDNPYLKYNHADAEFQERLKEDTSFGGNLGRAVFQAKKRVLEPLGLVEEPVKTAPGKKRPVEHSPAEPDSSSGTGKAGQQPARKRLNFGQTGDADSVPDPQPLGQPPAAPTSLGSTTMATGSGAPMADNNEGADGVGNSSGNWHCDSQWLGDRVITTSTRTWALPTYNNHLYKQISSQSGASNDNHYFGYSTPWGYFDFNRFHCHFSPRDWQRLINNNWGFRPKRLNFKLFNIQVKEVTQNDGTTTIANNLTSTVQVFTDSEYQLPYVLGSAHQGCLPPFPADVFMVPQYGYLTLNNGSQAVGHSSSYCLEYFPSQMLRTGNNFTFSYTFEDVPFHSSYAHSQSLDRLMNPLIDQYLYYLNRTQSNSGTLQQSRLLFSQAGPTSMSLQAKNWLPGPCYRQQRLSKQANDNNNSNFPWTAATKYHLNGRDSLVNPGPAMASHKDDEEKFFPMHGTLIFGKQGTNANDADLEHVMITDEEEIRTTNPVATEQYGNVSNNLQNSNTGPTTENVNHQGALPGMVWQDRDVYLQGPIWAKIPHTDGHFHPSPLMGGFGLKHPPPQIMIKNTPVPANPPTNFSAAKFASFITQYSTGQVSVEIEWELQKENSKRWNPEIQYTSNYNKSVNVDFTVDTNGVYSEPRPIGTRYLTRNL

SEQ ID NO: 11371 - protein, 735 aa, Artificial Sequence
  source: /note="Description of Artificial Sequence: Synthetic polypeptide"
MAADGYLPDWLEDTLSEGIRQWWKLKPGPPPPRPAERHQDDSRGLVLPGYKYLGPFNGLDKGEPVNEVDAAALEHDKAYDRQLDSGDNPYLKYNHADAEFQERLKEDTSFGGNLGRAVFQAKKRVLEPLGLVEEPVKTAPGKKRPVEHSPAEPDSSSGTGKAGQQPARKRLNFGQTGDADSVPDPQPLGQPPAAPTSLGSTTMATGSGAPMADNNEGADGVGNSSGNWHCDSQWLGDRVITTSTRTWALPTYNNHLYKQISSQSGASNDNHYFGYSTPWGYFDFNRFHCHFSPRDWQRLINNNWGFRPKRLNFKLFNIQVKEVTQSDGTTTIANNLTSTVQVFTDSEYQLPYVLGSAHQGCLPPFPADVFMVPQYGYLTLNNGSQAVGRSSFYCLEYFPSQMLRTGNNFTFSYTFEDVPFHSSYAHSQSLDRLMNPLIDQYLYYLNRTQSNSGTLQQSRLLFSQAGPTSMSLQAKNWLPGPCYRQQRLSKQANDNNNSNFPWTAATKYHLNGRDSLVNPGPAMASHKDDEEKFFPMHGTLIFGKQGTNANDADLEHVMITDEEEIRTTNPVATEQYGNVSNNLQNSNTGPTTENVNHQGALPGMVWQDRDVYLQGPIWAKIPHTDGHFHPSPLMGGFGLKHPPPQIMIKNTPVPANPPTNFSAAKFASFITQYSTGQVSVEIEWELQKENSKRWNPEIQYTSNYNKSVNVDFTVDANGVYSEPRPIGTRYLTRNL

SEQ ID NO: 11372 - protein, 735 aa, Artificial Sequence
  source: /note="Description of Artificial Sequence: Synthetic polypeptide"
MAADGYLPDWLEDTLSEGIRQWWKLKPGPPPPRPAERHQDDSRGLVLPGYKYLGPFNGLDKGEPVNEADAAALEHDKAYDRQLDSGDNPYLKYNHADAEFQERLKEDTSFGGNLGRAVFQAKKRVLEPLGLVEEPVKTAPGKKRPVEHSPAEPDSSSGTGKAGQQPARKRLNFGQTGDADSVPDPQPLGQPPAAPTSLGSTTMATGSGAPMADNNEGADGVGNSSGNWHCDSQWLGDRVITTSTRTWALPTYNNHLYKQISSQSGASNDNHYFGYSTPWGYFDFNRFHCHFSPRDWQRLINNNWGFRPKRLNFKLFNIQVKEVTQNDGTTTIANNLTSTVQVFTDSEYQLPYVLGSAHQGCLPPFPADVFMVPQYGYLTLNNGSQAVGRSSFYCLEYFPSQMLRTGNNFTFSYTFEDVPFHSSYAHSQSLDRLMNPLIDQYLYYLNRTQSNSGTLQQSRLLFSQAGPTSMSLQAKNWLPGPCYRQQRLSKQANDNNNSNFPWTAATKYHLNGRDSLVNPGPAMASHKDDEEKFFPMHGTLIFGKQGTNANDADLEHVMITDEEEIRTTNPVATEQYGNVSNNLQNSNTGPTTENVNHQGALPGMVWQDRDVYLQGPIWAKIPHTDGHFHPSPLMGGFGLKHPPPQIMIKNTPVPANPPTNFSAAKFASFITQYSTGQVSVEIEWELQKENSKRWNPEIQYTSNYNKSVNVDFTVDTNGVYSEPRPIGTRYLTRNL

SEQ ID NO: 11373 - protein, 735 aa, Artificial Sequence
  source: /note="Description of Artificial Sequence: Synthetic polypeptide"
MAADGYLPDWLEDTLSEGIRQWWKLKPGPPPPKPAERHQDDSRGLVLPGHKYLGPFNGLDKGEPVNEADAAALEHDKAYDRQLDSGDNPYLKYNHADAEFQERLKEDTSFGGNLGRAVFQAKKRVLEPLGLVEEPVKTAPGKKRPVEHSPAEPDSSSGTGKAGQQPARKRLNFGQTGDADSVPDPQPLGQPPAAPTSLGSTTMATGSGAPMADNNEGADGVGNSSGNWHCDSQWLGDRVITTSTRTWALPTYNNHLYKQISSQSGASNDNHYFGYSTPWGYFDFNRFHCHFSPRDWQRLINNNWGFRPKRLNFKLFNIQVKEVTQNDGTTTIANNLTSTVQVFTDSEYQLPYVLGSAHQGCLPPFPADVFMVPQYGYLTLNNGSQAVGHSSSYCLEYFPSQMLRTGNNFTFSYTFEDVPFHSSYAHSQSLDRLMNPLIDQYLYYLNRTQSNSGTLQQSRLLFSQAGPTSMSLQAKNWLPGPCYRQQRLSKQANDNNNSNFPWTAATKYHLNGRDSLVNPGPAMASHKDDEEKFFPMHGTLIFGKQGTNANDADLEHVMITDEEEIRTTNPVATEQYGNVSNNLQNSNTGPTTENVNHQGALPGMVWQDRDVYLQGPIWAKIPHTDGHFHPSPLMGGFGLKHPPPQIMIKNTPVPANPPTNFSAAKFASFITQYSTGQVSVEIEWELQKENSKRWNPEIQYTSNYNKSVNVDFTVDANGVYSEPRPIGTRYLTRNL

SEQ ID NO: 11374 - protein, 735 aa, Artificial Sequence
  source: /note="Description of Artificial Sequence: Synthetic polypeptide"
MAADGYLPDWLEDTLSEGIRQWWKLKPGPPPPRPAERHQDDSRGLVLPGYKYLGPFNGLDKGEPVNEADAAALEHDKAYDRQLDSGDNPYLKYNHADAEFQERLKEDTSFGGNLGRAVFQAKKRVLEPLGLVEEPVKTAPGKKRPVEHSPAEPDSSSGTGKAGQQPARKRLNFGQTGDADSVPDPQPLGQPPAAPTSLGSTTMATGSGAPMADNNEGADGVGNSSGNWHCDSQWLGDRVITTSTRTWALPTYNNHLYKQISSQSGASNDNHYFGYSTPWGYFDFNRFHCHFSPRDWQRLINNNWGFRPKRLNFKLFNIQVKEVTQNDGTTTIANNLTSTVQVFTDSEYQLPYVLGSAHQGCLPPFPADVFMVPQYGYLTLNNGSQAVGRSSFYCLEYFPSQMLRTGNNFTFSYTFEDVPFHSSYAHSQSLDRLMNPLIDQYLYYLNRTQSNSGTLQQSRLLFSQAGPTSMSLQAKNWLPGPCYRQQRLSKQANDNNNSNFPWTAATKYHLNGRDSLVNPGPAMASHKDDEEKFFPMHGTLIFGKQGTNANDADLEHVMITDEEEIRTTNPVATEQYGNVSNNLQNSNTGPTTENVNHQGALPGMVWQDRDVYLQGPIWAKIPHTDGHFHPSPLMGGFGLKHPPPQIMIKNTPVPANPPTNFSAAKFASFITQYSTGQASVEIEWELQKENSKRWNPEIQYTSNYNKSVNVDFTVDANGVYSEPRPIGTRYLTRNL

SEQ ID NO: 11375 - protein, 735 aa, Artificial Sequence
  source: /note="Description of Artificial Sequence: Synthetic polypeptide"
MAADGYLPDWLEDTLSEGIRQWWKLKPGPPPPKPAGRHKDDSRGLVLPGYKYLGPFNGLDKGEPVNEADAAALEHDKAYDRQLDSGDNPYLKYNHAGAEFQERLKEDTSFGGNLGRAVFQAKKRVLEPLGLVEEPVKTAPGKKRPVEHSPVEPDSSSGTGKAGQQPARKRLNFGQTGDADSVPDPQPLGQPPAAPTSLGSTTMATGSGAPMADNNEGADGVGNSSGNWHCDSQWLGDRVITTSTRTWALPTYNNHLYKQISSQSGAANDNHYFGYSTPWGYFDFNRFHCHFSPRDWQRLINNNWGFRPKRLNFKLFNIQVKEVTQNDGTTTIANNLTSTVQVFTDSEYQLPYVLGSAHQGCLPPFPADVFMVPQYGYLTLNNGSQAVGRSSFYCLEYFPSQMLRTGNNFTFSYTFEDVPFHSSYAHSQSLDRLMNPLIDQYLYYLNRTQSNSGTLQQSRLLFSQAGPTSMSLQAKNWLPGPCYRQQRLSKQANDNNNSNFPWTAATKYHLNGRDSLVNPGPAMASHKDDEEKFFPMHGTLIFGKQGTNANDADLEHVMITDEEEIRTTNPVATEQYGNVSNNLQNSNTGPTTENVNHQGALPGMVWQDRDVYLQGPIWAKIPHTDGHFHPSPLMGGFGLKHPPPQIMIKNTPVPANPPTNFSAAKFASFITQYSTGQVSVEIEWELQKENSKRWNPEIQYTSNYNKSVNVDFTVDANGVYSEPRPIGTRYLTRNL

SEQ ID NO: 11376 - protein, 735 aa, Artificial Sequence
  source: /note="Description of Artificial Sequence: Synthetic polypeptide"
MAADGYLPDWLEDTLSEGIRQWWKLKPGPPPPRPAERHQDDSRGLVLPGYKYLGPFNGLDKGEPVNEADAAALEHDKAYDRQLDSGDNPYLKYNHADAEFQERLKEDTSFGGNLGRAVFQAKKRVLEPLGLVEEPVKTAPGKKRPVEHSPAEPDSSSGTGKAGQQPARKRLNFGQTGDADSVPDPQPLGQPPAAPTSLGSTTMATGSGAPMADNNEGADGVGNSSGNWHCDSQWLGDRVITTSTRTWALPTYNNHLYKQISSQSGASNDNHYFGYSTPWGYFDFNRFHCHFSPRDWQRLINNNWGFRPKRLNFKLFNIQVKEVTQNDGTTTIANNLTSTVQVFTDSEYQLPYVLGSAHQGCLPPFPADVFMVPQYGYLTLNNGSQAVGRSSFYCLEYFPSQMLRTGNNFTFSYTFEDVPFHSSYAHSQSLDRLMNPLIDQYLYYLNRTQSNSGTLQQSRLLFSQAGPTSMSLQAKNWLPGPCYRQQRLSKQANDNNNSNFPWTAATKYHLNGRDSLVNPGPAMASHKDDEEKFFPMHGTLIFGKQGTNANDADLEHVMITDEEEIRTTNPVATEQYGNVSNNLQNSNTGPTTENVNHQGALPGMVWQDRDVYLQGPIWAKIPHTDGHFHPSPLMGGFGLKHPPPQIMIKNTPVPAYPPTNFSAAKFASFITQYSTRQVSVEIEWELQKENSKRWNPEIQYTSNYNKSVNVDFTVDANGVYSEPRPIGTRYLTRNL

SEQ ID NO: 11377 - protein, 735 aa, Artificial Sequence
  source: /note="Description of Artificial Sequence: Synthetic polypeptide"
MAADGYLPDWLEDTLSEGIRQWWKLKPGPPPPRPAERHQDDSRGLVLPGYKYLGPFNGLDKGEPVNEADAAALEHDKAYDRQLDSGDNPYLKYNHADAEFQERLKEDTSFGGNLGRAVFQAKKRVLEPLGLVEEPVKTAPGKKRPVEHSPAEPDSSSGTGKAGQQPARKRLNFGQTGDADSVPDPQPLGQPPAAPTSLGSTTMATGSGAPMADNNEGADGVGNSSGNWHCDSQWLGDRVITTSTRTWALPTYNNHLYKQISSQSGASNDNHYFGYSTPWGYFDFNRFHCHFSPRDWQRLINNNWGFRPKRLNFKLFNIQVKEVTQNDGTTTIANNLTSTVQVFTDSEYQLPYVLGSAHQGCLPPFPADVFMVPQYGYLTLNNGSQAVGRSSFYCLEYFPSQMLRTGNNFTFSYTFEDVPFHSSYAHSQSLDRLMNPLIDQYLYYLNRTQSNSGTLQQSRLLFSQAGPTSMSLQAKNWLPGPCYRQQRLSKQANDNNNSNFPWTAATKYHLNGRDSLVNPGPAMASHKDDEEKFFPMHGTLIFGKQGTNANDADLDNVMITDEEEIRTTNPVATEQYGTVSNNLQNSNTGPTTGTVNHQGALPGMVWQDRDVYLQGPIWAKIPHTDGHFHPSPLMGGFGLKHPPPQIMIKNTPVPANPPTNFSSAKFASFITQYSTGQVSVEIEWELQKENSKRWNPEIQYTSNYNKSVNVDFTVDTNGVYSEPRPIGTRYLTRNL

SEQ ID NO: 11378 - protein, 735 aa, Artificial Sequence
  source: /note="Description of Artificial Sequence: Synthetic polypeptide"
MAADGYLPDWLEDILSEGIRQWWKLKPGPPPPKPAERHKDDSRGLVLPGYKYLGPFNGLDKGEPVNEADAAALEHDKAYDRQLDSGDNPYLKYNHADAEFQERLKEDTSFGGNLGRAVFQAKKRVLEPLGLVEEPVKTAPGKKRPVEQSPAEPDSSSGTGKAGNQPARKRLNFGQTGDADSVPDPQPLGQPPAAPSGLGSTTMATGSGAPMADNNEGADGVGNSSGNWHCDSQWLGDRVITTSTRTWALPTYNNHLYKQISSQSGAANDNHYFGYSTPWGYFDFNRFHCHFSPRDWQRLINNNWGFRPKRLNFKLFNIQVKEVTQNDGTTTIANNLTSTVQVFTDSEYQLPYVLGSAHQGCLPPFPADVFMVPQYGYLTLNNGSQAVGRSSFYCLEYFPSQMLRTGNNFTFSYTFEDVPFHSSYAHSQSLDRLMNPLIDQYLYYLNKTQSNSGTLQQSRLLFSQAGPTSMSLQAKNWLPGPCYRQQRLSKQANDNNNSNFPWTAATKYHLNGRDSLVNPGPAMASHKDDEEKFFPMHGTLIFGKQGTNANDADLDNVMITDEEEIRTTNPVATEQYGTVSNNLQNSNTGPTTGTVNHQGALPGMVWQDRDVYLQGPIWAKIPHTDGHFHPSPLMGGFGLKHPPPQIMIKNTPVPANPPTNFSSAKFASFITQYSTGQVSVEIEWELQKENSKRWNPEIQYTSNYNKSVNVDFTVDTNGVYSEPRPIGTRYLTRNL

SEQ ID NO: 11379 - protein, 735 aa, Artificial Sequence
  source: /note="Description of Artificial Sequence: Synthetic polypeptide"
MAADGYLPDWLEDTLSEGIRQWWKLKPGPPPPRPAERHQDDSRGLVLPGYKYLGPFNGLDKGEPVNEADAAALEHDKAYDRQLDSGDNPYLKYNHAGAEFQERLKEDTSFGGNLGRAVFQAKKRVLEPLGLVEEPVKTAPGKKRPVEHSPVEPDSSSGTGKAGQQPARKRLNFGQTGDADSVPDPQPLGQPPAAPTSLGSTTMATGSGAPMADNNEGADGVGNSSGNWHCDSQWLGDRVITTSTRTWALPTYNNHLYKQISSQSGAANDNHYFGYSTPWGYFDFNRFHCHFSPRDWQRLINNNWGFRPKRLNFKLFNIQVKEVTQNDGTTTIANNLTSTVPVFTDSEYQLPYVLGSAHQGCLPPFPADVFMVPQYGYLTLNNGSQAVGRSSFYCLEYFPSQMLRTGNNFTFSYTFEDVPFHSSYAHSQSLDRLMNPLIDQYLYYLNKTQSNSGTLQQSRLLFSQAGPTSMSLQAKNWLPGPCYRQQRLSKQANDNNNSNFPWTAATKYHLNGRDSLVNPGPAMASHKDDEEKFFPMHGTLIFGKQGTNANDADLDNVMITDEEEIRTTNPVATEQYGTVSNNLQNSNTGPTTGTVNHQGALPGMVWQDRDVYLQGPIWAKIPHTDGHFHPSPLMGGFGLKHPPPQIMIKNTPVPANPPTNFSSAKFASFITQYSTGQVSVEIEWELQKENSKRWNPEIQYTSNYNKSVNVDFTVDTNGVYSEPRPIGTRYLTRNL

SEQ ID NO: 11380 - protein, 734 aa, Artificial Sequence
  source: /note="Description of Artificial Sequence: Synthetic polypeptide"
MAADGYLPDWLEDTLSEGIRQWWKLKPGPPPRPAERHQDDSRGLVLPGYKYLGPFNGLDKGEPVNEADAAALEHDKAYDRQLDSGDNPYLKYNHADAEFQERLKEDTSFGGNLGRAVFQAKKRVLEPLGLVEEPVKTAPGKKRPVEHSPAEPDSSSGTGKAGQQPARKRLNFGQTGDADSVPDPQPLGQPPAAPTSLGSTTMATGSGAPMADNNEGADGVGNSSGNWHCDSQWLGDRVITTSTRTWALPTYNNHLYKQISSQSGASNDNHYFGYSTPWGYFDFNRFHCHFSPRDWQRLINNNWGFRPKRLNFKLFNIQVKEVTQNDGTTTIANNLTSTVQVFTDSEYQLPYVLGSAHQGCLPPFPADVFMVPQYGYLTLNNGSQAVGRSSFYCLEYFPSQMLRTGNNFTFSYTFEDVPFHSSYAHSQSLDRLMNPLIDQYLYYLNRTQSNSGTLQQSRLLFSQAGPTSMSLQAKNWLPGPCYRQQRLSKQANDNNNSNFPWTAATKYHLNGRDSLVNPGPAMASHKDDEEKFFPMHGTLIFGKQGTNANDADLEHVMITDEEEIRTTNPVATEQYGNVSNNLQNSNTGPTTENVNHQGALPGMVWQDRDVYLQGPIWAKIPHTDGHFHPSPLMGGFGLKHPPPQIMIKNTPVPANPPTNFSAAKFASFITQYSTGQVSVEIEWELQKENSKRWNPEIQYTSNYNKSVNVDFTVDANGVYSEPRPIGTRYLTRNL

SEQ ID NO: 11381 - protein, 735 aa, Artificial Sequence
  source: /note="Description of Artificial Sequence: Synthetic polypeptide"
MAADGYLPDWLEDTLSEGIRQWWKLKPGPPPPKPAERHQDDSRGLVLPGHKYLGPFNGLDKGEPVNEADAAALEHDKAYDRQLDSGDNPYLKYNHADAEFQERLKEDTSFGGNLGRAVFQAKKRVLEPLGLVEEPVKTAPGKKRPVEHSPAEPDSSSGTGKAGQQPARKRLNFGQTGDADSVPDPQPLGQPPAAPTSLGSTTMATGSGAPMADNNEGADGVGNSSGNWHCDSQWLGDRVITTSTRTWALPTYNNHLYKQISSQSGASNDNHYFGYSTPWGYFDFNRFHCHFSPRDWQRLINNNWGFRPKRLNFKLFNIQVKEVTQNDGTTTIANNLTSTVQVFTDSEYQLPYVLGSAHQGCLPPFPADVFMVPQYGYLTLNNGSQAVGRSSFYCLEYFPSQMLRTGNNFTFSYTFEDVPFHSSYAHSQSLDRLMNPLIDQYLYYLNRTQSNSGTLQQSRLLFSQAGPTSMSLQAKNWLPGPCYRQQRLSKQANDNNNSNFPWTAATKYHLNGRDSLVNPGPAMASHKDDEEKFFPMHGTLIFGKQGTNANDADLEHVMITDEEEIRTTNPVATEQYGNVSNNLQNSNTGPTTENVNHQGALPGMVWQDRDVYLQGPIWAKIPHTDGHFHPSPLMGGFGLKHPPPQIMIKNTPVPANPPTNFSAAKFASFITQYSTGQVSVEIEWELQKENSKRWNPEIQYTSNYNKSVNVDFTVDTNGVYSEPRPIGTRYLTRNL

SEQ ID NO: 11382 - protein, 735 aa, Artificial Sequence
  source: /note="Description of Artificial Sequence: Synthetic polypeptide"
MAADGYLPDWLEDTLSEGIRQWWKLKPGPPPPRPAERHQDDSRGLVLPGYKYLGPFNGLDKGEPVNEADAAALEHDKAYDRQLDSGDNPYLKYNHADAEFQERLKEDTSFGGNLGRAVFQAKKRVLEPLGLVEEPVKTAPGKKRPVEHSPAEPDSSSGTGKAGQQPARKRLNFGQTGDADSVPDPQPLGQPPAAPTSLGSTTMATGSGAPMADNNEGADGVGNSSGNWHCDSQWLGDRVITTSTRTWALPTYNNHLYKQISSQSGASNDNHYFGYSTPWGYFDFNRFHCHFSPRDWQRLINNNWGFRPKRLNFKLFNIQVKEVTQNDGTTTIANNLTSTVQVFTDSEYQLPYVLGSAHQGCLPPFPADVFMVPQYGYLTLNNGSQAVGHSSSYCLEYFPSQMLRTGNNFTFSYTFEDVPFHSSYAHSQSLDRLMNPLIDQYLYYLNRTQSNSGTLQQSRLLFSQAGPTSMSLQAKNWLPGPCYRQQRLSKQANDNNNSNFPWTAATKYHLNGRDSLVNPGPAMASHKDDEEKFFPMHGTLIFGKQGTNANDADLEHVMITDEEEIRTTNPVATEQYGNVSNNLQNSNTGPTTENVNHQGALPGMVWQDRDVYLQGPIWAKIPHTDGHFHPSPLMGGFGLKHPPPQIMIKNTPVPANPPTNFSAAKFASFITQYSTGQVSVEIEWELQKENSKRWNPEIQYTSNYNKSVNVDFTVDANGVYSEPRPIGTRYLTRNL

SEQ ID NO: 11383 - protein, 735 aa, Artificial Sequence
  source: /note="Description of Artificial Sequence: Synthetic polypeptide"
MAADGYLPDWLEDTLSEGIRQWWKLKPGPPPPRPAERHQDDSRGLVLPGYKYLGPFNGLDKGEPVNEADAAALEHDKAYDRQLDSGDNPYLKYNHADAEFQERLKEDTSFGGNLGRAVFQAKKRVLEPLGLVEEPVKTAPGKKRPVEHSPAEPDSSSGTGKAGQQPARKRLNFGQTGDADSVPDPQPLGQPPAAPTSLGSTTMATGSGAPMADNNEGADGVGNSSGNWHCDSQWLGDRVITTSTRTRALPTYNNHLYKQISSQSGASNDNHYFGYSTPWGYFDFNRFHCHFSPRDWQRLTNNNWGFRPKRLNFKLFNIQVKEVTQNDGTTTIANNLTSTVQVFTDSEYQLPYVLGSAHQGCLPPFPADVFMVPQYGYLTLNNGSQAVGRSSFYCLEYFPSQMLRTGNNFTFSYTFEDVPFHSSYAHSQSLDRLMNPLIDQYLYYLNRTQSNSGTLQQSRLLFSQAGPTSMSLQAKNWLPGPCYRQQRLSKQANDNNNSNFPWTAATKYHLNGRDSLVNPGPAMASHKDDEEKFFPMHGTLIFGKQGTNANDADLEHVMITDEEEIRTTNPVATEQYGNVSNNLQNSNTGPTTENVNHQGALPGMVWQDRDVYLQGPIWAKIPHTDGHFHPSPLMGGFGLKHPPPQIMIKNTPVPANPPTNFSAAKFASFITQYSTGQVSVEIEWELQKENSKRWNPEIQYTSNYNKSVNVDFTVDANGVYSEPRPIGTRYLTRNL

SEQ ID NO: 11384 - protein, 735 aa, Artificial Sequence
  source: /note="Description of Artificial Sequence: Synthetic polypeptide"
MAADGYLPDWLEDTLSEGIRQWWKLKPGPPPPKPAERHKDDSRGLVLPGYKYLGPFNGLDKGEPVNEADAAALEHDKAYDRQLDSGDNPYLKYNHADAEFQERLKEDTSFGGNLARAVFQAKKRVLEPLGLVEEPVKTAPGKKRPVEHSPAGPDSSSGTGKSGQQPARKRLNFGQTGDADSVPDPQPLGQPPAAPSGLGTNTMASGSGAPMADNNEGADGVGNSSGNWHCDSTWMGDRVITTSTRTWALPTYNNHLYKQISSQSGAANDNHYFGYSTPWGYFDFNRFHCHFSPRDWQRLINNNWGFRPKRLNFKLFNIQVKEVTQNDGTTTIANNLTSTVQVFTDSEYQLPYVLGSAHQGCLPPFPADVFMVPQYGYLTLNNGSQAVGRSSFYCLEYFPSQMLRTGNNFTFSYTFEDVPFHSSYAHSQSLDRLMNPLIDQYLYYLNRTQSNSGTLQQSRLLFSQAGPTSMSLQAKNWLPGPCYRQQRLSKQANDNNNSNFPWTAATKYHLNGRDSLVNPGPAMASHKDDEEKFFPMHGTLIFGKQGTNANDADLEHVMITDEEEIRTTNPVATEQYGNVSNNLQNSNTGPTTENVNHQGALPGMVWQDRDVYLQGPIWAKIPHTDGHFHPSPLMGGFGLKHPPPQIMIKNTPVPANPPTNFSAAKFASFITQYSTGQVSVEIEWELQKENSKRWNPEIQYTSNYNKSVNVDFTVDANGVYSEPRPIGTRYLTRNL

SEQ ID NO: 11385 - protein, 734 aa, Artificial Sequence
  source: /note="Description of Artificial Sequence: Synthetic polypeptide"
MAADGYLPDWLEDTLSEGIRQWWKLKPGPPPPRPAERHQDDSRGLVLPGYKYLGPFNGLDKGEPVNEADAAALEHDKAYDRQLDSGDNPYLKYNHADAEFQERLKEDTSFGGNLGRAVFQAKKRVLEPLGLVEEPVKTAPGKKRPVEHSPAEPDSSSGTGKAGQQPARKRLNFGQTGDADSVPDPQPLGQPPAAPTSLGSTTMATGSGAPMADNNEGADGVGNSSGNWHCDSQWLGDRVITTSTRTWALPTYNNHLYKQISSQSGASNDNHYFGYSTPWGYFDFNRFHCHFSPRDWQRLINNNWGFRPKRLNFKLFNIQVKEVTQNDGTTTIANNLTSTVQVFTDSEYQLPYVLGSAHQGCLPPFPADVFMVPQYGYLTLNNGSQAVGRSSFYCLEYFPSQMLRTGNNFTFSYTFEDVPFHSSYAHSQSLDRLMNPLIDQYLYYLNRTQSNSGTLQQSRLLFSQAGPTSMSLQAKNWLPGPCYRQQRLSKQANDNNSNFPWTAATKYHLNGRDSLVNPGPAMASHKDDEEKFFPMHGTLIFGKQGTNANDADLEHVMITDEEEIRTTNPVATEQYGNVSNNLQNSNTGPTTENVNHQGALPGMVWQDRDVYLQGPIWAKIPHTDGHFHPSPLMGGFGLKHPPPQIMIKNTPVPANPPTNFSAAKFASFITQYSTGQVSVEIEWELQKENSKRWNPEIQYTSNYNKSVNVDFTVDANGVYSEPRPIGTRYLTRNL

SEQ ID NO: 11386 - protein, 735 aa, Artificial Sequence
  source: /note="Description of Artificial Sequence: Synthetic polypeptide"
MAADGYLPDWLEDTLSEGIRQWWKLKPGPPPPKPAERHKDDSRGLVLPGYKYLGPFNGLDKGEPVNEADAAALEHDKAYDRQLDSGDNPYLKYNHADAEFQERLKEDTSFGGNLARAVFQAKKRVLEPLGLVEEPVKTAPGKKRPVEHSPAGPDSSSGTGKSGQQPARKRLNFGQTGDADSVPDPQPLGQPPAAPTSLGSTTMATGSGAPMADNNEGADGVGNSSGNWHCDSQWLGDRVITTSTRTWALPTYNNHLYKQISSQSGASNDNHYFGYSTPWGYFDFNRFHCHFSPRDWQRLINNNWGFRPKRLNFKLFNIQVKEVTQNDGTTTIANNLTSTVQVFTDSEYQLPYVLGSAHQGCLPPFPADVFMVPQYGYLTLNNGSQAVGRSSFYCLEYFPSQMLRTGNNFTFSYTFEDVPFHSSYAHSQSLDRLMNPLIDQYLYYLNRTQSNSGTLQQSRLLFSQAGPTSMSLQAKNWLPGPCYRQQRLSKQANDNNNSNFPWTAATKYHLNGRDSLVNPGPAMASHKDDEEKFFPMHGTLIFGKQGTNANDADLEHVMITDEEEIRTTNPVATEQYGNVSNNLQNSNTGPTTENVNHQGALPGMVWQDRDVYLQGPIWAKIPHTDGHFHPSPLMGGFGLKHPPPQIMIKNTPVPANPPTNFSAAKFASFITQYSTGQVSVEIEWELQKENSKRWNPEIQYTSNYNKSVNVDFTVDANGVYSEPRPIGTRYLTRNL

SEQ ID NO: 11387 - protein, 735 aa, Artificial Sequence
  source: /note="Description of Artificial Sequence: Synthetic polypeptide"
MAADGYLPDWLEDTLSEGIRQWWKLKPGPPPPKPAGRHKDDSRGLVLPGYKYLGPFNGLDKGEPVNEADAAALEHDKAYDRQLDSGDNPYLKYNHAGAEFQERLKEDTSFGGNLGRAVFQAKKRVLEPLGLVEEPVKTAPGKKRPVEHSPVEPDSSSGTGKAGQQPARKRLNFGQTGDADSVPDPQPLGQPPAAPTSLGSTTMATGSGAPMADNNEGADGVGNSSGNWHCDSQWLGDRVITTSTRTWALPTYNNHLYKQISSQSGAANDNHYFGYSTPWGYFDFNRFHCHFSPRDWQRLINNNWGFRPKRLNFKLFNIQVKEVTQNDGTTTIANNLTSTVPVFTDSEYQLPYVLGSAHQGCLPPFPADVFMVPQYGYLTLNNGSQAVGRSSFYCLEYFPSQMLRTGNNFTFSYTFEDVPFHSSYAHSQSLDRLMNPLIDQYLYYLNKTQSNSGTLQQSRLLFSQAGPTSMSLQAKNWLPGPCYRQQRLSKQANDNNNSNFPWTAATKYHLNGRDSLVNPGPAMASHKDDEEKFFPMHGTLIFGKQGTNANDADLEHVMITDEEEIRTTNPVATEQYGNVSNNLQNSNTGPTTENVNHQGALPGMVWQDRDVYLQGPIWAKIPHTDGHFHPSPLMGGFGLKHPPPQIMIKNTPVPANPPTNFSAAKFASFITQYSTGQVSVEIEWELQKENSKRWNPEIQYTSNYNKSVNVDFTVDANGVYSEPRPIGTRYLTRNL

SEQ ID NO: 11388 - protein, 735 aa, Artificial Sequence
  source: /note="Description of Artificial Sequence: Synthetic polypeptide"
MAADGYLPDWLEDTLSEGIRQWWKLKPGPPPPKPAGRHKDDSRGLVLPGYKYLGPFNGLDKGEPVNEADAAALEHDKAYDRQLDSGDNPYLKYNHAGAEFQERLKEDTSFGGNLGRAVFQAKKRVLEPLGLVEEPVKTAPGKKRPVEHSPVEPDSSSGTGKAGQQPARKRLNFGQTGDADSVPDPQPLGQPPAAPTSLGSTTMATGSGAPMADNNEGADGVGNSSGNWHCDSQWLGDRVITTSTRTWALPTYNNHLYKQISSQSGAANDNHYFGYSTPWGYFDFNRFHCHFSPRDWQRLINNNWGFRPKRLNFKLFNIQVKEVTQNDGTTTIANNLTSTVPVFTDSEYQLPYVLGSAHQGCLPPFPADVFMVPQYGYLTLNNGSQAVGRSSFYCLEYFPSQMLRTGNNFTFSYTFEDVPFHSSYAHSQSLDRLMNPLIDQYLYYLNKTQSNSGTLQQSRLLFSQAGPTSMSLQAKNWLPGPCYRQQRLSKQANDNNNSNFPWTAATKYHLNGRDSLVNPGPAMASHKDDEEKFFPMHGTLIFGKQGTNANDADLDNVMITDEEEIRTTNPVATEQYGTVSNNLQNSNTGPTTGTVNHQGALPGMVWQDRDVYLQGPIWAKIPHTDGHFHPSPLMGGFGLKHPPPQIMIKNTPVPANPPTNFSAAKFASFITQYSTGQVSVEIEWELQKENSKRWNPEIQYTSNYNKSVNVDFTVDANGVYSEPRPIGTRYLTRNL

SEQ ID NO: 11389 - protein, 735 aa, Artificial Sequence
  source: /note="Description of Artificial Sequence: Synthetic polypeptide"
MAADGYLPDWLEDTLSEGIRQWWKLKPGPPPPRPAERHQDDSRGLVLPGYKYLGPFNGLDKGEPVNEADAAALEHDKAYDRQLDSGDNPYLKYNHADAEFQERLKEDTSFGGNLGRAVFQAKKRVLEPLGLVEEPVKTAPGKKRPVEHSPAEPDSSSGTGKAGQQPARKRLNFGQTGDADSVPDPQPLGQPPAAPTSLGSTTMATGSGAPMADNNEGADGVGNSSGNWHCDSQWLGDRVITTSTRTWALPTYNNHLYKQISSQSGASNDNHYFGYSTPWGYFDFNRFHCHFSPRDWQRLINNNWGFRPKRLNFKLFNIQVKEVTQNDGTTTIANNLTSTVQVFTDSEYQLPYVLGSAHQGCLPPFPADVFMVPQYGYLTLNNGSQAVGRSSFYCLEYFPSQMLRTGNNFTFSYTFEDVPFHSSYAHSQSLDRLMNPLIDQYLYYLNRTQSNSGTLQQSRLLFSQAGPTSMSLQAKNWLPGPCYRQQRLSKQANDNNNSNFPWTAATKYHLNGRDSLVNPGPAMASHKDDEEKFFPMHGTLIFGKQGTNANDADLEHVMITDEEEIRTTNPVATEQYGNVSNNLQNSNTGPTTENVNHQGALPGMVWQDRDVYLQGPIWAKIPHTDGHFHPSPLMGGFGLKHPPPQIMIKNTPVPANPPTNFSSAKFASFITQYSTGQVSVEIEWELQKENSKRWNPEIQYTSNYNKSVNVDFTVDTNGVYSEPRPIGTRYLTRNL

SEQ ID NO: 11390 - protein, 735 aa, Artificial Sequence
  source: /note="Description of Artificial Sequence: Synthetic polypeptide"
MAADGYLPDWLEDTLSEGIRQWWKLKPGPPPPKPAERHQDDSRGLVLPGYKYLGPFNGLDKGEPVNEADAAALEHDKAYDRQLDSGDNPYLKYNHADAEFQERLKEDTSFGGNLGRAVFQAKKRVLEPLGLVEEPVKTAPGKKRPVEHSPAEPDSSSGTGKAGQQPARKRLNFGQTGDADSVPDPQPLGQPPAAPTSLGSTTMATGSGAPMADNNEGADGVGNSSGNWHCDSQWLGDRVITTSTRTWALPTYNNHLYKQISSQSGAANDNHYFGYSTPWGYFDFNRFHCHFSPRDWQRLINNNWGFRPKRLNFKLFNIQVKEVTQNDGTTTIANNLTSTVPVFTDSEYQLPYVLGSAHQGCLPPFPADVFMVPQYGYLTLNNGSQAVGRSSFYCLEYFPSQMLRTGNNFTFSYTFEDVPFHSSYAHSQSLDRLMNPLIDQYLYYLNKTQSNSGTLQQSRLLFSQAGPTSMSLQAKNWLPGPCYRQQRLSKQANDNNNSNFPWTAATKYHLNGRDSLVNPGPAMASHKDDEEKFFPMHGTLIFGKQGTNANDADLDNVMITDEEEIRTTNPVATEQYGTVSNNLQNSNTGPTTGTVNHQGALPGMVWQDRDVYLQGPIWAKIPHTDGHFHPSPLMGGFGLKHPPPQIMIKNTPVPANPPTNFSSAKFASFITQYSTGQVSVEIEWELQKENSKRWNPEIQYTSNYNKSVNVDFTVDTNGVYSEPRPIGTRYLTRNL

SEQ ID NO: 11391 - protein, 735 aa, Artificial Sequence
  source: /note="Description of Artificial Sequence: Synthetic polypeptide"
MAADGYLPDWLEDTLSEGIRQWWKLKPGPPPPKPAERHKDDSRGLVLPGYKYLGPFNGLDKGEPVNEADAAALEHDKAYDRQLDSGDNPYLKYNHADAEFQERLKEDTSFGGNLARAVFQAKKRVLEPLGLVEEPVKTAPGKKRPVEHSPAGPDSSSGTGKSGQQPARKRLNFGQTGDADSVPDPQPLGQPPAAPSGLGTNTMASGSGAPMADNNEGADGVGNSSGNWHCDSTWMGDRVITTSTRTWALPTYNNHLYKQISSQSGAANDNHYFGYSTPWGYFDFNRFHCHFSPRDWQRLINNNWGFRPKRLNFELFNIQVKEVTQNDGTTTIANNLTSTVQVFTDSEYQLPYVLGSAHQGCLPPFPADVFMVPQYGYLTLNNGSQAVGRSSFYCLEYFPSQMLRTGNNFTFSYTFEDVPFHSSYAHSQSLDRLMNPLIDQYLYYLNRTQSNSGTLQQSRLLFSQAGPTSMSLQAKNWLPGPCYRQQRLSKQANDNNNSNFPWTAATKYHLNGRDSLVNPGPAMASHKDDEEKFFPMHGTLIFGKQGTNANDADLEHVMITDEEEIRTTNPVATEQYGNVSNNLQNSNTGPTTENVNHQGALPGMVWQDRDVYLQGPIWAKIPHTDGHFHPSPLMGGFGLKHPPPQIMIKNTPVPANPPTNFSAAKFASFITQYSTGQVSVEIEWELQKENSKRWNPEIQYTSNYNKSVNVDFTVDANGVYSEPRPIGTRYLTRNL

SEQ ID NO: 11392 - protein, 735 aa, Artificial Sequence
  source: /note="Description of Artificial Sequence: Synthetic polypeptide"
MAADGYLPDWLEDILSEGIRQWWKLKPGPPPPKPAERHKDDSRGLVLPGYKYLGPFNGLDKGEPVNEADAAALEHDKAYDRQLDSGDNPYLKYNHADAEFQERLKEDTSFGGNLGRAVFQAKKRVLEPLGLVEEPVKTAPGKKRPVEHSPAEPDSSSGTGKAGQQPARKRLNFGQTGDADSVPDPQPLGQPPAAPTSLGSTTMATGSGAPMADNNEGADGVGNSSGNWHCDSQWLGDRVITTSTRTWALPTYNNHLYKQISSQSGASNDNHYFGYSTPWGYFDFNRFHCHFSPRDWQRLINNNWGFRPKRLNFKLFNIQVKEVTQNDGTTTIANNLTSTVQVFTDSEYQLPYVLGSAHQGCLPPFPADVFMVPQYGYLTLNNGSQAVGRSSFYCLEYFPSQMLRTGNNFTFSYTFEDVPFHSSYAHSQSLDRLMNPLIDQYLYYLNRTQSNSGTLQQSRLLFSQAGPTSMSLQAKNWLPGPCYRQQRLSKQANDNNNSNFPWTAATKYHLNGRDSLVNPGPAMASHKDDEEKFFPMHGTLIFGKQGTNANDADLEHVMITDEEEIRTTNPVATEQYGNVSNNLQNSNTGPTTENVNHQGALPGMVWQDRDVYLQGPIWAKIPHTDGHFHPSPLMGGFGLKHPPPQIMIKNTPVPANPPTNFSAAKFASFITQYSTGQVSVEIEWELQKENSKRWNPEIQYTSNYNKSVNVDFTVDANGVYSEPRPIGTRYLTRNL

SEQ ID NO: 11393 - protein, 735 aa, Artificial Sequence
  source: /note="Description of Artificial Sequence: Synthetic polypeptide"
MAADGYLPDWLEDTLSEGIRQWWKLKPGPPPPRPAERHQDDSRGLVLPGYKYLGPFNGLDKGEPVNEADAAALEHDKAYDRQLDSGDNPYLKYNHADAEFQERLKEDTSFGGNLGRAVFQAKKRVLEPLGLVEEPVKTAPGKKRPVEHSPVEPDSSSGTGKAGQQPARKRLNFGQTGDADSVPDPQPLGQPPAAPTSLGSTTMATGSGAPMADNNEGADGVGNSSGNWHCDSQWLGDRVITTSTRTWALPTYNNHLYKQISSQSGAANDNHYFGYSTPWGYFDFNRFHCHFSPRDWQRLINNNWGFRPKRLNFKLFNIQVKEVTQNDGTTTIANNLTSTVPVFTDSEYQLPYVLGSAHQGCLPPFPADVFMVPQYGYLTLNNGSQAVGRSSFYCLEYFPSQMLRTGNNFTFSYTFEDVPFHSSYAHSQSLDRLMNPLIDQYLYYLNKTQSNSGTLQQSRLLFSQAGPTSMSLQAKNWLPGPCYRQQRLSKQANDNNNSNFPWTAATKYHLNGRDSLVNPGPAMASHKDDEEKFFPMHGTLIFGKQGTNANDADLDNVMITDEEEIRTTNPVATEQYGTVSNNLQNSNTGPTTGTVNHQGALPGMVWQDRDVYLQGPIWAKIPHTDGHFHPSPLMGGFGLKHPPPQIMIKNTPVPANPPTNFSSAKFASFITQYSTGQVSVEIEWELQKENSKRWNPEIQYTSNYNKSVNVDFTVDTNGVYSEPRPIGTRYLTRNL

SEQ ID NO: 11394 - protein, 735 aa, Artificial Sequence
  source: /note="Description of Artificial Sequence: Synthetic polypeptide"
MAADGYLPDWLEDTLSEGIRQWWKLKPGPPPPKPAERHKDDSRGLVLPGYKYLGPFNGLDKGEPVNEADAAALEHDKAYDRQLDSGDNPYLKYNHADAEFQERLKEDTSFGGNLARAVFQAKKRVLEPLGLVEEPVKTAPGKKRPVEHSPAEPDSSSGTGKAGQQPARKRLNFGQTGDADSVPDPQPLGQPPAAPTSLGSTTMATGSGAPMADNNEGADGVGNSSGNWHCDSQWLGDRVITTSTRTWALPTYNNHLYKQISSQSGASNDNHYFGYSTPWGYFDFNRFHCHFSPRDWQRLINNNWGFRPKRLNFKLFNIQVKEVTQNDGTTTIANNLTSTVQVFTDSEYQLPYVLGSAHQGCLPPFPADVFMVPQYGYLTLNNGSQAVGRSSFYCLEYFPSQMLRTGNNFTFSYTFEDVPFHSSYAHSQSLDRLMNPLIDQYLYYLNRTQSNSGTLQQSRLLFSQAGPTSMSLQAKNWLPGPCYRQQRLSKQANDNNNSNFPWTAATKYHLNGRDSLVNPGPAMASHKDDEEKFFPMHGTLIFGKQGTNANDADLEHVMITDEEEIRTTNPVATEQYGNVSNNLQNSNTGPTTENVNHQGALPGMVWQDRDVYLQGPIWAKIPHTDGHFHPSPLMGGFGLKHPPPQIMIKNTPVPANPPTNFSAAKFASFITQYSTGQVSVEIEWELQKENSKRWNPEIQYTSNYNKSVNVDFTVDANGVYSEPRPIGTRYLTRNL

SEQ ID NO: 11395 - protein, 735 aa, Artificial Sequence
  source: /note="Description of Artificial Sequence: Synthetic polypeptide"
MAADGYLPDWLEDTLSEGIRQWWKLKPGPPPPRPAERHQDDSRGLVLPGYKYLGPFNGLDKGEPVNEADAAALEHDKAYDRQLDSGDNPYLKYNHADAEFQERLKEDTSFGGNLGRAVFQAKKRVLEPLGLVEEPVKTAPGKKRPVEHSPAEPDSSSGTGKAGQQPARKRLNFGQTGDADSVPDPQPLGQPPAAPTSLGSTTMATGSGAPMADNNEGADGVGNSSGNWHCDSQWLGDRVITTSTRTWALPTYNNHLYKQISSQSGAANDNHYFGYSTPWGYFDFNRFHCHFSPRDWQRLINNNWGFRPKRLNFKLFNIQVKEVTQNDGTTTIANNLTSTVPVFTDSEYQLPYVLGSAHQGCLPPFPADVFMVPQYGYLTLNNGSQAVGRSSFYCLEYFPSQMLRTGNNFTFSYTFEDVPFHSSYAHSQSLDRLMNPLIDQYLYYLNKTQSNSGTLQQSRLLFSQAGPTSMSLQAKNWLPGPCYRQQRLSKQANDNNNSNFPWTAATKYHLNGRDSLVNPGPAMASHKDDEEKFFPMHGTLIFGKQGTNANDADLDNVMITDEEEIRTTNPVATEQYGTVSNNLQNSNTGPTTGTVNHQGALPGMVWQDRDVYLQGPIWAKIPHTDGHFHPSPLMGGFGLKHPPPQIMIKNTPVPANPPTNFSSAKFASFITQYSTGQVSVEIEWELQKENSKRWNPEIQYTSNYNKSVNVDFTVDTNGVYSEPRPIGTRYLTRNL

SEQ ID NO: 11396 - protein, 735 aa, Artificial Sequence
  source: /note="Description of Artificial Sequence: Synthetic polypeptide"
MAADGYLPDWLEDTLSEGIRQWWKLKPGPPPPKPAGRHKDDSRGLVLPGYKYLGPFNGLDKGEPVNEADAAALEHDKAYDRQLDSGDNPYLKYNHAGAEFQERLKEDTSFGGNLGRAVFQAKKRVLEPLGLVEEPVKTAPGKKRPVEHSPVEPDSSSGTGKAGQQPARKRLNFGQTGDADSVPDPQPLGQPPAAPTSLGSTTMATGSGAPMADNNEGADGVGNSSGNWHCDSQWLGDRVITTSTRTWALPTYNNHLYKQISSQSGAANDNHYFGYSTPWGYFDFNRFHCHFSPRDWQRLINNNWGFRPKRLNFKLFNIQVKEVTQNDGTTTIANNLTSTVPVFTDSEYQLPYVLGSAHQGCLPPFPADVFMVPQYGYLTLNNGSQAVGRSSFYCLEYFPSQMLRTGNNFTFSYTFEDVPFHSSYAHSQSLDRLMNPLIDQYLYYLNKTQSNSGTLQQSRLLFSQAGPTSMSLQAKNWLPGPCYRQQRLSKQANDNNNSNFPWTAATKYHLNGRDSLVNPGPAMASHKDDEEKFFPMHGTLIFGKQGTNANDADLDNVMITDEEEIRTTNPVATEQYGTVSNNLQNSNTGPTTGTVNHQGALPGMVWQDRDVYLQGPIWAKIPHTDGHFHPSPLMGGFGLKHPPPQIMIKNTPVPANPPTNFSSAKFASFITQYSTGQVSVEIEWELQKENSKRWNPEIQYTSNYNKSVNVDFTVDTNGVYSEPRPIGTRYLTRNL

SEQ ID NO: 11397 - protein, 735 aa, Artificial Sequence
  source: /note="Description of Artificial Sequence: Synthetic polypeptide"
MAADGYLPDWLEDTLSEGIRQWWKLKPGPPPPRPAERHQDDSRGLVLPGYKYLGPFNGLDKGEPVNEADAAALEHDKAYDRQLDSGDNPYLKYNHADAEFQERLKEDTSFGGNLGRAVFQAKKRVLEPLGLVEEPVKTAPGKKRPVEHSPAEPDSSSGTGKAGQQPARKRLNFGQTGDADSVPDPQPLGQPPAAPTSLGSTTMATGSGAPMADNNEGADGVGNSSGNWHCDSQWLGDRVITTSTRTWALPTYNNHLYKQISSQSGASNDNHYFGYSTPLGYFDFNRFHCHFSPRDWQRLINNNWGFRPKRLNFKLFNIQVKEVTQNDGTTTIANNLTSTVQVFTDSEYQLPYVLGSAHQGCLPPFPADVFMVPQYGYLTLNNGSQAVGRSSFYCLEYFPSQMLRTGNNFTFSYTFEDVPFHSSYAHSQSLDRLMNPLIDQYLYYLNRTQSNSGTLQQSRLLFSQAGPTSMSLQAKNWLPGPCYRQQRLSKQANDNNNSNFPWTAATKYHLNGRDSLVNPGPAMASHKDDEEKFFPMHGTLIFGKQGTNANDADLEHVMITDEEEIRTTNPVATEQYGNVSNNLQNSNTGPTTENVNHQGALPGMVWQDRDVYLQGPIWAKIPHTDGHFHPSPLMGGFGLKHPPPQIMIKNTPVPANPPTNFSAAKFASFITQYSTGQVSVEIEWELQKENSKRWNPEIQYTSNYNKSVNVDFTVDANGVYSEPRPIGTRYLTRNL

SEQ ID NO: 11398 - protein, 735 aa, Artificial Sequence
  source: /note="Description of Artificial Sequence: Synthetic polypeptide"
MAADGYLPDWLEDTLSEGIRQWWKLKPGPPPPKPAGRHKDDSRGLVLPGYKYLGPFNGLDKGEPVNEADAAALEHDKAYDRQLDSGDNPYLKYNHAGAEFQERLKEDTSFGGNLGRAVFQAKKRVLEPLGLVEEPVKTAPGKKRPVEHSPVEPDSSSGTGKAGQQPARKRLNFGQTGDADSVPDPQPLGQPPAAPTSLGSTTMATGSGAPMADNNEGADGVGNSSGNWHCDSQWLGDRVITTSTRTWALPTYNNHLYKQISSQSGAANDNHYFGYSTPWGYFDFNRFHCHFSPRDWQRLINNNWGFRPKRLNFKLFNIQVKEVTQNDGTTTIANNLTSTVPVFTDSEYQLPYVLGSAHQGCLPPFPADVFMVPQYGYLTLNNGSQAVGRSSFYCLEYFPSQMLRTGNNFTFSYTFEDVPFHSSYAHSQSLDRLMNPLIDQYLYYLNRTQSNSGTLQQSRLLFSQAGPTSMSLQAKNWLPGPCYRQQRLSKQANDNNNSNFPWTAATKYHLNGRDSLVNPGPAMASHKDDEEKFFPMHGTLIFGKQGTNANDADLEHVMITDEEEIRTTNPVATEQYGNVSNNLQNSNTGPTTENVNHQGALPGMVWQDRDVYLQGPIWAKIPHTDGHFHPSPLMGGFGLKHPPPQIMIKNTPVPANPPTNFSAAKFASFITQYSTGQVSVEIEWELQKENSKRWNPEIQYTSNYNKSVNVDFTVDANGVYSEPRPIGTRYLTRNL

SEQ ID NO: 11399 - protein, 735 aa, Artificial Sequence
  source: /note="Description of Artificial Sequence: Synthetic polypeptide"
MAADGYLPDWLEDILSEGIRQWWKLKPGPPPPKPAERHKDDSRGLVLPGYKYLGPFNGLDKGEPVNEADAAALEHDKAYDRQLDSGDNPYLKYNHADAEFQERLKEDTSFGGNLGRAVFQAKKRVLEPLGLVEEPVKTAPGKKRPVEQSPAEPDSSSGTGKAGNQPARKRLNFGQTGDADSVPDPQPLGQPPAAPSGLGSTTMATGSGAPMADNNEGADGVGNSSGNWHCDSQWLGDRVITTSTRTWALPTYNNHLYKQISSQSGAANDNHYFGYSTPWGYFDFNRFHCHFSPRDWQRLINNNWGFRPKRLNFKLFNIQVKEVTQNDGTTTIANNLTSTVPVFTDSEYQLPYVLGSAHQGCLPPFPADVFMVPQYGYLTLNNGSQAVGRSSFYCLEYFPSQMLRTGNNFTFSYTFEDVPFHSSYAHSQSLDRLMNPLIDQYLYYLNKTQSNSGTLQQSRLLFSQAGPTSMSLQAKNWLPGPCYRQQRLSKQANDNNNSNFPWTAATKYHLNGRDSLVNPGPAMASHKDDEEKFFPMHGTLIFGKQGTNANDADLDNVMITDEEEIRTTNPVATEQYGTVSNNLQNSNTGPTTGTVNHQGALPGMVWQDRDVYLQGPIWAKIPHTDGHFHPSPLMGGFGLKHPPPQIMIKNTPVPANPPTNFSSAKFASFITQYSTGQVSVEIEWELQKENSKRWNPEIQYTSNYNKSVNVDFTVDTNGVYSEPRPIGTRYLTRNL

SEQ ID NO: 11400 - protein, 735 aa, Artificial Sequence
  source: /note="Description of Artificial Sequence: Synthetic polypeptide"
MAADGYLPDWLEDTLSEGIRQWWKLKPGPPPPRPAERHQDDSRGLVLPGYKYLGPFNGLDKGEPVNEADAAALEHDKAYDRQLDSGDNPYLKYNHADAEFQERLKEDTSFGGNLGRAVFQAKKRVLEPLGLVEEPVKTAPGKKRPVEHSPAEPDSSSGTGKAGQQPARKRLNFGQTGDADSVPDPQPLGQPPAAPTSLGSTTMATGSGAPMADNNEGADGVGNSSGNWHCDSQWLGDRVITTSTRTWALPTYNNHLYKQISSQSGASNDNHYFGYSTPWGYFDFNRFHCHFSPRDWQRLINNNWGFRPKRLNFKLFNIQVKEVTQNDGTTTIANNLTSTVQVFTDSEYQLPYVLGSAHQGCLPPFPADVFMVPQYGYLTLNNGSQAVGRSSFYCLEYFPSQMLRTGNNFTFSYTFEDVPFHSSYAHSQSLDRLMNPLIDQYLYYLNRTQSNSGTLQQSRLLFSQAGPTSMSLQAKNWLPGPCYRQQRLSKQANDNNNSNFPWTAATKYHLNGRDSLVNPGPAMASHKDDEEKFFPMHGTLIFGKQGTNANDADLEHVMITDEEEIRTTNPVATEQYGNVSNNLQNSNTGPTTENVNHQGALPGMVWQDRDVYLQGPIWAKIPHTDGHFHPSPLMGGFGLKHPPPQIMIKNTPVPANPPTNFSAAKFASFITQYSTGQVSVEIEWELQKENSKRWNPEIQYTSNYNKSVNVDFTVDANGVYSEPRPIGTRYLTRNL

SEQ ID NO: 11401 - protein, 735 aa, Artificial Sequence
  source: /note="Description of Artificial Sequence: Synthetic polypeptide"
MAADGYLPDWLEDTLSEGIRQWWKLKPGPPPPKPAGRHKDDSRGLVLPGYKYLGPFNGLDKGEPVNEADAAALEHDKAYDRQLDSGDNPYLKYNHAGAEFQERLKEDTSFGGNLGRAVFQAKKRVLEPLGLVEEPVKTAPGKKRPVEHSPVEPDSSSGTGKAGQQPARKRLNFGQTGDADSVPDPQPLGQPPAAPTSLGSTTMATGSGAPMADNNEGADGVGNSSGNWHCDSQWLGDRVITTSTRTWALPTYNNHLYKQISSQSGASNDNHYFGYSTPWGYFDFNRFHCHFSPRDWQRLINNNWGFRPKRLNFKLFNIQVKEVTQNDGTTTIANNLTSTVQVFTDSEYQLPYVLGSAHQGCLPPFPADVFMVPQYGYLTLNNGSQAVGHSSFYCLEYFPSQMLRTGNNFTFSYTFEDVPFHSSYAHSQSLDRLMNPLIDQYLYYLNRTQSNSGTLQQSRLLFSQAGPTSMSLQAKNWLPGPCYRQQRLSKQANDNNNSNFPWTAATKYHLNGRDSLVNPGPAMASHKDDEEKFFPMHGTLIFGKQGTNANDADLEHVMITDEEEIRTTNPVATEQYGNVSNNLQNSNTGPTTENVNHQGALPGMVWQDRDVYLQGPIWAKIPHTDGHFHPSPLMGGFGLKHPPPQIMIKNTPVPANPPTNFSAAKFASFITQYSTGQVSVEIEWELQKENSKRWNPEIQYTSNYNKSVNVDFTVDTNGVYSEPRPIGTRYLTRNL

SEQ ID NO: 11402 - protein, 735 aa, Artificial Sequence
  source: /note="Description of Artificial Sequence: Synthetic polypeptide"
MAADGYLPDWLEDTLSEGIRQWWKLKPGPPPPKPAERHKDDSRGLVLPGYKYLGPFNGLDKGEPVNEADAAALEHDKAYDRQLDSGDNPYLKYNHADAEFQERLKEDTSFGGNLGRAVFQAKKRVLEPLGLVEEPVKTAPGKKRPVEHSPAEPDSSSGTGKAGQQPARKRLNFGQTGDADSVPDPQPLGQPPAAPTSLGSTTMATGSGAPMADNNEGADGVGNSSGNWHCDSQWLGDRVITTSTRTWALPTYNNHLYKQISSQSGASNDNHYFGYSTPWGYFDFNRFHCHFSPRDWQRLINNNWGFRPKRLNFKLFNIQVKEVTQNDGTTTIANNLTSTVQVFTDSEYQLPYVLGSAHQGCLPPFPADVFMVPQYGYLTLNNGSQAVGRSSFYCLEYFPSQMLRTGNNFTFSYTFEDVPFHSSYAHSQSLDRLMNPLIDQYLYYLNRTQSNSGTLQQSRLLFSQAGPTSMSLQAKNWLPGPCYRQQRLSKQANDNNNSNFPWTAATKYHLNGRDSLVNPGPAMASHKDDEEKFFPMHGTLIFGKQGTNANDADLEHVMITDEEEIRTTNPVATEQYGNVSNNLQNSNTGPTTENVNHQGALPGMVWQDRDVYLQGPIWAKIPHTDGHFHPSPLMGGFGLKHPPPQIMIKNTPVPANPPTNFSAAKFASFITQYSTGQVSVEIEWELQKENSKRWNPEIQYTSNYNKSVNVDFTVDTNGVYSEPRPIGTRYLTRNL

SEQ ID NO: 11403 - protein, 735 aa, Artificial Sequence
  source: /note="Description of Artificial Sequence: Synthetic polypeptide"
MAADGYLPDWLEDTLSEGIRQWWKLKPGPPPPKPAERHQDDSRGLVLPGHKYLGPFNGLDKGEPVNEADAAALEHDKAYDRQLDSGDNPYLKYNHADAEFQERLKEDTSFGGNLGRAVFQAKKRVLEPLGLVEEPVKTAPGKKRPVEHSPAEPDSSSGTGKAGQQPARKRLNFGQTGDADSVPDPQPLGQPPAAPTSLGSTTMATGSGAPMADNNEGADGVGNSSGNWHCDSQWLGDRVITTSTRTWALPTYNNHLYKQISSQSGASNDNHYFGYSTPWGYFDFNRFHCHFSPRDWQRLINNNWGFRPKRLNFKLFNIQVKEVTQNDGTTTIANNLTSTVQVFTDSEYQLPYVLGSAHQGCLPPFPADVFMVPQYGYLTLNNGSQAVGHSSSYCLEYFPSQMLRTGNNFTFSYTFEDVPFHSSYAHSQSLDRLMNPLIDQYLYYLNRTQSNSGTLQQSRLLFSQAGPTSMSLQAKNWLPGPCYRQQRLSKQANDNNNSNFPWTAATKYHLNGRDSLVNPGPAMASHKDDEEKFFPMHGTLIFGKQGTNANDADLEHVMITDEEEIRTTNPVATEQYGNVSNNLQNSNTGPTTENVNHQGALPGMVWQDRDVYLQGPIWAKIPHTDGHFHPSPLMGGFGLKHPPPQILIKNTPVPANPSTTFSAAKFASFITQYSTGQVSVEIEWELQKENSKRWNPEIQYTSNYNKSVNVDFTVDTNGVYSEPRPIGTRYLTRNL

SEQ ID NO: 11404 - protein, 735 aa, Artificial Sequence
  source: /note="Description of Artificial Sequence: Synthetic polypeptide"
MAADGYLPDWLEDTLSEGIRQWWKLKPGPPPPKPAERHKDDSRGLVLPGYKYLGPFNGLDKGEPVNEADAAALEHDKAYDRQLDSGDNPYLKYNHADAEFQERLKEDTSFGGNLARAVFQAKKRVLEPLGLVEEPVKTAPGKKRPVEHSPAEPDSSSGTGKSGQQPARKRLNFGQTGDADSVPDPQPLGQPPAAPSGLGTNTMASGSGAPMADNNEGADGVGNSSGNWHCDSTWMGDRVITTSTRTWALPTYNNHLYKQISSQSGASNDNHYFGYSTPWGYFDFNRFHCHFSPRDWQRLINNNWGFRPKRLNFKLFNIQVKEVTQNDGTTTIANNLTSTVQVFTDSEYQLPYVLGSAHQGCLPPFPADVFMVPQYGYLTLNNGSQAVGRSSFYCLEYFPSQMLRTGNNFTFSYTFEDVPFHSSYAHSQSLDRLMNPLIDQYLYYLNRTQSNSGTLQQSRLLFSQAGPTSMSLQAKNWLPGPCYRQQRLSKQANDNNNSNFPWTAATKYHLNGRDSLVNPGPAMASHKDDEEKFFPMHGTLIFGKQGTNANDADLEHVMITDEEEIRTTNPVATEQYGNVSNNLQNSNTGPTTENVNHQGALPGMVWQDRDVYLQGPIWAKIPHTDGHFHPSPLMGGFGLKHPPPQIMIKNTPVPANPPTNFSAAKFASFITQYSTGQVSVEIEWELQKENSKRWNPEIQYTSNYNKSVNVDFTVDANGVYSEPRPIGTRYLTRNL

SEQ ID NO: 11405 - protein, 735 aa, Artificial Sequence
  source: /note="Description of Artificial Sequence: Synthetic polypeptide"
MAADGYLPDWLEDILSEGIRQWWKLKPGPPPPKPAERHKDDSRGLVLPGYKYLGPFNGLDKGEPVNEADAAALEHDKAYDRQLDSGDNPYLKYNHADAEFQERLKEDTSFGGNLGRAVFQAKKRVLEPLGLVEEPVKTAPGKKRPVEQSPAEPDSSSGTGKAGNQPARKRLNFGQTGDADSVPDPQPLGQPPAAPSGLGSTTMATGSGAPMADNNEGADGVGNSSGNWHCDSQWLGDRVITTSTRTWALPTYNNHLYKQISSQSGAANDNHYFGYSTPWGYFDFNRFHCHFSPRDWQRLINNNWGFRPKRLNFKLFNIQVKEVTQNDGTTTIANNLTSTVQVFTDSEYQLPYVLGSAHQGCLPPFPADVFMVPQYGYLTLNNGSQAVGRSSFYCLEYFPSQMLRTGNNFTFSYTFEDVPFHSSYAHSQSLDRLMNPLIDQYLYYLNRTQSNSGTLQQSRLLFSQAGPTSMSLQAKNWLPGPCYRQQRLSKQANDNNNSNFPWTAATKYHLNGRDSLVNPGPAMASHKDDEEKFFPMHGTLIFGKQGTNANDADLEHVMITDEEEIRTTNPVATEQYGNVSNNLQNSNTGPTTENVNHQGALPGMVWQDRDVYLQGPIWAKIPHTDGHFHPSPLMGGFGLKHPPPQIMIKNTPVPANPPTNFSAAKFASFITQYSTGQVSVEIEWELQKENSKRWNPEIQYTSNYNKSVNVDFTVDANGVYSEPRPIGTRYLTRNL

SEQ ID NO: 11406 - protein, 735 aa, Artificial Sequence
  source: /note="Description of Artificial Sequence: Synthetic polypeptide"
MAADGYLPDWLEDTLSEGIRQWWKLKPGPPPPRPAERHQDDSRGLVLPGYKYLGPFNGLDKGEPVNEADAAALEHDKAYDRQLDSGDNPYLKYNHADAEFQERLKEDTSFGGNLGRAVFQAKKRVLEPLGLVEEPVKTAPGKKRPVEHSPAEPDSSSGTGKAGQQPARKRLNFGQTGDADSVPDPQPLGQPPAAPTSLGSTTMATGSGAPMADNNEGADGVGNSSGNWHCDSQWLGDRVITTSTRTWALPTYNNHLYKQISSQSGASNDNHYFGYSTPWGYFDFNRFHCHFSPRDWQRLINNNWGFRPKRLNFKLFNIQVKEVTQNDGTTTIANNLTSTVQVFTDSEYQLPYVLGSAHQGCLPPFPADVFMVPQYGYLTLNNGSQAVGRSSFYCLEYFPSQMLRTGNNFTFSYTFEDVPFHSSYAHSQSLDRLMNPLIDQYLYYLNRTQSNSGTLQQSRLLFSQAGPTSMSLQAKNWLPGPCYRQQRLSKQANDNNNSNFPWTAATKYHLNGRDSLVNPGPAMASHKDDEEKFFPMHGTLIFGKQGTNANDADLEHVMITDEEEIRTTNPVATEQYGNVSNNLQNSNTGPTTENVNHQGALPGMVWQDRDVYLQGPIWAKIPHTDGHFHPSPLMGGFGLKHPPPQILIKSTPVPANPSTTFSAAKFASFITQYSTGQVSVEIEWELQKENSKRWNPEIQYTSNYNKSVNVDFTVDTNGVYSEPRPIGTRYLTRNL

SEQ ID NO: 11407 - protein, 735 aa, Artificial Sequence
  source: /note="Description of Artificial Sequence: Synthetic polypeptide"
MAADGYLPDWLEDTLSEGIRQWWKLKPGPPPPRPAERHQDDSRGLVLPGYKYLGPFNGLDKGEPVNEADAAALEHDKAYDRQLDSGDNPYLKYNHADAEFQERLKEDTSFGGNLGRAVFQAKKRVLEPLGLVEEPVKTAPGKKRPVEHSPAEPDSSSGTGKAGQQPARKRLNFGQTGDADSVPDPQPLGQPPAAPTSLGSTTMATGSGAPMADNNEGADGVGNSSGNWHCDSQWLGDRVITTSTRTWALPTYNNHLYKQISSQSGASNDNHYFGYSTPWGYFDFNRFHCHFSPRDWQRLTNNNWGFRPKRLNFKLFNIQVKEVTQNDGTTTIANNLTSTVQVFTDSEYQLPYVLGSAHQGCLPPFPADVFMVPQYGYLTLNNGSQAVGRSSFYCLEYFPSQMLRTGNNFTFSYTFEDVPFHSSYAHSQSLDRLMNPLIDQYLYYLNRTQSNSGTLQQSRLLFSQAGPTSMSLQAKNWLPGPCYRQQRLSKQANDNNNSNFPWTAATKYHLNGRDSLVNPGPAMASHKDDEEKFFPMHGTLIFGKQGTNANDADLEHVMITDEEEIRTTNPVATEQYGNVSNNLQNSNTGPTTENVNHQGALPGMVWQDRDVYLQGPIWAKIPHTDGHFHPSPLMGGFGLKHPPPQIMIKNTPVPANPPTNFSAAKFASFITQYSTGQVSVEIEWELQKENSKRWNPEIQYTSNYNKSVNVDFTVDANGVYSEPRPIGTRYLTRNL

SEQ ID NO: 11408 - protein, 735 aa, Artificial Sequence
  source: /note="Description of Artificial Sequence: Synthetic polypeptide"
MAADGYLPDWLEDTLSEGIRQWWKLKPGPPPPKPAGRHKDDSRGLVLPGYKYLGPFNGLDKGEPVNEADAAALEHDKAYDRQLDSGDNPYLKYNHAGAEFQERLKEDTSFGGNLGRAVFQAKKRVLEPLGLVEEPVKTAPGKKRPVEHSPVEPDSSSGTGKAGQQPARKRLNFGQTGDADSVPDPQPLGQPPAAPTSLGSTTMATGSGAPMADNNEGADGVGNSSGNWHCDSQWLGDRVITTSTRTWALPTYNNHLYKQISSQSGASNDNHYFGYSTPWGYFDFNRFHCHFSPRDWQRLINNNWGFRPKRLNFKLFNIQVKEVTQNDGTTTIANNLTSTVPVFTDSEYQLPYVLGSAHQGCLPPFPADVFMVPQYGYLTLNNGSQAVGRSSFYCLEYFPSQMLRTGNNFTFSYTFEDVPFHSSYAHSQSLDRLMNPLIDQYLYYLNKTQSNSGTLQQSRLLFSQAGPTSMSLQAKNWLPGPCYRQQRLSKQANDNNNSNFPWTAATKYHLNGRDSLVNPGPAMASHKDDEEKFFPMHGTLIFGKQGTNANDADLDNVMITDEEEIRTTNPVATEQYGTVSNNLQNSNTGPTTGTVNHQRALPGMVWQDRDVYLQGPIWAKIPHTDGHFHPSPLMGGFGLKHPPPQIMIKNTPVPANPPTNFSSAKFASFITQYSTGQVSVEIEWELQKENSKRWNPEIQYTSNYNKSVNVDFTVDTNGVYSEPRPIGTRYLTRNL

SEQ ID NO: 11409 - protein, 735 aa, Artificial Sequence
  source: /note="Description of Artificial Sequence: Synthetic polypeptide"
MAADGYLPDWLEDTLSEGIRQWWKLKPGPPPPKPAGRHKDDSRGLVLPGYKYLGPFNGLDKGEPVNEADAAALEHDKAYDRQLDSGDNPYLKYNHAGAEFQERLKEDTSFGGNLGRAVFQAKKRVLEPLGLVEEPVKTAPGKKRPVEHSPVEPDSSSGTGKAGQQPARKRLNFGQTGDADSVPDPQPLGQPPAAPTSLGSTTMATGSGAPMADNNEGADGVGNSSGNWHCDSQWLGDRVITTSTRTWALPTYNNHLYKQISSQSGASNDNHYFGYSTPWGYFDFNRFHCHFSPRDWQRLINNNWGFRPKRLNFKLFNIQVKEVTQNDGTTTIANNLTSTVPVFTDSEYQLPYVLGSAHQGCLPPFPADVFMVPQYGYLTLNNGSQAVGRSSFYCLEHFPSQMLRTGNNFTFSYTFEDVPFHSSYAHSQSLDRLMNPLIDQYLYYLNKTQSNSGTLQQSRLLFSQAGPTSMSLQAKNWLPGPCYRQQRLSKQANDNNNSNFPWTAATKYHLNGRDSLVNPGPAMASHKDDEEKFFPMHGTLIFGKQGTNANDADLDNVMITDEEEIRTTNPVATEQYGTVSNNLQNSNTGPTTGTVNHQRALPGMVWQDRDVYLQGPIWAKIPHTDGHFHPSPLMGGFGLKHPPPQIMIKNTPVPANPPTNFSSAKFASFITQYSTGQVSVEIEWELQKENSKRWNPEIQYTSNYNKSVNVDFTVDTNGVYSEPRPIGTRYLTRNL

SEQ ID NO: 11410 - protein, 735 aa, Artificial Sequence
  source: /note="Description of Artificial Sequence: Synthetic polypeptide"
MAADGYLPDWLEDTLSEGIRQWWKLKPGPPPPKPAGRHKDDSRGLVLPGYKYLGPFNGLDKGEPVNEADAAALEHDKAYDRQLDSGDNPYLKYNHAGAEFQERLKEDTSFGGNLGRAVFQAKKRVLEPLGLVEEPVKTAPGKKRPVEHSPVEPDSSSGTGKAGQQPARKRLNFGQTGDADSVPDPQPLGQPPAAPTSLGSTTMATGSGAPMADSNEGADGVGNSSGNWHCDSQWLGDRVITTSTRTWALPTYNNHLYKQISSQSGASNDNHYFGYSTPWGYFDFNRFHCHFSPRDWQRLINNNWGFRPKRLNFKLFNIQVKEVTQNDGTTTIANNLTSTVPVFTDSEYQLPYVLGSAHQGCLPPFPADVFMVPQYGYLTLNNGSQAVGRSSFYCLEYFPSQMLRTGNNFTFSYTFEDVPFHSSYAHSQSLDRLMNPLIDQYLYYLNKTQSNSGTLQQSRLLFSQAGPTSMSLQAKNWLPGPCYRQQRLSKQANDNNNSNFPWTAATKYHLNGRDSLVNPGPAMASHKDDEEKFFPMHGTLIFGKQGTNANDADLDNVMITDEEEIRTTNPVATEQYGTVSNNLQNSNTGPTTGTVNHQRALPGMVWLDRDVYLQGPIWAKIPHTDGHFHPSPLMGGFGLKHPPPQIMIKNTPVPANPPTNFSSAKFASFITQYSTGQVSVEIEWELQKENSKRWNPEIQYTSNYNKSVNVDFTVDTNGVYSEPRPIGTRYLTRNL

SEQ ID NO: 11411 - protein, 735 aa, Artificial Sequence
  source: /note="Description of Artificial Sequence: Synthetic polypeptide"
MAADGYLPDWLEDTLSEGIRQWWRLKPGPPPPKPAGRHKDDSRGLVLPGYKYLGPFNGLDKGEPVNEADAAALEHDKAYDRQLDSGDNPYLKYNHAGAEFQERLKEDTSFGGNLGRAVFQAKKRVLEPLGLVEEPVKTAPGKKRPVEHSPVEPDSSSGTGKAGQQPARKRLNFGQTGDADSVPDPQPLGQPPAAPTSLGSTTMATGSGAPMADNNEGADGVGNSSGNWHCDSQWLGDRVITTSTRTWALPTYNNHLYKQISSQSGASNDNHYFGYSTPWGYFDFNRFHCHFSPRDWQRLINNNWGFRPKRLNFKLFNIQVKEVTQNDGTTTIANNLTSTVPVFTDSEYQLPYVLGSAHQGCLPPFPADVFMVPQYGYLTLNNGSQAVGRSSFYCLEYFPSQMLRTGNNFTFSYTFEDVPFHSSYAHSQSLDRLMNPLIDQYLYYLNKTQSNSGTLQQSRLLFSQAGPTSMSLQAKNWLPGPCYRQQRLSKQANDNNNSNFPWTAATKYHLNGRDSLVNPGPAMASHKDDEEKFFPMHGTLIFGKQGTNANDADLDNVMITDEEEIRTTNPVATEQYGTVSNNLQNSNTGPTTGTVNHQRALPGMVWQDRDVYLQGPIWAKIPHTDGHFHPSPLMGGFGLKHPPPQIMIKNTPVPANPPTNFSSAKFASFITQYSTGQVSVEIEWELQKENSKRWNPEIQYTSNYNKSVNVDFTVDTNGVYSEPRPIGTRYLTRNL

SEQ ID NO: 11412 - protein, 735 aa, Artificial Sequence
  source: /note="Description of Artificial Sequence: Synthetic polypeptide"
MAADGYLPDWLEDTLSEGIRQWWKLKPGPPPPKPAGRHKDDSRGLVLPGYKYLGPFNGLDKGEPVNEADAAALEHDKAYDRQLDSGDNPYLKYNHAGAEFQERLKEDTSFGGNLGRAVFQAKKRVLEPLGLVEEPVKTAPGKKRPVEHSPVEPDSSSGTGKAGQQPARKRLNFGQTGDADSVPDPQPLGQPPAAPTSLGSTTMATGSGAPMADNNEGADGVGNSSGNWHCDSQWLGDRVITTSTRTWALPTYNNHLYKQISSQSGASNDNHYFGYSTPWGYFDFNRFHCHFSPRDWQRLINNNWGFRPKRLNFKLFNIQVKEVTQNDGTTTIANNLTSTVPVFTDSEYQLPYVLGSAHQGCLPPFPADVFMVPQYGYLTLNNGSQAVGRSSFYCLEYFPSQMLRTGNNFTFSYTFEDVPFHSSYAHSQSLDRLMNPLIDQYLYYLNKTQSNSGTLQQSRLLFSQAGPTSMSLQAKNWLPGPCYRQQRLSKQANDNNNSNFPWTAATKYHLNGRDSLVNPGPAMASHKDDEEKFFPMHGTLIFGKQGTNANDADLDNVMITDEEEIRTTNPVATEQYGTVSNNLQNSNTGPTTGTVNHQRALPGMVWQDRDVYLQGPIWAKIPHTDGHFHPSPLMGGFGLKHPPPQIMIKNTPVPANPPTNFSSAKFASFITQYSTGQVSVEIEWELQKENSKRWNPEIQYTSNYNKSVNVDLTVDTNGVYSEPRPIGTRYLTRNL

SEQ ID NO: 11413 - protein, 735 aa, Artificial Sequence
  source: /note="Description of Artificial Sequence: Synthetic polypeptide"
MAADGYLPDWLEDTLSEGIRQWWKLKPGPPPPKPAGRHKDDSRGLVLPGYKYLGPFNGLDKGEPVNEADAAALEHDKAYDRQLDSGDNPYLKYNHAGAEFQERLKEDTSFGGNLGRAVFQAKKRVLEPLGLVEEPVKTAPGKKRPVEHSPVEPDSSSGTGKAGQQPARKRLNFGQTGDADSVPDPQPLGQPPAAPTSLGSTTMATGSGAPMADNNEGADGVGNSSGNWHCDSQWLGDRVITTSTRTWALPTYNNHLYKQISSQSGASNDNHYFGYSTPWGYFDFNRFHCHFSPRDWQRLINNNWGFRPKRLNFKLFNIQVKEVTQNDGTTTIANNLTSTVPVFTDSEYQLPYVLGSAHQGCLPPFPADVFMVPQYGYPTLNNGSQAVGRSSFYCLEYFPSQMLRTGNNFTFSYTFEDVPFHSSYAHSQSLDRLMNPLIDQYLYYLNKTQSNSGTLQQSRLLFSQAGPTSMSLQAKNWLPGPCYRQQRLSKQANDNNNSNFPWAAATKYHLNGRDSLVNPGPAMASHKDDEEKFFPMHGTLIFGKQGTNANDADLDNVMITDEEEIRTTNPVATEQYGTVSNNLQNSNTGPTTGTVNHQRALPGMVWQDRDVYLQGPIWAKIPHTDGHFHPSPLMGGFGLKHPPPQIMIKNTPVPANPPTNFSSAKFASFITQYSTGQVSVEIEWELQKENSKRWNPEIQYTSNYNKSVNVDFTVDTNGVYSEPRPIGTRYLTRNL

SEQ ID NO: 11414 - protein, 735 aa, Artificial Sequence
  source: /note="Description of Artificial Sequence: Synthetic polypeptide"
MAADGYLPDWLEDTLSEGIRQWWKLKPGPPPPKPAERHQDDSRGLVLPGYKYLGPFNGLDKGEPVNEADAAALEHDKAYDRQLDSGDNPYLKYNHADAEFQERLKEDTSFGGNLGRAVFQAKKRVLEPLGLVEEPVKTAPGKKRPVEHSPAEPDSSSGTGKAGQQPARKRLNFGQTGDADSVPDPQPLGQPPAAPTSLGSTTMATGSGAPMADNNEGADGVGNSSGNWHCDSQWLGDRVITTSTRTWALPTYNNHLYKQISSQSGASNDNHYFGYSTPWGYFDFNRFHCHFSPRDWQRLINNNWGFRPKRLNFKLFNIQVKEVTQNDGTTTIANNLTSTVQVFTDSEYQLPYVLGSAHQGCLPPFPADVFMVPQYGYLTLNNGSQAVGRSSFYCLEYFPSQMLRTGNNFTFSYTFEDVPFHSSYAHSQSLDRLMNPLIDQYLYYLNRTQSNSGTLQQSRLLFSQAGPTSMSLQAKNWLPGPCYRQQRLSKQANDNNNSNFPWTAATKYHLNGRDSLVNPGPAMASHKDDEEKFFPMHGTLIFGKQGTNANDADLEHVMITDEEEIRTTNPVATEQYGNVSNNLQNSNTGPTTENVNHQGALPGMVWQDRDVYLQGPIWAKIPHTDGHFHPSPLMGGFGLKHPPPQIMIKNTPVPANPPTNFSAAKFASFITQYSTGQVSVEIEWELQKENSKRWNPEIQYTSNYNKSVNVDFTVDTNGVYSEPRPIGTRYLTRNL

SEQ ID NO: 11415 - protein, 734 aa, Artificial Sequence
  source: /note="Description of Artificial Sequence: Synthetic polypeptide"
MAADGYLPDWLEDTLSEGIRQWWKLKPGPPPPKPAERHQDDSRGLVLPGYKYLGPFNGLDKGEPVNEADAAALEHDKAYDRQLDSGDNPYLKYNHADAEFQERLKEDTSFGGNLGRAVFQAKKRVLEPLGLVEEPVKTAPGKKRPVEHSPAEPDSSSGTGKAGQQPARKRLNFGQTGDADSVPDPQPLGQPPAAPTSLGSTTMATGSGAPMADNNEGADGVGNSSGNWHCDSQWLGDRVITTSTRTWALPTYNNHLYKQISSQSGASNDNHYFGYSTPWGYFDFNRFHCHFSPRDWQRLINNNWGFRPKRLNFKLFNIQVKEVTQNDGTTTIANNLTSTVQVFTDSEYQLPYVLGSAHQGCLPPFPADVFMVPQYGYLTLNNGSQAVGRSSFYCLEYFPSQMLRTGNNFTFSYTFEDVPFHSSYAHSQSLDRLMNPLIDQYLYYLNRTQSNSGTLQQSRLLFSQAGPTSMSLQAKNWLPGPCYRQQRLSKQANDNNSNFPWTAATKYHLNGRDSLVNPGPAMASHKDDEEKFFPMHGTLIFGKQGTNANDADLEHVMITDEEEIRTTNPVATEQYGNVSNNLQNSNTGPTTENVNHQGALPGMVWQDRDVYLQGPIWAKIPHTDGHFHPSPLMGGFGLKHPPPQIMIKNTPVPANPPTNFSAAKFASFITQYSTGQVSVEIEWELQKENSKRWNPEIQYTSNYNKSVNVDFTVDTNGVYSEPRPIGTRYLTRNL

SEQ ID NO: 11416 - protein, 734 aa, Artificial Sequence
  source: /note="Description of Artificial Sequence: Synthetic polypeptide"
MAADGYLPDWLEDTLSEGIRQWWKLKPGPPPKPAERHQDDSRGLVLPGYKYLGPFNGLDKGEPVNEADAAALEHDKAYDRQLDSGDNPYLKYNHADAEFQERLKEDTSFGGNLGRAVFQAKKRVLEPLGLVEEPVKTAPGKKRPVEHSPAEPDSSSGTGKAGQQPARKRLNFGQTGDADSVPDPQPLGQPPAAPTSLGSTTMATGSGAPMADNNEGADGVGNSSGNWHCDSQWLGDRVITTSTRTWALPTYNNHLYKQISSQSGASNDNHYFGYSTPWGYFDFNRFHCHFSPRDWQRLINNNWGFRPKRLNFKLFNIQVKEVTQNDGTTTIANNLTSTVQVFTDSEYQLPYVLGSAHQGCLPPFPADVFMVPQYGYLTLNNGSQAVGRSSFYCLEYFPSQMLRTGNNFTFSYTFEDVPFHSSYAHSQSLDRLMNPLIDQYLYYLNRTQSNSGTLQQSRLLFSQAGPTSMSLQAKNWLPGPCYRQQRLSKQANDNNNSNFPWTAATKYHLNGRDSLVNPGPAMASHKDDEEKFFPMHGTLIFGKQGTNANDADLEHVMITDEEEIRTTNPVATEQYGNVSNNLQNSNTGPTTENVNHQGALPGMVWQDRDVYLQGPIWAKIPHTDGHFHPSPLMGGFGLKHPPPQIMIKNTPVPANPPTNFSAAKFASFITQYSTGQVSVEIEWELQKENSKRWNPEIQYTSNYNKSVNVDFTVDTNGVYSEPRPIGTRYLTRNL

SEQ ID NO: 11417 - protein, 735 aa, Artificial Sequence
  source: /note="Description of Artificial Sequence: Synthetic polypeptide"
MAADGYLPDWLEDTLSEGIRQWWKLKPGPPPPKPAERHQDDSRGLVLPGYKYLGPFNGLDKGEPVNEADAAALEHDKAYDRQLDSGDNPYLKYNHADAEFQERLKEDTSFGGNLGRAVFQAKKRVLEPLGLVEEPVKTAPGKKRPVEHSPAEPDSSSGTGKAGQQPARKRLNFGQTGDADSVPDPQPLGQPPAAPTSLGSTTMATGSGAPMADNNEGADGVGNSSGNWHCDSQWLGDRVITTSTRTWALPTYNNHLYKQISSQSGASNDNHYFGYSTPWGYFDFNRFHCHFSPRDWQRLINNNWGFRPKRLNFKLFNIQVKEVTQNDGTTTIANNLTSTVQVFTDSEYQLPYVLGSAHQGCLPPFPADVFMVPQYGYLTLNNGSQAVGRSSFYCLEYFPSQMLRTGNNFTFSYTFEDVPFHSSYAHSQSLDRLMNPLIDQYLYYLNRTQSNSGTLQQSRLLFSQAGPTSMSLQAKNWLPGPCYRQQRLSKQANDNNNSNFPWTAATKYHLNGRDSLVNPGPAMASHKDDEEKFFPMHGTLIFGKQGTNANDADLEHVMITDEEEIRTTNPVATEQYGNVSNNLQNSNTGPTTENVNHQGALPGMVWQDRDAYLQGPIWAKIPHTDGHFHPSPLMGGFGLKHPPPQIMIKNTPVPANPPTNFSAAKFASFITQYSTGQVSVEIEWELQKENSKRWNPEIQYTSNYNKSVNVDFTVDTNGVYSEPRPIGTRYLTRNL

SEQ ID NO: 11418 - protein, 735 aa, Artificial Sequence
  source: /note="Description of Artificial Sequence: Synthetic polypeptide"
MAADGYLPDWLEDTLSEGIRQWWKLKPGPPPPKPAERHQDDSRGLVLPGYKYLGPFNGLDKGEPVNEADAAALEHDKAYDRQLDSGDNPYLKYNHADAEFQERLKEDTSFGGNLGRAVFQAKKRVLEPLGLVEEPAKTAPGKKRPVEHSPAEPDSSSGTGKAGQQPARKRLNFGQTGDADSVPDPQPLGQPPAAPTSLGSTTMATGSGAPMADNNEGADGVGNSSGNWHCDSQWLGDRVITTSTRTWALPTYNNHLYKQISSQSGASNDNHYFGYSTPWGYFDFNRFHCHFSPRDWQRLINNNWGFRPKRLNFKLFNIQVKEVTQNDGTTTIANNLTSTVQVFTDSEYQLPYVLGSAHQGCLPPFPADVFMVPQYGYLTLNNGSQAVGRSSFYCLEYFPSQMLRTGNNFTFSYTFEDVPFHSSYAHSQSLDRLMNPLIDQYLYYLNRTQSNSGTLQQSRLLFSQAGPTSMSLQAKNWLPGPCYRQQRLSKQANDNNNSNFPWTAATKYHLNGRDSLVNPGPAMASHKDDEEKFFPMHGTLIFGKQGTNANDADLEHVMITDEEEIRTTNPVATEQYGNVSNNLQNSNTGPTTENVNHQGALPGMVWQDRDVYLQGPIWAKIPHTDGHFHPSPLMGGFGLKHPPPQIMIKNTPVPANPPTNFSAAKFASFITQYSTGQVSVEIEWELQKENSKRWNPEIQYTSNYNKSVNVDFTVDTNGVYSEPRPIGTRYLTRNL

SEQ ID NO: 11419 - protein, 735 aa, Artificial Sequence
  source: /note="Description of Artificial Sequence: Synthetic polypeptide"
MAADGYLPDWLEDTLSEGIRQWWKLKPGPPPPKPAERHQDDSRGLVLPGYKYLGPFNGLDKGEPVNEADAAALEHDKAYDRQLDSGDNPYLKYNHADAEFQERLKEDTSFGGNLGRAVFQAKKRVLEPLGLVEEPVKTAPGKKRPVEHSPAEPDSSSGTGKAGQQPARKRLNFGQTGDADSVPDPQPLGQPPAAPTSLGSTTMATGSGAPMADNNEGADGVGNSSGNWHCDSQWLGDRVITTSTRTWALPTYNNHLYKQISSQSGASNDNHYFGYSTPWGYFDFNRFHCHFSPRDWQRLINNNWGFRPKRLNFKLFNIQVKEVTQNDGTTTIANNLTSTVQVFTDSEYQLPYVLGSAHQGCLPPFPADVFMVPQYGYLTLNNGSQAVGRSSFYCLEYFPSQMLRTGNNFTFSYTFEDVPFHSSYAHSQSLDRLMNPLIDQYLYYLNRTQSNSGTLQQSRLLFSQAGPTSMSLQAKNWLPGPCYRQQRLSKQANDNNNSNFPWTAATKYHLNGRDSLVNPGPAMASHKDDEEKFFPMHGTLIFGKQGTNANDADLEHVMITDEEEIRTTNPVATEQYGNVSNNLQNSNTGPTTENVNHQGALPGMVWQDRDVYLQGPIWAKIPHTDGHFHPSPLMGGFGLKHPPPQIMIKNTPVPANPPTNFSAAKFASFITQYSTGQVSVEIEWELQKENSKRWNPEIQYTSNYNKSVNVDFTVDTNGAYSEPRPIGTRYLTRNL

SEQ ID NO: 11420 - protein, 735 aa, Artificial Sequence
  source: /note="Description of Artificial Sequence: Synthetic polypeptide"
MAADGYLPDWLEDTLSEGIRQWWKLKPGPPPPKPAERHKDDSRGLVLPGYKYLGPFNGLDKGEPVNEADAAALEHDKAYDRQLDSGDNPYLKYNHADAEFQERLKEDTSFGGNLGRAVFQAKKRVLEPLGLVEEPVKTAPGKKRPVEHSPVEPDSSSGTGKAGQQPARKRLNFGQTGDADSVPDPQPLGQPPAAPTSLGSTTMATGSGAPMADNNEGADGVGNSSGNWHCDSQWSGDRVITTSTRTWALPTYNNHLYKQISSQSGASNDNHYFGYSTPWGYFDFNRFHCHFSPRDWQRLINNNWGFRPKRLNFKLFNIQVKEVTQNDGTTTIANNLTSTVQVFTDSEYQLPYVLGSAHQGCLPPFPADVFMVPQYGYLTLNNGSQAVGRSSFYCLEYFPSQMLRTGNNFTFSYTFEDVPFHSSYAHSQSLDRLMNPLIDQYLYYLNKTQSNSGTLQQSRLLFSQAGPTSMSLQAKNWLPGPCYRQQRLSKQANDNNNSNFPWTAATKYHLNGRDSLVNPGPAMASHKDDEEKFFPMHGTLIFGKQGTNANDADLDNVMITDEEEIRTTNPVATEQYGTVSNNLQNSNTGPTTGTVNHQGALPGMVWQDRDVYLQGPIWAKIPHTDGHFHPSPLMGGFGLKHPPPQIMIKNTPVPANPPTNFSSAKFASFITQYSTGQVSVEIEWELQKENSKRWNPEIQYTSNYNKSVNVDFTVDTNGVYSEPRPIGTRYLTRNL

SEQ ID NO: 11421 - protein, 735 aa, Artificial Sequence
  source: /note="Description of Artificial Sequence: Synthetic polypeptide"
MAADGYLPDWLEDALSEGIRQWWKLKPGPPPPKPAERHKDDSRGLVLPGYKYLGPFNGLDKGEPVNEADAAALEHDKAYDRQLDSGDNPYLKYNHADAEFQERLKEDTSFGGNLGRAVFQAKKRVLEPLGLVEEPVKTAPGKKRPVEHSPVEPDSSSGTGKAGQQPARKRLNFGQTGDADSVPDPQPLGQPPAAPTSLGSTTMATGSGAPMADNNEGADGVGNSSGNWHCDSQWSGDRVITTSTRTWALPTYNNHLYKQISSQSGASNDNHYFGYSTPWGYFDFNRFHCHFSPRDWQRLINNNWGFRPKRLNFKLFNIQVKEVTQNDSTTTIANNLTSTVQVFTDSEYQLPYVLGSAHQGCLPPFPADVFMVPQYGYLTLNNGSQAVGRSSFYCLEYFPSQMLRTGNNFTFSYTFEDVPFHSSYAHSQSLDRLMNPLIDQYLYYLNKTQSNSGTLQQSRLLFSQAGPTSMSPQAKNWLPGPCYRQQRLSKQANDNNNSNFPWTAATKYHLNGRDSLVNPGPAMASHKDDEEKFFPMHGTLIFGKQGTNANDADLDNVMITDEEEIRTTNPVATEQYGTVSNNLQNSNTGPTTGTVNHQGALPGMVWQDRDVYLQGPIWAKIPHTDGHFHPSPLMGGFGLKHPPPQIMIKNTPVPANPPTNFSSAKFASFITQYSTGQVSVEIEWELQKENSKRWNPEIQYTSNYNKSVNVDFTVDTNGVYSEPRPIGTRYLTRNL

SEQ ID NO: 11422 - protein, 735 aa, Artificial Sequence
  source: /note="Description of Artificial Sequence: Synthetic polypeptide"
MAADGYLPDWLEDTLSEGIRQWWKLKPGPPPPKPAERHKDDSRGLVLPGYKYLGPFNGLDKGEPVNEANAAALEHDKAYDRQLDSGDNPYLKYDHADAEFQERLKEDTSFGGNLGRAVFQAKKRVLEPLGLVEEPVKTAPGKKRSVEHSPVEPDSSSGTGKAGQQPARKRLNFGQTGDADSVPDPQPLGQPPAAPTSLGSTTMATGSGAPMADNNEGADGVGNSSGNWHCDSQWSGDRVITTSTRTWALPTYNNHLYKQISSQSGASNDNHYFGHSTPWGYFDFNRFHCHFSPRDWQRLINNNWGFRPKRLNFKLFNIQVKEVTQNDGTTTIANNLTSTVQVFTDSEYRLPYVLGSAHQGCLPPFPADVFMVPQYGYLTLNNGSQAVGRSSFYCLEYFPSQMLRTGNNFTFSYTFEDVPFHSSYAHSQSLDRLMNPLIDQYLYYLNKTQSNSGTLQQSRLLFSQAGPTSMSLQAKNWLPGPCYRQQRLSKQANDNNNSNFPWTVATKYHLNGRDSLVNPGPAMASHKDDEEKFFPMHGTLIFGKQGTNANDADLDNVMITDEEEIRTTNPVATEQYGTVSNNLQNSNTGPTTGTVNHQGALPGMVWQDRDVYLQGPIWAKIPHTDGHFHPSPLMGGFGLKHPPPQIMIKNTPVPANPPTNFSSAKFASFITQYSTGQVSVEIEWELQKENSKRWNPETQYTSNYNKSVNVDFTVDTNGVYSEPRPIGTRYLTRNL

SEQ ID NO: 11423 - protein, 735 aa, Artificial Sequence
  source: /note="Description of Artificial Sequence: Synthetic polypeptide"
MAADGYLPDWLEDTLSEGIRQWWKLKPGPPPPKPAERHKDDSRGLVLPGYKYLGPFNGLDKGEPVNEANAAALEHDKAYDRQLDSGDNPYLKYNHADAEFQERLKEDTSFGGNLGRAVFQAKKRVLEPLGLVEEPVKTAPGKKRPVEHSPVEPDSSSGTGKAGQQPARKRLNFGQTGDADSVPDPQPLGQPPAAPTSLGSTTMATGSGAPMADNNEGADGVGNSSGNWHCDSQWSGDRVITTSTRTWALPTYNNHLYKQISSQSGASNDNHYFGYSTPWGYFDFNRFHCRFSPRDWQRLINNNWGFRPKRLNFKLLNIQVKEVTQNDGTTTIANNLTSTVQVFTDSEYQLPYVLGSAHQGCLPPFPADVFMVPQYGYLTLNNGSQAVGRSSFYCLEYFPSQMLRTGNNFTFSYTFEDVPFHSSYAHSQSLDRLMNPLIDQYLYYLNKTQSNSGTLQQSRLLFSQAGPTSMSLQAKNWLPGPCYRQQRLSKQANDNNNSNFPWTAATKYHLNGRDSLVNPGPAMASHKDDEEKFFPMHGTLIFGKQGTNANDADLDNVMVTDEEEIRTTNPVATEQYGTVSNNLQNSNTGPTTGTVNHQGALPGMVWQDRDVYLQGPIWAKIPHTDGHFHPSPLMGGFGLKHPPPQIMIKNTPVPANPPTNFSSAKFASFITQYSTGQVSVEIEWELQKENSKRWNPETQYTSNYNKSVNVDFTVDTNGVYSEPRPIGTRYLTRNL

SEQ ID NO: 11424 - protein, 735 aa, Artificial Sequence
  source: /note="Description of Artificial Sequence: Synthetic polypeptide"
MAADGYLPDWLEDTLSEGIRQWWKLKPGPPPPKPAERHKDDSRGLVLPGYKYLGPFNGLDKGEPVNEADAAALEHDKAYDRQLDSGDNPYLKYNHADAEFQERLKEDTSFGGNLGRAVFQAKKRVLEPLGLVEEPVKTAPGKKRPVEHSPVEPDSSSGTGKAGQQPARKGLNFGQTGDADSVPDPRPLGQPPAAPASLGSTTMATGSGAPMADNNEGADGVGNSSGNWHCDSQWLGDRVITTSTRTWALPTYNNHLYKQISSQSGASNDNHYFGYSTPWGYFDFNRFHCHFSPRDWQRLINNNWGFRPKRLNFKLFNIQVKEVTQNDGTTTIANNLTSTVPVFTDSEYQLPYVLGSAHQGCLPPFPADVFMVPQYGYLTLNNGSQAVGRSSFYCLEYFPSQMLRTGNNFTFSYTFEDVPFHSSYAHSQSLDRLMNPLIDQYLYYLNKTQSNSGTLQQSRLLFSQAGPTSMSLQAKNWLPGPYYRQQRLSKQANDNNNSNFPWTAATKYHPNGRDSLVDPGPAMASHKDDEEKFFPMHGTLIFGKQGTNANDADLDNVMITDEEEIRTTNPVATGQYGTVSNNLQNSNTGPTTGTVNHQGALPGMVWQDRDVYLQGPIWAKIPHTDGHFHPSPLMGGFGLKHPPPQIMVKNTPVPANPPTNFSSAKFVSFITRYSTGQVSVEIEWELQKENSKRWNPEIQYTSNYNKSVNVDFTVDTNGVYSEPRPIGTRYLTRNL

SEQ ID NO: 11425 - protein, 735 aa, Artificial Sequence
  source: /note="Description of Artificial Sequence: Synthetic polypeptide"
MAADGYLPDWLEDTLSEGIRQWWKLKPGPPPPKPAERHKDDSRGLVLPGYKYLGPFNGPDKGEPVNEADAAALEHDKAYDRQLDSGDNPYLKYNHADAEFQERLKEDTSFGGNLGRAVFQAKKRVLEPLGLVEEPVKTAPGKKRPVEHSPVEPDSSSGTGKAGQQPARKRLNFGQTGDADSVPDPQPLGQPPAAPTSLGSTTMATGSGAPMADNNEGADGVGNSSGNWHCDSQWSGDRVITTSTRTWALPTYNNHLYKQISSQSGASNDNHYFGYSTPWGYFDFNRFHCHFSPRDWQRLINNNWGFRPKRLNFKLFNIQVKEVTQNDGTTTIANNLTSTVQVFTDSEYQLPYVLGSAHQGCLPPFPADVFMVPQYGYLTLNNGSQAVGRSSFYCLEYFPSQMLRTGNNFTFSYTFEDVPFHSSYAHSQSLDRLMNPLIDQYLYYLNKTQSNSGTLQQSRLLFSQAGPTSMSLQAKNWLPGPCYRQQRLSKQANDNNNSNFPWTAATKYHLNGRDSLVNPGPAMASHKDDEEKFFPMHGTLIFGKQGTNANDADLDNVMITDEEEIRTTNPVATEQYGTVSNNLQNSNTGPTTGTVNHQGALPGMVWQDRDVYLQGPIWAKIPHTDGHFHPSPLMGGFGLKHPPPQIMIKNTPVPANPPTNFSSAKFASFITQYSTGQVSVEIEWELQKENSKRWNPEIQYTSNYNKSVNVDFTVDTNGVYSEPRPIGTRYLTRNL

SEQ ID NO: 11426 - protein, 735 aa, Artificial Sequence
  source: /note="Description of Artificial Sequence: Synthetic polypeptide"
MAADGYLPDWLEDTLSEGIRQWWKLKPGPPPPKPAERHKDDSRGLVLPGYKYLGPFNGLDKGEPVNEADAAALEHDKAYDRQLDSGDNPYLKYNHADAEFQERLKEDTSFGGNLGRAVFQAKKRVLEPLGLVEEPVKTAPGKKRPVEHSPVEPDSSSGTGKAGQQPARKRLNFGQTGDADSVPDPQPLGQPPAAPTSLGSTTMATGSGAPMADNNEGADGVGNSSGNWHCDSQWSGDRVITTSTRTWALPTYNNHLYKQISSQSGASNDNHYFGYSTPWGYFDFNRFHCHFSPRDWQRLINNNWGFRPKRLNFKLFNIQVKEVTQNDGTTTIANNLTSTVQVFTDSEYQLPYVLGSAHQGCLPPFPADVFMVPQYGYLTLNNGSQAVGRSSFYCLEYFPSQMLRTGNNFTFSYTFEDVPFHSSYAHSQSLDRLMNPLIDQYLYYLNKTQSNSGTLQQSRLLFSQAGPTSMSLQAKNWLPGPCYRQQRLSKQANDNNNSNFPWTAATKYHLNGRDSLVNPGPAMASHKDDEEKFFPMHGTLIFGKQGTNANDADLDNVMITDEEEIRTTNPVATEQYGTVSNNLQNSNTGPTTGTVNHQGALPGMVWQDRDVYLQGPIWAKIPHTDGHFHPSPLMGGFGLKHPPPQIMIKNTPVPANPPTNFSSAKFASFITQYSTGQVSVEIEWELQKENSKRWNPETQYTSNYNKSVNVDFTVDTNGVYSEPRPIGTRYLTRNL

SEQ ID NO: 11427 - protein, 735 aa, Artificial Sequence
  source: /note="Description of Artificial Sequence: Synthetic polypeptide"
  MOD_RES (574)..(574): Any naturally occurring amino acid
MAADGYLPDWLEDTLSEGIRQWWKLKPGPPPPKPAERHKDDSRGLVLPGYKYLGPFNGLDKGEPVNEADAAALEHDKAYDRQLDSGDNPYLKYNHADAEFQERLKEDTSFGGNLGRAVFQAKKRVLEPLGLVEEPVKTAPGKKRPVEHSPVEPDSSSGTGKAGQQPARKGLNFGQTGDADSVPDPRPLGQPPAAPASLGSTTMATGSGAPMADNNEGADGVGNSSGNWHCDSQWLGDRVITTSTRTWALPTYNNHLYKQISSQSGASNDNHYFGYSTPWGYFDFNRFHCHFSPRDWQRLINNNWGFRPKRLNFKLFNIQVKEVTQNDGTTTIANNLTSTVPVFTDSEYQLPYVLGSAHQGCLPPFPADVFMVPQYGYLTLNNGSQAVGRSSFYCLEYFPSQMLRTGNNFTFSYTFEDVPFHSSYAHSQSLDRLMNPLIDQYLYYLNKTQSNSGTLQQSRLLFSQAGPTSMSLQAKNWLPGPYYRQQRLSKQANDNNNSNFPWTAATKYHPNGRDSLVDPGPAMASHKDDEEKFFPMHGTLIFGKQGTNANDADLDNVMITDEEEIRTTNPVATXQYGTVSNNLQNSNTGPTTGTVNHQGALPGMVWQDRDVYLQGPIWAKIPHTDGHFHPSPLMGGFGLKHPPPQIMVKNTPVPANPPTNFSSAKFASFITRYSTGQVSVEIEWELQKENSKRWNPEIQYTSNYNKSVNVDFTVDTNGVYSEPRPIGTRYLTRNL

SEQ ID NO: 11428 - protein, 735 aa, Artificial Sequence
  source: /note="Description of Artificial Sequence: Synthetic polypeptide"
MAADGYLPDWLEDTLSEGIRQWWKLKPGPPPPKPAERHKDDSRGLVLPGYKYLGPFNGLDKGEPVNEADAAAPEHDKAYDRQLDSGDNPYPKYNHADAEFQERLKEDTSFGGNLGRAVFQAKKRVLEPLGLVEEPVKTAPGKKRPVEHSPVEPDSSSGTGKAGQQPARKRLNFGQTGDADSVPDPQPLGQPPAAPTSLGSTTMATGSGAPMADNNEGADGVGNSSGNWHCDSQWSGDRVITTSTRTWALPTYNNHLYKQISSQSGASNDNHYFGYSTPWGYFDFNRFHCHFSPRDWQRLINNNWGFRPKRLNFKLFNIQVKEVTQNDGTTTIANNLTSTVQVFTDSEYQLPYVLGSAHQGCLPPFPADVFMVPQYGYLTLNNGSQAVGRSSFYCLEYFPSQMLRTGNNFTFSYTFEDVPFHSSYAHSQSLDRLMNPLIDQYLYYLNKTQSNSGTLQQSRLLFSQAGPTSMSLQAKNWLPGPCYRQQRLSKQANDNNNSNFPWTAATKYHLNGRDSLVNPGPAMASHKDDEEKFFPMHGTLIFGKQGTNANDADLDNVMITDEEEIRTTNPVATEQYGTVSNNLQNSNTGPTTGTVNHQGALPGMVWQDRDVYLQGPIWAKIPHTDGHFHPSPLMGGFGLKHPPPQIMIKNTPVPANPPTNFSSAKFASFITQYSTGQVSVEIEWELQKENSKRWNPEIQYTSNYNKSVNVDFTVDTNGVYSEPRPIGTRYLTRNL

SEQ ID NO: 11429 - protein, 735 aa, Artificial Sequence
  source: /note="Description of Artificial Sequence: Synthetic polypeptide"
MAADGYLPDWLEDTLSEGIRQWWKLKPGPPPPKPAERHKDDSRGLVLPGYKYLGPFNGLDKGEPVNEADAAALEHDKAYDRQLDSGDNPYLKYNHADAEFQERLKEDTSFGGNLGRAVFQAKKRVLEPLGLVVEPVKTAPGKKRPVEHSPVEPDSSSGTGKAGQQPARKRLNFGQTGDADSVPDPQPLGQPPAAPTSLGSTTMATGSGAPMADNNEGADGVGNSSGNWHCDSQWSGDRVITTSTRTWALPTYNNHLYKQISSRSGASNDNHYFGYSTPWGYFDFNGFHCHFSPRDWQRLINNNWGFRPKRLNFKLFNIQVKEVTQNDGTTTIANNLTSTVQVFTDSEYQLPHVLGSAHQGCLPPFPADVFMVPQYGYLTLNNGSQAVGRSSFYCPEYFPSQMLRTGNNFTFSYTFEDVPFHSSYAHSQSLDRLMNPLIDQYLYYLNKTQSNSGTLQQSRLLFSQAGPTSMSLQAKNWLPGPCYRQQRLSKQANGNNNSNFPWTAATKYHLNGRDSLVNPGPAMASHKDDEEKFFPMHGTLIFGKQGTNANDADLDNVMITDEEEIRTTNPVATEQYGTVSNNLQNSNTGPTTGTVNHQGALPGMVWQDRDVYLQGPIWAKIPHTDGHFHPSPLMGGFGLKHPPPQIMIKNTPVPANPPTNFSSAKFASFITQYSTGQVSVEIEWELQKENSKRWNPEIQYTSNYNKSVNVDFTVDTNGVYSEPRPIGTRYLTRNL

SEQ ID NO: 11430 - protein, 735 aa, Artificial Sequence
  source: /note="Description of Artificial Sequence: Synthetic polypeptide"
MAADGYLPDWLEDTLSEGIRQWWKLKPGPPPPKPAERHKDDSRGLVLPGYKYLGPFNGLDKGEPVNEADAAALEHDKAYDRQLDSGDNPYLKYNHADAEFQERLKEDTSFGGNLGRAVFQAKKRVLEPLGLVEEPVKTVPGKKRPVEHSPVEPDSSSGTGKAGQQPARKRLNFGQTGDADSVPDPQPLGQPPAAPTSLGSTTMATGSGAPMADNNEGADGVGNSSGNWHCDSQWSGDRVITTSTRTWALPTYNNHPYKQISSQSGASNDNHYFGYSTPWGYFDFNRFHCHFSPRDWQRLINNNWGFRPKRLNFKLFNIQVKEVTQNDGTTTIANNLTSTVQVFTDSEYQLPYVLGSAHQGRLPPFPADVFMVPQYGYLTLNNGSQAVGRSSFYCLEYFPSQMLRTGNNFTFSYTFEDVPFHSSYAHSQSLDRLMNPLIDQYLYYLNKTQSNSGTLQQSRLLFSQAGPTSMSLQAKNWLPGPCYRQQRLSKQADDNNNSNFPWTAATKYHLNGRDSLVNPGPAMASHKDDEEKFFPMHGTLIFGKQGTNANDADLDNVMITDEEEIRTTNPVATEQYGTVSNNLQNSNTGPTTGTVNHQGALPGMVWQDRDVYLQGPIWAKIPHTDGHFHPSPLMGGFGLKHPPPQIMIKNTPVPANPPTNFSSAKFASFITQYSTGQVSVEIEWELQKENSKRWNPEIQYTSNYNKSVNVDFTVDANGVYSEPRPIGTRYLTRNL

SEQ ID NO: 11431 - protein, 735 aa, Artificial Sequence
  source: /note="Description of Artificial Sequence: Synthetic polypeptide"
MAADGYLPDWLEDTLSEGIRQWWKLKPGPPPPKPAERHKDDSRGLVLSGYKYLGPFNGLDKGEPVNEADAAALEHDKAYDRQLDSGDNPYLKYNHADAEFQERLKEDTSFGGNLGRAVFQAKKRVLEPLGLVEEPVKTAPGKKRPVEHSPVEPDSSSGTGKAGQQPARKRLNFGQTGDADSVPDPQPLGQPPAAPTSLGSTTMATGSGAPMADNNEGADGVGNSSGNWHCDSQWSGDRVITTSTRTWALPTYNNHLYKQISSQSGASNDNHYFGYSTPWGYFDFNRFHCHFSPRDWQRLINNNWGFRPKRLNFKLFNIQVKEVTQNDGTTTIANNLTSTVQVFTDSEYQLPYVLGSAHQGCLPPFPADVFMVPQYGYLTLNNGSQAVGRSSFYCLEYFPSQMLRTGNNFTFSYTFEDVPFHSSYAHSQSLDRLMNPLIDQYLYYLNKTQSNSGTLQQSRLLFSQAGPTSMSLQAKNWLPGPCYRQQRLSKQANDNNNSNFPWTAATKYHLNGRDSLVNPGPAMASHKDDEEKFFPMHGTLIFGKQGTNANDADLDNVMITDEEEIRTTNPVATEQYGTVSNNLQNSNTGPTTGTVNHQGALPGMVWQDRDVYLQGPIWAKIPHTDGHFHPSPLMGGFGLKHPPPQIMIKNTPVPANPPTNFSSAKFASFITQYSTGQVSVEIEWELQKENSKRWNPEIQYTSNYNKSVNVDFTVDTNGVYSEPRPIGTRYLTRNL

SEQ ID NO: 11432 - protein, 735 aa, Artificial Sequence
  source: /note="Description of Artificial Sequence: Synthetic polypeptide"
MAADGYLPDWLEDTLSEGIRQWWKLKPGPPPPKPAERHKDDSRGLVLPGYKYLGPFNGLDKGEPVNEADAAALEHDKAYDRQLDSGDNPYLKYNHADAEFQERLKEDTSFGGNLGRAVFQAKKRVLEPLGLVEEPVKTAPGKKRPVEHSPVEPDSSSGTGKAGQQPARKRLNFGQTGDADSVPDPQPLGQPPAAPTSLGSTTMATGSGAPMADNNEGADGVGNSSGNWHCDSQWSGDRVITTSTRTWALPTYNNHLYKQISSQSGASNDNHYFGYSTPWGYFDFNRFHCHFSPRDWQRLINNNWGFRPKRLNFKLFNIQVKEVTQNDGTTTIANNLTSTVQVFTDSEYQLPYVLGSAHQGCLPPFPADVFMVPQYGYLTLNNGSQAVGRSSFYCLEYFPSQMLRTGNNFTFSYTFEDVPFHSSCAHSQSLDRLMNPLIDQYLYYLNKTQSNSGTLQQSRLLFSQAGPTSMSLQAKNWLPGPCYRQQRLSKQANDNNNSNFPWTAATKYHLNGRDSLVNPGPAMASHKDDEEKFFPMHGTLIFGKQGTNANDADLDNVMITDEEEIRTTNPVATEQYGTVSNNLQNSNTGPTTGTVNHQGALPGMVWQDRDVYLQGPIWAKIPHTDGHFHPSPLMGGFGLKHPPPQIMIKNTPVPANPPTNFSSAKFASFITQYSTGQVSVEIEWELQKENSKRWNPEIQYTSNYNKSVNVDFTVDTNGVYSEPRPIGTRYLTRNL

SEQ ID NO: 11433 - protein, 735 aa, Artificial Sequence
  source: /note="Description of Artificial Sequence: Synthetic polypeptide"
MAADGYLPDWLEDTLSEGIRQWWKLKPGPPPPKPAERHKDDSRGLVLPGYKYLGPFNGLDKGEPVNEADAAALEHDKAYDRQLDSGDNPYLKYNHADAEFQERLKEDTSFGGNLGRAVFQAKKRVLEPLGLVEEPVKTAPGKKRPVEHSPVEPDSSSGTGKAGQQPARKRLNFGQTGDADSVPDPQPLGQPPAAPTSLGSTTMATGSGAPMADNNEGADGVGNSSGNWHCDSQWSGDRVITTSTRTWALPTYNNHLYKQISSQSGASNDNHYFGYSTPWGYFDFNRFHCHFSPRDWQRLINNNWGFRPKRLNFKLFNIQVKEVTQNDGTTTIANNLTSTVPVFTDSEYQLPYVLGSAHQGCLPPFPADVFMVPQYGYLTLNNGSQAVGRSSFYCLEYFPSQMLRTGNNFTFSYTFEDVPFHSSYAHSQSLDRLMNPLIDQYLYYLNKTQSNSGTLQQSRLLFSQAGPTSMSLQAKNWLPGPYYRQQRLSKQANDNNNSNFPWTAATKYHPNGRDSLVDPGPAMASHKDDEEKFFPMHGTLIFGKQGTNANDADLDNVMITDEEEIRTTNPVATGQYGTVSNNLQNSNTGPTTGTVNHQGALPGMVWQDRDVYLQGPIWAKIPHTDGHFHPSPLMGGFGLKHPPPQIMVKNTPVPANPPTNFSSAKFASFITRYSTGQVSVEIEWELQKENSKRWNPEIQYTSNYNKSVNVDFTVDTNGVYSEPRPIGTRYLTRNL

SEQ ID NO: 11434 - protein, 735 aa, Artificial Sequence
  source: /note="Description of Artificial Sequence: Synthetic polypeptide"
MAADGYLPDWLEDTLSEGIRQWWKLKPGPPPPKPAERHKDDSRGLVLPGYKYLGPFNGPDKGEPVNEADAAALEHDKAYDRQLDSGDNPYLKYNHADAEFQERLKEDTSFGGNLGRAVFQAKKRVLEPLGLVEEPVKTAPGKKRPVEHSPVEPDSSSGTGKAGQQPARKRLNFGQTGDADSVPDPQPLGQPPAAPTSLGSTTMATGSGAPMADNNEGADGVGNSSGNWHCDSQWSGDRVITTSTRTWALPTYNNHLYKQISSQSGASNDNHYFGYSTPWGYFDFNRFHCHFSPRDWQRLINNNWGFRPKRLNFRLFNIQVKEVTQNDGTTTIANNLTSTVQVFTDSEYQLPYVLGSAHQGCLPPFPADVFMVPQYGYLTLNNGSQAVGRSSFYCLEYFPSQMLRTGNNFTFSYTFEDVPFHSSYAHSQSLDRLMNPLIDQYLYYLNKTQSNSGTLQQSRLLFSQAGPTSMSLQAKNWLPGPCYRQQRLSKQANDNNNSNFPWTAATKYHLNGRDSLVNPGPAMASHKDDEEKFFPMHGTLIFGKQGTNANDADLDNVMITDEEEIRTTNPVATEQYGTVSNNLQNSNTGPTTGTVNHQGALPGMVWQDRDVYLQGPIWAKIPHTDGHFHPSPLMGGFGLKHPPPQIMIKNTPVPANPPTNFSSAKFASFITQYSTGQVSVEIEWELQKENSKRWNPEIQYTSNYNKSVNVDFTVDTNGVYSEPRPIGTRYLTRNL

SEQ ID NO: 11435 - protein, 735 aa, Artificial Sequence
  source: /note="Description of Artificial Sequence: Synthetic polypeptide"
MAADGYLPDWLEDTLSEGIRQWWKLKPGPPPPKPAERHKDDSRGLVLPGYKYLGPFNGPDKGEPVNEADAAALEHDKAYDRQLDSGDNPYLKYNHADAEFQERLKEDTSFGGNLGRAVFQAKKRVLEPLGLVEEPVKTAPGKKRPVEHSPVEPDSSSGTGKAGQQPARKRLNFGQTGDADSVPDPQPLGQPPAAPTSLGSTTMATGSGAPMADNNEGADGVGNSSGNWHCDSQWSGDRVITTSTRTWALPTYNNHLYKQISSQSGASNDNHYFGYSTPWGYFDFNRFHCHFSPRDWQRLINNNWGFRPKRLNFRLFNIQVKEVTQNDGTTTIANNLTSTVQVFTDSEYQLPYVLGSAHQGCLPPFPADVFMVPQYGYLTLNNGGQAVGRSSFYCLEYFPSQMLRTGDNFTFSYTFEDVPFHSSYAHSQSLDRLMNPLIDQYLYYLNKTQSNSGTLQQSRLLFSQAGPTSMSLQAKNWLPGPCYRQQRLSKQANDNNNSNFPWTAATKYHLNGRDSLVNPGPAMASHKDDEEKFFPMHGTLIFGKQGTNANDADLDNVMITDEEEIRTTNPVATEQYGTVSNNLQNSNTGPTTGTVNHQGALPGMVWQDRDVYLQGPIWAKIPHTDGHFHPSPLMGGFGLKHPPPQIMIKNTPVPANPPTNFSSAKFASFITQYSTGQVSVEIEWELQKENSKRWNPEIQYTSNYNKSVNVDFTVDTNGVYSEPRPIGTRYLTRNL

SEQ ID NO: 11436 - protein, 735 aa, Artificial Sequence
  source: /note="Description of Artificial Sequence: Synthetic polypeptide"
MAADGYLPDWLEDTLSEGIRQWWKLKPGPPPPKPAERHKDDSRGLVLPGYKYLGPFNGLDKGEPVNEADAAALEHDKAYDRQLDSGDNPYLKYNHADAEFQERLKEDTSFGGNLGRAVFQAKKRVLEPLGLVEEPVKTAPGKKRPVEHSPVEPDSSSGTGKAGQQPARKRLNFGQTGDADSVPDPQPLGQPPAAPTSLGSTTMATGSGAPMADNNEGADGVGNSSGNWHCDSQWSGDRVITTSTRTWALPTYNNHLYKQISSQSGASNDNHYFGYSTPWGYFDFNRFHCHFSPRDWQRLINNNWGFRPKRLNFKLFNIQVKEVTQNDGTTTIANNLTSTVQVFTDSEYQLPYVLGSAHQGCLPPFPADVFMVPQYGYLTLNNGSQAVGRSSFYCLEYFPSQMLRTGNNFTFSYTFEDVPFHSSYAHSQSLDRLMNPLIDQYLYYLNKTQSNSGTLQQSRLLFSQAGPTSMSLQAKNWLPGPCYRQQRLSKQANDNNNSNFPWTAATKYHLNGRDSLVNPGPAMASHKDDEEKFFPMHGTLIFGKQGTNANDADLDNAMITDEEEIRTTNPVATEQYGTVSNNLQNSNTGPTTGTVNHQGALPGMVWQDRDVYLQGPIWAKIPHTDGHFHPSPLMGGFGLKHPPPQIMIKNTPVPANPPTNFSSAKFASFITQYSTGQVSVEIEWELQKENSKRWNPEIQYTSNYNKSVNVDFTVDTNGVYSEPRPIGTRYLTRNL

SEQ ID NO: 11437 - protein, 735 aa, Artificial Sequence
  source: /note="Description of Artificial Sequence: Synthetic polypeptide"
MAADGYLPDWLEDTLSEGIRQWWKLKPGPPPPKPAERHKDDSRGLVLPGYKYLGPFNGLDKGEPVNEANAAALEHDKAYDRQLDSGDNPYLKYNHADAEFQERLKEDTSFGGNLGRAVFQAKKRVLEPLGLVEEPVKTAPGKKRPVEHSPVEPDSSSGTGKAGQQPARKRLNFGQTGDADSVPDPQPLGQPPAAPTSLGSTTMATGSGAPMADNNEGADGVGNSSGNWHCDSQWSGDRVITTSTRTWALPTYNNHLYKQISSQSGASNDNHYFGYSTPWGYFDFNRFHCHFSPRDWQRLINNNWGFRPKRLNFKLFNIQVKEVTQNDGTTTIANNLTSTVQVFTDSEYQLPYVLGSAHQGCLPPFPADVFMVPQYGYLTLNNGSQAVGRSSFYCLEYFPSQMLRTGNNFTFSYTFEDVPFHSSYAHSQSLDRLMNPLIDQYLYYLNKTQSNSGTLQQSRLLFSQAGPTSMSLQAKNWLPGPCYRQQRLSKQANDNNNSNFPWTAATKYHLNGRDSLVNPGPAMASHKDDEEKFFPMHGTLIFGKQGTNANDADLDNVMITDEEEIRTTNPVATEQYGTVSNNLQNSNTGPTTGTVNHQGALPGMVWQDRDVYLQGPIWAKIPHTDGHFHPSPLMGGFGLKHPPPQIMIKNTPVPANPPTNFSSAKFASFITQYSTGQVSVEIEWELQKENSKRWNPETQYTSNYNKSVNVDFTVDTNGVYSEPRPIGTRYLTRNL

SEQ ID NO: 11438 - protein, 735 aa, Artificial Sequence
  source: /note="Description of Artificial Sequence: Synthetic polypeptide"
MAADGYLPDWLEDTLSEGIRQWWKLKPGPPPPKPAERHKDDSRGLVLPGYKYLGPFNGPDKGEPVNEADAAALEHDKAYDRQLDSGDNPYLKYNHADAEFQERLKEDTSFGGNLGRAVFQAKKRVLEPLGLVEEPVKTAPGKKRPVEHSPVEPDSSSGTGKAGQQPARKRLNFGQTGDADSVPDPQPLGQPPAAPTSLGSTTMATGSGAPMADNNEGADGVGNSSGNWHCDSQWSGDRVITTSTRTWALPTYNNHLYKQISSQSGASNDNHYFGYSTPWGYFDFNRFHCHFSPRDWQRLINNNWGFRPKRLNFRLFNIQVKEVTQNDGTTTIANNLTSTVQVFTDSEYQLPYVLGSAHQGCLPPFPADVFMVPQYGYLTLNNGSQAVGRSSFYCLEYFPSQMLRTGDNFTFSYTFEDVPFHSSYAHSQSLDRLMNPLIDQYLYYLNKTQSNSGTLQQSRLLFSQAGPTSMSLQAKNWLPGPCYRQQRLSKQANDNNNSNFPWTAATKYHLNGRDSLVNPGPAMASHKDDEEKFFPMHGTLIFGKQGTNANDADLDNVMITDEEEIRTTNPVATEQYGTVSNNLQNSNTGPTTGTVNHQGALPGMVWQDRDVYLQGPIWAKIPHTDGHFHPSPLMGGFGLKHPPPQIMIKNTPVPANPPTNFSSAKFASFITQYSTGQVSVEIEWELQKENSKRWNPEIQYTSNYNKSVNVDFTVDTNGVYSEPRPIGTRYLTRNL

SEQ ID NO: 11439 - protein, 735 aa, Artificial Sequence
  source: /note="Description of Artificial Sequence: Synthetic polypeptide"
MAADGYLPDWLEDTLSEGIRQWWKLKPGPPPPKPAERHKDDSRGLVLPGYKYLGPFNGLDKGEPVNEADAAALEHDKAYDRQLDSGDNPYLKYNHADAEFQERLKEDTSFGGNLGRAVFQAKKRVLEPLGLVEEPVKTAPGKKRPVEHSPVEPDSSSGTGKAGQQPARKGLNFGQTGDADSVPDPRPLGQPPAAPASLGSTTMATGSGAPMADNNEGADGVGNSSGNWHCDSQWLGDRVITTSTRTWALPTYNNHLYKQISSQSGASNDNHYFGYSTPWGYFDFNRFHCHFSPRDWQRLINNNWGFRPKRLNFKLFNIQVKEVTQNDGTTTIANNLTSTVPVFTDSEYQLPYVLGSAHQGCLPPFPADVFMVPQYGYLTLNNGSQAVGRSSFYCLEYFPSQMLRTGNNFTFSYTFEDVPFHSSYAHSQSLDRLMNPLIDQYLYYLNKTQSNSGTLQQSRLLFSQAGPTSMSLQAKNWLPGPYYRQQRLSKQANDNNNSNFPWTAATKYHPNGRDSLVDPGPAMASHKDDEEKFFPMHGTLIFGKQGTNANDADLDNVMITDEEEIRTTNPVATGQYGTVSNNLQNSNTGPTTGTVNHQGALPGMVWQDRDVYLQGPIWAKIPHTDGHFHPSPLMGGFGLKHPPPQIMVKNTPVPANPPTNFSSAKFASFITRYSTGQVSVEIEWELQKENSKRWNPEIQYTSNYNKSVNVDFTVDTNGVYSEPRPIGTRYLTRNL

SEQ ID NO: 11440 - protein, 735 aa, Artificial Sequence
  source: /note="Description of Artificial Sequence: Synthetic polypeptide"
MAADGYLPDWLEDTLSEGIRQWWKLKPGPPPPKPAERHKDDSRGLVLPGYKYLGPFNGLDKGEPVNEADAAALEHDKAYDRQLDSGDNPYLKYNHADAEFQERLKEDTSFGGNLGRAVFQAKKRVLEPLGLVEEPVKTVPGKKRPVEHSPVEPDSSSGTGKAGQQPARKRLNFGQTGDADSVPDPQPLGQPPAAPTSLGSTTMATGSGAPMADNNEGADGVGNSSGNWHCDSQWSGDRVITTSTRTWALPTYNNHPYKQISSQSGASNDNHYFGYSTPWGYFDFNRFHCHFSPRDWQRLINNNWGFRPKRLNFKLFNIQVKEVTQNDGTTTIANNLTSTVQVFTDSEYQLPYVLGSAHQGRLPPFPADVFMVPQYGYLTLNNGSQAVGRSSFYCLEYFPSQMLRTGNNFTFSYTFEDVPFHSSYAHSQSLDRLMNPLIDQYLYYLNKTQSNSGTLQQSRLLFSQAGPTSMSLQAKNWLPGPCYRQQRLSKQADDNNNSNFPWTAATKYHLNGRDSLVNPGPAMASHKDDEEKFFPMHGTLIFGKQGTNANDADLDNVMITDEEEIRTTNPVATEQYGTVSNNLQNSNTGPTTGTVNHQGALPGMVWQDRDVYLQGPIWAKIPHTDGHFHPSPLMGGFGLKHPPPQIMIKNTPVPANPPTNFSSAKFASFITQYSTGQVSVEIEWELQKENSKRWNPEIQYTSNYNKSVNVDFTVDTNGVYSEPRPIGTRYLTRNL

SEQ ID NO: 11441 - protein, 735 aa, Artificial Sequence
  source: /note="Description of Artificial Sequence: Synthetic polypeptide"
MAADGYLPDWLEDTLSEGIRQWWKLKPGPPPPKPAERHKDDSRGLVLPGYKYLGPFNGLDKGEPVNEADAAALEHDKAYDRQLDSGDNPYLKYNHADAEFQERLKEDTSFGGNLGRAVFQAKKRVLEPLGLVEEPVKTAPGKKRPVEQSPAEPDSSSGTGKAGNQPARKRLNFGQTGDADSVPDPQPLGQPPAAPSGLGSTTMATGSGAPMADNNEGADGVGNSSGNWHCDSQWLGDRVITTSTRTWALPTYNNHLYKQISSQSGASNDNHYFGYSTPWGYFDFNRFHCHFSPRDWQRLINNNWGFRPKRLNFKLFNIQVKEVTQNDGTTTIANNLTSTVQVFTDSEYQLPYVLGSAHQGCLPPFPADVFMVPQYGYLTLNNGSQAVGRSSFYCLEYFPSQMLRTGNNFTFSYTFEDVPFHSSYAHSQSLDRLMNPLIDQYLYYLNKTQSNSGTLQQSRLLFSQAGPTSMSLQAKNWLPGPCYRQQRLSKQANDNNNSNFPWTAATKYHLNGRDSLVNPGPAMASHKDDEEKFFPMHGTLIFGKQGTNANDADLDNVMITDEEEIRTTNPVATEQYGTVSNNLQNSNTGPTTGTVNHQGALPGMVWQDRDVYLQGPIWAKIPHTDGHFHPSPLMGGFGLKHPPPQIMIKNTPVPANPPTNFSSAKFASFITQYSTGQVSVEIEWELQKENSKRWNPEIQYTSNYNKSVNVDFTVDTNGVYSEPRPIGTRYLTRNL

SEQ ID NO: 11442 - protein, 734 aa, Artificial Sequence
  source: /note="Description of Artificial Sequence: Synthetic polypeptide"
MAADGYLPDWLEDTLSEGIRQWWKLKPGPPPKPAERHKDDSRGLVLPGYKYLGPFNGLDKGEPVNEADAAALEHDKAYDRQLDSGDNPYLKYNHADAEFQERLKEDTSFGGNLGRAVFQAKKRVLEPLGLVEEPVKTAPGKKRPVEQSPAEPDSSSGTGKAGNQPARKRLNFGQTGDADSVPDPQPLGQPPAAPSGLGSTTMATGSGAPMADNNEGADGVGNSSGNWHCDSQWLGDRVITTSTRTWALPTYNNHLYKQISSQSGASNDNHYFGYSTPWGYFDFNRFHCHFSPRDWQRLINNNWGFRPKRLNFKLFNIQVKEVTQNDGTTTIANNLTSTVQVFTDSEYQLPYVLGSAHQGCLPPFPADVFMVPQYGYLTLNNGSQAVGRSSFYCLEYFPSQMLRTGNNFTFSYTFEDVPFHSSYAHSQSLDRLMNPLIDQYLYYLNKTQSNSGTLQQSRLLFSQAGPTSMSLQAKNWLPGPCYRQQRLSKQANDNNNSNFPWTAATKYHLNGRDSLVNPGPAMASHKDDEEKFFPMHGTLIFGKQGTNANDADLDNVMITDEEEIRTTNPVATEQYGTVSNNLQNSNTGPTTGTVNHQGALPGMVWQDRDVYLQGPIWAKIPHTDGHFHPSPLMGGFGLKHPPPQIMIKNTPVPANPPTNFSSAKFASFITQYSTGQVSVEIEWELQKENSKRWNPEIQYTSNYNKSVNVDFTVDTNGVYSEPRPIGTRYLTRNL

SEQ ID NO: 11443 - protein, 735 aa, Artificial Sequence
  source: /note="Description of Artificial Sequence: Synthetic polypeptide"
MAADGYLPDWLEDTLSEGIRQWWKLKPGPPPPKPAERHKDDSRGLVLPGYKYLGPFNGLDKGEPVNEADAAALEHDKAYDRQLDSGDNPYLKYNHADAEFQERLKEDTSFGGNLGRAVFQAKKRVLEPLGLVEEPVKTAPGKKRPVEQSPAEPDSSSGTGKAGNQPARKRLNFGQTGDADSVPDPQPLGQPPAAPSGLGSTTMATGSGAPMADNNEGADGVGNSSGNWHCDSQWLGDRVITTSTRTWALPTYNNHLYKQISSQSGASNDNHYFGYSTPWGYFDFNRFHRHFSPRDWQRLINNNWGFRPKRLNFKLFNIQVKEVTQNDGTTTIANNLTSTVQVFTDSEYQLPYVLGSAHQGCLPPFPADVFMVPQYGYLTLNNGSQAVGRSSFYCLEYFPSQMLRTGNNFTFSYTFEDVPFHSSYAHSQSLDRLMNPLIDQYLYYLNKTQSNSGTLQQSRLLFSQAGPTSMSLQAKNWLPGPCYRQQRLSKQANDNNNSNFPWTAATKYHLNGRDSLVNPGPAMASHKDDEEKFFPMHGTLIFGKQGTNANDADLDNVMITDEEEIRTTNPVATEQYGTVSNNLQNSNTGPTTGTVNHQGALPGMVWQDRDVYLQGPIWAKIPHTDGHFHPSPLMGGFGLKHPPPQIMIKNTPVPANPPTNFSSAKFASFITQYSTGQVSVEIEWELQKENSKRWNPEIQYTSNYNKSVNVDFTVDTNGVYSEPRPIGTRYLTRNL

SEQ ID NO: 11444 - protein, 734 aa, Artificial Sequence
  source: /note="Description of Artificial Sequence: Synthetic polypeptide"
MAADGYLPDWLEDTLSEGIRQWWKLKPGPPPPKPAERHKDDSRGLVLPGYKYLGPFNGLDKGEPVNEADAAALEHDKAYDRQLDSGDNPYLKYNHADAEFQERLKEDTSFGGNLGRAVFQAKKRVLEPLGLVEEPVKTAPGKKRPVEQSPAEPDSSSGTGKAGNQPARKRLNFGQTGDADSVPDPQPLGQPPAAPSGLGSTTMATGSGAPMADNNEGADGVGNSSGNWHCDSQWLGDRVITTSTRTWALPTYNNHLYKQISSQSGASNDNHYFGYSTPWGYFDFNRFHCHFSPRDWQRLINNNWGFRPKRLNFKLFNIQVKEVTQNDGTTTIANNLTSTVQVFTDSEYQLPYVLGSAHQGCLPPFPADVFMVPQYGYLTLNNGSQAVGRSSFYCLEYFPSQMLRTGNNFTFSYTFEDVPFHSSYAHSQSLDRLMNPLIDQYLYYLNKTQSNSGTLQQSRLLFSQAGPTSMSLQAKNWLPGPCYRQQRLSKQANDNNSNFPWTAATKYHLNGRDSLVNPGPAMASHKDDEEKFFPMHGTLIFGKQGTNANDADLDNVMITDEEEIRTTNPVATEQYGTVSNNLQNSNTGPTTGTVNHQGALPGMVWQDRDVYLQGPIWAKIPHTDGHFHPSPLMGGFGLKHPPPQIMIKNTPVPANPPTNFSSAKFASFITQYSTGQVSVEIEWELQKENSKRWNPEIQYTSNYNKSVNVDFTVDTNGVYSEPRPIGTRYLTRNL

SEQ ID NO: 11445 - protein, 735 aa, Artificial Sequence
  source: /note="Description of Artificial Sequence: Synthetic polypeptide"
MAADGYLPDWLEDTLSEGIRQWWKLKPGPPPPRPAERHQDDSRGLVLPGYKYLGPFNGLDKGEPVNEADAAALEHDKAYDRQLDSGDNPYLKYNHADAEFQERLKEDTSFGGNLGRAVFQAKKRVLEPLGLVEEPVKTAPGKKRPVEHSPAEPDSSSGTGKAGQQPARKRLNFGQTGDADSVPDPQPLGQPPAAPTSLGSTTMATGSGAPMADNNEGADGVGNSSGNWHCDSQWLGDRVITTSTRTWALPTYNNHLYKQISSQSGASNDNHYFGYSTPWGYFDFNRFHCHFSPRDRQRLINNNWGFRPKRLNFKLFNIQVKEVTQNDGTTTIANNLTSTVQVFTDSEYQLPYVLGSAHQGCLPPFPADVFMVPQYGYLTLNNGSQAVGRSSFYCLEYFPSQMLRTGNNFTFSYTFEDVPFHSSYAHSQSLDRLMNPLIDQYLYYLNRTQSNSGTLQQSRLLFSQAGPTSMSLQAKNWLPGPCYRQQRLSKQANDNNNSNFPWTAATKYHLNGRDSLVNPGPAMASHKDDEEKFFPMHGTLIFGKQGTNANDADLEHVMITDEEEIRTTNPVATEQYGNVSNNLQNSNTGPTTENVNHQGALPGMVWQDRDVYLQGPIWAKIPHTDGHFHPSPLMGGFGLKHPPPQIMIKNTPVPANPPTNFSAAKFASFITQYSTGQVSVEIEWELQKENSKRWNPEIQYTSNYNKSVNVDFTVDANGVYSEPRPIGTRYLTRNL

SEQ ID NO: 11446 - protein, 735 aa, Artificial Sequence
  source: /note="Description of Artificial Sequence: Synthetic polypeptide"
MAADGYLPDWLEDTLSEGIRQWWKLKPGPPPPRPAERHQDDSRGLVLPGYKYLGPFNGLDKGEPVNEADAAALEHDKAYDRQLDSGDNPYLKYNHADAEFQERLKEDTSFGGNLGRAVFQAKKRVLEPLGLVEEPVKTAPGKKRPVEHSPAEPDSSSGTGKAGQQPARKRLNFGQTGDADSVPDPQPLGQPPAAPTSLGSTTMATGSGAPMADNNEGADGVGNSSGNWHCDSQWLGDRVITTSTRTWALPTYNNHLYKQISSQSGASNDNHYFGYSTPWGYFDFNRFHCHFSPRDWQRLINNNWGFRPKRLNFKLFNIQVKEVTQNDGTTTIANNLTSTVQVFTDSEYQLPYVLGSAHQGCLPPFPADVFMVPQYGYLTLNNGSQAVGRSSFYCLEYFPSQMLRTGNNFTFSYTFEDVPFHSSYAHSQSLDRLMNPLIDQYLYYLNRTQSNSGTLQQSRLLFSQAGPTSMSLQAKNWLPGPCYRQQRLSKQANDNNNSNFPWTAATKYRLNGRDSLVNPGPAMASHKDDEEKFFPMHGTLIFGKQGTNANDADLEHVMITDEEEIRTTNPVATEQYGNVSNNLQNSNTGPTTENVNHQGALPGMVWQDRDVYLQGPIWAKIPHTDGHFHPSPLMGGFGLKHPPPQIMIKNTPVPANPPTNFSAAKFASFITQYSTGQVSVEIEWELQKENSKRWNPEIQYTSNYNKSVNVDFTVDANGVYSEPRPIGTRYLTRNL

SEQ ID NO: 11447 - protein, 735 aa, Artificial Sequence
  source: /note="Description of Artificial Sequence: Synthetic polypeptide"
MAADGYLPDWLEDTLSEGIRQWWKLKPGPPPPRPAERHQDDSRGLVLPGYKYLGPFNGLDKGEPVNEADAAALEHDKAYDRQLDSGDNPYLKYNHADAEFQERLKEDTSFGGNLGRAVFQAKKRVLEPLGLVEEPVKTAPGKKRPVEHSPAEPDSSSGTGKAGQQPARKRLNFGQTGDADSVPDPQPLGQPPAAPTSLGSTTMATGSGAPMADNNEGADGVGNSSGNWHCDSQWLGVRVITTSTRTWALPTYNNHLYKQISSQSGASNDNHYFGYSTPWGYFDFNRFHCHFSPRDRQRLINNNWGFRPKRLNFKLFNIQVKEVTQNDGTTTIANNLTSTVQVFTDSEYQLPYVLGSAHQGCLPPFPADVFMVPQYGYLTLNNGSQAVGRSSFYCLEYFPSQMLRTGNNFTFSYTFEDVPFHSSYAHSQSLDRLMNPLIDQYLYYLNRTQSNSGTLQQSRLLFSQAGPTSMSLQAKNWLPGPCYRQQRLSKQANDNNNSNFPWTAATKYHLNGRDSLVNPGPAMASHKDDEEKFFPMHGTLIFGKQGTNANDADLEHVMITDEEEIRTTNPVATEQYGNVSNNLQNSNTGPTTENVNHQGALPGMVWQDRDVYLQGPIWAKIPHTDGHFHPSPLMGGFGLKHPPPQIMIKNTPVPANPPTNFSAAKFASFITQYSTGQVSVEIEWELQKENSKRWNPEIQYTSNYNKSVNVDFTVDANGVYSEPRPIGTRYLTRNL

SEQ ID NO: 11448 - protein, 735 aa, Artificial Sequence
  source: /note="Description of Artificial Sequence: Synthetic polypeptide"
MAADGYLPDWLEDTLSEGIRQWWKLKPGPPPPRPAERHQDDSRGLVLPGYKYLGPFNGLDKGEPVNEADAAALEHDKAYDRQLDSGDNPYLKYNHADAEFQERLKEDTSFGGNLGRAVFQAKKRVLEPLGLVEEPVKTAPGKKRPVEHSPAEPDSSSGTGKAGQQPARKRLNFGQTGDADSVPDPQPLGQPPAAPTSLGSTTMAIGSGAPMADNNEGADGVGNSSGNWHCDSQWLGDRVITTSTRTWALPTYNNHLYKQISSQSGASNDNHYFGYSTPWGYFDFNRFHCHFSPRDWQRLINNNWGFRPKRLNFKLFNIQVKEVTQNDGTTTIANNLTSTVQVFTDSEYQLPYVLGSAHQGCLPPFPADVFMVPQYGYLTLNNGSQAVGRSSFYCLEYFPSQMLRTGNNFTFSYTFEDVPFHSSYAHSQSLDRLMNPLIDQYLYYLNRTQSNSGTLQQSRLLFSQAGPTSMSLQAKNWLPGPCYRQQRLSKQANDNNNSNFPWTAATKYHLNGRDSLVNPGPAMASHKDDEEKFFPMHGTLIFGKQGTNANDADLEHVMITDEEEIRTTNPVATEQYGNVSNNLQNSNTGPTTENVNHQGALPGMVWQDRDVYLQGPIWAKIPHTDGHFHPSPLMGGFGLKHPPPQIMIKNTPVPANPPTNFSAAKFASFITQYSTGQVSVEIEWELQKENSKRWNPEIQYTSNYNKSVNVDFTVDANGVYSEPRPIGTRYLTRNL

SEQ ID NO: 11449 - protein, 735 aa, Artificial Sequence
  source: /note="Description of Artificial Sequence: Synthetic polypeptide"
MAADGYLPDWLEDTLSEGIRQWWKLKPGPPPPRPAERHQDDSRGLVLPGYKYLGPFNGLDKGEPVNEADAAALEHDKAYDRQLDSGDNPYLKYNHADAEFQERLKEDTSFGGNLGRAVFQAKKRVLEPLGLVEEPVKTAPGKKRPVEHSPAEPDSSSGTGKAGQQPARKRLNFGQTGDADSVPDPQPLGQPPAAPTSLGSTTMATGSGAPMADNNEGADGVGNSSGNWHCDSQWLGDRVITTSTRTWALPTYNNHLYKQISSQSGASNDNHYFGYSTPWGYLDFNRFHCHFSPRDWQRLINNNWGFRPKRLNFKLFNIQVKEVTQNDGTTTIANNLTSTVQVFTDSEYQLPYVLGSAHQGCLPPFPADVFMVPQYGYLTLNNGSQAVGRSSFYCLEYFPSQMLRTGNNFTFSYTFEDVPFHSSYAHSQSLDRLMNPLIDQYLYYLNRTQSNSGTLQQSRLLFSQAGPTSMSLQAKNWLPGPCYRQQRLSKQANDNNNSNFPWTAATKYHLNGRDSLVNPGPAMASHKDDEEKFFPMHGTLIFGKQGTNANDADLEHVMITDEEEIRTTNPVATEQYGNVSNNLQNSNTGPTTENVNHQGALPGMVWQDRDVYLQGPIWAKIPHTDGHFHPSPLMGGFGLKHPPPQIMIKNTPVPANPPTNFSAAKFASFITQYSTGQVSVEIEWELQKENSKRWNPEIQYTSNYNKSVNVDFTVDANGVYSEPRPIGTRYLTRNL

SEQ ID NO: 11450 - protein, 735 aa, Artificial Sequence
  source: /note="Description of Artificial Sequence: Synthetic polypeptide"
MAADGYLPDWLEDTLSEGIRQWWKLKPGPPPPKPAERHKDDSRGLVLPGYKYLGPFNGLDKGEPVNEADAAALEHDKAYDRQLDSGDNPYLKYNHADAEFQERLKEDTSFGGNLGRAVFQAKKRVLEPLGLVEEPVKTAPGKKRPVEHSPVEPDSSSGTGKAGQQPARKRLNFGQTGDADSVPDPQPLGQPPAAPTSLGSTTMATGSGAPMADNNEGADGVGNSSGNWHCDSQWLGDRVITTSTRTWALPTYNNHLYKQISSQSGAANDNHYFGYSTPWGYFDFNRFHCHFSPRDWQRLINNNWGFRPKRLNFKLFNIQVKEVTQNDGTTTIANNLTSTVQVFTDSEYQLPYVLGSAHQGCLPPFPADVFMVPQYGYLTLNNGSQAVGRSSFYCLEYFPSQMLRTGNNFTFSYTFEDVPFHSSYAHSQSLDRLMNPLIDQYLYYLNKTQSNSGTLQQSRLLFSQAGPTSMSLQAKNWLPGPCYRQQRLSKQANDNNNSNFPWTAATKYHLNGRDSLVNPGPAMASHKDDEEKFFPMHGTLIFGKQGTNANDADLDNVMITDEEEIRTTNPVATEQYGTVSNNLQNSNTGPTTGTVNHQGALPGMVWQDRDVYLQGPIWAKIPHTDGHFHPSPLMGGFGLKHPPPQIMIKNTPVPANPPTNFSSAKFASFITQYSTGQVSVEIEWELQKENSKRWNPEIQYTSNYNKSVNVDFTVDTNGVYSEPRPIGTRYLTRNL

SEQ ID NO: 11451 - protein, 735 aa, Artificial Sequence
  source: /note="Description of Artificial Sequence: Synthetic polypeptide"
MAADGYLPDWLEDTLSEGIRQWWKLKPGPPPPRPAERHQDDSRGLVLPGYKYLGPFNGLDKGEPVNEADAAALEHDKAYDRQLDSGDNPYLKYNHADAEFQERLKEDTSFGGNLGRAVFQAKKRVLEPLGLVEEPVKTAPGKKRPVEHSPAEPDSSSGTGKAGQQPARKRLNFGQTGDADSVPDPQPLGQPPAAPTSLGSTTMATGSGAPMADNNEGADGVGNSSGNWHCDSQWLGDRVITTSTRTWALPTYNNHLYKQISSQSGASNDNHYFGYSTPWGYFDFNRFHCHFSPRDWQRLINNNWGFRPKRLNFKLFNIQVKEVTQNDGTTTIANNLTSTVQVFTDSEYQLPYVLGSAHQGCLPPFPADVFMVPQYGYLTLNNGSQAVGRSSFYCLEYFPSQMLRTGNNFTFSYTFEDVPFHSSYAHSQSLDRLMNPLIDQYLYYLNRTQSNSGTLQQSRLLFSQAGPTSMSLQAKDWLPGPCYRQQRLSKQANDNNNSNFPWTAATKYHLNGRDSLVNPGPAMASHKDDEEKFFPMHGTLIFGKQGTNANDADLEHVMITDEEEIRTTNPVATEQYGNVSNNLQNSNTGPTTENVNHQGALPGMVWQDRDVYLQGPIWAKIPHTDGHFHPSPPMGGFGLKHPPPQIMIKNTPVPANPPTNFSAAKFASFITQYSTGLVSVEIEWELQKENSKRWNPEIQYTSNYNKSVNVDFTVDANGVYSEPRPIGTRYLTRNL

SEQ ID NO: 11452 - protein, 735 aa, Artificial Sequence
  source: /note="Description of Artificial Sequence: Synthetic polypeptide"
MAADGYLPDWLEDTLSEGIRQWWKLKPGPPPPKPAERHKDDSRGLVLPGYKYLGPFNGLDKGEPVNEADAAALEHDKAYDRQLDSGDNPYLKYNHADAEFQERLKEDTSFGGNLGRAVFQAKKRVLEPLGLVEEPVKTAPGKKRPVEHSPVEPDSSSGTGKAGQQPARKRLNFGQTGDADSVPDPQPLGQPPAAPSGLGTNTMATGSGAPMADNNEGADGVGNSSGNWHCDSTWMGDRVITTSTRTWALPTYNNHLYKQISSQSGASNDNHYFGYSTPWGYFDFNRFHCHFSPRDWQRLINNNWGFRPKRLSFKLFNIQVKEVTQNDGTTTIANNLTSTVQVFTDSEYQLPYVLGSAHQGCLPPFPADVFMVPQYGYLTLNNGSQAVGRSSFYCLEYFPSQMLRTGNNFTFSYTFEDVPFHSSYAHSQSLDRLMNPLIDQYLYYLSKTNAPSGTHQMSRLQFSQAGASDMSGPARNWLPGPCYRQQRVSKQAADNNNSDLPWTGATKYHLNGRDSLVNPGPAMASHKDDEEKFFLMSGVLIFGKQGSNENNVDIEKVMITDEEEIRTTNPVATEQYGSVSTNLQSANTSPATSDVNHQGVLPGMVWQDRDVYLQGPIWAKIPHTDGHFHPSPLMGGFGLKHPPPQILIKNTPVPANPSTTFSAAKFASFITQYSTGQVSVEIEWELQKENSKRWNPEIQYTSNYNKSVNVDFTVDTNGVYSEPRPIGTRYLTRNL

SEQ ID NO: 11453 - protein, 735 aa, Artificial Sequence
  source: /note="Description of Artificial Sequence: Synthetic polypeptide"
MAADGYLPDWLEDTLSEGIRQWWKLKPGPPPPRPAERHQDDSRGLVLPGYKYLGPFNGLDKGEPVNEADAAALEHDKAYDRQLDSGDNPYLKYNHADAEFQERLKEDTSFGGNLGRAVFQAKKRVLEPLGLVEEPVKTAPGKKRPVEHSPAEPDSSSGTGKAGQQPARKRLNFGQTGDADSVPDPQPLGQPPAAPTSLGSTTMATGSGAPMADNNEGADGVGNSSGNWHCDSQWLGDRVITTSTRTWALPTYNNHLYKQISSQSGASNDNHYFGYSTPWGYFDFNRFHCHFSPRDWQRLINNNWGFRPKRLNFKLFNIQVKEVTQNDGTTTIANNLTSTVQVFTDSEYQLPYVLGSAHQGCLPPFPADVFMVPQYGYLTLNNGSQAVGRSSFYCLEYFPSQMLRTGNNFTFSYTFEDVSFHSSYAHSQSLDRLMNPLIDQYLYYLNRTQSNSGTLQQSRLLFSQAGPTSMSLQAKNWLPGPCYRQQRLSKQANDNNNSNFPWTAATKYHLNGRDSLVNPGPAMASHKDDEEKFFPMHGTLIFGKQGTNANDADLEHVMITDEEEIRTTNPVATEQYGNVSNNLQNSNTGPTTENVNHQGALPGMVWQDRDVYLQGPIWAKIPHTDGHFHPSPLMGGFGLKHPPPQIMIKNTPVPANPPTNFSAAKFASFITQYSTGQVSVEIEWELQKENSKRWNPEIQYTSNYNKSVNVDFTVDANGVYSEPRPIGTRYLTRNL

SEQ ID NO: 11454 - protein, 735 aa, Artificial Sequence
  source: /note="Description of Artificial Sequence: Synthetic polypeptide"
MAADGYLPDWLEDTLSEGIRQWWKLKPGPPPPRPAERHQDDSRGLVLPGYKYLGPFNGLDKGEPVNEADAAALEHDKAYDRQLDSGDNPYLKYNHADAEFQERLKEDTSFGGNLGRAVFQAKKRVLEPLGLVEEPVKTAPGKKRPVEHSPAEPDSSSGTGKAGQQPARKRLNFGQTGDADSVPDPQPLGQPPAAPTSLGSTTMATGSGAPMADNNEGADGVGNSSGNWHCDSQWLGDRVITTSTRTWALPTYNNHLYKQISSQSGASNDNHYFGYSTPWGYFDFNRFHCHFSPRDWQRLINNNWGFRPKRLNFKLFNIQVKEVTQNDGTTTIANNLTSTVQVFTDSEYQLPYVLGSAHQGCLPPFPADVFMVPQYGYLTLNNGSQAVGRSSFYCLEYFPSQMLRTGNNFTFSYTFEDVPFHSSYAHSQSLDRLMNPLIDQYLYYLNRTQSNSGTLQQSRLLFSQAGPTSMSLQAKNWLPGPCYRQQRLSKQANDNNNSNFPWTAATKYHLNGRDSLVNPGPAMASHKDDEEKFFPMHGTLIFGKQGTNANDADLEHVMITDEEEIRTTNPVATEQYGNVSNNLQNSNTGPTTENVNHQGALLGMVWQDRDVYLQGPIWAKIPHTDGHFHPSPLMGGFGLKHPPPQIMIKNTPVPANPPTNFSAAKFASFITQYSTGQVSVEIEWELQKENSKRWNPEIQYTSNYNKSVNVDFTVDANGVYSEPRPIGTRYLTRNL

SEQ ID NO: 11455 - protein, 735 aa, Artificial Sequence
  source: /note="Description of Artificial Sequence: Synthetic polypeptide"
MAADGYLPDWLEDTLSEGIRQWWKLKPGPPPPRPAERHQDDSRGLVLPGYKYLGPFNGLDKGEPVNEADAAALEHDKAYDRQLDSGDNPYLKYNHADAEFQERLKEDTSFGGNLGRAVFQAKKRVLEPLGLVEEPVKTAPGKKRPVEHSPAEPDSSSGTGKAGQQPARKRLNFGQTGDADSVPDPQPLGQPPAAPTSLGSTTMATGSGAPMADNNEGADGVGNSSGNWHCDSQWLGDRVITTSTRTWALPTYNNHLYKQISSQSGASNDNHYFGYSTPWGYFDFNRFHCHFSPRDWQRLINNNWGFRPKRLNFKLFNIQVKEVTQNDGTATIANNLTSTVQVFTDSEYQLPYVLGSAHQGCLPPFPADVFMVPQYGYLTLNNGSQAVGRSSFYCLEYFPSQMLRTGNNFTFSYTFEDVPFHSSYAHSQSLDRLMNPLIDQYLYYLNRTQSNSGTLQQSRLLFSQAGPTSMSLQAKNWLPGPCYRQQRLSKQANDNNNSNFPWTAATKYHLNGRDSLVNPGPAMASHKDDEEKFFPMHGTLIFGKQGTNANDADLEHVMITDEEEIRTTNPVATEQYGNVSNNLQNSNTGPTTENVNHQGALPGMVWQDRDVYLQGPIWAKIPHTDGHFHPSPLMGGFGLKHPPPQIMIKNTPVPANPPTNFSAAKFASFITQYSTGQVSVEIEWELQKENSKRWNPEIQYTSNYNKSVNVDFTVDANGVYSEPRPIGTRYLTRNL

SEQ ID NO: 11456 - protein, 735 aa, Artificial Sequence
  source: /note="Description of Artificial Sequence: Synthetic polypeptide"
MAADGYLPDWLEDTLSEGIRQWWKLKPGPPPPKPAERHKDDSRGLVLPGYKYLGPFNGLDKGEPVNEADAAALEHDKAYDRQLDSGDNPYLKYNHADAEFQERLKEDTSFGGNLGRAVFQAKKRVLEPLGLVEEPVKTAPGKKRPVEHSPVEPDSSSGTGKAGQQPARKRLNFGQTGDADSVPDPQPLGQPPAAPTSLGSTTMATGSGAPMADNNEGADGVGNSSGNWHCDSQWLGDRVITTSTRTWALPTYNNHLYKQISSQSGASNDNHYFGYSTPWGYFDFNRFHCHFSPRDWQRLINNNWGFRPKRLNFKLFNIQVKEVTQNDGTTTIANNLTSTVQVFTDSEYQLPYVLGSAHQGCLPPFPADVFMVPQYGYLTLNNGSQAVGRSSFYCLEYFPSQMLRTGNNFTFSYTFEDVPFHSSYAHSQSLDRLMNPLIDQYLYYLNKTQSNSGTLQQSRLLFSQAGPTSMSLQAKNWLPGPCYRQQRLSKQANDNNNSNFPWTAATKYHLNGRDSLVNPGPAMASHKDDEEKFFPMHGTLIFGKQGTNANDADLDNVMITDEEEIRTTNPVATEQYGTVSNNLQNSNTGPTTGTVNHQGALPGMVWQDRDVYLQGPIWAKIPHTDGHFHPSPLMGGFGLKHPPPQIMIKNTPVPANPPTNFSSAKFASFITQYSTGQVSVEIEWELQKENSKRWNPEIQYTSNYNKSVNVDFTVDTNGVYSEPRPIGTRYLTRNL

SEQ ID NO: 11457 - protein, 735 aa, Artificial Sequence
  source: /note="Description of Artificial Sequence: Synthetic polypeptide"
MAADGYLPDWLEDTLSEGIRQWWKLKPGPPPPKPAERHKDDSRGLVLPGYKYLGPFNGLDKGEPVNEADAAALEHDKAYDRQLDSGDNPYLKYNHADAEFQERLKEDTSFGGNLGRAVFQAKKRVLEPLGLVEEPVKTAPGKKRPVEHSPVEPDSSSGTGKAGQQPARKRLNFGQTGDADSVPDPQPLGQPPAAPTSLGSTTMATGSGAPMADNNEGADGVGNSSGNWHCDSQWLGDRVITTSTRTWALPTYNNHLYKQISSQSGASNDNHYFGYSTPWGYFDFNRFHCHFSPRDWQRLINNNWGFRPKRLNFKLFNIQVKEVTQNDGTTTIANNLTSTVQVFTDSEYQLPYVLGSAHQGCLPPFPADVFMVPQYGYLTLNNGSQAVGRSSFYCLEYFPSQMLRTGNNFTLSYTFEDVPFHSSYAHSQSLDRLMNPLIDQYLYYLNKTQSNSGTLQQSRLLFSQAGPTSMSLQAKNWLPGPCYRQQRLSKQANDNNNSNFPWTAATKYHLNGRDSLVNPGPAMASHKDDEEKFFPMHGTLIFGKQGTNANDADLDNVMITDEEEIRTTNPVATEQYGTVSNNLQNSNTGPTTGTVNHQGALPGMVWQDRDVYLQGPIWAKIPHTDGHFHPSPLMGGFGLKHPPPQIMIKNTPVPANPPTNFSSAKFASFITQYSTGQVSVEIEWELQKENSKRWNPEIQYTSNYNKSVNVDFTVDTNGVYSEPRPIGTRYLTRNL

SEQ ID NO: 11458 - protein, 735 aa, Artificial Sequence
  source: /note="Description of Artificial Sequence: Synthetic polypeptide"
MAADGYLPDWLEDTLSEGIRQWWKLKPGPPPPKPAERHKDDSRGLVLPGYKYLGPFNGLDKGEPVNEADAAALEHDKAYDRQLDSGDNPYLKYNHADAEFQERLKEDTSFGGNLGRAVFQAKRRVLEPLGLVEEPVKTAPGKKRPVEHSPVEPDSSSGTGKAGQQPARKRLNFGQTGDADSVPDPQPLGQPPAAPTSLGSTTMATGSGAPMADNNEGADGVGNSSGNWHCDSQWLGDRVITTSTRTWALPTYNNHLYKQISSQSGASNDNHYFGYSTPWGYFDFNRFHCHFSPRDWQRLINNNWGFRPKRLNFKLFNIQVKEVTQNDGTTTIANNLTSTVQVFTDSEYQLPYVLGSAHQGCLPPFPADVFMVPQYGYLTLNNGSQAVGRSSFYCLEYFPSQMLRTGNNFTFSYTFEDVPFHSSYAHSQSLDRLMNPLIDQYLYYLNKTQSNSGTLQQSRLLFSQAGPTSMSLQAKNWLPGPCYRQQRLSKQANDNNNSNFPWTAATKYHLNGRDSLVNPGPAMASHKDDEEKFFPMHGTLIFGKQGTNANDADLDNVMITDEEEIRTTNPVATEQYGTVSNNLQNSNTGPTTGTVNHQGALPGMVWQDRDVYLQGPIWAKIPHTDGHFHPSPLMGGFGLKHPPPQIMIKNTPVPANPPTNFSSAKFASFITQYSTGQVSVEIEWELQKENSKRWNPEIQYTSNYNKSVNVDFTVDTNGVYSEPRPIGTRYLTRNL

SEQ ID NO: 11459 - protein, 735 aa, Artificial Sequence
  source: /note="Description of Artificial Sequence: Synthetic polypeptide"
MAADGYLPDWLEDTLSEGIRQWWKLKPGPPPPKPAERHKDDSRGLVLPGYKYLGPFNGLDKGEPVNEADAAALEHDKAYDRQLDSGDNPYLKYNHADAEFQERLKEDTSFGGNLGRAVFQAKKRVLEPLGLVEEPVKTAPGKKRPVEHSPVEPDSSSGTGKAGQQPARKRLNFGQTGDADSVPDPQPLGQPPAAPTSLGSTTMATGSGAPMADNNEGADGVGNSSGNWHCDSQWLGGRVITTSTRTWALPTYNNHLYKQISSQSGASNDNHYFGYSTPWGYFDFNRFHCHFSPRDWQRLINNNWGFRPKRLNFKLFNIQVKEVTQNDGTTTIANNLTSTVQVFTDSEYQLPYVLGSAHQGCLPPFPADVFMVPQYGYLTLNNGSQAVGRSSFYCLEYFPSQMLRTGNNFTFSYTFEDVPFHSSYAHSQSLDRLMNPLIDQYLYYLNKTQSNSGTLQQSRLLFSQAGPTSMSLQAKNWLPGPCYRQQRLSKQANDNNNSNFPWTAATKYHLNGRDSLVNPGPAMASHKDDEEKFFPMHGTLIFGKQGTNANDADLDNVMITDEEEIRTTNPVATEQYGTVSNNLQNSNTGPTTGTVNHQGALPGMVWQDRDVYLQGPIWAKIPHTDGHFHPSPLMGGFGLKHPPPQIMIKNTPVPANPPTNFSSAKFASFITQYSTGQVSVEIEWELQKENSKRWNPEIQYTSNYNKSVNVDFTVDTNGVYSEPRPIGTRYLTRNL

SEQ ID NO: 11460 - protein, 734 aa, Artificial Sequence
  source: /note="Description of Artificial Sequence: Synthetic polypeptide"
MAADGYLPDWLEDTLSEGIRQWWKLKPGPPPPKPAERHKDDSRGLVLPGYKYLGPFNGLDKGEPVNEADAAALEHDKAYDRQLDSGDNPYLKYNHADAEFQERLKEDTSFGGNLGRAVFQAKKRVLEPLGLVEEPVKTAPGKKRPVEHSPVEPDSSSGTGKAGQQPARKRLNFGQTGDADSVPDPQPLGQPPAAPTSLGSTTMATGSGAPMADNNEGADGVGNSSGNWHCDSQWLGDRVITTSTRTWALPTYNNHLYKQISSQSGASNDNHYFGYSTPWGYFDFNRFHCHFSPRDWQRLINNNWGFRPKRLNFKLFNIQVKEVTQNDGTTTIANNLTSTVQVFTDSEYQLPYVLGSAHQGCLPPFPADVFMVPQYGYLTLNNGSQAVGRSSFYCLEYFPSQMLRTGNNFTFSYTFEDVPFHSSYAHSQSLDRLMNPLIDQYLYYLNKTQSNSGTLQQSRLLFSQAGPTSMSLQAKNWLPGPCYRQQRLSKQANDNNSNFPWTAATKYHLNGRDSLVNPGPAMASHKDDEEKFFPMHGTLIFGKQGTNANDADLDNVMITDEEEIRTTNPVATEQYGTVSNNLQNSNTGPTTGTVNHQGALPGMVWQDRDVYLQGPIWAKIPHTDGHFHPSPLMGGFGLKHPPPQIMIKNTPVPANPPTNFSSAKFASFITQYSTGQVSVEIEWELQKENSKRWNPEIQYTSNYNKSVNVDFTVDTNGVYSEPRPIGTRYLTRNL

SEQ ID NO: 11461 - protein, 735 aa, Artificial Sequence
  source: /note="Description of Artificial Sequence: Synthetic polypeptide"
MAADGYLPDWLEDTLSEGIRQWWKLKPGPPPPKPAERHKDDSRGLVLPGYKYLGPFNGLDKGEPVNEADAAALEHDKAYDRQLDSGDNPYLKYNHADAEFQERLKEDTSFGGNLGRAVFQAKKRVLEPLGLVEEPVKTAPGKKRPVEHSPVEPDSSSGTGKAGQQPARKRLNFGQTGDADSVPDPQPLGQPPAAPTSLGSTTMATGSGAPMADNNEGADGVGNSSGNWHCDSQWLGDRVITTSTRTWALPTYNNHLYKQISSQSGASNDNHYFGYSTPWGYFDFNRFHCHFSPRDWQRLINNNWGFRPKRLNFKLFNIQVKEVTQNDGTTTIANNLTSTVQVFTDSEYQLPYVLGSAHQGCLPPFPADVFMVPQYGYLTLNNGSQAVGRSSFYCLEYFPSQMLRTGNNFTFSYTFEDVPFHSSYAHSQSLDRLMNPLIDQYLYYLNKTQSNSGTLQQPRLLFSQAGPTSMSLQAKNWLPGPCYRQQRLSKQANDNNNSNFPWTAATKYHLNGRDSLVNPGPAMASHKDDEEKFFPMHGTLIFGKQGTNANDADLDNVMITDEEEIRTTNPVATEQYGTVSNNLQNSNTGPTTGTVNHQGALPGMVWQDRDVYLQGPIWAKIPHTDGHFHPSPLMGGFGLKHPPPQIMIKNTPVPANPPTNFSSAKFASFITQYSTGQVSVEIEWELQKENSKRWNPEIQYTSNYNKSVNVDFTVDTNGVYSEPRPIGTRYLTRNL

SEQ ID NO: 11462 - protein, 735 aa, Artificial Sequence
  source: /note="Description of Artificial Sequence: Synthetic polypeptide"
MAADGYLPDWLEDTLSEGIRQWWKLKPGPPPPKPAERHKDDSRGLVLPGYKYLGPFNGLDKGEPVNEADAAALEHDKAYDRQLDSGDNPYLKYNHADAEFQERLKEDTSFGGNLGRAVFQAKKRVLEPLGLVEEPVKTAPGKKRPVEHSPVEPDSSSGTGKAGQQPARKRLNFGQTGDADSVPDPQPLGQPPAAPTSLGSTTMATGSGAPMADNNEGADGVGNSSGNWHCDSQWLGDRVITTSTRTWALPTYNNHLYKQISSQSGASNDNHYFGYSTPWGYFDFNRFHCHFSPRDWQRLINNNWGFRPKRLNFKLFNIQVKEVTQNDGTTTIANNLTSTVQVFTDSEYQLPYVLGSAHQGCLPPFPADVFMVPQYGYLTLNNGSQAVGRSSFYCLEYFPSQMLRTGNNFTFSCTFEDVPFHSSYAHSQSLDRLMNPLIDQYLYYLNKTQSNSGTLQQSRLLFSQAGPTSMSLQAKNWLPGPCYRQQRLSKQANDNNNSNFPWTAATKYHLNGRDSLVNPGPAMASHKDDEEKFFPMHGTLIFGKQGTNANDADLDNVMITDEEEIRTTNPVATEQYGTVSNNLQNSNTGPTTGTVNHQGALPGMVWQDRDVYLQGPIWAKIPHTDGHFHPSPLMGGFGLKHPPPQIMIKNTPVPANPPTNFSSAKFASFITQYSTGQVSVEIEWELQKENSKRWNPEIQYTSNYNKSVNVDFTVDTNGVYSEPRPIGTRYLTRNL

SEQ ID NO: 11463 - protein, 735 aa, Artificial Sequence
  source: /note="Description of Artificial Sequence: Synthetic polypeptide"
MAADGYLPDWLEDTLSEGIRQWWKLKPGPPPPKPAERHKDDSRGLVLPGYKYLGPFNGLDKGEPVNEADAAALEHDKAYDRQLDSGDNPYLKYNHADAEFQERLKEDTSFGGNLGRAVFQAKKRVLEPLGLVEEPVKTAPGKKRPVEHSPVEPDSSSGTGKAGQQPARKRLNFGQTGDADSVPDPQPLGQPPAAPTSLGSTTMATGSGAPMADNNEGADGVGNSSGNWHCDSQWLGDRVITTSTRTWALPTYNNHLYKQISSQSGASNDNHYFGYSTPWGYFDFNRFHCHFSPRDWQRLIDNNWGFRPKRLNFKLFNIQVKEVTQNDGTTTIANNLTSTVQVFTDSEYQLPYVLGSAHQGCLPPFSADVFMVPQYGYLTLNNGSQAVGRSSFYCLEYFPSQMLRTGNNFTFSYTFEDVPFHSSYAHSQSLDRLMNPLIDQYLYYLNKTQSNSGTLQQSRLLFSQAGPTSMSLQAKNWLPGPCYRQQRLSKQANDNNNSNFPWTAATKYHLNGRDSLVNPGPAMASHKDDEEKFFPMHGTLIFGKQGTNANDADLDNVMITDEEEIRTTNPVATEQYGTVSNNLQNSNTGPTTGTVNHQGALPGMVWQDRDVYLQGPIWAKIPHTDGHFHPSPLMGGFGLKHPPPQIMIKNTPVPANPPANFSSAKFASFITQYSTGQVSVEIEWELQKENSKRWNPEIQYTSNYNKSVNVDFTVDTNGVYSEPRPIGTRYLTRNL

SEQ ID NO: 11464 - protein, 744 aa, Artificial Sequence
  source: /note="Description of Artificial Sequence: Synthetic polypeptide"
MITTLDKSGMAADGYLPDWLEDTLSEGIRQWWKLKPGPPPPKPAERHKDDSRGLVLPGYKYLGPFNGLDKGEPVNEADAAALEHDKAYDRQLDSGDNPYLKYNHADAEFQERLKEDTSFGGNLGRAVFQAKKRVLEPLGLVEEPVKTAPGKKRPVEHSPVEPDSSSGTGKAGQQPARKRLNFGQTGDADSVPDPQPLGQPPAAPTSLGSTTMATGSGAPMADNNEGADGVGNSSGNWHCDSQWLGDRVITTSTRTWALPTYNNHLYKQISSQSGASNDNHYFGYSTPWGYFDFNRFHCHFSPRDWQRLINNNWGFRPKRLNFKLFNIQVKEVTQNDGTTTIANNLTGTVQVFTDSEYQLPYVLGSAHQGCLPPFPADVFMVPQYGYLTLNNGSQAVGRSSFYCLEYFPSQMLRTGNNFTFSYTFEDVPFHSSYAHSQSLDRLMNPLIDQYLYYLNKTQSNSGTLQQSRLLFSQAGPTSMSLQAKNWLPGPCYRQQRLSKQANDNNNSNFPWTAATKYHLNGRDSLVNPGPAMASHKDDEEKFFPMHGTLIFGKQGTNANDADLDNVMITDEEEIRTTNPVATEQYGTVSNNLQNSNTGPTTGTVNHQGALPGMVWQDRDVYLQGPIWAKIPHTDGHFHPSPLMGGFGLKHPPPQIMIKNTPVPANPPTNFSSAKFASFITQYSTGQVSVEIEWELQKENSKRWNPEIQYTSNYNKSVNVDFTVDTNGVYSEPRPIGTRYLTRNL

SEQ ID NO: 11465 - protein, 744 aa, Artificial Sequence
  source: /note="Description of Artificial Sequence: Synthetic polypeptide"
MITTLDKSGMAADGYLPDWLEDTLSEGIRQWWKLKPGPPPPKPAERHKDDSRGLVLPGYKYLGPFNGLDKGEPVNEADAAALEHDKAYDRQLDSGDNPYLKYNHADAEFQERLKEDTSFGGNLGRAVFQAKKRVLEPLGLVEEPVKTAPGKKRPVEHSPVEPDSSSGTGKAGQQPARKRLNFGQTGDADSVPDPQPLGQPPAAPTSLGSTTMATGSGAPMADNNEGADGVGNSSGNWHCDSQWLGDRVITTSTRTWALPTYNNHLYKQISSQSGASNDNHYFGYSTPWGYFDFNRFHCHFSPRDWQRLINNNWGFRPKRLNFKLFNIQVKEVTQNDGTTTIANNLTSTVQVFTDSEYQLPYVLGSAHQGCLPPFPADVFMVPQYGYLTLNNGSQAVGRSSFYCLEYFPSQMLRTGNNFTFSYTFEDVPFHSSYAHSQSLDRLMNPLIDQYLYYLNKTQSNSGTLQQSRLLFSQAGPTSMSLQAKNWLPGPCYRQQRLSKQANDNNNSNFPWTAATKYHLNGRDSLVNPGPAMASHKDDEEKFFPMHGTLIFGKQGTNANDADLDNVMITDEEEIRTTNPVATEQYGTVSNNLQNSNTGPTTGTVNHQGALPGMVWQDRDVYLQGPIWAKIPHTDGHFHPSPLMGGFGLKHPPPQIMIKNTPVPANPPTNFSSAKFASFITQYSTGQVSVEIEWELQKENSKRWNPEIQYTSNYNKSVNVDFSVDTNGVYSEPRPIGTRYLTRNL

SEQ ID NO: 11466 - protein, 735 aa, Artificial Sequence
  source: /note="Description of Artificial Sequence: Synthetic polypeptide"
MAADGYLPDWLEDTLSEGIRQWWKLKPGPPPPKPAERHKDDSRGLVLPGYKYLGPFNGLDKGEPVNEADAAALEHDKAYDRQLDSGDNPYLKYNHADAEFQERLKEDTSFGGNLGRAVFQAKKRVLEPLGLAEEPVKTAPGKKRPVEHSPVEPDSSSGTGKAGQQPARKRLNFGQTGDADSVPDPQPLGQPPAAPTSLGSTTMATGSGAPMADNNEGADGVGNSSGNWHCDSQWLGDRVITTSTRTWALPTYNNHLYKQISSQSGASNDNHYFGYSTPWGYFDFNRFHCHFSPRDWQRLINNNWGFRPKRLNFKLFNIQVKEVTQNDGTTTIANNLTSTVQVFTDSEYQLPYVLGSAHQGCLPPFPADVFMVPQYGYLTLNNGSQAVGRSSFYCLEYFPSQMLRTGNNFTFSYTFEDVPFHSSYAHSQSLDRLMNPLIDQYLYYLNKTQSNSGTLQQSRLLFSQAGPTSMSLQAKNWLPGPCYRQQRLSKQANDNNNSNFPWTAATKYHLNGRDSLVNPGPAMASHKDDEEKFFPMHGTLIFGKQGTNANDADLDNVMITDEEEIRTTNPVATEQYGTVSNNLQNSNTGPTTGTVNHQGALPGMVWQDRDVYLQGPIWAKIPHTDGHFHPSPLMGGFGLKHPPPQIMIKNTPVPANPPTNFSSAKFASFITQYSTGQVSVEIEWELQKENSKRWNPEIQYTSNYNKSVNVDFTVDTNGVYSEPRPIGTRYLTRNL

SEQ ID NO: 11467 - protein, 735 aa, Artificial Sequence
  source: /note="Description of Artificial Sequence: Synthetic polypeptide"
MAADGYLPDWLEDTLSEGIRQWWKLKPGPPPPKPAERHKDDSRGLVLPGYKYLGPFNGLDKGEPVNEADAAALEHDKAYDRQLDSGDNPYLKYNHADAEFQERLKEDTSFGGNLGRAVFQAKKRVLEPLGLVEEPVKTAPGKKRPVEHSPVEPDSSSGTGKAGQQPARKRLNFGQTGDADSVPDPQPLGQPPAAPTSLGSTTMATGSGAPMADNNEGADGVGNSSGNWHCDSQWLGDRVITTSTRTWALPTYNNHLYKQISSQSGASNDNHYFGYSTPWGYFDFNRFHCHFSPRDWQRLINNNWGFRPKRLNFKLFNIQVKEVTQNDGTTTIANNLTSTVQVFTDSEYQLPYVLGSAHQGCLPPFPADVFMVPQYGYLTLNNGSQAVGRSSFYCLEYFPSQMLRTGNNFTFSYTFEDVPFHSSYAHSQSLDRLMNPLIDQYLYYLNKTQSNSGTLQQSRLLFSQAGPTSMSLQAKNWLPGPCYRQQRLSKQANDNNNSNFPWAAATKYHLNGRDSLVNPGPAMASHKDDEEKFFPMHGTLIFGKQGTNANDADLDNVMITDEEEIRTTNPVATEQYGTVSNNLQNSNTGPTTGTVNHQGALPGMVWQDRDVYLQGPIWAKIPHTDGHFHPSPLMGGFGLKHPPPQIMIKNTPVPANPPTNFSSAKFASFITQYSTGQVSVEIEWELQKENSKRWNPEIQYTSNYNKSVNVDFTVDTNGVYSEPRPIGTRYLTRNL

SEQ ID NO: 11468 - protein, 734 aa, Artificial Sequence
  source: /note="Description of Artificial Sequence: Synthetic polypeptide"
MAADGYLPDWLEDTLSEGIRQWWKLKPGPPPPKPAERHKDDSRGLVLPGYKYLGPFNGLDKGEPVNEADAAALEHDKAYDRQLDSGDNPYLKYNHADAEFQERLKEDTSFGGNLGRAVFQAKKRVLEPLGLVEEPVKTAPGKKRPVEHSPVEPDSSSGTGKAGQQPARKRLNFGQTGDADSVPDPQPLGQPPAAPTSLGSTTMATGSGAPMADNNEGADGVGNSSGNWHCDSQWLGDRVITTSTRTWALPTYNNHLYKQISSQSGASNDNHYFGYSTPWGYFDFNRFHCHFSPRDWQRLINNNWGFRPKRLNFKLFNIQVKEVTQNDGTTTIANNLTSTVQVFTDSEYQLPYVLGSAHQGCLPPFPADVFMVPQYGYLTLNNGSQAVGRSSFYCLEYFPSQMLRTGNNFTFSCTFEDVPFHSSYAHSQSLDRLMNPLIDQYLYYLNKTQSNSGTLQQSRLLFSQAGPTSMSLQAKNWLPGPCYRQQRLSKQANDNNSNFPWTAATKYHLNGRDSLVNPGPAMASHKDDEEKFFPMHGTLIFGKQGTNANDADLDNVMITDEEEIRTTNPVATEQYGTVSNNLQNSNTGPTTGTVNHQGALPGMVWQDRDVYLQGPIWAKIPHTDGHFHPSPLMGGFGLKHPPPQIMIKNTPVPANPPTNFSSAKFASFITQYSTGQVSVEIEWELQKENSKRWNPEIQYTSNYNKSVNVDFTVDTNGVYSEPRPIGTRYLTRNL

SEQ ID NO: 11469 - protein, 735 aa, Artificial Sequence
  source: /note="Description of Artificial Sequence: Synthetic polypeptide"
MAADGYLPDWLEDTLSEGIRQWWKLKPGPPPPKPAERHKDDSRGLVLPGYKYLGPFNGLDKGEPVNEADAAALEHDKAYDRQLDSGDNPYLKYNHADAEFQERLKEDTSFGGNLGRAVFQAKKRVLEPLGLVEEPVKTAPGKKRPVEHSPVEPDSSSGTGKAGQQPARKRLNFGQTGDADSVPDPQPLGQPPAAPTSLGSTTMATGSGAPMADNNEGADGVGNSSGNWHCDSQWLGDRVITTSTRTWALPTYNNHLYKQISSQSGASNDNHYFGYSTPWGYFDFNRFHCHFSPRDWQRLINNNWGFRPKRLNFKLFNIQVKEVTQNDGTTTIANNLTSTVQVFTDSEYQLPYVLGSAHQGCLPPFPADVFMVPQYGYLTLNNGSQAVGRSSFYCLEYFPSQMLRTGNNFTFSCTFEDVPFHSSYAHSQSLDRLMNPLIDQYLYYLNKTQSNSGTLQQSRLLFSQAGPTSMSLQAKNWLPGPCYRQQRLSKQANDNNNSNFPWTAATKYHLNGRDSLVNPGPAMASHKDDEEKFFPMHGTLIFGKQGTNANDADLDNVMITDEEEIRTTNPVATEQYGTVSNNLQNSNTGPTTGTVNHQGALPGMVWQDRDVYLQGPIWAKIPHTDGHFHPSPLMGGFGLKHPPPQIMIKNTPVPANPPTNFSSAKFASFITQYSTGQVSVEIEWELQKENSKRWNPEIQYTSNYNKSVNVDFSVDTNGVYSEPRPIGTRYLTRNL

SEQ ID NO: 11470 - protein, 735 aa, Artificial Sequence
  source: /note="Description of Artificial Sequence: Synthetic polypeptide"
MAADGYLPDWLEDTLSEGIRQWWKLKPGPPPPKPAERHKDDSRGLVLPGYKYLGPFNGLDKGEPVNEADAAALEHDKAYDRQLDSGDNPYLKYNHADAEFQERLKEDTSFGGNLGRAVFQAKKRVLEPLGLVEEPVKTAPGKKRPVEHSPVEPDSSSGTGKAGQQPARKRLNFGQTGDADSVPDPQPLGQPPAAPTSLGSTTMATGSGAPMADNNEGADGVGNSSGNWHCDSQWLGDRVITTSTRTWALPTYNNHLYKQISSQSGASNDNHYFGYSTPWGYFDFNRFHCHFSPRDWQRLINNNWGFRPKRLNFKLFNIQVKEVTQNDGTTTIANNLTSTVQVFTDSEYQLPYVPGSAHQGCLPPFPADVFMVPQYGYLTLNNGSQAVGRSSFYCLEYFPSQMLRTGNNFTFSCTFEDVPFHSSYAHSQSLDRLMNPLIDQYLYYLNKTQSNSGTLQQPRLLFSQAGPTSMSLQAKNWLPGPCYRQQRLSKQANDNNNSNFPWTAATKYHLNGRDSLVNPGPAMASHKDDEEKFFPMHGTLIFGKQGTNANDADLDNVMITDEEEIRTTNPVATEQYGTVSNNLQNSNTGPTTGTVNHQGALPGMVWQDRDVYLQGPIWAKIPHTDGHFHPSPLMGGFGLKHPPPQIMIKNTPVPANPPTNFSSAKFASFITQYSTGQVSVEIEWELQKENSKRWNPEIQYTSNYNKSVNVDFTVDTNGVYSEPRPIGTRYLTRNL

SEQ ID NO: 11471 - protein, 735 aa, Artificial Sequence; identical to SEQ ID NO: 11400
  source: /note="Description of Artificial Sequence: Synthetic polypeptide"

SEQ ID NO: 11472 - protein, 735 aa, Artificial Sequence
  source: /note="Description of Artificial Sequence: Synthetic polypeptide"
MAADGYLPDWLEDTLSEGIRQWWKLKPGPPPPRPAERHQDDSRGLVLPGYKYLGPFNGLDKGEPVNEADAAALEHDKAYDRQLDSGDNPYLKYNHADAEFQERLKEDTSFGGNLGRAVFQAKKRVLEPLGLVEEPVKTAPGKKRPVEHSPAEPDSSSGTGKAGQQPARKRLNFGQTGDADSVPDPQPLGQPPAAPTSLGSTTMATGSGAPMADNNEGADGVGNSSGNWHCDSQWLGDRVITTSTRTWALPTYNNHLYKQISSQSGASNDNHYFGYSTPWGYFDFNRFHCHFSPRDWQRLINNNWGFRPKRLNFKLFNIQVKEVTQNDGTTTIANNLTSTVQVFTDSEYQLPYVLGSAHQGCLPPFPADVFMVPQYGYLTLNNGSQAVGRSSFYCLEYFPSQMLRTGNNFTFSYTFEDVPFHSSYAHSQSLDRLMNPLIDQYLYYLNRTQSNSGTLQQSRLLFSQAGPTSMSLQAKNWLPGPCYRQQRLSKQANDNNNSNFPWTAATKYHLNGRDSLVNPGPAMASHKDDEEKFFPMHGTLIFGKQGTNANDADLEHVMITGEEEIRTTNPVATEQYGNVSNNLQNSNTGPTTENVNHQGALPGMVWQDRDVYLQGPIWAKIPHTDGHFHPSPLMGGFGLKHPPPQIMIKNTPVPANPPTNFSAAKFASFITQYSTGQVSVEIEWELQKENSKRWNPEIQYTSNYNKSVNVDFTVDANGVYSEPRPIGTRYLTRNL

SEQ ID NO: 11473 - protein, 735 aa, Artificial Sequence
  source: /note="Description of Artificial Sequence: Synthetic polypeptide"
MAADGYLPDWLEDTLSEGIRQWWKLKPGPPPPRPAERHQDDSRGLVLPGYKYLGPFNGLDKGEPVNEADAAALEHDKAYDRQLDSGDNPYLKYNHADAEFQERLKEDTSFGGNLGRAVFQAKKRVLEPLGLVEEPVKTAPGKKRPVEHSPAEPDSSSGTGKAGQQPARKRLNFGQTGDADSVPDPQPLGQPPAAPTSLGSTTMATGSGAPMADNNEGADGVGNSSGNWHCDSQWLGDRVITTSTRTWALPTYNNHLYKQISSQSGASNDNHYFGYSTPLGYFDFNRFHCHFSPRDWQRLINNNWGFRPKRLNFKLFNIQVKEVTQNDGTTTIANNLTSTVQVFTDSEYQLPYVLGSAHQGCLPPFPADVFMVPQYGYLTLNNGSQAVGRSSFYCLEYFPSQMLRTGNNFTFSYTFEDVPFHSSYAHSQSLDRLMNPLIDQYLYYLNRTQSNSGTLQQSRLLFSQAGPTSMSLQAKNWLPGPCYRQQRLSKQANDNNNSNFPWTAATKYHLNGRDSLVNPGPAMASHKDDEEKFFPMHGTLIFGKQGTNANDTDLEHVMITDEEEIRTTNPVATEQYGNVSNNLQNSNTGPTTENVNHQGALPGMVWQDRDVYLQGPIWAKIPHTDGHFHPSPLMGGFGLKHPPPQIMIKNTPVPANPPTNFSAAKFASFITQYSTGQVSVEIEWELQKENSKRWNPEIQYTSNYNKSVNVDFTVDANGVYSEPRPIGTRYLTRNL

SEQ ID NO: 11474 - protein, 735 aa, Artificial Sequence
  source: /note="Description of Artificial Sequence: Synthetic polypeptide"
MAADGYLPDWLEDTLSEGIRQWWKLKPGPPPPRPAERHQDDSRGLVLPGYKYLGPFNGLDKGEPVNEADAAALEHDKAYDRQLDSGDNPYLKYNHADAEFQERLKEDTSFGGNLGRAVFQAKKRVLEPLGLVEEPVKTAPGKKRPVEHSPAEPDSSSGTGKAGQQPARKRLNFGQTGDADSVPDPQPLGQPPAAPTSLGSTTMATGSGAPMADNNEGADGVGNSSGNWHCDSQWLGDRVITTSTRTWALPTYNNHLYKQISSQSGASNDNHYFGYSTPWGYFDFNRFHCHFSPRDWQRLINNNWGFRPKRLNFKLFNIQVKEVTQNDGTTTIANNLTSTVQVFTDSEYQLPYVLGSAHQGCLPPFPADVFMVPQYGYLTLNNGSQAVGRSSFYCLEYFPSQMLRTGNNFTFSYTFEDVPFHSSYAHSQSLDRLMNPLIDQYLYYLNRTQSNSGTLQQSRLLFSQAGPTSMSLQAKNWLPGPCYRQQRLSKQANDNNNSNFPWTAATKYHLNGRDSLVNPGPAMASHKDDEEKFFPMHGTLIFGKQGTNANDADLERVMITDEEEIRTTNPVATEQYGNVSNNLQNSNTGPTTENVNHQGALPGMVWQDRDVYLQGPIWAKIPHADGHFHPSPLMGGFGLKHPPPQIMIKNTPVPANPPTNFSAAKFASFITQYSTGQVSVEIEWELQKENSKRWNPEIQYTSNYNKSVNVDFTVDANGVYSEPRPIGTRYLTRNL

SEQ ID NO: 11475 - protein, 735 aa, Artificial Sequence
  source: /note="Description of Artificial Sequence: Synthetic polypeptide"
MAADGYLPDWLEDTLSEGIRQWWKLKPGPPPPRPAERHQDDSRGLVLPGYKYLGPFNGLDKGEPVNEADAAALEHDKAYDRQLDSGDNPYLKYNHADAEFQERLKEDTSFGGNLGRAVFQAKKRVLEPLGLVEEPVKTAPGKKRPVEHSPAEPDSSSGTGKAGQQPARKRLNFGQTGDADSVPDPQPLGQPPAAPTSLGSTTMATGSGAPMADNNEGADGVGNSSGNWHCDSQWLGDRVITTSTRTWALPTYNNHLYKQISSQSGASNDNHYFGYSTPWGYFDFNRFHCHFSPRDWQRLINNNWGFRPKRLNFKLFNIQVKEVTQNDGTTTIANNLTSTVQVFTDSEYQLPYVLGSAHQGCLPPFPADVFMVPQYGYLTLNNGSQAVGRSSFYCLEYFPSQMLRTGNNFTFSYTFEDVPFHSSYAHSQSLDRLMNPLIDQYLYYLNRTQSNSGTLQQSRLLFSQAGPTSMSLQAKNWLPGPCYRQQRLSKQANDNNNSNFPWTAATKYHLNGRDSLVNPGPAMASHKDDEEKFFPMHGTLIFGKQGTNANDADLEHVMITDEEEIRTTNPVATEQYGNVSNNLQNSNTGPTTENVNHQGALPGMVWQDRDVYLQGPIWAKIPHTDGHFHPSPLMGGFGLKHPPPQIMIKNTPVPANPPTNFSAAKFASFITRYSTGQVSAEIEWELQKENSKRWNPEIQYTSNYNKSVNVDFTVDANGVYSEPRPIGTRYLTRNL

SEQ ID NO: 11476 - protein, 735 aa, Artificial Sequence
  source: /note="Description of Artificial Sequence: Synthetic polypeptide"
MAADGYLPDWLEDILSEGIRQWWKLKPGPPPPKPAERHKDDSRGLVLPGYKYLGPFNGLDKGEPVNEADAAALEHDKAYDRQLDSGDNPYLKYNHADAEFQERLKEDTSFGGNLGRAVFQAKKRVLEPLGLVEEPVKTAPGKKRPVEQSPAEPDSSSGTGKAGNQPARKRLNFGQTGDADSVPDPQPLGQPPAAPSGLGSTTMATGSGAPMADNNEGADGVGNSSGNWHCDSQWLGDRVITTSTRTWALPTYNNHLYKQISSQSGAANDNHYFGYSTPWGYFDFNRFHCHFSPRDWQRLINNNWGFRPKRLNFKLFNIQVKEVTQNDGTTTIANNLTSTVQVFTDSEYQLPYVLGSAHQGCLPPFPADVFMVPQYGYLTLNNGSQAVGRSSFYCLEYFPSQMLRTGNNFTFSYTFEDVPFHSSYAHSQSLDRLMNPLIDQYLHYLNKTQSNSGTLQQSRLLFSQAGPTSMSLQAKNWLPGPCYRQQRLSKQANDNNNSNFPWTAATKYHLNGRDSLVNPGPAMASHKDDEEKFFPMHGTLIFGKQGTNANDADLDNVMITDEEEIRTTNPVATEQYGTVSNNLQNSNTGPTTGTVNHQGALPGMVWQDRDVYLQGPIWAKIPHTDGHFHPSPLMGGFGLKHPPPQIMIKNTPVPANPPTNFSSAKFASFITQYSTGQVSVEIEWELQKENSKRWNPEIQYTSNYNKSVNVDFTVDTNGVYSEPRPIGTRYLTRNL

SEQ ID NO: 11477 - protein, 735 aa, Artificial Sequence
  source: /note="Description of Artificial Sequence: Synthetic polypeptide"
MAADGYLPDWLEDTLSEGIRQWWKLKPGPPPPRPAERHQDDSRGLVLPGYKYLGPFNGLDKGEPVNEADAAALEHDKAYDRQLDSGDNPYLKYNHADAEFQERLKEDTSFGGNLGRAVFQAKKRVLEPLGLVEEPVKTAPGKKRPVEHSPAEPDSSSGTGKAGQQPARKRLNFGQTGDADSVPDPQPLGQPPAAPTSLGSTTMATGSGAPMADNNEGADGVGNSSGNWHCDSQWLGDRVITTSTRTWALPTYNNHLYKQISSQSGASNDNHYFGYSTPWGYFDFNRFHCHFSPRDWQRLINNNWGFRPKRLNFKLFNIQVKEVTQNDGTTTIANNLTSTVQVFTDSEYQLPYVLGSAHQGCLPPFPADVFMVPQYGYLTLNNGSQAVGRSSFYCLEYFPSQMLRTGNNFTFSYTFEDVPFHSSYAHSQSLDRLMNPLIDQYLYYLNRTQSNSGTLQQSRLLFSQAGPTSMSLQAKNWLPGPCYRQQRLSKQANDNNNSNFPWTAATKYHLNGRDSLVNPGPAMASHKDDEEKFFPMHGTLIFGKQGTNANDADLEHVMITDEEEIRTTNPVATEQYGNVSNNLQNSNTGPTTENVNRQGALPGMVWQDRDVYLQGPIWAKIPHTDGHFHPSPLMGGFGLKHPPPQIMIKNTPVPANPPTNFSAAKFASFITQYSTGQVSVEIEWELQKENSKRWNPEIQYTSNYNKSVNVDFTVDANGVYSEPRPIGTRYLTRNL

SEQ ID NO: 11478 - protein, 735 aa, Artificial Sequence
  source: /note="Description of Artificial Sequence: Synthetic polypeptide"
MAADGYLPDWLEDTLSEGIRQWWKLKPGPPPPRPAERHQDDSRGLVLPGYKYLGPFNGLDKGEPVNEADAAALEHDKAYDRQLDSGDNPYLKYNHADAEFQERLKEDTSFGGNLGRAVFQAKKRVLEPLGLVEEPVKTAPGKKRPVEHSPAEPDSSSGTGKAGQQPARKRLNFGQTGDADSVPDPQPLGQPPAAPTSLGSTTMATGSGAPMADNNEGADGVGNSSGNWHCDSQWLGDRVITTSTRTWALPTYNNHLYKQISSQSGASNDNHYFGYSTPWGYFDFNRFHCHFSPRDWQRLINNNWGFRPKRLNFKLFNIQVKEVTQNDGTTTIANNLTSTVQVFTDSEYQLPYVLGSAHQGCLPPFPADVFMVPQYGYLTLNNGSQAVGRSSFYCLEYFPSQMLRTGNNFTFSYTFEDVPFHSSYAHSQSLDRLMNPLIDQYLYYLNRTQSNSGTLQQSRLLFSQAAPTSMSLQAKNWLPGPCYRQQRLSKQANDNNNSNFPWTAATKYHLNGRDSLVNPGPAMASHKDDEEKFFPMHGTLIFGKQGTNANDTDLEHVMITDEEEIRTTNPVATEQYGNVSNNLQNSNTGPTTENVNHQGALPGMVWQDRDVYLQGPIWAKIPHTDGHFHPSPLMGGFGLKHPPPQIMIKNTPVPANPPTNFSAAKFASFITQYSTGQVSVEIEWELQKENSKRWNPEIQYTSNYNKSVNVDFTVDANGVYSEPRPIGTRYLTRNL

SEQ ID NO: 11479 - protein, 735 aa, Artificial Sequence
  source: /note="Description of Artificial Sequence: Synthetic polypeptide"
MAADGYLPDWLEDILSEGIRQWWKLKPGPPPPKPAERHKDDSRGLVLPGYKYLGPFNGLDKGEPVNEADAAALEHDKAYDRQLDSGDNPYLKYNHADAEFQERLKEDTSFGGNLGRAVFQAKKRVLEPLGLVEEPVKTAPGKKRPVEQSPAEPDSSSGTGKAGNQPARKRLNFGQTGDADSVPDPQPLGQPPAAPSGLGSTTMATGSGAPMADNNEGADGVGNSSGNWHCDSQWLGDRVITTSTRTWALPTYNNHLYKQISSQSGAANDNHYFGYSTPWGYFDFNRFHCHFSPRDWQRLINNNWGFRPKRLNFKLFNIQVKEVTQNDGTTTIANNLTSTVQVFTDSEYQLPYVLGSAHQGCLPPFPADVFMVPQYGYLTLNNGSQAVGRSSFYCLEYFPSQMLRTGNNFTFSYTFEDVPFHSSYAHSQSLDRLMNPLIDQYLYYLNKTQSNSGTLQQSRLLFSQAGPTSMSLQAKNWLPGPCYRQQRLSKQANDNNNSNFPWTAATKYHLNGRDSLVNPGPAMASHKDDEEKFFPMHGTLIFGKQGTNANDADLDNVMITDEEEIRTTNPVATEQYGTVSNNLQNSNTGPTTGTVNHQGALPGMVWQDRDVYLQGPIWAKIPHTDGHFHPSPLMGGFGLKHPPPQIMIKNTPVPANPPTNFSSAKFASFVTQYSTGQVSVEIEWELQKENSKRWNPEIQYTSNYNKSVNVDFTVDTNGVYSEPRPIGTRYLTRNL

SEQ ID NO: 11480 - protein, 735 aa, Artificial Sequence
  source: /note="Description of Artificial Sequence: Synthetic polypeptide"
MAADGYLPDWLEDTLSEGIRQWWKLKPGPPPPRPAERHQDDSRGLVLPGYKYLGPFNGLDKGEPVNEADAAALEHDKAYDRQLDSGDNPYLKYNHADAEFQERLKEDTSFGGNLGRAVFQAKKRVLEPLGLVEEPVKTAPGKKRPVEHSPAEPDSSSGTGKAGQQPARKRLNFGQTGDADSVPDPQPLGQPPAAPTSLGSTTMATGSGAPMADNNEGADGVGNSSGNWHCDSQWLGDRVITTSTRTWALPTYNNHLYKQISSQSGASNDNHYFGYSTPWGYFDFNRFHCHFSPRDWQRLINNNWGFRPKRLNFKLFNIQVKEVTQNDGTTTIANNLTSTVQVFTDSEYQLPYALGSAHQGCLPPFPADVFMVPQYGYLTLNNGSQAVGRSSFYCLEYFPSQMLRTGNNFTFSYTFEDVPFHSSYAHSQSLDRLMNPLIDQYLYYLNRTQSNSGTLQQSRLLFSQAGPTSMSLQAKNWLPGPCYRQQRLSKQANDNNNSNFPWTAATKYHLNGRDSLVNPGPAMASHKDDEEKFFPMHGTLIFGKQGTNANDTDLEHVMITDEEEIRTTNPVATEQYGNVSNNLQNSNTGPTTENVNHQGALPGMVWQDRDVYLQGPIWAKIPHTDGHFHPSPLMGGFGLKHPPPQIMIKNTPVPANPPTNFSAAKFASFITQYSTGQVSVEIEWELQKENSKRWNPEIQYTSNYNKSVNVDFTVDANGVYSEPRPIGTRYLTRNL

SEQ ID NO: 11481 - protein, 735 aa, Artificial Sequence
  source: /note="Description of Artificial Sequence: Synthetic polypeptide"
MAADGYLPDWLEDILSEGIRQWWKLKPGPPPPKPAERHKDDSRGLVLPGYKYLGPFNGLDKGEPVNEADAAALEHDKAYDRQLDSGDNPYLKYNHADAEFQERLKEDTSFGGNLGRAVFQAKKRVLEPLGLVEEPVKTAPGKKRPVEQSPAEPDSSSGTGKAGNQPARKRLNFGQTGDADSVPDPQPLGQPPAAPSGLGSTTMATGSGAPMADNNEGADGVGNSSGNWHCDSQWLGDRVITTSTRTWALPTYNNHLYKQISSQSGAANDNHYFGYSTPWGYFDFNRFHCHFSPRDWQRLINNNWGFRPKRLNFKLFSIQVKEVTQNDGTTTIANNLTSTVQVFTDSEYQLPYVLGSAHQGCLPPFPADVFMVPQYGYLTLNNGSQAVGRSSFYCLEYFPSQMLRTGNNFTFSYTFEDVPFHSSYAHSQSLDRLMNPLIDQYLYYLNKTQSNSGTLQQSRLLFSQAGPTSMSLQAKNWLPGPCYRQQRLSKQANDNNNSNFPWTAATKYHLNGRDSLVNPGPAMASHKDDEEKFFPMHGTLIFGKQGTNANDADLDNVMITDEEEIRTTNPVATEQYGTVSNNLQNSNTGPTTGTVNHQGALPGMVWQDRDVYLQGPIWAKIPHTDGHFHPSPLMGGFGLKHPPPQIMIKNTPVPANPPTNFSSAKFASFITQYSTGQVSVEIEWELQKENSKRWNPEIQYTSNYNKSVNVDFTVDTNGVYSEPRPIGTRYLTRNL

SEQ ID NO: 11482 - protein, 735 aa, Artificial Sequence
  source: /note="Description of Artificial Sequence: Synthetic polypeptide"
MAADGYLPDWLEDTLSEGIRQWWKLKPGPPPPRPAERHQDDSRGLVLPGYKYLGPFNGLDKGEPVNEADAAALEHDKAYDRQLDSGDNPYLKYNHADAEFQERLKEDTSFGGNLGRAVFQAKKRVLEPLGLVEEPVKTAPGKKRPVEHSPAEPDSSSGTGKAGQQPARKRLNFGQTGDADSVPDPQPLGQPPAAPTSLGSTTMATGSGAPMADNNEGADGVGNSSGNWHCDSQWLGDRVITTSTRTWALPTYNNHLYKQISSQSGASNDNHYLGYSTPWGYFDFNRFHCHFSPRDWQRLINNNWGFRPKRLNFKLFNIQVKEVTQNDGTTTIANNLTSTVQVFTDSEYQLPYVLGSAHQGCLPPFPADVFMVPQYGYLTLNNGSQAVGRSSFYCLEYFPSQMLRTGNNFTFSYTFEDVPFHSSYAHSQSLDRLMNPLIDQYLYYLNRTQSNSGTLQQSRLLFSQAAPTSMSLQAKNWLPGPCYRQQRLSKQANDNNNSNFPWTAATKYPLNGRDSLVNPGPAMASHKDDEEKFFPMHGTLIFGKQGTNANDTDLEHVMITDEEEIRTTNPVATEQYGNVSNNLQNSNTGPTTENVNHQGALPGMVWQDRDVYLQGPIWAKIPHTDGHFHPSPLMGGFGLKHPPPQIMIKNTPVPANPPTNFSAAKFASFITQYSTGQVSVEIEWELQKENSKRWNPEIQYTSNYNKSVNVDFTVDANGVYSEPRPIGTRYLTRNL

SEQ ID NO: 11483 - protein, 735 aa, Artificial Sequence
  source: /note="Description of Artificial Sequence: Synthetic polypeptide"
MAADGYLPDWLEDILSEGIRQWWKLKPGPPPPKPAERHKDDSRGLVLPGYKYLGPFNGLDKGEPVNEADAAALEHDKAYDRQLDSGDNPYLKYNHADAEFQERLKEDTSFGGNLGRAVFQAKKRVLEPLGLVEEPVKTAPGKKRPVEQSPAEPDSSSGTGKAGNQPARKRLNFGQTGDADSVPDPQPLGQPPAAPSGLGSTTMATGSGAPMADNNEGADGVGNSSGNWHCDSQWLGDRVITTSTRTWALPTYNNHLYKQISSQSGAANDNHYFGYSTPWGYFDFNRFHCHFSPRDWQRLINNNWGFRPKRLNFKLFNIQVKEVTQNDGTTTIANNLTSTVQVFTDSEYQLPYVLGSAHQGCLPPFPADVFMVPQYGYLTLNNGSQAVGRSSFYCLEYFPSQMLRTGNNFTFSYAFEDVPFHSSYAHSQSLDRLMNPLIDQYLYYLNKTQSNSGTLQQSRLLFSQAGPTSMSLQAKNWLPGPCYRQQRLSKQANDNNNSNFPWTAATKYHLNGRDSLVNPGPAMASHKDDEEKFFPMHGTLIFGKQGTNANDADLDNVMITDEEEIRTTNPVATEQYGTVSNNLQNSNTGPTTGTVNHQGALPGMVWQDRDVYLQGPIWAKIPHTDGHFHPSPLMGGFGLKHPPPQIMIKNTPVPANPPTNFSSAKFAPFITQYSTGQVSVEIEWELQKENSKRWNPEIQYTSNYNKSVNVDFTVDTNGVYSEPRPIGTRYLTRNL

SEQ ID NO: 11484 - protein, 735 aa, Artificial Sequence
  source: /note="Description of Artificial Sequence: Synthetic polypeptide"
MAADGYLPDWLEDTLSEGIRQWWKLKPGPPPPRPAERHQDDSRGLVLPGYKYLGPFNGLDKGEPVNEADAAALEHDKAYDRQLDSGDNPYLKYNHADAEFQERLKEDTSFGGNLGRAVFQAKKRVLEPLGLVEEPVKTAPGKKRPVEHSPAEPDSSSGTGKAGQQPARKRLNFGQTGDADSVPDPQPLGQPPAAPTSLGSTTMATGSGAPMADNNEGADGVGNSSGNWHCDSQWLGDRVITTSTRTWALPTYNNHLYKQISSQSGASNDNHYFGYSTPWGYFDFNRFHCHFSPRDWQRLINNNWGFRPKRLNFKLFNIQVKEVTQNDGTTTIANNLTSTVQVFTDSEYQLPYVLGSAHQGCLPPFPADVFMVPQYGYLTLNNGSQAVGRSSFYCLEYFPSQMLRTGNNFTFSYTFEDVPFHSSYAHSQSLDRLMNPLIDQYLYYLNRTQSNSGTLQQSRLLFSQAGPTSMSLQAKNWLPGPCYRQQRLSKQANDNNNSNFPWTAATKYHLNGRDSLVNPGPAMASHKDDEEKFFPMHGTLIFGKQGTNANDADLEHVMITDEEEIRTTNPVATEQYGNVSNNLQNSNTGPTTENVNHQGALPGMVWQDRDVYLQGPIWAKIPHTDGHFHPSPLMGGFGLKHPPPQIMIKNTPVPANPPTNFSAAKFASFITRYSTGQVSVEIEWELQKENSKRWNPEIQYTSNYNKSVNVDFTVDANGVYSEPRPIGTRYLTRNL

SEQ ID NO: 11485 - protein, 735 aa, Artificial Sequence
  source: /note="Description of Artificial Sequence: Synthetic polypeptide"
MAADGYLPDWLEDTLSEGIRQWWKLKPGPPPPRPAERHQDDSRGLVLPGYKYLGPFNGLDKGEPVNEADAAALEHDKAYDRQLDSGDNPYLKYNRADAEFQERLKEDTSFGGNLGRAVFQAKKRVLEPLGLVEEPVKTAPGKKRPVEHSPAEPDSSSGTGKAGQQPARKRLNFGQTGDADSVPDPQPLGQPPAAPTSLGSTTMATGSGAPMADNNEGADGVGNSSGNWHCDSQWLGDRVITTSTRTWALPTYNNHLYKQISSQSGASNDNHYFGYSTPWGYFDFNRFHCHFSPRDWQRLINNNWGFRPKRLNFKLFNIQVKEVTQNDGTTTIANNLTSTVQVFTDSEYQLPYVLGSAHQGCLPPFPADVFMVPQYGYLTLNNGSQAVGRSSFYCLEYFPSQMLRTGNNFTFSYTFEDVPFHSSYAHSQSLDRLMNPLIDQYLYYLNRTQSNSGTLQQSRLLFSQAGPTSMSLQAKNWLPGPCYRQQRLSKQANDNNNSNFPWTAATKYHLNGRDSLVNPGPAMASHKDDEEKFFPMHGTLIFGKQGTNANDTDLEHVMITDEEEIRTTNPVATEQYGNVSNNLQNSNTGPTTENVNHQGALPGMVWQDRDVYLQGPIWAKIPHTDGHFHPSPLMGGFGLKHPPPQIMIKNTPVPANPPTNFSAAKFASFITQYSTGQVSVEIEWELQKENSKRWNPEIQYTSNYNKSVNVDFTVDANGVYSEPRPIGTRYLTRNL

SEQ ID NO: 11486 - protein, 735 aa, Artificial Sequence
  source: /note="Description of Artificial Sequence: Synthetic polypeptide"
  MOD_RES (628)..(628): Any naturally occurring amino acid
MAADGYLPDWLEDTLSEGIRQWWKLKPGPPPPRPAERHQDDSRGLVLPGYKYLGPFNGLDKGEPVNEADAAALEHDKAYDRQLDSGDNPYLKYNHADAEFQERLKEDTSFGGNLGRAVFQAKKRVLEPLGLVEEPVKTAPGKKRPVEHSPAEPDSSSGTGKAGQQPARKRLNFGQTGDADSVPDPQPLGQPPAAPTSLGSTTMATGSGAPMADNNEGADGVGNSSGNWHCDSQWLGDRVITTSTRTWALPTYNNHLYKQISSQSGASNDNHYFGYSTPWGYFDFNRFHCHFSPRDWQRLINNNWGFRPKRLNFKLFNIQVKEVTQNDGTTTIANNLTSTVQVFTDSEYQLPYVLGSAHQGCLPPFPADVFMVPQYGYLTLNNGSQAVGRSSFYCLEYFPSQMLRTGNNFTFSYTFEDVPFHSSYAHSQSLDRLMNPLIDQYLYYLNRTQSNSGTLQQSRLLFSQAGPTSMSLQAKNWLPGPCYRQQRLSKQANDNNNSNFPWTAATKYHLNGRDSLVNPGPAMASHKDDEEKFFPMHGTLIFGKQGTNANDADLEHVMITDEEEIRTTNPVATEQYGNVSNNLQNSNTGPTTENVNHQGALPGMVWQDRDVYLQGPIWAKIPHTDGHXHPSPLMGGFGLKHPPPQIMIKNTPVPANPPTNFSAAKFASFITQYSTGQVSVEIEWELQKENSKRWNPEIQYTSNYNKSVNVDFTVDANGVYSEPRPIGTRYLTRNL

SEQ ID NO: 11487 - protein, 735 aa, Artificial Sequence
  source: /note="Description of Artificial Sequence: Synthetic polypeptide"
MAADGYLPDWLEDTLSEGIRQWWKLKPGPPPPRPAERHQDDSRGLVLPGYKYLGPFNGLDKGEPVNEADAAALEHDKAYDRQLDSGDNPYLKYNHADAEFQERLKEDTSFGGNLGRAVFQAKKRVLEPLGLVEEPVKTAPGKKRPAEHSPAEPDSSSGTGKAGQQPARKRLNFGQTGDADSVPDPQPLGQPPAAPTSLGSTTMATGSGAPMADNNEGADGVGNSSGNWHCDSQWLGDRVITTSTRTWALPTYNNHLYKQISSQSGASNDNHYFGYSTPWGYFDFNRFHCHFSPRDWQRLINNNWGFRPKRLNFKLFNIQVKEVTQNDGTTTIANNLTSTVQVFTDSEYQLPYVLGSAHQGCLPPFPADVFMVPQYGYLTLNNGSQAVGRSSFYCLEYFPSQMLRTGNNFTFSYTFEDVPFHSSYAHSQSLDRLMNPLIDQYLYYLNRTQSNSGTLQQSRLLFSQAGPTSMSLQAKNWLPGPCYRQQRLSKQANDNNNSNFPWTAATKYHLNGRDSLVNPGPAMASHKDDEEKFFPMHGTLIFGKQGTNANDADLEHVMITDEEEIRTTNPVATEQYGNVSNNLQNSNTGPTTENVNHQGALPGMVWQDRDVYLQGPIWAKIPHTDGHFHPSPLMGGFGLKHPPPQIMIKNTPVPANPPTNFSAAKFASFITQYSTGQVSVEIEWELQKENSKRWNPEIQYTSNYNKSVNVDFTVDANGVYSEPRPIGTRYLTRNL

SEQ ID NO: 11488 - protein, 735 aa, Artificial Sequence
  source: /note="Description of Artificial Sequence: Synthetic polypeptide"
MAADGYLPDWLEDTLSEGIRQWWKLKPGPPPPRPAERHQDDSRGLVLPGYKYLGPFNGLDKGEPVNEADAAALEHDKAYDRQLDSGDNPYLKYNHADAEFQERLKEDTSFGGNLGRAVFQAKKRVLEPLGLVEEPVKTAPGKKRPVEHSPAEPDSSSGTGKAGQQPARKRLNFGQTGDADSVPDPQPLGQPPAAPTSLGSTTMATGSGAPMADNNEGADGVGNSSGNWHCDSQWLGDRVITTSTRTWALPTYNNHLYKQISSQSGASNDNHYFGYSTPWGYFDFNRFHCHFSPRDWQRLINNNWGFRPKRLNFKLFNIQVKEVTQNDGTTTIANNLTSTVQVFTDSEYQLPYVLGSAHQGCLPPFPADVFMVPQYGYLTLNNGSQAVGRSSFYCLEYFPSQMLRTGNNFTFSYTFEDVPFHSSYAHSQSLDRLMNPLIDQYLYYLNRTQSNSGTLQQPRLLFSQAGPTSMSLQAKNWLPGPCYRQQRLSKQANDNNNSNFPWTAATKYHLNGRDSLVNPGPAMASHKDDEEKFFPMHGTLIFGKQGTNANDADLEHVMITDEEEIRTTNPVATEQYGNVSNNLQNSNTGPTTENVNHQGALPGMVWQDRDVYLQGPIWAKIPHTDGHFHPSPLMGGFGLKHPPPQIMIKNTPVPANPPTNFSAAKFASFITQYSTGQVSVEIEWELQKENSKRWNPEIQYTSNYNKSVNVDFTVDANGVYSEPRPIGTRYLTRNL

SEQ ID NO: 11489 - protein, 735 aa, Artificial Sequence
  source: /note="Description of Artificial Sequence: Synthetic polypeptide"
  MOD_RES (552)..(552): Any naturally occurring amino acid
MAADGYLPDWLEDTLSEGIRQWWKLKPGPPPPRPAERHQDDSRGLVLPGYKYLGPFNGLDKGEPVNEADAAALEHDKAYDRQLDSGDNPYLKYNHADAEFQERLKEDTSFGGNLGRAVFQAKKRVLEPLGLVEEPVKTAPGKKRPVEHSPAEPDSSSGTGKAGQQPARKRLNFGQTGDADSVPDPQPLGQPPAAPTSLGSTTMATGSGAPMADNNEGADGVGNSSGNWHCDSQWLGDRVITTSTRTWALPTYNNHLYKQISSQSGASNDNHYFGYSTPWGYFDFNRFHCHFSPRDWQRLINNNWGFRPKRLNFKLFNIQVKEVTQNDGTTTIANNLTSTVQVFTDSEYQLPYVLGSAHQGCLPPFPADVFMVPQYGYLTLNNGSQAVGRSSFYCLEYFPSQMLRTGNNFTFSYTFEDVPFHSSYAHSQSLDRLMNPLIDQYLYYLNRTQSNSGTLQQSRLLFSQAGPTSMSLQAKNWLPGPCYRQQRLSKQANDNNNSNFPWTAATKYHLNGRDSLVNPGPAMASHKDDEEKFFPMHGTLIFGKQGTNANDXDLEHVMITDEEEIRTTNPVATEQYGNVSNNLQNSNTGPTTENVNHQGALPGMVWQDRDVYLQGPIWAKIPHTDGHFHPSPLMGGFGLKHPPPQIMIKNTPVPANPPTNFSAAKFASFITQYSTGQVSVEIEWELQKENSKRWNPETQYTSNYNKSVNVDFTVDANGVYSEPRPIGTRYLTRNL

SEQ ID NO: 11490 - protein, 735 aa, Artificial Sequence
  source: /note="Description of Artificial Sequence: Synthetic polypeptide"
MAADGYLPDWLEDTLSEGIRQWWKLKPGPPLPRPAERHQDDSRGLVLPGYKYLGPFNGLDKGEPVNEADAAALEHDKAYDRQLDSGDNPYLKYNHADAEFQERLKEDTSFGGNLGRAVFQAKKRVLEPLGLVEEPVKTAPGKKRPVEHSPAEPDSSSGTGKAGQQPARKRLNFGQTGDADSVPDPQPLGQPPAAPTSLGSTTMATGSGAPMADNNEGADGVGNSSGNWHCDSQWLGDRVITTSTRTWALPTYNNHLYKQISSQSGASNDNHYFGYSTPWGYFDFNRFHCHFSPRDWQRLINNNWGFRPKRLNFKLFNIQVKEVTQNDGTTTIANNLTSTVQVFTDSEYRLPYVLGSAHQGCLPPFPADVFMVPQYGYLTLNNGSQAVGRSSFYCLEYFPSQMLRTGNNFTFSYTFEDVPFHSSYAHSQSLDRLMNPLIDQYLYYLNRTQSNSGTLQQSRLLFSQAGPTSMSLQAKNWLPGPCYRQQRLSKQANDNNNSNFPWTAATKYHLNGRDSLVNPGPAMASHKDDEEKFFPMHGTLIFGKQGTNANDADLEHVMITDEEEIRTTNPVATEQYGNVSNNLQNSNTGPTTENVNHQGALPGMVWQDRDVYLQGPIWAKIPHTDGHFHPSPLMGGFGLKHPPPQIMIKNTPVPANPPTNFSAAKFASFITQYSTGQVSVEIEWELQKENSKRWNPEIQYTSNYNKSVNVDFTVDANGVYSEPRPIGTRYLTRNL

SEQ ID NO: 11491 - protein, 735 aa, Artificial Sequence
  source: /note="Description of Artificial Sequence: Synthetic polypeptide"
MAADGYLPDWLEDTLSEGIRQWWKLKPGPPPPRPAERHQDDSRGLVLPGYKYLGPFNGLDKGEPVNEADAAALEHDKAYDRQLDSGDNPYLKYNHADAEFQERLKEDTSFGGNLGRAVFQAKKRVLEPLGLVEEPVKTAPGKKRPVEHSPAEPDSSSGTGKAGQQPARKRLNFGQTGDADSVPDPQPLGQPPAAPTSLGSTTMATGSGAPMADNNEGADGVGNSSGNWHCDSQWLGDRVITTSTRTWALPTYNNHLYKQISSQSGASNDNHYFGYSTPWGYFDFNRFHCHFSPRDWQRLINNNWGFRPKRLNFKLFNIQVKEVTQNDGTTTIANNLTSTVQVFTDSEYQLPYVLGSAHQGCLPPFPADVFMVPQYGYLTLNNGSQAVGRSSFYCLEYFPSQMLRTGNNFTFSYTFEDVPFHSSYAHSQSLDRLMNPLTDQYLYYLNRTQSNSGTLQQSRLLFSQAGPTSMSLQAKNWLPGPCYRQQRLSKQANDNNNSNFPWTAATKYHLNGRDSLVNPGPAMASHKDDEEKFFPMHGTLIFGKQGTNANDTDLEHVMITDEEEIRTTNPVATEQYGNVSNNLQNSNTGPTTENVNHQGALPGMVWQDRDVYLQGPIWAKIPHTDGHFHPSPLMGGFGLKHPPPQIMIKNTPVPANPPTNFSAAKFASFITQYSTGQVSVEIEWELQKENSKRWNPEIQYTSNYNKSVNVDFTVDANGVYSEPRPIGTRYLTRNL

SEQ ID NO: 11492 - protein, 735 aa, Artificial Sequence
  source: /note="Description of Artificial Sequence: Synthetic polypeptide"
MAADGYLPDWLEDTLSEGIRQWWKLKPGPPPPRPAERHQDDSRGLVLPGYKYLGPFNGLDKGEPVNEADAAALEHDKAYDRQLDSGDNPYLKYNHADAEFQERLKEDTSFGGNLGRAVFQAKKRVLEPLGLVEEPVKTAPGKKRPVEHSPAEPDSSSGTGKAGQQPARKRLNFGQTGDADSVPDPQPLGQPPAAPTSLGSTTMATGSGAPMADNNEGADGVGNSSGNWHCDSQWLGDRVITTSTRTWALPTYNNHLYRQISSQSGASNDNHYFGYSTPWGYFDFNRFHCHFSPRDWQRLINNNWGFRPKRLNFKLFNIQVKEVTQNDGTTTIANNLTSTVQVFTDSEYQLPYVLGSAHQGCLPPFPADVFMVPQYGYLTLNNGSQAVGRSSFYCLKYFPSQMLRTGNNFTFSYTFEDVPFHSSYAHSQSLDRLMNPLIDQYLYYLNRTQSNSGTLQQSRLLFSQAGPTSMSLQAKNWLPGPCYRQQRLSKQANDNNNSNFPWTAATKYHLNGRDSLVNPGPAMASHKDDEEKFFPLHGTLIFGKQGTNANDTDLEHVMITDEEEIRTTNPVATEQYGNVSNNLQNSNTGPTTENVNHQGALPGMVWQDRDVYLQGPIWAKIPHTDGHFHPSPLMGGFGLKHPPPQIMIKNTPVPANPPTNFSAAKFASFITQYSTGQVSVEIEWELQKENSKRWNPEIQYTSNYNKSVNVDFTVDANGVYSEPRPIGTRYLTRNL

SEQ ID NO: 11493 - protein, 735 aa, Artificial Sequence
  source: /note="Description of Artificial Sequence: Synthetic polypeptide"
MAADGYLPDWLEDTLSEGIRQWWKLKPGPPPPRPAERHQDDSRGLVLPGYKYLGPFNGLDKGEPVNEADAAALEHDKAYDRQLDSGDNPYLKYNHADAEFQERLKEDTSFGGNLGRAVFQAKKRVLEPLGLVEEPVKTAPGKKRPVEHSPAEPDSSSGTGKAGQQPARKRLNFGQTGDADSVPDPQPLGQPPAAPTSLGSTTMATGSGAPMADNNEGADGVGNSSGNWHCDSQWLGDRVITTSTRTWALPTYNNHLYRQISSQSGASNDNHYFGYSTPWGYFDFNRFHCHFSPRDWQRLINNNWGFRPKRLNFKLFNIQVKEVTQNDGTTTIANNLTSTVQVFTDSEYQLPYVLGSAHQGCLPPFPADVFMVPQYGYLTLNNGSQAVGRSSFYCLEYFPSQMLRTGNNFTFSYTFEDVPFHSSYAHSQSLDRLMNPLIDQYLYYLNRTQSNSGTLQQSRLLFSQAGPTSMSLQAKNWLPGPCYRQQRLSKQANDNNNSNFPWTAATKYHLNGRDSLVNPGPAMASHKDDEEKFFPMHGTLIFGKQGTNANDTDLEHVMITDEEEIRTTNPVATEQYGNVSNNLQNSNTGPTTENVNHQGALPGMVWQDRDVYLQGPIWAKIPHTDGHFHPSPLMGGFGLKHPPPQIMIKNTPVPANPPTNFSAAKFASFITQYSTGQVSVEIEWVLQKENSKRWNPEIQYTSNYNKSVNVDFTVDANGVYSEPRPIGTRYLTRNL

SEQ ID NO: 11494 - protein, 735 aa, Artificial Sequence
  source: /note="Description of Artificial Sequence: Synthetic polypeptide"
MAADGYLPDWLEDTLSEGIRQWWKLKPGPPPPRPAERHQDDSRGLVLPGYKYLGPFNGLDKGEPVNEADAAALEHDKAYDRQLDSGDNPYLKYNHADAEFQERLKEDTSFGGNLGRAVFQAKKRVLEPLGLVEEPVKTAPGKKRPVEHSPAEPDSSSGTGKAGQQPARKRLNFGQTGDADSVPDPQPLGQPPAAPTSLGSTTMATGSGAPMADNNEGADGVGNSSGNWHCDSQWLGDRVITTSTRTWALPTYNNHLYKQISSQSGASNDNHYFGYSTPWGYFDFNRFHCHFSPRDWQRLINNNWGFRPKRLNFKLFNIQVKEVTQNDGTTTIANNLISTVQVFTDSEYQLPYVLGSAHQGCLPPFPADVFMVPQYGYLTLNNGSQAVGRSSFYCLEYFPSQMLRTGNNFTFSYTFEDVPFHSSYAHSQSLDRLMNPLIDQYLYYLNRTQSNSGTLQQSRLLFSQAGPTSMSLQAKNWLPGPCYRQQRLSKQANDNNNSNFPWTAATKYHLNGRDSLVNPGPAMASHKDDEEKFFPMHGTLIFGKQGTNANDADLEHVMITDEEEIRTTNPVATEQYGNVSNNLQNSNTGPTTENVNHQGALPGMVWQDRDVYLQGPIWAKIPHTDGHFHPSPLMGGFGLKHPPPQIMIKNTPVPANPPTNFSAAKFASFITQYSTGQVSVEIEWELQKENSKRWNPEIQYTSNYNKSVNVDFTVDANGVYSEPRPIGTRYLTRNL

SEQ ID NO: 11495 - protein, 734 aa, Artificial Sequence
  source: /note="Description of Artificial Sequence: Synthetic polypeptide"
MAADGYLPDWLEDILSEGIRQWWKLKPGPPPPKPAERHKDDSRGLVLPGYKYLGPFNGLDKGEPVNEADAAALEHDKAYDRQLDSGDNPYLKYNHADAEFQERLKEDTSFGGNLGRAVFQAKKRVLEPLGLVEEPVKTAPGKKRPVEQSPAEPDSSSGTGKAGNQPARKRLNFGQTGDADSVPDPQPLGQPPAAPSGLGSTTMATGSGAPMADNNEGADGVGNSSGNWHCDSQWLGDRVITTSTRTWALPTYNNHLYKQISSQSGAANDNHYFGYSTPWGYFDFNRFHCHFSPRDWQRLINNNWGFRPKRLNFKLFNIQVKEVTQNDGTTTIANNLTSTVQVFTDSEYQLPYVLGSAHQGCLPPFPADVFMVPQYGYLTLNNGSQAVGRSSFYCLEYFPSQMLRTGNNFTFSYTFEDVPFHSSYAHSQSLDRLMNPLIDQYLYYLNKTQSNSGTLQQSRLLFSQAGPTSMSLQAKNWLPGPCYRQQRLSKQANDNNSNFPWTAATKYHLNGRDSLVNPGPAMASHKDDEEKFFPMHGTLIFGKQGTNANDADLDNVMITDEEEIRTTNPVATEQYGTVSNNLQNSNTGPTTGTVNHQGALPGMVWQDRDVYLQGPIWAKIPHTDGHFHPSPLMGGFGLKHPPPQIMIKNTPVPANPPTNFSSAKFASFITQYSTGQVSVEIEWELQKENSKRWNPEIQYTSNYNKSVNVDFTVDTNGVYSEPRPIGTRYLTRNL

SEQ ID NO: 11496 - protein, 735 aa, Artificial Sequence
  source: /note="Description of Artificial Sequence: Synthetic polypeptide"
MAADGYLPDWLEDILSEGIRQWWKLKPGPPPPKPAERHKDDSRGLVLPGYKYLGPFNGLDKGEPVNEADAAALEHDKAYDRQLDSGDNPYLKYNHADAEFQERLKEDTSFGGNLGRAVFQAKKRVLEPLGLVEEPVKTAPGKKRPVEQSPAEPDSSSGTGKAGNQPARKRLNFGQTGDADSVPDPQPLGQPPAAPSGLGSTTMATGSGAPMADNNEGADGVGNSSGNWHCDSQWLGDRVITTSTRTWALPTYNNHLYKQISSQSGAANDSHYFGYSTPWGYFDFNRFHCHFSPRDWQRLINNNWGFRPKRLNFKLFNIQVKEVTQNDGTTTIANNLTSTVQVFTDSEYQLPYVLGSAHQGCLPPFPADVFMVPQYGYLTLNNGSQAVGRSSFYCLEYFPSQMLRTGNNFTFSYTFEDVPFHSSYAHSQSLDRLMNPLIDQYLYYLNKTQSNSGTLQQSRLLFSQAGPTSMSLQAKNWLPGPCYRQQRLSKQANDNNNSNFPWTAATKYHLNGRDSLVNPGPAMASHKDDEEKFFPMHGTLIFGKQGTNANDADLDNVMITDEEEIRTTNPVATEQYGTVSNNLQNSNTGPTTGTVNHQGALPGMVWQDRDVYLQGPIWAKIPHTDGHFHPSPLMGGFGLKHPPPQIMIKNTPVPANPPTNFSSAKFASFITQYSTGQVSVEIEWELQKENSKRWNPEIQYTSNYNKSVNVDFTVDTNGVYSEPRPIGTRYLTRNL

SEQ ID NO: 11497 - protein, 735 aa, Artificial Sequence
  source: /note="Description of Artificial Sequence: Synthetic polypeptide"
MAADGYLPDWLEDTLSEGIRQWWKLKPGPPPPRPAERHQDDSRGLVLPGYKYLGPFNGLDKGEPVNEADAAALEHDKAYDRQLDSGDNPYLKYNHADAEFQERLKEDTSFGGNLGRAVFQAKKRVLEPLGLVEEPVKTAPGKKRPVEHSPAEPDSSSGTGKAGQQPARKRLNFGQTGDADSVPDPQPLGQPPAAPTSLGSTTMATGSGAPMADNNEGADGVGNSSGNWHCDSQWLGDRVITTSTRTWALPTYNNHLYKQISSQSGASNDNHYFGYSTPWGYFDFNRFHCHFSPRDWQRLINNNWGFRPKRLNFKLFNIQVKEVTQNDGTTTIANNLTSTVQVFTDSEYQLPYVLGSAHQGCLPPFPADVFMVPQYGYLTLNNGSQAVGRSSFYCLEYFPSQMLRTGNNFTFSYTFEDVPFHSSYAHSQSLDRLMNPLIDQYLYYLNRTQSNSGTLQQSRLLFSQAGPTSMSLQAKNWLPGPCYRQQRLSKQANDNNNSNFPWTAATKYHLNGRDSLVNPGPAMASHKDDEEKFFPMHGTLIFGKQGTNANDTDLEHVMITDEEEIRTTNPVATEQYGNVSNNLQNSNTGPTTENVNHQGALPGMVWQDRDVYLQGPIWAKIPHTDGHFHPSPLMGGFGLKHPPPQIMIKNTPVPANPPTNFSAAKFASFITQYSTGQVSVEIEWELQKENSKRWNPEIQYTSNYNKSVNVDFTVDANGVYSEPRPIGTRYLTRNL

SEQ ID NO: 11498 - protein, 734 aa, Artificial Sequence
  source: /note="Description of Artificial Sequence: Synthetic polypeptide"
MAADGYLPDWLEDILSEGIRQWWKLKPGPPPKPAERHKDDSRGLVLPGYKYLGPFNGLDKGEPVNEADAAALEHDKAYDRQLDSGDNPYLKYNHADAEFQERLKEDTSFGGNLGRAVFQAKKRVLEPLGLVEEPVKTAPGKKRPVEQSPAEPDSSSGTGKAGNQPARKRLNFGQTGDADSVPDPQPLGQPPAAPSGLGSTTMATGSGAPMADNNEGADGVGNSSGNWHCDSQWLGDRVITTSTRTWALPTYNNHLYKQISSQSGAANDNHYFGYSTPWGYFDFNRFHCHFSPRDWQRLINNNWGFRPKRLNFKLFNIQVKEVTQNDGTTTIANNLTSTVQVFTDSEYQLPYVLGSAHQGCLPPFPADVFMVPQYGYLTLNNGSQAVGRSSFYCLEYFPSQMLRTGNNFTFSYTFEDVPFHSSYAHSQSLDRLMNPLIDQYLYYLNKTQSNSGTLQQSRLLFSQAGPTSMSLQAKNWLPGPCYRQQRLSKQANDNNNSNFPWTAATKYHLNGRDSLVNPGPAMASHKDDEEKFFPMHGTLIFGKQGTNANDADLDNVMITDEEEIRTTNPVATEQYGTVSNNLQNSNTGPTTGTVNHQGALPGMVWQDRDVYLQGPIWAKIPHTDGHFHPSPLMGGFGLKHPPPQIMIKNTPVPANPPTNFSSAKFASFITQYSTGQVSVEIEWELQKENSKRWNPEIQYTSNYNKSVNVDFTVDTNGVYSEPRPIGTRYLTRNL

SEQ ID NO: 11499 - protein, 735 aa, Artificial Sequence
  source: /note="Description of Artificial Sequence: Synthetic polypeptide"
MAADGYLPDWLEDTLSEGIRQWWKLKPGPPPPRPAERHQDDSRGLVLPGYKYLGPFNGLDKGEPVNEADAAALEHDKAYDRQLDSGDNPYLKYNHADAEFQERLKEDTSFGGNLGRAVFQAKKRVLEPLGLVEEPVKTAPGKKRPVEHSPAEPDSSSGTGKAGQQPARKRLNFGQTGDADSVPDPQPLGQPPAAPTSLGSTTMATGSGAPMADNNEGADGVGNSSGNWHCDSQWLGDRVITTSTRTWALPTYNNHLYKQISSQSGASNDNHYFGYSTPWGYFDFNRFHCHFSPRDWQRLINNNWGFRPKRLNFKLFNIQVKEVTQNDGTTTIANNLTSTVQVFTDSEYQLPYVLGSAHQGCLPPFPADVFMVPQYGYLTLNNGSQAVGRSSFYCLEYFPSQMLRTGNNFTFSYTFGDVPFHSSYAHSQSLDRLMNPLIDQYLYYLNRTQSNSGTLQQSRLLFSQAGPTSMSLQAKNWLPGPCYRQQRLSKQANDNNNSNFPWTAATKYHLNGRDSLVNPGPAMASHKDDEEKFFPMHGTLIFGKQGTNANDADLEHVMITDEEEIRTTNPVATEQYGNVSNNLQNSNTGPTTENVNHQGALPGMVWQDRDVYLQGPIWAKIPHTDGHFHPSPLMGGFGLKHPPPQIMIKNTPVPANPPTNFSAAKFASFITQYSTGQVSVEIEWELQKENSKRWNPEIQYTSNYNKSVNVDFTVDANGVYSEPRPIGTRYLTRNL

SEQ ID NO: 11500 - protein, 735 aa, Artificial Sequence
  source: /note="Description of Artificial Sequence: Synthetic polypeptide"
MAADGYLPDWLEDTLSEGIRQWWKLKPGPPPPRPAERHQDDSRGLVLPGYKYLGPFNGLDKGEPVNEADAAALEHDKAYDRQLDSGDNPYLKYNHADAEFQERLKEDTSFGGNLGRAVFQAKKRVLEPLGLVEEPVKTAPGKKRPVEHSPAEPDSSSGTGKAGQQPARKRLNFGQTGDADSVPDPQPLGQPPAAPTSLGSTTMATGSGAPMADNNEGADGVGNSSGNWHCDSQWLGDRVITTSTRTWALPTYNNHLYKQISSQSGASNDSHYFGYSTPWGYFDFNRFHCHFSPRDWQRLINNNWGFRPKRLNFKLFNIQVKEVTQNDGTTTIANNLTSTVQVFTDSEYQLPYVLGSAHQGCLPPFPADVFMVPQYGYLTLNNGSQAVGRSSFYCLEYFPSQMLRTGNNFTFSYTFEDVPFHSSYAHSQSLDRLMNPLIDQYLYYLNRTQSNSGTLQQSRLLFSQAGPTSMSLQAKNWLPGPCYRQQRLSKQANDNNNSNFPWTAATKYHLNGRDSLVNPGPAMASHKDDEEKFFPMHGTLIFGKQGTNANDADLEHVMITDEEEIRTTNPVATEQYGNVSNNLQNSNTGPTTENVNHQGALPGMVWQDRDVYLQGPIWAKIPHTDGHFHPSPLMGGFGLKHPPPQIMIKNTPVPANPPTNFSAAKFASFITQYSTGQVSVEIEWELQKENSKRWNPEIQYTSNYNKSVNVDFTVDANGVYSEPRPIGTRYLTRNL

SEQ ID NO: 11501 - protein, 735 aa, Artificial Sequence
  source: /note="Description of Artificial Sequence: Synthetic polypeptide"
MAADGYLPDWLEDTLSEGIRQWWKLKPGPPPPRPAERHQDDSRGLVLPGYKYLGPFNGLDKGEPVNEADAAALEHDKAYDRQLDSGDNPYLKYNHADAEFQERLKEDTSFGGNLGRAVFQAKKRVLEPLGLVEEPVKTAPGKKRPVEHSPAEPDSSSGTGKAGQQPARKRLNFGQTGDADSVPDPQPLGQPPAAPTSLGSTTMATGSGAPMADNNEGADGVGNSSGNWHCDSQWLGDRVITTSTRTWALPTYNNHLYKQISSQSGASNDNHYFGYSTPWGYFDFNRFHCHFSPRDWQRLINNNWGFRPKRLNFKLFNIQVKEVTQNDGTTTIANNLTSTIQVFTDSEYQLPYVLGSAHQGCLPPFPADVFMVPQYGYLTLNNGSQAVGRSSFYCLEYFPSQMLRTGNNFTFSYTFEDVPFHSSYAHSQSLDRLMNPLIDQYLYYLNRTQSNSGTLQQSRLLFSQAGPTSMSLQAKNWLPGPCYRQQRLSKQANDNNNSNFPWTAATKYHLNGRDSLVNPGPAMASHKDDEEKFFPMHGTLIFGKQGTNANDADLEHVMITDEEEIRTTNPVATEQYGNVSNNLQNSNTGPTTENVNHQGALPGMVWQDRDVYLQGPIWAKIPHTDGHFHPSPLMGGFGLKHPPPQIMIKNTPVPANPPTNFSAAKFASFITQYSTGQVSVEIEWELQKENSKRWNPEIQYTSNYNKSVNVDFTVDANGVYSEPRPIGTRHLTRNL

SEQ ID NO: 11502 - protein, 735 aa, Artificial Sequence
  source: /note="Description of Artificial Sequence: Synthetic polypeptide"
MAADGYLPDWLEDTLSEGIRQWWKLKPGPPPPRPAERHQDDSRGLVLPGYKYLGPFNGLDKGEPVNEADAAALEHDKAYDRQLDSGDNPYLKYNHADAEFQERLKEDTSFGGNLGRAVFQAKKRVLEPLGLVEEPVKTAPGKKRPVEHSPAEPDSSSGTGKAGQQPARKRLNFGQTGDADSVPDPQPLGQPPAAPTSLGSTTMATGSGAPMADNNEGADGVGNSSGNWHCDSQWLGDRVITTSTRTWALPTYNNHLYKQISSQSGASNDNHYFGYSTPWGYFDFNRFHCHFSPRDWQRLINNNWGFRPKRLNFKLFNIQVKEVTQNDGTTTIANNLTSTVQVFTDSEYQLPYVLGSAHQGCLPPFPADVFMVPQYGYLTLNNGSQAVGRSSFYCLEYFPSQMLRTGNNFTFSYTFEDVPFHSSYAHSQSLDRLMNPLIDQYLYYLNRTQSNSGTLQQSGLLFSQAGPTSMSLQAKNWLPGPCYRQQRLSKQANDNNNSNFPWTAATKYHLNGRDSLVNPGPAMASHKDDEEKFFPMHGTLIFGKQGTNANDTDLEHVMITDEEEIRTTNPVATEQYGNVSNNLQNSNTGPTTENVNHQGALPGMVWQDRDVYLQGPIWAKIPHTDGHFHPSPLMGGFGLKHPPPQIMIKNTPVPANPPTNFSAAKFASFITQYSTGQVSVEIEWELQKENSKRWNPEIQYTSNYNKSVNVDFTVDANGVYSEPRPIGTRYLTRNL

SEQ ID NO: 11503 - protein, 735 aa, Artificial Sequence
  source: /note="Description of Artificial Sequence: Synthetic polypeptide"
MAADGYLPDWLEDTLSEGIRQWWKLKPGPPPPRPAERHQDDSRGLVLPGYKYLGPFNGLDKGEPVNEADAAALEHDKAYDRQLDSGDNPYLKYNHADAEFQERPKEDTSFGGNLGRAVFQAKKRVLEPLGLVEEPVKTAPGKKRPVEHSPAEPDSSSGTGKAGQQPARKRLNFGQTGDADSVPDPQPLGQPPAAPTSLGSTTMATGSGAPMADNNEGADGVGNSSGNWHCDSQWLGDRVITTSTRTWALPTYNNHLYKQISSQSGASNDNHYFGYSTPWGYFDFNRFHCHFSPRDWQRLINNNWGFRPKRLNFKLFNIQVKEVTQNDGTTTIANNLTSTVQVFTDSEYQLPYVLGSAHQGCLPPFPADVFMVPQYGYLTLNNGSQAVGRSSFYCLEYFPSQMLRTGNNFTFSYTFEDVPFHSSYAHSQSLDRLMNPLIDQYLYYLNRTQSNSGTLQQSRLLFSQAGPTSMSLQAKNWLPGPCYRQQRLSKQANDNNNSNFPWTAATKYHLNGRDSLVNPGPAMASHKDDEEKFFPMHGTLIFGKQGTNANDADLEHVMITDEEEIRTTNPVATEQYGNVSNNLQNSNTGPTTENVNHQGALPGMVWQDRDVYLQGPIWAKIPHTDGHFHPSPLMGGFGLKHPPPQIMIKNTPVPANPPTNFSAAKFASFITRYSTGQVSVEIEWELQKENSKRWNPEIQYTSNYNKSVNVDFTVDANGVYSEPRPIGTRYLTRNL

SEQ ID NO: 11504 - protein, 735 aa, Artificial Sequence
  source: /note="Description of Artificial Sequence: Synthetic polypeptide"
MAADGYLPDWLEDTLSEGIRQWWKLKPGPPPPKPAERHKDDSRGLVLPGYKYLGPFNGLDKGEPVNEADAAALEHDKAYDRQLDSGDNPYLKYNHADAELQERLKEDTSFGGNLGRAVFQAKKRVLEPLGLVEEPVKTAPGKKRPVEHSPVEPDSSSGTGKAGQQPARKRLNFGQTGDADSVPDPQPLGQPPAAPTSLGSTTMATGSGAPMADNNEGADGVGNSSGNWHCDSQWSGDRVITTSTRTWALPTYNNHLYKQISSQSGASNDNHYFGYSTPWGYFDFNRFHCHFSPRDWQRLINNNWGFRPKRLNFKLFNIQVKGVTQNDGTTTIANNLTSTVQVFTDSEYQLPYVLGSAHQGCLPPFPADVFMVPQYGYLTLNNGSQAVGRSSFYCLEYFPSQMLRTGNNFTFSYTFEDVPFHSSYAHSQSLDRLMNPLIDQYLYYLNKTQSNSGTLQQSRLLFSQAGPTSMSLQAKNWLPGPCYRQQRLSKQANDNNNSNFPWTAATKYHLNGRDSLVNPGPAMASHKDDEEKFFPMHGTLIFGKQGTNANDADLDNVMITDEEEIRTTNPVATEQYGTVSNNLQNSNTGPTTGTVNHQGALPGMVWQDRDVYLQGPIWAKIPHTDGHFHPSPLMGGFGLKHPPPQIMIKNTPVPANPPTNFSSAKFASFITQYSTGQVSVEIEWELQKENSKRWNPEIQYTSNYNKSVNVDFTVDTNGVYSEPRPIGTRYLTRNL

SEQ ID NO: 11505 - protein, 735 aa, Artificial Sequence
  source: /note="Description of Artificial Sequence: Synthetic polypeptide"
MAADGYLPDWLEDILSEGIRQWWKLKPGPPPPKPAERHKDDSRGLVLPGYKYLGPFNGLDKGEPVNEADAAALEHDKAYDRQLDSGDNPYLKYNHADAEFQERLKEDTSFGGNLGRAVFQAKKRVLEPLGLVEEPVKTAPGKKRPVEQSPAEPDSSSGTGKAGNQPARKRLNFGQTGDADSVPDPQPLGHPPAAPSGLGSTTMATGSGAPMADNNEGADGVGNSSGNWHCDSQWLGDRVITTSTRTWALPTYNNHLYKQISSQSGASNDNHYFGYSTPWGYFDFNRFHCHFSPRDWQRLINNNWGFRPKRLNFKLFNIQVKEVTQNDGTTTIANNLTSTVQVFTDSEYQLPYVLGSAHQGCLPPFPADVFMVPQYGYLTLNNGSQAVGRSSFYCLEYFPSQMLRTGNNFTFSYTFEDVPFHSSYAHSQSLDRLMNPLIDQYLYYLNKTQSNSGTLQQSRLLFSQAGPTSMSLQAKNWLPGPCYRQQRLSKQANDNNNSNFPWTAATKYHLNGRDSLVNPGPAMASHKDDEEKFFPMHGTLIFGKQGTNANDADLDNVMITDEEEIRTTNPVATEQYGTVSNNLQNSNTGPTTGTVNHQGALPGMVWQDRDVYLQGPIWAKIPHTDGHFHPSPLMGGFGLKHPPPQIMIKNTPVPANPPTNFSSAKFASFITQYSTGQVSVEIEWELQKENSKRWNPEIQYTSNYNKSVNVDFTVDTNGVYSEPRPIGTRYLTRNL

SEQ ID NO: 11506 - protein, 735 aa, Artificial Sequence
  source: /note="Description of Artificial Sequence: Synthetic polypeptide"
MAADGYLPDWLEDILSEGIRQWWKLKPGPPPPKPAERHKDDSRGLVLPGYKYLGPFNGLDKGEPVNEADAAALEHDKAYDRQLDSGDNPYLKYNHADAEFQERLKEDTSFGGNLGRAVFQAKKRVLEPLGLVEEPVKTAPGKKRPVEQSPAEPDSSSGTGKAGNQPARKRLNFGQTGDADSVPDPQPLGQPPAAPSGLGSTTMATGSGAPMADNNEGADGVGNSSGNWHCDSQWLGDRVITTSTRTWALPTYNNHLYKQISSQSGASNDNHYFGYSTPWGYFDFNRFHCHFSPRDWQRLINNNWGFRPKRLNFKLFNIQVKEVTQNDGTTTIANNLTSTVQVFTDSEYQLPYVLGSAHQGCLPPFPADVFMVPQYGYLTLNNGSQAVGRSSFYCLEYFPSQMLRTGNNFTFSYTFEDVPFHSSYAHSQSLDRLMNPLIDQYLYYLNKTQSNSGTLQQSRLLFSQAGPTSMSLQAKNWLPGPCYRQQRLSKQVNDNNNSNFPWTAATKYHLNGRDSLVNPGPAMASHKDDEEKFFPMHGTLIFGKQGTNANDADLDNVMITDEEEIRTTNPVATEQYGTVSNNLQNSNTGPTTGTVNHQGALPGMVWQDRDVYLQGPIWAKIPHTDGHFHPSPLMGGFGLKHPPPQIMIKNTPVPANPPTNFSSAKFASFITQYSTGQVSVEIEWELQKENSKRWNPEIQYTSNYNKSVNVDFTVDTNGVYSEPRPIGTRYLTRNL

SEQ ID NO: 11507 - protein, 735 aa, Artificial Sequence
  source: /note="Description of Artificial Sequence: Synthetic polypeptide"
MAADGYLPDWLEDILSEGIRQWWKLKPGPPPPKPAERHKDDSRGLVLPGYKYLGPFNGLDKGEPVNEADAAALEHDKAYDRQLDSGDNPYLKYNHADAEFQERLKEDTSFGGNLGRAVFQAKKRVLEPLGLVEEPVKTAPGKKRPVEQSPAEPDSSSGAGKAGNQPARKRLNFGQTGDADSVPDPQPLGQPPAAPSGLGSTTMATGSGAPMADNNEGADGVGNSSGNWHCDSQWLGDRVITTSTRTWALPTYNNHLYKQISSQSGASNDNHYFGYSTPWGYFDFNRFHCHFSPRDWQRLINNNWGFRPKRLNFKLFNIQVKEVTQNDGTTTIANNLTSTVQVFTDSEYQLPYVLGSAHQGCLPPFPADVFMVPQYGYLTLNNGSQAVGRSSFYCLEYFPSQMLRTGNNFTFSYTFEDVPFHSSYAHSQSLDRLMNPLIDQYLYYLTKTQSNSGTLQQSRLLFSQAGPTSMSLQAKNWLPGPCYRQQRLSKQANDNNNSNFPWTAATKYHLNGRDSLVNPGPAMASHKDDEEKFFPMHGTLIFGKQGTNANDADLDNVMITDEEEIRTTNPVATEQYGTVSNNLQNSNTGPTTGTVDHQGALPGMVWQDRDVYLQGPIWAKIPHTDGHFHPSPLMGGFGLKHPPPQIMIKNTPVPANPPTNFSSAKFASFITQYSTGQVSVEIEWELQKENSKRWNPEIQYTSNYNKSVNVDFTVDTNGVYSEPRPIGTRYLTRNL

SEQ ID NO: 11508 - protein, 735 aa, Artificial Sequence
  source: /note="Description of Artificial Sequence: Synthetic polypeptide"
MAADGYLPDWLEDILSEGIRQWWKLKPGPPPPKPAERHKDDSRGLVLPGYKYLGPFNGLDKGEPVNEADAAALEHDKAYDRQLDSGDNPYLKYNHADAEFQERLKEDTSFGGNLGRAVFQAKKRVLEPLGLVEEPVKTAPGKKRPVEQSPAEPDSSSGTGKAGNQPARKRLNFGQTGDADSVPDPQPLGQPPAAPSGLGSTTMATGSGAPMADNNEGADGVGNSSGNWHCDSQWLGDRVITTSTRTWALPTYNNHLYKQISSQSGASNDNHYFGYSTPWGYFDFNRFHCHFSPRDWQRLINNNWGFRPKRLNFKLFNIQVKEVTQNDGTTTIANNLTSTVQVFTDSEYQLPYVLGSAHQGCLPPFPADVFMVPQYGYLTLNNGSQAVGRSSFYCLEYFPSQMLRTGNNFTFSYTFEDVPFHSSYAHSQSLDRLMNPLIDQYLYYLNKTQSNSGTLQQSRLLLSQAGPTSMSLQAKNWLPGPCYRQQRLSKQANDNNNSNFPWTAATKYHLNGRDSLVNPGPAMASHKDDEEKFFPMHGTLIFGKQGTNANDADLDNVMITDEEEIRTTNPVATEQYGTVSNNLQNSNTGPTTGTVNHQGALPGMVWQDRDVYLQGPIWAKIPHTDGHFHPSPLMGGFGLKHPPPQIMIKNTPVPANPPTNFSSAKFASFITQYSTGQVSVEIEWELQKENSKRWNPEIQYTSNYNKSVNVDFTVDTNGVYSEPRPIGTRYLTRNL

SEQ ID NO: 11509 - protein, 735 aa, Artificial Sequence
  source: /note="Description of Artificial Sequence: Synthetic polypeptide"
MAADGYLPDWLEDTLSEGIRQWWKLKPGPPPPKPAERHKDDSRGLVLPGYKYLGPFNGLDKGEPVNEADAAALEHDKAYDRQLDSGDNPYLKYNHADAEFQERLKEDTSFGGNLGRAVFQAKKRVLEPLGLVEEPVKTAPGKKRPVEHSPVEPDSSSGTGKAGQQPARKRLNFGQTGDADSVPDPQPLGQPPAAPTSLGSTTMATGSGAPMADNNEGADGVDNSSGNWHCDSQWSGDRVITTSTRTWALPTYNNHLYKQISSQSGASNDNHYFGYSTPWGYFDFNRFHCHFSPRDWQRLINNNWGFRPKRLNFKLFNIQVKEVTQNDGTTTIANNLTSTVQVSTDSEYQLPYVLGSAHQGCLPPFPADVFMVPQYGYLTLNNGSQAVGRSSFYCLEYFPSQMLRTGNNFTFSYTFEDVPFHSSYAHSQSLDRLMNPLIDQYLYYLNKTQSNSGTLQQSRLLFSQAGPTSMSLQAKNWLPGPCYRQQRLSKQANDNNNSNFPWTAATKYHLNGRDSLVNPGPAMASHKDDEEKFFPMHGTLIFGKQGTNANDADLDNVMITDEEEIRTTNPVATEQYGTVSNNLQNSNTGPTTGTVNHQGALPGMVWQDRDVYLQGPIWAKIPHTDGHFHPSPLMGGFGLKHPPPQIMIKNTPVPANPPTNFSSAKFASFITQYSTGQVSVEIEWELQKENSKRWNPEIQYTSNYNKSVNVDFTVDTNGVYSEPRPIGTRYLTRNL

SEQ ID NO: 11510 - protein, 735 aa, Artificial Sequence
  source: /note="Description of Artificial Sequence: Synthetic polypeptide"
MAADGYLPDWLEDTLSEGIRQWWKLKPGPPPPKPAERHKDDSRGLVLPGYKYLGPFNGLDKGEPVNEADAAALEHDKAYDRQLDSGDNPYLKYNHADAEFQERLKEDTSFGGNLGRAVFQAKKRVLEPLGLVEEPVKTAPGKKRPVEHSPVEPDSSSGTGKAGQQPARKRLNFGQTGDADSVPDPQPLGQPPAAPTSLGSTTMATGSGAPMADNNEGADGVGNSSGNWHCDSQWSGDRVITTSTRTWALPTYNNHLYKQISSQSGASNDNHYFGYSTPWGYFDFNRFHCHFSPRDWQRLINNNWGFRPKRLNFKLFNIQVKEVTQNDGTTTIANNLTSTVQVFTDSEYQLPYVLGSAHQGCLPPFPADVFMVPQYGYLTLNNGSQAVGRSSFYCLEYFPSQMLRTGNNFTFSYTFEDVPFHSSYAHSQSLDRLMNPLIDQYLYYLNKTQSNSGTLQQSRLLFSQAGPTSMSLQAKNWLPGPCCRQQRLSKQANDNNNSNFPWTAATKYHLNGRDSLVNPGPAMASHKDDEEKFFPMHGTLIFGKQGTNANDADLDNVMITDEEEIRTTNPVATEQYGTVSNNLQNSNTGPTTGTVNHQGALPGMVWQDRDVYLQGPIWAKIPHTDGHFHPSPLMGGFGLKHPPPQIMIKNTPVPANPPTNFSSAKFASFITQYSTGQVSVEIEWELQKENSKRWNPEIQYTSNYNKSVNVDFTVDTNGVYSEPRPIGTRYLTRNL

SEQ ID NO: 11511 - protein, 735 aa, Artificial Sequence
  source: /note="Description of Artificial Sequence: Synthetic polypeptide"
MAADGYLPDWLEDILSEGIRQWWKLKPGPPPPKPAERHKDDSRGLVLPGYKYLGPFNGLDKGEPVNEADAAALEHDKAYDRQLDSGDNPYLKYNHADAEFQERLKEDTSFGGNLGRAVFQAKKRVLEPLGLVEEPVKTAPGKKRPVEQSPAEPDSSSGTGKAGNQPARKRLNFGQTGDADSVPDPQPLGQPPAAPSGLGSTTMATGSGAPMADNNEGADGVGNSSGNWHCDSQWLGDRVITTSTRTWALPTYNNHLYKQISSQSGASNDNHYFGYSTPWGYFDFNRFHCHFSPRDWQRLINNNWGFRPKRLNFKLFNIQVKEVTQNDGTTTIANNLTSTVQVFTDSEYQLPYVLGSAHQGCLPPFPADVFMVPQYGYLTLNNGSQAVGRSSFYCLEYFPSQMLRTGNNFTFSYTFEDVPFHSSYAHSQSLDRLMNPLIDQYLYYLNKTQSNSGTLQQSRLLFSQAGPTSMSLQAKNWLPGPCYRQQRLSKQANDNNNSNFPWTAATKYHLNGRDSLVNPGPAMASHKDDEEKFFPMHGTLIFGKQGTNANDADLDNVMITDEEEIRTTNPVATEQYGTVSNNLQNSNTGPTTGTVNHQGALPGMVWQDRDVYLQGPIWAKIPHTDGHFHPSPLMGGFGLKHPPPQIMIKNTPVPANPPTNFSSAKFASFITQYSTGQVSVEIERELQKENSKRWNPEIQYTSNYNKSVNVDFTVDTNGVYSEPRPIGTRYLTRNL

SEQ ID NO: 11512 - protein, 735 aa, Artificial Sequence
  source: /note="Description of Artificial Sequence: Synthetic polypeptide"
MAADGYLPDWLEDILSEGVRQWWKLKPGPPPPKPAERHKDDSRGLVLPGYKYLGPFNGLDKGEPVNEADAAALEHDKAYDRQLDSGDNPYLKYNHADAEFQERLKEDTSFGGNLGRAVFQAKKRVLEPLGLVEEPVKTAPGKKRPVEQSPAEPDSSSGTGKAGNQPARKRLNFGQTGDADSVPDPQPLGQPPAAPSGLGSTTMATGSGAPMADNNEGADGVGNSSGNWHCDSQWLGDRVITTSTRTWALPTYNNHLYKQISSQSGASNDNHYFGYSTPWGYFDFNRFHCHFSPRDWQRLINNNWGFRPKRLNFKLFNIQVKEVTQNDGTTTIANNLTSTVQVFTDSEYQLPYVLGSAHQGCLPPFPADVFMVPQYGYLTLNNGSQAVGRSSFYCLEYFPSQMLRTGNNFTFSYTFEDVPFHSSYAHSQSLDRLMNPLIDQYLYYLNKTQSNSGTLQQSRLLFSQAGPTSMSLQAKNWLPGPCYRQQRLSKQANDNNNSNFPWTAATKYHLNGRDSLVNPGPAMASHKDDEEKFFPMHGTLIFGKQGTNANDADLDNVMITDEEEIRTTNPVATEQYGTVSNNLQNSNTGPTTGTVNHQGALPGMVWQDRDVYLQGPIWAKIPHTDGHFHPSPLMGGFGLKHPPPQIMIKNTPVPANPPTNFSSAKFASFITQYSTGQVSVEIEWELQKENSKRWNPEIQYTSNYNKSVNVDFTVDTNGVYSEPRPIGTRYLTRNL

SEQ ID NO: 11513 - protein, 735 aa, Artificial Sequence
  source: /note="Description of Artificial Sequence: Synthetic polypeptide"
MAADGYLPDWLEDTLSEGIRQWWKLKPGPPPPKPAERHKDDSRGLVLPGYKYLGPFNGLDKGEPVNEADAAALEHDKAYDRQLDSGDNPYLKYNHADAEFQERLKEDTSFGGNLGRAVFQAKKRVLEPLGLVEEPVKTAPGKKRPVEHSPVEPDSSSGTGKAGQQPARKRLNFGQTGDADSVPDPQPLGQPPAAPTSLGSTTMATGSGAPMADNNEGADGVGNSSGNWHCDSQWSGDRVITTSTRTWALPTYNNHLYKQISSQSGASNDNHYFGYSTPWGYFDFNRFHCHFSPRDWQRLINNNWGFRPKRLNFKLFNIQVKEVTQNDGTTTIANNLTSTVQVSTDSEYQLPYVLGSAHQGCLPPFPADVFMVPQYGYLTLNNGSQAVGRSSFYCLEYFPSQMLRTGNNFTFSYTFEDVPFHSSYAHSQSLDRLMNPLIDQYLYYLNKTQSNSGTLQQSRLLFSQAGPTSMSLQAKNWLPGPCYRQQRLSKQANDNNNSNFPWTAATKYHLNGRDSLVNPGPAMASHKDDEEKFFPMHGTLIFGKQGTNANDADLDNVMITDEEEIRTTNPVATEQYGTVSNNLQNSNTGPTTGTVNHQGALPGMVWQDRDVYLQGPIWAKIPHTDGHFHPSPLMGGFGLKHPPPQIMIKNTPVPANPPTNFSSAKFASFITQYSTGQVSVEIEWELQKENSKRWNPEIQYTSNYNKSVNVDFTVDTNGVYSEPRPIGTRYLTRNL

SEQ ID NO: 11514 - protein, 735 aa, Artificial Sequence
  source: /note="Description of Artificial Sequence: Synthetic polypeptide"
MAADGYLPDWLEDILSEGIRQWWKLKPGPPPPKPAERHKDDSRGLVLPGYKYLGPFNGLDKGEPVNEADAAALEHDKAYDRQLDSGDNPYLKYNHADAEFQERLKEDTSFGGNLGRAVFQAKKRVLEPLGLVEEPVKTAPGKKRPVEQSPAEPDSSSGTGKAGNQPARKRLNFGQTGDADSVPDPQPLGQPPAAPSGLGSTTMATGSGAPMADNNEGADGVGNSSGNWHCDSQWLGDRVITTSTRTWALPTYNNHLYKQISSQSGASNDNHYFGYSTPWGYFDFNRFHCHFSPRDWQRLINNNWGFRPKRLNFKLFNIQVKEVTQNDGTTTIANNLTSTVQVFTDSEYQLPYVLGSAHQGCLPPFPADVFMVPQYGYLTLNNGSQAVGRSSFYCLEYFPSQMLRTGNNFTFSYTFEDVPFHSSYAHSQSLDRLMNPLIDQYLYYLNKTQSNSGTLQQSRLLFSQAGPTSMSLQAKNWLPGPCYRQQRLSKQANDNNNSNFPWTAATKYHLNGRDSLVNPGPAMASHKDDEEKFFPMHGTLIFGKQGTNANDADLDNVMITDEEEIRTTNPVATEQYGTVSNNLQNSNTGPTTGTVNHQGALPGMVWQDRDVYLQGPIWAKIPHTDGHFHPSPLMGGFGLKHPPPQIMIKNTPVPVNPPTNFSSAKFASFITQYSTGQVSVEIEWELQKENSKRWNPEIQYTSNYNKSVNVDFTVDTNGVYSEPRPIGTRYLTRNL

SEQ ID NO: 11515 - protein, 735 aa, Artificial Sequence
  source: /note="Description of Artificial Sequence: Synthetic polypeptide"
MAADGYLPDWLEDTLSEGIRQWWKLKPGPPPPKPAERHKDDSRGLVLPGYKYLGPFNGLDKGEPVNEADAAALEHDKAYDRQLDSGDNPYLKYNHADAEFQERLKEDTSFGGNLARAVFQAKKRVLEPLGLVEEPVKTAPGKKRPVEHSPAEPDSSSGTGKSGQQPARKRLNFGQTGDADSVPDPQPLGQPPAAPSGLGSTTMATGSGAPMADNNEGADGVGNSSGNWHCDSQWLGDRVITTSTRTWALPTYNNHLYKQISSQSGASNDNHYFGYSTPWGYFDFNRFHCHFSPRDWQRLINNNWGFRPKRLNFKLFNIQVKEVTQNDGTTTIANNLTSTVQVFTDSEYQLPYVLGSAHQGCLPPFPADVFMVPQYGYLTLNNGSQAVGRSSFYCLEYFPSQMLRTGNNFTFSYTFEDVPFHSSYAHSQSLDRLMNPLIDQYLYYLNKTQSNSGTLQQSRLLFSQAGPTSMSLQAKNWLPGPCYRQQRLSKQANDNNNSNFPWTAATKYHLNGRDSLVNPGPAMASHKDDEEKFFPMHGTLIFGKQGTNANDADLDNVMITDEEEIRTTNPVATEQYGTVSNNLQNSNTGPTTGTVNHQGALPGMVWQDRDVYLQGPIWAKIPHTDGHFHPSPLMGGFGLKHPPPQIMIKNTPVPANPPTNFSSAKFASFITQYSTGQVSVEIEWELQKENSKRWNPEIQYTSNYNKSVNVDFTVDTNGVYSEPRPIGTRYLTRNL

SEQ ID NO: 11516 - protein, 735 aa, Artificial Sequence
  source: /note="Description of Artificial Sequence: Synthetic polypeptide"
MAADGYLPDWLEDILSEGIRQWWKLKPGPPPPKPAERHKDDSRGLVLPGYKYLGPFNGLDKGEPVNEADAAALEHDKAYDRQLDSGDNPYLKYNHADAEFQERLKEDTSFGGNLGRAVFQAKKRVLEPLGLVEEPVKTAPGKKRPVEQSPAEPDSSSGTGKAGNQPARKRLNFGQTGDADSVPDPQPLGQPPAAPSGLGSTTMATGSGAPMADNNEGADGVGNSSGNWHCDSQWLGDRVITTSTRTWALPTYNNHLYKQISSQSGASNDNHYFGYSTPWGYFDFNRFHCHFSPRDWQRLINNNWGFRPKRLNFKLFNIQVKEVTQNDGTTTIANNLTSTVQVFTDSEYQLPYVLGSAHQGCLPPFPADVFMVPQYGYLTLNNGSQAVGRSSFYCLEYFPSQMLRTGNNFTFSYTFEDVPFHSSYAHSQSLDRLMNPLIDQYLYYLNKTQSNSGTLQQSRLLFSQAGPTSMSLQAKNWLPGPCYRQQRLSKQANDNNNSNFPWTAATKYHLNGRDSLVNPGPAMASHKDDEEKFFPMHGTLIFGKQGTNANDADLDNVMITDEEEIRTTNPVATEQYGTVSNNLQNSNTGPTTGTVNHQGALPGMVWQDRDVYLQGPIWAKIPHTDGHFHPSPLMGGFGLKHPPPQIMIKNTPVPANPPTNFSSAKFASFITQYSTGQVSVGIEWELQKENSKRWNPEIQYTSNYNKSVNVDFTVDTNGVYSEPRPIGTRYLTRNL

SEQ ID NO: 11517 - protein, 734 aa, Artificial Sequence
  source: /note="Description of Artificial Sequence: Synthetic polypeptide"
MAADGYLPDWLEDILSEGIRQWWKLKPGPPPPKPAERHKDDSRGLVLPGYKYLGPFNGLDKGEPVNEADAAALEHDKAYDRQLDSGDNPYLKYNHADAEFQERLKEDTSFGGNLGRAVFQAKKRVLEPLGLVEEPVKTAPGKKRPVEQSPAEPDSSSGTGKAGNQPARKRLNFGQTGDADSVPDPQPLGQPPAAPSGLGSTTMATGSGAPMADNNEGADGVGNSSGNWHCDSQWLGDRVITTSTRTWALPTYNNHLYKQISSQSGASNDNHYFGYSTPWGYFDFNRFHCHFSPRDWQRLINNNWGFRPKRLNFKLFNIQVKEVTQNDGTTTIANNLTSTVQVFTDSEYQLPYVLGSAHQGCLPPFPADVFMVPQYGYLTLNNGSQAVGRSSFYCLEYFPSQMLRTGNNFTFSYTFEDVPFHSSYAHSQSLDRLMNPLIDQYLYYLNKTQSNSGTLQQSRLLFSQAGPTSMSLQAKNWLPGPCYRQQRLSKQANDNNSNFPWTAATKYHLNGRDSLVNPGPAMASHKDDEEKFFPMHGTLIFGKQGTNANDADLDNVMITDEEEIRTTNPVATEQYGTVSNNLQNSNTGPTTGTVNHQGALPGMVWQDRDVYLQGPIWAKIPHTDGHFHPSPLMGGFGLKHPPPQIMIKNTPVPANPPTNFSSAKFASFITQYSTGQVSVEIEWELQKENSKRWNPEIQYTSNYNKSVNVDFTVDTNGVYSEPRPIGTRYLTRNL

SEQ ID NO: 11518 - protein, 735 aa, Artificial Sequence
  source: /note="Description of Artificial Sequence: Synthetic polypeptide"
MAADGYLPDWLEDTLSEGIRQWWKLKPGPPPPKPAERHKDDSRGLVLPGYKYLGPFNGLDKGEPVNEADAAALEHDKAYDRQLDSGDNPYLKYNHADAEFQERLKEDTSFGGNLGRAVFQAKKRVLEPLGLVVEPVKTAPGKKRPVEHSPVEPDSSSGTGKAGQQPARKRLNFDQTGGADSVPDPQPLGQPPAAPTSLGSTTMATGSGAPMADNNEGADGVGNSSGNWHCDSQWSGDRVITTSTRTWALPTYNNHLYKQISSRSGASNDNHYFGYSTPWGYFDFNGFHCHFSPRDWQRLINNNWGFRPKRLNFKLFNIQVKEVTQNDGTTTIANNLTSTVQVFTDSEYQLPHVLGSAHQGCLPPFPADVFMVPQYGYLTLNNGSQAVGRSSFYCPGYFPSQMLRTGNNFTFSYTFEDVPFHSSYAHSQSLDRLMNPLIDQYLYYLNKTQSNSGTLQQSRLLFSQAGPTSMSLQAKNWLPGPCYRQQRLSKQANGNNNSNFPWTAATKYHLNGRDSLVNPGPAMASHKDDEEKFFPMHGTLIFGKQGTNANDADLDNVMITDEEEIRTTNPVATEQYGTVSNNLQNSNTGPTTGTVNHQGALPGMVWQDRDVYLQGPIWAKIPHTDGHFHPSPLMGGFGLKHPPPQIMIKNTPVPANPPTNFSSAKFASFITQYSTGQVSVEIEWELQKENSKRWNPEIQYTSNYNKSVNVDFTVDTNGVYSEPRPIGTRYLTRNL

SEQ ID NO: 11519 - protein, 734 aa, Artificial Sequence
  source: /note="Description of Artificial Sequence: Synthetic polypeptide"
MAADGYLPDWLEDTLSEGIRQWWKLKPGPPPPKPAERHKDDSRGLVLPGYKYLGPFNGLDKGEPVNEADAAALEHDKAYDRQLDSGDNPYLKYNHADAEFQERLKEDTSFGGNLGRAVFQAKKRVLEPLGLVEEPVKTAPGKKRPVEHSPVEPDSSSGTGKAGQQPARKRLNFGQTGDADSVPDPQPLGQPPAAPTSLGSTTMATGSGAPMADNNEGADGVGNSSGNWHCDSQWSGDRVITTSTRTWALPTYNNHLYKQISSQSGASNDNHYFGYSTPWGYFDFNRFHCHFSPRDWQRLINNNWGFRPKRLNFKLFNIQVKEVTQNDGTTTIANNLTSTVQVFTDSEYQLPYVLGSAHQGCLPPFPADVFMVPQYGYLTLNNGSQAVGRSSFYCLEYFPSQMLRTGNNFTFSYTFEDVPFHSSYAHSQSLDRLMNPLIDQYLYYLNKTQSNSGTLQQSRLLFSQAGPTSMSLQAKNWLPGPCYRQQRLSKQANDNNSNFPWTAATKYHLNGRDSLVNPGPAMASHKDDEEKFFPMHGTLIFGKQGTNANDADLDNVMITDEEEIRTTNPVATEQYGTVSNNLQNSNTGPTTGTVNHQGALPGMVWQDRDVYLQGPIWAKIPHTDGHFHPSPLMGGFGLKHPPPQIMIKNTPVPANPPTNFSSAKFASFITQYSTGQVSVEIEWELQKENSKRWNPEIQYTSNYNKSVNVDFTVDTNGVYSEPRPIGTRYLTRNL

SEQ ID NO: 11520 - protein, 735 aa, Artificial Sequence
  source: /note="Description of Artificial Sequence: Synthetic polypeptide"
MAADGYLPDWLEDILSEGIRQWWKLKPGPPPPKPAERHKDDSRGLVLPGYKYLGPFNGLDKGEPVNEADAAALEHDKAYDRQLDSGDNPYLKYNHADAEFQERLKEDTSFGGNLGRAVFQAKKRVLEPLGLVEEPVKTAPGKKRPVEQSPAEPDSSSGTGKAGNQPARKRLNFGQTGDADSVPDPQPLGQPPAAPSGLGSTTMATGSGAPMADNNEGADGVGNSSGNWHCDSQWLGDRVITTSTRTWALPTYNNHLYKQISSQSGASNDNHYFGYSTPWGYFDFNRFHCHFSPRDWQRLINNNWGFRPKRLNFKLFNIQVKEVTQNDGTTTIANNLTSTVQVFTDSEYQLPYVLGSAHQGCLPPFPADVFMVPQYGYLTLNNGSQAVGRSSFYCLEYFPSQMLRTGNNFTFSYTFEDVPFHSSYAHSQSLDRLMNPLIDQYLYYLNKTQSNSGTLQQSRLLFSQAGPTSMSLQAKNWLPGPCYRQQRLSKQANDNNNSNFPWTAATKYHLNGRDSLVNPGPAMASHKDDEEKFFPMHGTLIFGKQGTNANDADLDNVMITDEEEIRTTNPVATEQYGTVSNNLQNSNTGPTTGTVNHQGALPGMVWQDRDVYLQGPIWAKIPHTDGHFHPSPLMGGFGLKHPPPQIMIKNTPVPANPPTNFSSAKFASFITQYSTGQVSVGIEWVLQKENSKRWNPEIQYTSNYNKSVNVDFTVDTNGVYSEPRPIGTRYLTRNL

SEQ ID NO: 11521 - protein, 735 aa, Artificial Sequence
  source: /note="Description of Artificial Sequence: Synthetic polypeptide"
MAADGYLPDWLEDTLSEGIRQWWKLKPGPPPPKPAERHKDDSRGLVLPGYKYLGPFNGLDKGEPVNEADAAALEHDKAYDRQLDSGDNPYLKYNHADAEFQERLKEDTSFGGNLARAVFQAKKRVLEPLGLVEEPVKTAPGKKRPVEQSPAEPDSSSGTGKAGNQPARKRLNFGQTGDADSVPDPQPLGQPPAAPSGLGSTTMATGSGAPMADNNEGADGVGNSSGNWHCDSQWLGDRVITTSTRTWALPTYNNHLYKQISSQSGASNDNHYFGYSTPWGYFDFNRFHCHFSPRDWQRLINNNWGFRPKRLNFKLFNIQVKEVTQNDGTTTIANNLTSTVQVFTDSEYQLPYVLGSAHQGCLPPFPADVFMVPQYGYLTLNNGSQAVGRSSFYCLEYFPSQMLRTGNNFTFSYTFEDVPFHSSYAHSQSLDRLMNPLIDQYLYYLNKTQSNSGTLQQSRLLFSQAGPTSMSLQAKNWLPGPCYRQQRLSKQANDNNNSNFPWTAATKYHLNGRDSLVNPGPAMASHKDDEEKFFPMHGTLIFGKQGTNANDADLDNVMITDEEEIRTTNPVATEQYGTVSNNLQNSNTGPTTGTVNHQGALPGMVWQDRDVYLQGPIWAKIPHTDGHFHPSPLMGGFGLKHPPPQIMIKNTPVPANPPTNFSSAKFASFITQYSTGQVSVEIEWELQKENSKRWNPEIQYTSNYNKSVNVDFTVDTNGVYSEPRPIGTRYLTRNL

SEQ ID NO: 11522 - protein, 735 aa, Artificial Sequence
  source: /note="Description of Artificial Sequence: Synthetic polypeptide"
MAADGYLPDWLEDILSEGIRQWWKLKPGPPPPKPAERHKDDSRGLVLPGYKYLGPFNGLDKGEPVNEADAAALEHDKAYDRQLDSGDNPYLKYNHADAEFQERLKEDTSFGGNLGRAVFQAKKRVLEPLGLVEEPVKTAPGKKRPVEQSPAEPDSSSGAGKAGNQPARKRLNFGQTGDADSVPDPQPLGQPPAAPSGLGSTTMATGSGAPMADNNEGADGVGNSSGNWHCDSQWLGDRVITTSTRTWALPTYNNHLYKQISSQSGASNDNHYFGYSTPWGYFDFNRFHCHFSPRDWQRLINNNWGFRPKRLNFKLFNIQVKEVTQNDGTTTIANNLTSTVQVFTDSEYQLPYVLGSAHQGCLPPFPADVFMVPQYGYLTLNNGSQAVGRSSFYCLEYFPSQMLRTGNNFTFSYTFEDVPFHSSYAHSQSLDRLMNPLIDQYLYYLNKTQSNSGTLQQSRLLFSQAGPTSMSLQAKNWLPGPCYRQQRLSKQANDNNNSNFPWTAATKYHLNGRDSLVNPGPAMASHKDDEEKFFPMHGTLIFGKQGTNANDADLDNVMITDEEEIRTTNPVATEQYGTVSNNLQNSNTGPTTGTVNHQGALPGMVWQDRDVYLQGPIWAKIPHTDGHFHPSPLMGGFGLKHPPPQIMIKNTPVPANPPTNFSSAKFASFITQYSTGQVSVEIEWELQKENSKRWNPEIQYTSNYNKSVNVDFTVDTNGVYSEPRPIGTRYLTRNL

SEQ ID NO: 11523 - protein, 735 aa, Artificial Sequence
  source: /note="Description of Artificial Sequence: Synthetic polypeptide"
MAADGYLPDWLKDILSEGIRQWWKLKPGPPPPKPAERHKDDSRGLVLPGYKYLGPFNGLDKGEPVNEADAAALEHDKAYDRQLDSGDNPYLKYNHADAEFQERLKEDTSFGGNLGRAVFQAKKRVLEPLGLVEEPVKTAPGKKRPVEQSPAEPDSSSGTGKAGNQPARKRLNFGQTGDADSVPDPQPLGQPPAAPSGLGSTTMATGSGAPMADNNEGADGVGNSSGNWHRDSQWLGDRVITTSTRTWALPTYNNHLYKQISSQSGASNDNHYFGYSTPWGYFDFNRFHCHFSPRDWQRLINNNWGFRPKRLNFKLFNIQVKEVTQNDGTTTIANNLTSTVQVFTDSEYQLPYVLGSAHQGCLPPFPADVFMVPQYGYLTLNNGSQAVGRSSFYCLEYFPSQMLRTGNNFTFSYTFEDVPFHSSYAHSQSLDRLMNPLIDQYLYYLNKTQSNSGTLQQSRLLFSQAGPTSMSLQAKNWLPGPCYRQQRLSKQANDNNNSNFPWTAATKYHLNGRDSLVNPGPAMASHKDDEEKFFPMHGTLIFGKQGTNANDADLDNVMITDEEEIRTTNPVATEQYGTVSNNLQNSNTGPTTGTVNHQGALPGMVWQDRDVYLQGPIWAKIPHTDGHFHPSPLMGGFGLKHPPPQIMIKNTPVPVNPPTNFSSAKFASFITQYSTGQVSVEIEWELQKENSKRWNPEIQYTSNYNKSVNVDFTVDTNGVYSEPRPIGTRYLTRNL

SEQ ID NO: 11524 - protein, 735 aa, Artificial Sequence
  source: /note="Description of Artificial Sequence: Synthetic polypeptide"
MAADGYLPDWLEDILSEGIRRWWKLKPGPPPPKPAERHKDDSRGLVLPGYKYLGPFNGLDKGEPVNEADAAALEHDKAYDRQLDSGDNPYLKYNHADAEFQERLKEDTSFGGNLGRAVFQAKKRVLEPLGLVEEPVKTAPGKKRPVEQSPAEPDSSSGTGKAGNQPARKRLNFGQTGDADSVPDPQPLGQPPAAPSGLGSTTMATGSGAPMADNNEGADGVGNSSGNWHCDSQWLGDRVITTSTRTWALPTYNNHLYKQISSQSGASNDNHYFGYSTPWGYFDFNRFHCHFSPRDWQRLINNNWGFRPKRLNFKLFNIQVKEVTQNDGTTTIANNLTSTVQVFTDSEYQLPYVLGSAHQGCLPPFPADVFMVPQYGYLTLNNGSQAVGRSSFYCLEYFPSQMLRTGNNFTFSYTFEDVPFHSSYAHSQSLDRLMNPLIDQYLYYLNKTQSNSGTLQQSRLLFSQAGPTSMSLQAKNWLPGPCYRQQRLSKQANDNNNSNFPWTAATKYHLNGRDSLVNPGPAMASHKDDEEKFFPMHGTLIFGKQGTNANDADLDNVMITDEEEIRTTNPVATERYGTVSNNLQNSNTGPTTGTVNHQGALPGMVWQDRDVYLQGPIWAKIPHTDGHFHPSPLMGGFGLKHPPPQIMIKNTPVPANPPTNFSSAKFASFITQYSTGQVSVEIEWELQKENSKRWNPEIQYTSNYNKSVNVDFTVDTNGVYSEPRPIGTRYLTRNL

SEQ ID NO: 11525 - protein, 735 aa, Artificial Sequence
  source: /note="Description of Artificial Sequence: Synthetic polypeptide"
MAADGYLPDWLEDTLSEGIRQWWKLKPGPPPPKPAERHKDDSRGLVLPGYKYLGPFNGLDKGEPVNEADAAALEHDKAYDRQLDSGDNPYLKYNHADAEFQERLKEDTSFGGNLARAVFQAKKRVLEPLGLVEEPVKTAPGKKRPVEHSPAEPDSSSGTGKSGQQPARKRLNFGQTGDADSVPDPQPLGQPPAAPSGLGTNTMASGSGAPMADNNEGADGVGNSSGNWHCDSQWLGDRVITTSTRTWALPTYNNHLYKQISSQSGASNDNHYFGYSTPWGYFDFNRFHCHFSPRDWQRLINNNWGFRPKRLNFKLFNIQVKEVTQNDGTTTIANNLTSTVQVFTDSEYQLPYVLGSAHQGCLPPFPADVFMVPQYGYLTLNNGSQAVGRSSFYCLEYFPSQMLRTGNNFTFSYTFEDVPFHSSYAHSQSLDRLMNPLIDQYLYYLNKTQSNSGTLQQSRLLFSQAGPTSMSLQAKNWLPGPCYRQQRLSKQANDNNNSNFPWTAATKYHLNGRDSLVNPGPAMASHKDDEEKFFPMHGTLIFGKQGTNANDADLDNVMITDEEEIRTTNPVATEQYGTVSNNLQNSNTGPTTGTVNHQGALPGMVWQDRDVYLQGPIWAKIPHTDGHFHPSPLMGGFGLKHPPPQIMIKNTPVPANPPTNFSSAKFASFITQYSTGQVSVEIEWELQKENSKRWNPEIQYTSNYNKSVNVDFTVDTNGVYSEPRPIGTRYLTRNL

SEQ ID NO: 11526 - protein, 735 aa, Artificial Sequence
  source: /note="Description of Artificial Sequence: Synthetic polypeptide"
MAADGYLPDWLEDTLSEGIRQWWKLKPGPPPPKPAERHKDDSRGLVLPGYKYLGPFNGLDKGEPVNEADAAALEHDKAYDRQLDSGDNPYLKYNHADAEFQERLKEDTSFGGNLARAVFQAKKRVLEPLGLVEEPVKTAPGKKRPVEHSPAEPDSSSGTGKSGQQPARKRLNFGQTGDADSVPDPQPLGQPPAAPSGLGTNTMASGSGAPMADNNEGADGVGNSSGNWHCDSTWMGDRVITTSTRTWALPTYNNHLYKQISSQSGASNDNHYFGYSTPLGYFDFNRFHCHFSPRDWQRLINNNWGFRPKRLNFKLFNIQVKEVTQNDGTTTIANNLTSTVQVFTDSEYQLPYVLGSAHQGCLPPFPADVFMVPQYGYLTLNNGSQAVGRSSFYCLEYFPSQMLRTGNNFTFSYTFEDVPFHSSYAHSQSLDRLMNPLIDQYLYYLNKTQSNSGTLQQSRLLFSQAGPTSMSLQAKNWLPGPCYRQQRLSKQANDNNNSNFPWTAATKYHLNGRDSLVNPGPAMASHKDDEEKFFPMHGTLIFGKQGTNANDADLDNVMITDEEEIRTTNPVATEQYGTVSNNLQNSNTGPTTGTVNHQGALPGMVWQDRDVYLQGPIWAKIPHTDGHFHPSPLMGGFGLKHPPPQIMIKNTPVPANPPTNFSSAKFASFITQYSTGQVSVEIEWELQKENSKRWNPEIQYTSNYNKSVNVDFTVDTNGVYSEPRPIGTRYLTRNL

SEQ ID NO: 11527 - protein, 735 aa, Artificial Sequence
  source: /note="Description of Artificial Sequence: Synthetic polypeptide"
MAADGYLPDWLEDTLSEGIRQWWKLKPGPPPPKPAERHKDDSRGLVLPGYKYLGPFNGLDKGEPVNEADAAALEHDKAYDRQLDSGDNPYLKYNHADAEFQERLKEDTSFGGNLARAVFQAKKRVLEPLGLVEEPVKTAPGKKRPVEHSPAEPDSSSGTGKSGQQPARKRLNFGQTGDADSVPDPQPLGQPPAAPSGLGTNTMASGSGAPMADNNEGADGVGNSSGNWHCDSTWMGDRVITTSTRTWALPTYNNHLYKQISSQSGASNDNHYFGYSTPWGYFDFNRFHCHFSPRDWQRLINNNWGFRPKRLNFKLFNIQVKEVTQNDGTTTIANNLTSTVQVFTDSEYQLPYVLGSAHQGCLPPFPADVFMVPQYGYLTLNNGSQAVGRSSFYCLEYFPSQMLRTGNNFTFSYTFEDVPFHSSYAHSQSLDRLMNPLIDQYLYYLNKTQSNSGTLQQSRLLFSQAGPTSMSLQAKNWLPGPCYRQQRLSKQANDNNNSNFPWTAATKYHLNGRDSLVNPGPAMASHKDDEEKFFPMHGTLIFGKQGTNANDADLDNVMITDEEEIRTTNPVATEQYGTVSNNLQNSNTGPTTGTVNHQGALPGMVWQDRDVYLQGPIWAKIPHTDGHFHPSPLMGGFGLKHPPPQIMIKNTPVPANPPTNFSSAKFASFITQYSTGQVSVEIEWELQKENSKRWNPEIQYTSNYNKSVNVDFTVDTNGVYSEPRPIGTRYLTRNL

SEQ ID NO: 11528 - protein, 735 aa, Artificial Sequence
  source: /note="Description of Artificial Sequence: Synthetic polypeptide"
MAADGYLPDWLEDTLSEGIRQWWKLKPGPPPPKPAERHKDDSRGLVLPGYKYLGPFNGLDKGEPVNEADAAALEHDKAYDRQLDSGDNPYLKYNHADAEFQERLKEDTSFGGNLGRAVFQAKKRVLEPLGLVVEPVKTAPGKKRPVEHSPVEPDSSSGTGKAGQQPARKRLNFDQTGDADSVPDPQPLGQPPAAPTSLGSTTMATGSGAPMADNNEGADGVGNSSGNWHCDSQWSGDRVITTSTRTWALPTYNNHLYKQISSRSGASNDNHYFGYSTPWGYFDFNGFHCHFSPRDWQRLINNNWGFRPKRLNFKLFNIQVKEVTQNDGTTTIANNLTSTVQVFTDSEYQLPHVLGSAHQGCLPPFPADVFMVPQYGYLTLNNGSQAVGRSSFYCPGYFPSQMLRTGNNFTFSYTFEDVPFHSSYAHSQSLDRLMNPLIDQYLYYLNKTQSNSGTLQQSRLLFSQAGPTSMSLQAKNWLPGPCYRQQRLSKQANGNNNSNFPWTAATKYHLNGRDSLVNPGPAMASHKDDEEKFFPMHGTLIFGKQGTNANDADLDNVMITDEEEIRTTNPVATEQYGTVSNNLQNSNTGPTTGTVNHQGALPGMVWQDRDVYLQGPIWAKIPHTDGHFHPSPLMGGFGLKHPPPQIMIKNTPVPANPPTNFSSAKFASFITQYSTGQVSVEIEWELQKENSKRWNPEIQYTSNYNKSVNVDFTVDTNGVYSEPRPIGTRYLTRNL

SEQ ID NO: 11529 - protein, 735 aa, Artificial Sequence
  source: /note="Description of Artificial Sequence: Synthetic polypeptide"
MAADGYLPDWLEDILSEGIRQWWKLKPGPPPPKPAERHKDDSRGLVLPGYKYLGPFNGLDKGEPVNEADAAALEHDKAYDRQLDSGDNPYLKYNHADAEFQGRLKEDTSFGGNLGRAVFQAKKRVLEPLGLVEEPVKTAPGKKRPVEQSPAEPDSSSGTGKAGNQPARKRLNFGQTGDADSVPDPQPLGQPPAAPSGLGSTTMATGSGAPMADNNEGADGVGNSSGNWHCDSQWLGDRVITTSTRTWALPTYNNHLYKQISSQSGASNDNHYFGYSTPWGYFDFNRFHCHFSPRDWQRLINNNWGFRPKRLNFKLFNIQVKEVTQNDGTTTIANNLTSTVQVFTDSEYQLPYVLGSAHQGCLPPFPADVFMVPQYGYLTLNNGSQAVGRSSFYCLEYFPSQMLRTGNNFTFSYTFEDVPFHSSYAHSQSLDRLMNPLIDQYLYYLNKTQSNSGTLQQSRLLFSQAGPTSMSLQAKNWLPGPCYRQQRLSKQANDNNNSNFPWTAATKYHLNGRDSLVNPGPAMASHKDDEEKFFPMHGTLIFGKQGTNANDADLDNVMITDEEEIRTTNPVATEQYGTVSNNLQNSNTGPTTGTVNHQGALPGMVWQDRDVYLQGPIWAKIPHTDGHFHPSPLMGGFGLKHPPPQIMIKNTPVPANPPTNFSSAKFASFITQYSTGQVSVEIEWELQKENSKRWNPEIQYTSNYNKSVNVDFTVDTNGVYSEPRPIGTRYLTRNL

SEQ ID NO: 11530 - protein, 735 aa, Artificial Sequence
  source: /note="Description of Artificial Sequence: Synthetic polypeptide"
MAADGYLPDWLEDILSEGIRQWWKLKPGPPPPKPAERHKDDSRGLVLPGYKYLGPFNGLDKGEPVNEADAAALEHDKAYDRQLDSGDNPYLKYNHADAEFQERLKEDTSFGGNLGRAVFQAKKRALEPLGLVEEPVKTAPGKKRPVEQSPAEPDSSSGTGKAGNQPARKRSNFGQTGDADSVPDPQPLGQPPAAPSGLGSTTMATGSGAPMADNNEGADGVGNSSGNWHCDSQWLGDRVITTSTRTWALPTYNNHLYKQISSQSGASNDNHYFGYSTPWGYFDFNRFHCHFSPRDWQRLINNNWGFRPKRLNFKLFNIQVKEVTQNDGTTTIANNLTSTVQVFTDSEYQLPYVLGSAHQGCLPPFPADVFMVPQYGYLTLNNGSQAVGRSSFYCLEYFPSQMLRTGNNFTFSYTFEDVPFHSSYAHSQSLDRLMNPLIGQYLYYLNKTQSNSGTLQQSRLLFSQAGPTSMSLQAKNWLPGPCYRQQRLSKQANDNNNSNFPWTAATKYHLNGRDSLVNPGPAMASHKDDEEKFFPMHGTLIFGKQGTNANDADLDNVMITDEEEIRTTNPVATEQYGTVSNNLQNSNTGPTTGTVNHQGALPGMVWQDRDVYLQGPIWAKIPHTDGHFHPSPLMGGFGLKHPPPQIMIKNTPVPANPPTNFSSAKFASFITQYSTGQVSVEIEWELQKENSKRWNPEIQYTSNYNKSVNVDFTVDTNGVYSEPRPIGTRYLTRNL

SEQ ID NO: 11531 - protein, 738 aa, Artificial Sequence
  source: /note="Description of Artificial Sequence: Synthetic polypeptide"
MAADGYLPDWLEDNLSEGIREWWALKPGAPKPKANQQKQDDGRGLVLPGYKYLGPFNGLDKGEPVNAADAAALEHDKAYDQQLQAGDNPYLRYNHADAEFQERLQEDTSFGGNLGRAVFQAKKRVLEPLGLVEEGAKTAPGKERPVEPSPQRSPDSSTGIGKEGQQPARKRLNFGQTGDSESVPDPQPLGEPPAAPSGVGPNTMAAGGGAPMADNNEGADGVGSSSGNWHCDSTWLGDRVITTSTRTWALPTYNNHLYKQISNGTSGGATNDNTYFGYSTPWGYFDFNRFHCHFSPRDWQRLINNNWGFRPKRLSFKLFNIQVKEVTQNEGTKTTANNLTSTIQVFTDSEYQLPYVLGSAHQGCLPPFPADVFTIPQYGYLTLNNGSQAVGRSSFYCLEYFPSQMLRTGNNFQFTYTFEDVPFHSSYAHSQSLDRLMNPLIDQYLYYLSRIQTTGGTANTQTLGFSQGGPNTMANQAKNWLPGPCYRQQRVSTTTGQNNNSNFAWTAGTKYHLNGRNSLANPGIAMATHKDDEERFFPSNGILIFGKQNAARDNADYSDVMPTSEEEIKTTNPVATEEYGIVADNLQQQNTAPQIGTVNSQGALPGMVWQNRDVYLQGPIWAKIPHTDGNFHPSPLMGGFGLKHPPPQILIKNTPVPADPPTTFNQSKLNSFITQYSTGQVSVEIEWELQKENSKRWNPEIQYTSNYYKSTSVDFAVNTEGVYSEPRPIGTRYLTRNL

SEQ ID NO: 11532 - protein, 738 aa, Artificial Sequence
  source: /note="Description of Artificial Sequence: Synthetic polypeptide"
MAADGYLPDWLEDNLSEGIREWWALKPGAPKPKANQQKQDDGRGLVLPGYKYLGPFNGLDKGEPVNAADAAALEHDKAYDQQLQAGDNPYLRYNHADAEFQERLQEDTSFGGNLGRAVFQAKKRVLEPLGLVEEGAKTAPGKKRPVEPSPQRSPDSSTGIGKGGQQPARKRLNFGQTGDSESVPDPQPLGEPPAAPSGVGPNTMAAGGGAPMADNNEGADGVGSSSGNWHCDSTWLGDRVITTSTRTWALPTYNNHLYKQISNGTSGGATNDNTYFGYSTPWGYFDFNRFHCHFSPRDWQRLINNNWGFRPKRLSFKLFNIQVKEVTQNEGTKTIANNLTSTIQVFTDSEYQLPYVLGSAHQGCLPPFPADVFTIPQYGYLTLNNGSQAVGRSSFYCLEYFPSQMLRTGNNFQFTYTFEDVPFHSSYAHSQSLDRLMNPLIDQYLYYLSRIQTTGGTANTQTLGFSQGGPNTMANQAKNWLPGPCYRQQRVSTTTGQNNNSNFAWTAGTKYHLNGRNSLANPGIAMATHKDDEERFFPSNGILIFGKQNAARDNADYSDVMPTSEEEIKTTNPVATEEYGIVADNLQQQNTAPQIGTVNSQGALPGMVWQNRDVYLQGPIWAKIPHTDGNFHPSPLMGGFGLKHPPPQILIKNTPVPADPPTTFNQSKLNSFITQYSTGQVSVEIEWELQKENSKRWNPEIQYTSNYYKSTSVDFAVNTEGVYSEPRPIGTRYLTRNL

SEQ ID NO: 11533 - protein, 738 aa, Artificial Sequence
  source: /note="Description of Artificial Sequence: Synthetic polypeptide"
MAADGYLPDWLEDNLSEGIREWWALKPGAPKPKANQQKQDDGRGLVLPGYKYLGPFNGLDKGEPVNAADAAALEHDKAYDQQLQAGDNPYLRYNHADAEFQERLQEDTSFGGNLGRAVFQAKKRVLEPLGLVEEGAKTAPGKERPVEPSPQRSPDSSTGIGKKGQQPARKRLNFGQTGDSESVPDPQPLGEPPAAPSGVGPNTMAAGGGAPMADNNEGADGVGSSSGNWHCDSTWLGDRVITTSTRTWALPTYNNHLYKQISNGTSGGATNDNTYFGYSTPWGYFDFNRFHCHFSPRDWQRLINNNWGFRPKRLSFKLFNIQVKEVTQNEGTKTTANNLTSTIQVFTDSEYQLPYVLGSAHQGCLPPFPADVFTIPQYGYLTLNNGSQAVGRSSFYCLEYFPSQMLRTGNNFQFTYTFEDAPFHSSYAHSQSLDRLMNPLIDQYLYYLSRIQTTGGTANTQTLGFSQGGPNTMANQAKNWLPGPCYRQQRVSTTTGQNNNSNFAWTAGTKYHLNGRNSLANPGIAMATHKDDEERFFPSNGILIFGKQNAARDNADYSDVMPTSEEEIKTTNPVATEEYGIVADNLQQQNTAPQIGTVNSQGALPGMVWQNRDVYLQGPIWAKIPHTDGNFHPSPLMGGFGLKHPPPQILIKNTPVPADPPTTFNQSKLNSFITQYSTGQVSVEIEWELQKENSKRWNPEIQYTSNYYKSTSVDFAVNTEGVYSEPRPIGTRYLTRNL

SEQ ID NO: 11534 - protein, 738 aa, Artificial Sequence
  source: /note="Description of Artificial Sequence: Synthetic polypeptide"
MAADGYLPDWLEDNLSEGIREWWALKPGAPKPKANQQKQDDGRGLVLPGYKYLGPFNGLDKGEPVNAADAAALEHDKAYDQQLQAGDNPYLRYNHADAEFQERLQEDTSFGGNLGRAVFQAKKRVLEPLGLVEEGAKTAPGKKRPVEPSPQRSPDSSTGIGKEGQQPARKRLNFGQTGDSESVPDPQPLGEPPAAPSGVGPNTMAAGGGAPMADNNEGADGVGSSSGNWHCDSTWLGDRVITTSTRTWALPTYNNHLYKQISNGTSGGATNDNTYFGYSTPWGYFDFNRFHCHFSPRDWQRLINNNWGFRPKRLSFKLFNIQVKEVTQNEGTKTIANNLTSTIQVFTDSEYQLPYVLGSAHQGCLPPFPADVFTIPQYGYLTLNNGSQAVGRSSFYCLEYFPSQMLRTGNNFQFTYTFEDVPFHSSYAHSQSLDRLMNPLIDQYLYYLSRIQTTGGTANTQTLGFSQGGPNTMANQAKNWLPGPCYRQQRVSTTTGQNNNSNFAWTAGTKYHLNGRNSLANPGIAMATHKDDEERFFPSNGILIFGKQNAARDNADYSDVMPTSEEEIKTTNPVATEEYGIVADNLQQQNTAPQIGTVNSQGALPGMVWQNRDVYLQGPIWAKIPHTDGNFHPSPLMGGFGLKHPPPQILIKNTPVPADPPTTFNQSKLNSFITQYCTGQVSVEIEWELQKENSKRWNPEIQYTSNYYKSTSVDFAVNTEGVYSEPRPIGTRYLTRNL

SEQ ID NO: 11535 - protein, 738 aa, Artificial Sequence
  source: /note="Description of Artificial Sequence: Synthetic polypeptide"
MAADGYLPDWLEDNLSEGIREWWALKPGAPKPKANQQKQDDGRGLVLPGYKYLGPFNGLDKGEPVNAADAAALEHDKAYDQQLQAGDNPYLRYNHADAEFQERLQEDTSFGGNLGRAVFQAKKRVLEPLGLVEEGAKTAPGKKRPVEPSPQRSPDSSTGIGKEGQQPARKRLNFGQTGDSESVPDPQPLGEPPAAPSGVGPNTMAAGGGAPMADNNEGADGVGSSSGNWHCDSTWLGDRVITTSTRTWALPTYNNHLYKQISNGTSGGATNDNTYFGYSTPWGYFDFNRFHCHFSPRDWQRLINNNWGFRPKRLSFKLFNIQVKEVTQNEGTKTIANNLTSTIQVFTDSEYQLPYVLGSAHQGCLPPFPADVFTIPQYGYLTLNNGSQAVGRSSFYCLEYFPSQMLRTGNNFQFTYTFEDVPFHSSYAHSQSLDRLMNPLIDQYLYYLSRIQTTGGTANTQTLGFSQGGPNTMANQAKNWLPGPCYRQQRVSTTTGQNNNSNFAWTAGTKYHLNGRNSLANPGIAMATHKDDEERFFPSNGILIFGKQNAARDNADYSDVMPTSEEEIKTTNPVATEEYGIVADNLQQQNTAPQIGTVNSQGALPGMVWQNRDVYLQGPIWAKIPHTDGNFHPSPLMGGFGLKHPPPQILIKNTPVPADPPTTFNQSKLNSFITQYSTGQVSVEIEWELQKENSKRWNPEIQYTSNYYKSTSVDFAVNTEGVYSEPRPIGTRYLTRNL

SEQ ID NO: 11536 - protein, 738 aa, Artificial Sequence
  source: /note="Description of Artificial Sequence: Synthetic polypeptide"
MAADGYLPDWLEDNLSEGIREWWALKPGAPKPKANQQKQDDGRGLVLPGYKYLGPFNGLDKGEPVNAADAAALEHDKAYDQQLQAGDNPYLRYNHADAEFQERLQEDTSFGGNLGRAVFQAKKRVLEPLGLVEEGAKTAPGKERPVEPSPQRSPDSSTGIGKKGQQPARKRLNFGQTGDSESVPDPQPLGEPPAAPSGVGPNTMAAGGGAPMADNNEGADGVGSSSGNWHCDSTWLGDRVITTSTRTWALPTYNNHLYKQIPNGTSGGATNDNTYFGYSTPWGYFDFNRFHCHFSPRDWQRLINNNWGFRPKRLSFKLFNIQVKEVTQNEGTKTTANNLTSTIQVFTDSEYQLPYVLGSAHQGCLPPFPADVFTIPQYGYLTLNNGSQAVGRSSFYCLEYFPSQMLRTGNNFQFTYTFEDVPFHSSYAHSQSLDRLMNPLIDQYLYYLSRIQTTGGTANTQTLGFSQGGPNTMANQAKNWLPGPCYRQQRVSTTTGQNNNSNFAWTAGTKYHLNGRNSLANPGIAMATHKDDEERFFPSNGILIFGKQNAARDNADYSDVMPTSEEEIKTTNPVATEEYGIVADNLQQQNTAPQIGTVNSQGALPGMVWQNRDVYLQGPIWAKIPHTDGNFHPSPLMGGFGLKHPPPQILIKNTPVPADPPTTFNQSKLNSFITQYSTGQVSVEIEWELQKENSKRWNPEIQYTSNYYKSTSVDFAVNTEGVYSEPRPIGTRYLTRNL

SEQ ID NO: 11537 - protein, 738 aa, Artificial Sequence
  source: /note="Description of Artificial Sequence: Synthetic polypeptide"
MAADGYLPDWLEDNLSEGIREWWALKPGAPKPKANQQKQDDGRGLVLPGYKYLGPFNGLDKGEPVNAADAAALEHDKAYDQQLQAGDNPYLRYNHADAEFQERLQEDTSFGGNLGRAVFQAKKRVLEPLGLVEEGAKTAPGKKRPVEPSPQRSPDSSTGIGKEGQQPARKRLNFGQTGDSESVPDPQPLGEPPAAPSGVGPNTMAAGGGAPMADNNEGADGVGSSSGNWHCDSTWLGDRVITTSTRTWALPTYNNHLYKQISNGTSGGATNDNTYFGYSTPWGYFDFNRFHCHFSPRDWQRLINNNWGFRPKRLSFKLFNIQVKEVTQNEGTKTTANNLTSTIQVFTDSEYQLPYVLGSAHQGCLPPFPADVFTIPQYGYLTLNNGSQAVGRSSFYCLEYFPSQMLRTGNNFQFTYTFEDVPFHSSYAHSQSLDRLMNPLIDQYLYYLSRIQTTGGTANTQTLGFSQGGPNTMANQAKNWLPGPCYRQQRVSTTTGQNNNSNFAWTAGTKYHLNGRNSLANPGIAMATHKDDEERFFPSNGILIFGKQNAARDNADYSDVMPTSEEEIKTTNPVATEEYGIVADNLQQQNTAPQIGTVNSQGALPGMVWQNRDVYLQGPIWAKIPHTDGNFHPSPLMGGFGLKHPPPQILIKNTPVPADPPTTFNQSKLNSFITQYSTGQVSVEIEWELQKENSKRWNPEIQYTSNYYKSTSVDFAVNTEGVYSEPRPIGTRYLTRNL

SEQ ID NO: 11538 - protein, 738 aa, Artificial Sequence
  source: /note="Description of Artificial Sequence: Synthetic polypeptide"
MAADGYLPDWLEDNLSEGIREWWALKPGAPKPKANQQKQDDGRGLVLPGYKYLGPFNGLDKGEPVNAADAAALEHDKAYDQQLQAGDNPYLRYNHADAEFQERLQEDTSFGGNLGRAVFQAKKRVLEPLGLVEEGAKTAPGKERPVEPSPQRSPDSSTGIGKKGQQPARKRLNFGQTGDSESVPDPQPLGEPPAAPSGVGPNTMAAGGGAPMADNNEGADGVGSSSGNWHCDSTWLGDRVITTSTRTWALPTYNNHLYKQISNGTSGGATNDNTYFGYSTPWGYFDFNRFHCHFSPRDWQRLINNNWGFRPKRLSFKLFNIQVKEVTQNEGTKTTANNLTSTIQVFTDSEYQLPYVLGSAHQGCLPPFPADVFTIPQYGYLTLNNGSQAVGRSSFYCLEYFPSQMLRTGNNFQFTYTFEDVPFHSSYAHSQSLDRLMNPLIDQYLYYLSRIQTTGGTANTQTLGFSQGGPNTMANQAKNWLPGPCYRQQRVSTTTGQNNNSNFAWTAGTKYHLNGRNSLANPGIAMATHKDDEERFFPSNGILIFGKQNAARDNADYSDVMPTSEEEIKTTNPVATEEYGIVADNLQQQNTAPQIGTVNSQGALPGMVWQNRDVYLQGPIWAKIPHTDGNFHPSPLMGGFGLKHPPPQILIKNTPVPADPPTTFNQSKLNSFITQYSTGQVSVEIEWELQKENSKRWNPEIQYTSNYYKSTSVDFAVNTEGVYSEPRPIGTRYLTRNL

SEQ ID NO: 11539 - protein, 738 aa, Artificial Sequence
  source: /note="Description of Artificial Sequence: Synthetic polypeptide"
MAADGYLPDWLEDNLSEGIREWWALKPGAPKPKANQQKQDDGRGLVLPGYKYLGPFNGLDKGEPVNAADAAALEHDKAYDQQLQAGDNPYLRYNHADAEFQERLQEDTSFGGNLGRAVFQAKKRVLEPLGLVEEGAKTAPGKERPVEPSPQRSPDSSTGIGKKGQQPARKRLNFGQTGDSESVPDPQPLGEPPAAPSGVGPNTMAAGGGAPMADNNEGADGVGSSSGNWHCDSTWLGDRVITTSTRTWALPTYNNHLYKQISNGTSGGATNDNTYFGYSTPWGYFDFNRFHCHFSPRDWQRLINNNWGFRPKRLSFKLFNIQVKEVTQNEGTKTIANNLTSTIQVFTDSEYQLPYVLGSAHQGCLPPFPADVFTIPQYGYLTLNNGSQAVGRSSFYCLEYFPSQMLRTGNNFQFTYTFEDVPFHSSYAHSQSLDRLMNPLIDQYLYYLSRIQTTGGTANTQTLGFSQGGPNTMANQAKNWLPGPCYRQQRVSTTTGQNNNSNFAWTAGTKYHLNGRNSLANPGIAMATHKDDEERFFPSNGILIFGKQNAARDNADYSDVMPTSEEEIKTTNPVATEEYGIVADNLQQQNTAPQIGTVNSQGALPGMVWQNRDVYLQGPIWAKIPHTDGNFHPSPLMGGFGLKHPPPQILIKNTPVPADPPTTFNQSKLNSFITQYSTGQVSVEIEWELQKENSKRWNPEIQYTSNYYKSTSVDFAVNTEGVYSEPRPIGTRYLTRNL

SEQ ID NO: 11540 - protein, 738 aa, Artificial Sequence
  source: /note="Description of Artificial Sequence: Synthetic polypeptide"
MAADGYLPDWLEDNLSEGIREWWALKPGAPKPKANQQKQDDGRGLVLPGYKYLGPFNGLDKGEPVNAADAAALEHDKAYDQQLQAGDNPYLRYNHADAEFQERLQEDTSFGGNLGRAVFQAKKRVLEPLGLVEEGAKTAPGKKRPVEPSPQRSPDSSTGIGKKGQQPARKRLNFGQTGDSESVPDPQPLGEPPAAPSGVGPNTMAAGGGAPMADNNEGADGVGSSSGNWHCDSTWLGDRVITTSTRTWALPTYNNHLYKQISNGTSGGATNDNTYFGYSTPWGYFDFNRFHCHFSPRDWQRLINNNWGFRPKRLSFKLFNIQVKEVTQNEGTKTIANNLTSTIQVFTDSEYPLPYVLGSAHQGCLPPFPADVFTIPQYGYLTLNNGSQAVGRSSFYCLEYFPSQMLRTGNNFQFTYTFEDVPFHSSYAHSQSLDRLMNPLIDQYLYYLSRIQTTGGTANTQTLGFSQGGPNTMANQAKNWLPGPCYRQQRVSTTTGQNNNSNFAWTAGTKYHLNGRNSLANPGIAMATHKDDEERFFPSNGILIFGKQNAARDNADYSDVMPTSEEEIKTTNPVATEEYGIVADNLQQQNTAPQIGTVNSQGALPGMVWQNRDVYLQGPIWAKIPHTDGNFHPSPLMGGFGLKHPPPQILIKNTPVPADPPTTFNQSKLNSFITQYSTGQVSVEIEWELQKENSKRWNPEIQYTSNYYKSTSVDFAVNTEGVYSEPRPIGTRYLTRNL

SEQ ID NO: 11541 - protein, 738 aa, Artificial Sequence
  source: /note="Description of Artificial Sequence: Synthetic polypeptide"
MAADGYLPDWLEDNLSEGIREWWALKPGAPKPKANQQKQDDGRGLVLPGYKYLGPFNGLDKGEPVNAADAAALEHDKAYDQQLQAGDNPYLRYNHADAEFQERLQEDTSFGGNLGRAVFQAKKRVLEPLGLVEEGAKTAPGKKRPVEPSPQRSPDSSTGIGKKGQQPARKRLNFGQTGDSESVPDPQPLGEPPAAPSGVGPNTMAAGGGAPMADNNEGADGVGSSSGNWHCDSTWLGDRVITTSTRTWALPTYNNHLYKQISNGTSGGATNDNTYFGYSTPWGYFDFNRFHCHFSPRDWQRLINNNWGFRPKRLSFKLFNIQVKEVTQNEGTKTIANNLTSTIQVFTDSEYQLPYVLGSAHQGCLPPFPADVFTIPQYGYLTLNNGSQAVGRSSFYCLEYFPSQMLRTGNNFQFTYTFEDVPFHSSYAHSQSLDRLMNPLIDQYLYYLSRIQTTGGTANTQTLGFSQGGPNTMANQAKNWLPGPCYRQQRVSTTTGQNNNSNFAWTAGTKYHLNGRNSLANPGIAMATHKDDEERFFPSNGILIFGKQNAARDNADYSDVMPTSEEEIKTTNPVATEEYGIVADNLQQQNTAPQIGTVNSQGALPGMVWQNRDVYLQGPIWAKIPHTDGNFHPSPLMGGFGLKHPPPQILIKNTPVPADPPTTFNQSKLNSFITQYGTGQVSVEIEWELQKENSKRWNPEIQYTSNYYKSTSVDFAVNTEGVYSEPRPIGTRYLTRNL

SEQ ID NO: 11542 - protein, 738 aa, Artificial Sequence
  source: /note="Description of Artificial Sequence: Synthetic polypeptide"
MAADGYLPDWLEDNLSEGIREWWALKPGAPKPKANQQKQDDGRGLVLPGYKYLGPFNGLDKGEPVNAADAAALEHDKAYDQQLQAGDNPYLRYNHADAEFQERLQEDTSFGGNLGRAVFQAKKRVLEPLGLVEEGAKTAPGKKRPVEPSPQRSPDSSTGIGKKGQQPARKRLNFGQTGDSESVPDPQPLGEPPAAPSGVGPNTMAAGGGAPMADNNEGADGVGSSSGNWHCDSTWLGDRVITTSTRTWALPTYNNHLYKQISNGTSGGATNDNTYFGYSTPWGYFDFNRFHCHFSPRDWQRLINNNWGFRPKRLSFKPFNIQVKEVTQNEGTKTIANNLTSTIQVFTDSEYQLPYVLGSAHQGCLPPFPADVFTIPQYGYLTLNNGSQAVGRSSFYCLEYFPSQMLRTGNNFQFTYTFEDVPFHSSYAHSQSLDRLMNPLIDQYLYYLSRIQTTGGTANTQTLGFSQGGPNTMANQAKNWLPGPCYRQQRVSTTTGQNNNSNFAWTAGTKYHLNGRNSLANPGIAMATHKDDEERFFPSNGILIFGKQNAARDNADYSDVMPTSEEEIKTTNPVATEEYGIVADNLQQQNTAPQIGTVNSQGALPGMVWQNRDVYLQGPIWAKIPHTDGNFHPSPLMGGFGLKHPPPQILIKNTPVPADPPTTFNQSKLNSFITQYSTGQVSVEIEWELQKENSKRWNPEIQYTSNYYKSTSVDFAVNTEGVYSEPRPIGTRYLTRNL

SEQ ID NO: 11543 - protein, 738 aa, Artificial Sequence
  source: /note="Description of Artificial Sequence: Synthetic polypeptide"
MAADGYLPDWLEDNLSEGIREWWALKPGAPKPKANQQKQDDGRGLVLPGYKYLGPFNGLDKGEPVNAADAAALEHDKAYDQQLQAGDNPYLRYNHADAEFQERLQEDTSFGGNLGRAVFQAKKRVLEPLGLVEEGAKTAPGKKRPVEPSPQRSPDSSTGIGKKGQQPARKRLNFGQTGDSESVPDPQPLGEPPAAPSGVGPNTMAAGGGAPMADNNEGADGVGSSSGNWHCDSTWLGDRVITTSTRTWALPTYNNHLYKQISNGTSGGATNDNTYFGYSTPWGYFDFNRFHCHFSPRDWQRLINNNWGFRPKRLSFKLFNIQVKEVTQNEGTKTIANNLTSTIQVFTDSEYQLPYVLGSAHQGCLPPFPADVFTIPQYGYLTLNNGSQAVGRSSFYCLEYFPSQMLRTGNNFQFTYTFEDVPFHSSYAHSQSLDRLMNPLIDQYLYYLSRIQTTGGTANTQALGFSQGGPNTMANQAKNWLPGPCYRQQRVSTTTGQNNNSNFAWTAGTKYHLNGRNSLANPGIAMATHKDDEERFFPSNGILIFGKQNAARDNADYSDVMPTSEEEIKTTNPVATEEYGIVADNLQQQNTAPQIGTVNSQGALPGMVWQNRDVYLQGPIWAKIPHTDGNFHPSPLMGGFGLKHPPPQILIKNTPVPADPPTTFNQSKLNSFITQYSTGQVSVEIEWELQKENSKRWNPEIQYTSNYYKSTSVDFAVNTEGVYSEPRPIGTRYLTRNL

SEQ ID NO: 11544 - protein, 738 aa, Artificial Sequence
  source: /note="Description of Artificial Sequence: Synthetic polypeptide"
MAADGYLPDWLEDNLSEGIREWWALKPGAPKPKANQQKQDDGRGLVLPGYKYLGPFNGLDKGEPVNAADAAALEHDKAYDQQLQAGDNPYLRYNHADAEFQERLQEDTSFGGNLGRAVFQAKKRVLEPLGLVEEGAKTAPGKKRPVEPSPQRSPDSSTGIGKKGQQPARKRLNFGQTGDSESVPDPQPLGEPPAAPSGVGPNTMAAGGGAPMADNNEGADGVGSSSGNWHCDSTWLGDRVITTSTRTWALPTYNNHLYKQISNGTSGGATNDNTYFGYSTPWGYFDFNRFHCHFSPRDWQRLINNNWGFRPKRLSFKLFNIQVKEVTQNEGTKTIANNLTSTIQVFTDSEYQLPYVLGSAHQGCLPPFPADVFTIPQYGYLTLNNGSQAVGRSSFYCLEYFPSQMLRTGNNFQFTYTFEDVPFHSSYAHSQSLDRLMNPLIDQYLYYLSRIQTTGGTANTQTLGFSQGGPNTMANQAKNWLPGPCYRQQRVSTTTGQNNNSNFAWTAGTKYHLNGRNSLANPGIAMATHKDDEERFFPSNGILIFGKQNAARDNADYSDVMPTSEEEIKTTNPVATEGYGIVADNLQQQNTAPQIGTVNSQGALPGMVWQNRDVYLQGPIWAKIPHTDGNFHPSPLMGGFGLKHPPPQILIKNTPVPADPPTTFNQSKLNSFITQYSTGQVSVEIEWELQKENSKRWNPEIQYTSNYYKSTSVDFAVNTEGVYSEPRPIGTRYLTRNL

SEQ ID NO: 11545 - protein, 738 aa, Artificial Sequence
  source: /note="Description of Artificial Sequence: Synthetic polypeptide"
MAADGYLPDWLEDNLSEGIREWWALKPGAPKPKANQQKQDDGRGLVLPGYKYLGPFNGLDKGEPVNAADAAALEHDKAYDQQLQAGDNPYLRYNHADAEFQERLQEDTSFGGNLGRAVFQAKKRVLEPLGLVEEGAKTAPGKKRPVEPSPQRSPDSSTGIGKKGQQPARKRLNFGQTGDSESVPDPQPLGEPPAAPSGVGPNTMAAGGGAPMADNNEGADGVGSSSGNWHCDSTWLGDRVITTSTRTWALPTYNNHLYKQISNGTSGGATNDNTYFGYSTPWGYFDFNRFHCHFSPRDWQRLINNNWGFRPKRLSFKLFNIQVKEVTQNEGTKTIANNLTSTIQVFTDSEYQLPYVLGSAHQGCLPPFPADVFTIPQYGYLTLNNGSQAVGRSSFYCLEYFPSQMLRTGNNFQFTYTFEDVPFHSSYAHSQSLDRLMNPLIDQYLYYLSRIQTTGGTANTQTLGFSQGGPNTMANQAKNWLPGPCYRQQRVSTTTGQNNNSNFAWTAGTKYHLNGRNSLANPGIAMATRKDDEERFFPSNGILIFGKQNAARDNADYSDVMPTSEEEIKTTNPVATEEYGIVADNLQQQNTAPQIGTVNSQGALPGMVWQNRDVYLQGPIWAKIPHTDGNFHPSPLMGGFGLKHPPPQILIKNTPVPADPPTTFNQSKLNSFITQYSTGQVSVEIEWELQKENSKRWNPEIQYTSNYYKSTSVDFAVNTEGVYSEPRPIGTRYLTRNL

SEQ ID NO: 11546 - protein, 738 aa, Artificial Sequence
  source: /note="Description of Artificial Sequence: Synthetic polypeptide"
MAADGYLPDWLEDNLSEGIREWWALKPGAPKPKANQQKQDDGRGLVLPGYKYLGPFNGLDKGEPVNAADAAALEHDKAYDQQLQAGDNPYLRYNHADAEFQERLQEDTSFGGNLGRAVFQAKKRVLEPLGLVEEGAKTAPGKKRPVEPSPQRSPDSSTGIGKKGQQPARKRLNFGQTGDSESVPDPQPLGEPPAAPSGVGPNTMAAGGGAPMADNNEGADGVGSSSGNWHCDSTWLGDRVITTSTRTWALPTYNNHLYKQISNGTSGGATNDNTYFGYSTPWGYFDFNRFHCHFSPRDWQRLINNNWGFRPKRLSFKLFNIQVKEVTQNEGTKTIANNLTSTIQVFTDSEYQLPYVLGSAHQGCLPPFPADVFTIPQYGYLTLNNGSQAVGRSSFYCLEYFPSQMLRTGNNFQFTYTFEDVPFHSSYAHSQSLDRLMNPLIDQYLYYLSRIQTTGGTANTQTLGFSQGGPNTMANQAKNWLPGPCYRQQRVSTTTGQNNNSNFAWTAGTKYHLNGRNSLANPGIAMATHKDDEERFFPSNGILIFGKQNAARDNADYSDVMPTSEEEIKTTNPVATEEYGIVADNLQQQNTAPQIGTVNSQGALPGMVWQNRDVYLQGPIWAKIPHTDGNFHPSPLMGGFGLKHPPPQILIKNTPVPADPPTTFNQSKPNSFITQYSTGQVSVEIEWELQKENSKRWNPEIQYTSNYYKSTSVDFAVNTEGVYSEPRPIGTRYLTRNL

SEQ ID NO: 11547 - protein, 738 aa, Artificial Sequence
  source: /note="Description of Artificial Sequence: Synthetic polypeptide"
MAADGYLPDWLEDNLSEGIREWWALKPGAPKPKANQQKQDDGRGLVLPGYKYLGPFNGLDKGEPVNAADAAALEHDKAYDQQLQAGDNPYLRYNHADAEFQERLQEDTSFGGNLGRAVFQAKKRVLEPLGLVEEGAKTAPGKKRPVEPSPQRSPDSSTGIGKKGQQPARKRLNFGQTGDSESVPDPQPLGEPPAAPSGVGPNTMAAGGGAPMADNNEGADGVGSSSGNWHCDSTWLGDRVITTSTRTWALPTYNNHLYKQISNGTSGGATNDNTYFGYSTPWGYFDFNRFHCHFSPRDWQRLINNNWGFRPKRLSFKLFNIQVKEVTQNEGTKTIANNLTSTIQVFTDSEYQLPYVLGSAHQGCLPPFPADVFTIPQYGYLTLNNGSQAVGRSSFYCLEYFPSQMLRTGNNFQFTYTFEDVPFHSSYAHSQSLDRLMNPLIDQYLYYLSRIQTTGGTANTQTLGFSQGGPNTMANQAKNWLPGPCYRQQRVSTTTGQNNNSNFAWTAGTKYHLNGRNSLANPGIAMATHKDDEERFFSSNGILIFGKQNAARDNADYSDVMPTSEEEIKTTNPVATEEYGIVADNLQQQNTAPQIGTVNSQGALPGMVWQNRDVYLQGPIWAKIPHTDGNFHPSPLMGGFGLKHPPPQILIKNTPVPADPPTTFNQSKLNSFITQYSTGQVSVEIEWELQKENSKRWNPEIQYTSNYYKSTSVDFAVNTEGVYSEPRPIGTRYLTRNL

SEQ ID NO: 11548 - protein, 738 aa, Artificial Sequence
  source: /note="Description of Artificial Sequence: Synthetic polypeptide"
MAADGYLPDWLEDNLSEGIREWWALKPGAPKPKANQQKQDDGRGLVLPGYKYLGPFNGLDKGEPVNAADAAALEHDKAYDQQLQAGDNPYLRYNHADAEFQERLQEDTSFGGNLGRAVFQAKKRVLEPLGLVEEGAKTAPGKKRPVEPSPQRSPDSSTGIGKKGQQPARKRLNFGQTGDSESVPDPQPLGEPPAAPSGVGPNTMAAGGGAPMADNNEGADGVGSSSGNWHCDSTWLGDRVITTSTRTWALPTYNNHLYKQISNGTSGGATNDNTYFGYSTPWGYFDFNRFHCHFSPRDWQRLINNNWGFRPKRLSFKLFNIQVKEVTQNEGTKTIANNLTSTIQVFTDSEYQLPYVLGSAHQGCLPPFPADVFTIPQYGYLTLNNGSQAVGRSSFYCLEYFPSQMLRTGNNFQFTYTFEDVPFHSSYAHSQSLDRLMNPLIDQYLYYLSRIQTTGGTANTQTLGFSQGGPNTMANQAKNWLPGPCYRQQRVSTTTGQNNNSNFAWAAGTKYHLNGRNSLANPGIAMATHKDDEERFFPSNGILIFGKQNAARDNADYSDVMPTSEEEIKTTNPVATEEYGIVADNLQQQNTAPQIGTVNSQGALPGMVWQNRDVYLQGPIWAKIPHTDGNFHPSPLMGGFGLKHPPPQILIKNTPVPADPPTTFNQSKLNPFITQYSTGQVSVEIEWELQKENSKRWNPEIQYTSNYYKSTSVDFAVNTEGVYSEPRPIGTRYLTRNL

SEQ ID NO: 11549 - protein, 738 aa, Artificial Sequence
  source: /note="Description of Artificial Sequence: Synthetic polypeptide"
MAADGYLPDWLEDNLSEGIREWWALKPGAPKPKANQQKQDDGRGLVLPGYKYLGPFNGLDKGEPVNAADAAALEHDKAYDQQLQAGDNPYLRYNHADAEFQERLQEDTSFGGNLGRAVFQAKKRVLEPLGLVEEGAKTAPGKKRPVEPSPQRSPDSSTGIGKKGQQPARKRLNFGQTGDSESVPDPQPLGEPPAAPSGVGPNTMAAGGGAPMADNNEGADGVGSSSGNWHCDSTWLGDRVITTSTRTWALPTYNNHLYKQISNGTSGGATNDNTYFGYSTPWGYFDFNRFHCHFSPRDWQRLINNNWGFRPKRLSFKLFNIQVKEVTQNEGTKTIANNPTSTIQVFTDSEYQLPYVLGSAHQGCLPPFPADVFTIPQYGYLTLNNGSQAVGRSSFYCLEYFPSQMLRTGNNFQFTYTFEDVPFHSSYAHSQSLDRLMNPLIDQYLYYLSRIQTTGGTANTQTLGFSQGGPNTMANQAKNWLPGPCYRQQRVSTTTGQNNNSNFAWTAGTKYHLNGRNSLANPGIAMATHKDDEERFFPSNGILIFGKQNAARDNADYSDVMPTSEEEIKTTNPVATEEYGIVADNLQQQNTAPQIGTVNSQGALPGMVWQNRDVYLQGPIWAKIPHTDGNFHPSPLMGGFGLKHPPPQILIKNTPVPADPPTTFNQSKLNSFITQYSTGQVSVEIEWELQKENSKRWNPEIQYTSNYYKSTSVDFAVNTEGVYSEPRPIGTRYLTRNL

SEQ ID NO: 11550 - protein, 738 aa, Artificial Sequence
  source: /note="Description of Artificial Sequence: Synthetic polypeptide"
MAADGYLPDWLEDNLSEGIREWWALKPGAPKPKANQQKQDDGRGLVLPGYKYLGPFNGLDKGEPVNAADAAALEHDKAYDQQLQAGDNPYLRYNHADAEFQERLQEDTSFGGNLGRAVFQAKKRVLEPLGLVEEGAKTAPGKKRPVEPSPQRSPDSSTGIGKKGQQPARKRLNFGQTGDSESVPDPQPLGEPPAAPSGVGPNTMAAGGGAPMADNNEGADGVGSSSGNWHCDSTWLGDRVITTSTRTWALPTYNNHLYKQISNGTSGGATNDNTYFGYSTPWGYFDFNRFHCRFSPRDWQRLINNNWGFRPKRLSFKLFNIQVKEVTQNEGTKTIANNLTSTIQVFTDSEYQLPYVLGSAHQGCLPPFPADVFTIPQYGYLTLNNGSQAVGRSSFYCLEYFPSQMLRTGNNFQFTYTFEDVPFHSSYAHSQSLDRLMNPLIDQYLYYLSRIQTTGGTANTQTLGFSQGGPNTMANQAKNWLPGPCYRQQRVSTTTGQNNNSNFAWTAGTKYHLNGRNSLANPGIAMATHKDDEERFFPSNGILIFGKQNAARDNADYSDVMPTSEEEIKTTNPVATEEYGIVADNLQQQNTAPQIGTVNSQGALPGMVWQNRDVYLQGPIWAKIPHTDGNFHPSPLMGGFGLKHPPPQILIKNTPVPADPPTTFNQSKLNSFITQYSTGQVSVEIEWELQKENSKRWNPEIQYTSNYYKSTSVDFAVNTEGVYSEPRPIGTRYLTRNL

SEQ ID NO: 11551 - protein, 738 aa, Artificial Sequence
  source: /note="Description of Artificial Sequence: Synthetic polypeptide"
MAADGYLPDWLEDNLSEGIREWWALKPGAPKPKANQQKQDDGRGLVLPGYKYLGPFNGLDKGEPVNAADAAALEHDKAYDQQLQAGDNPYLRYNHADAEFQERLQEDTSFGGNLGRAVFQAKKRVLEPLGLVEEGAKTAPGKKRPVEPSPQRSPDSSTGIGKKGQQPARKRLNFGQTGDSESVPDPQPLGEPPAAPSGVGPNTMAAGGGAPMADNNEGADGVGSSSGNWHCDSTWLGDRVITTSTRTWALPTYNNHLYKQISNGTSGGATNDNTYFGYSTPWGYFDFNRFHCHFSPRDWQRLINNNWGFRPKRLSFKLFNIQVKEVTQNEGTKTIANNLTSTIQVFTDSEYQLPYVLGSAHQGCLPPFPADVFTIPQYGYLTLNNGSQAVGRSSFYCLEYFPSQMLRTGNNFQFTYTFEDVPFHSSYAHSQSLDRLMNPLIDQYLYYLSRIQTTGGTANTQTLGFSQGGPNTMANQAKNWLPGPCYRQQRVSTTTGQNNNSNFAWTAGTKYHLNGRNSLANPGIAMATHKDDEERFFPSNGILIFGKQNAARDNADYSDVMPTSEEEIKTTNPVATEEYGIVADNLQQQNAAPQIGTVNSQGALPGMVWQNRDVYLQGPIWAKIPHTDGNFHPSPLMGGFGLKHPPPQILIKNTPVPADPPTTFNQSKLNSFITQYSTGQVSVEIEWELQKENSKRWNPEIQYTSNYYKSTSVDFAVNTEGVYSEPRPIGTRYLTRNL

SEQ ID NO: 11552 - protein, 738 aa, Artificial Sequence
  source: /note="Description of Artificial Sequence: Synthetic polypeptide"
MAADGYLPDWLEDNLSEGIREWWALKPGAPKPKANQQKQDDGRGLVLPGYKYLGPFNGLDKGEPVNAADAAALEHDKAYDQQLQAGDNPYLRYNHADAEFQERLQEDTSFGGNLGRAVFQAKKRVLEPLGLVEEGAKTAPGKKRPVEPSPQRSPDSSTGIGKKGQQPARKRLNFGQTGDSESVPDPQPLGEPPAAPSGVGPNTMAAGGGAPMADNNEGADGVGSSSGNWHCDSTWLGDRVITTSTRTWALPTYNNHLYKQISNGTSGGATNDNTYFGYSTPWGYFDFNRFHCHFSPRDWQRLINNNWGFRPKRLSFKLFNIQVKEVTQNEGTKTIANSLTSTIQVFTDSEYQLPYVLGSAHQGCLPPFPADVFTIPQYGYLTLNNGSQAVGRSSFYCLEYFPSQMLRTGNNFQFTYTFEDVPFHSSYAHSQSLDRLMNPLIDQYLYYLSRIQTTGGTANTQTLGFSQGGPNTMANQAKNWLPGPCYRQQRVSTTTGQNNNSNFAWTAGTKYHLNGRNSLANPGIAMATHKDDEERFFPSNGILIFGKQNAARDNADYSDVMPTSEEEIKTTNPVATEEYGIVADNLQQQNTAPQIGTVNSQGALPGMVWQNRDVYLQGPIWAKIPHTDGNFHPSPLMGGFGLKHPPPQILIKNTPVPADPPTTFNQSKLNSFITQYSTGQVSVEIEWELQKENSKRWNPEIQYTSNYYKSASVDFAVNTEGVYSEPRPIGTRYLTRNL

SEQ ID NO: 11553 - protein, 738 aa, Artificial Sequence
  source: /note="Description of Artificial Sequence: Synthetic polypeptide"
MAADGYLPDWLEDNLSEGIREWWALKPGAPKPKANQQKQDDGRGLVLPGYKYLGPFNGLDKGEPVNAADAAALEHDKAYDQQLQAGDNPYLRYNHADAEFQERLQEDTSFGGNLGRAVFQAKKRVLEPLGLVEEGAKTAPGKKRPVEPSPQRSPDSSTGIGKKGQQPARKRLNFGQTGDSESVPDPQPLGEPPAAPSGVGPNTMAAGGGAPMADNNEGADGVGSSSGNWHCDSTWLGDRVITTSTRTWALPTYNNHLYKQISNGTSGGATNDNTYFGYSTPWGYFDFNRFHCHFSPRDWQRLINNNWGFRPKRLSFKLFNIQVKEVTQNEGTKTIANNLTSTIQVFTDSEYQLPYVLGSAHQGCLPPFPADVFTIPQYGYLTLNNGSQAVGRSSFYCLEYFPSQMLRTGNNFQFTYTFEDVPFHSSYAHSQSLDRLMNPLIDQYLYYLSRIQTTGGTANTQTLGFSQGGPNTMANQAKNWLPGPCYRQQRVSTTTGQNNNSNFAWTAGTKYHLNGGNSLANPGIAMATHKDDEERFFPSNGILIFGKQNAARDNADYSDVMPTSEEEIKTTNPVATEEYGIVADNLQQQNTAPQIGTVNSQGALPGMVWQNRDVYLQGPIWAKIPHTDGNFHPSPLMGGFGLKHPPPQILIKNTPVPADPPTTFNQSKLNSFITQYSTGQVSVEIEWELQKENSKRWNPEIQYTSNYYKSTSVDFAVNTEGVYSEPRPIGTRYLTRNL

SEQ ID NO: 11554 - protein, 738 aa, Artificial Sequence
  source: /note="Description of Artificial Sequence: Synthetic polypeptide"
MAADGYLPDWLEDNLSEGIREWWALKPGAPKPKANQQKQDDGRGLVLPGYKYLGPFNGLDKGEPVNAADAAALEHDKAYDQQLQAGDNPYLRYNHADAEFQERLQEDTSFGGNLGRAVFQAKKRVLEPLGLVEEGAKTAPGKKRPVEPSPQRSPDSSTGIGKKGQQPARKRLNFGQTGDSESVPDPQPLGEPPAAPSGVGPNTMAAGGGAPMADNNEGADGVGSSSGNWHCDSTWLGDRVITTSTRTWALPTYNNHLYKQISNGTSGGATNDNTYFGYSTPWGYFDFNRFHCHFSPRDWQRLINNNWGFRPKRLSFKLFNIQVKEVTQNEGTKTIANNLTSTIQVFTDSEYQLPYVLGSAHQGCLPPFPADVFTIPQYGYLTLNNGSQAVGRSSFYCLEYFPSQMLRTGNNFQFTYTFEDVPFHSSYAHSQSLDRLMNPLIDQYLYYLSRIQTTGGTANTQTLGFSQGGPNTMANQAKNWLPGPCYRQQRVSTTTGQNNNSNFAWTAGTKYHLNGRNSLANPGIAMATHKDDEERFFPSNGILIFGKQNAARDNADYSDVMPTSEEEIKTTNPVATEEYGIVADNLQQQNTAPQIGTVNSQGALPGMVWQNRDVYLQGPIWAKIPHTDGNFHPSPLMGGFGLKHPPPQILIKNTPVPADPPTTFNQSRLNSFITQYSTGQVSVEIEWELQKENSKRWNPEIQYTSNYYKSTSVDFAVNTEGVYSEPRPIGTRYLTRNL

SEQ ID NO: 11555 - protein, 738 aa, Artificial Sequence
  source: /note="Description of Artificial Sequence: Synthetic polypeptide"
MAADGYLPDWLEDNLSEGIREWWALKPGAPKPKANQQKQDDGRGLVLPGYKYLGPFNGLDKGEPVNAADAAALEHDKAYDQQLQAGDNPYLRYNHADAEFQERLQEDTSFGGNLGRAVFQAKKRVLEPLGLVEEGAKTAPGKKRPVEPSPQRSPDSSTGIGKKGQQPARKRLNFGQTGDSESVPDPQPLGEPPAAPSGVGPNTMAAGGGAPMADNNEGADGVGSSSGNWHCDSTWLGDRVITTSTRTWALPTYNNHLYKQISNGTSGGAANDNTYFGYSTPWGYFDFNRFHCHFSPRDWQRLINNNWGFRPKRLSFKLFNIQVKEVTQNEGTKTIANNLTSTIQVFTDSEYQLPYVLGSAHQGCLPPFPADVFTIPQYGYLTLNNGSQAVGRSSFYCLEYFPSQMLRTGNNFQFTYTFEDVPFHSSYAHSQSLDRLMNPLIDQYLYYLSRIQTTGGTANTQTLGFSQGGPNTMANQAKNWLPGPCYRQQRVSTTTGQNNNSNFAWTAGTKYHLNGRNSLANPGIAMATHKDDEERFFPSNGILIFGKQNAARDNADYSDVMPTSEEEIKTTNPVATEEYGIVADNLQQQNTAPQIGTVNSQGALPGMVWQNRDVYLQGPIWAKIPHTDGNFHPSPLMGGFGLKHPPPQILIKNTPVPADPPTTFNQSKLNSFITQYSTGQVSVEIEWELQKENSKRWNPEIQYTSNYYKSTSVDFAVNTEGVYSEPRPIGTRYLTRNL

SEQ ID NO: 11556 - protein, 738 aa, Artificial Sequence
  source: /note="Description of Artificial Sequence: Synthetic polypeptide"
MAADGYLPDWLEDNLSEGIREWWALKPGAPKPKANQQKQDDGRGLVLPGYKYLGPFNGLDKGEPVNAADAAALEHDKAYDQQLQAGDNPYLRYNHADAEFQERLQEDTSFGGNLGRAVFQAKKRVLEPLGLVEEGAKTAPGKKRPVEPSPQRSPDSSTGIGKKGQQPARKRLNFGQTGDSESVPDPQPLGEPPAAPSGVGPNTMAAGGGAPMAGNNEGADGVGSSSGNWHCDSTWLGDRVITTSTRTWALPTYNNHLYKQISNGTSGGATNDNTYFGYSTPWGYFDFNRFHCHFSPRDWQRLINNNWGFRPKRLSFKLFNIQVKEVTQNEGTKTIANNLTSTIQVFTDSEYQLPYVLGSAHQGCLPPFPADVFTIPQYGYLTLNNGSQAVGRSSFYCLEYFPSQMLRTGNNFQFTYTFEDVPFHSSYAHSQSLDRLMNPLIDQYLYYLSRIQTTGGTANTQTLGFSQGGPNTMANQAKNWLPGPCYRQQRVSTTTGQNNNSNFAWTAGTKYHLNGRNSLANPGIAMATHKDDEERFFPSNGILIFGKQNAARDNADYSDVMPTSEEEIKTTNPVATEEYGIVADNLQQQNTAPQIGTVNSQGALPGMVWQNRDVYLQGPIWAKIPHTDGNFHPSPLMGGFGLKHPPPQILIKNTPVPADPPTTFNQSKLNSFITQYSTGQVSVEIEWELQKENSKRWNPEIQYTSNYYKSTSVDFAVNTEGVYSEPRPIGTRYLTRNL

SEQ ID NO: 11557 - protein, 738 aa, Artificial Sequence
  source: /note="Description of Artificial Sequence: Synthetic polypeptide"
MAADGYLPDWLEDNLSEGIREWWALKPGAPKPKANQQKQDDGRGLVLPGYKYLGPFNGLDKGEPVNAADAAALEHDKAYDQQLQAGDNPYLRYNHADAEFQERLQEDTSFGGNLGRAVFQAKKRVLEPLGLVEEGAKTAPGKKRPVEPSPQRSPDSSTGIGRKGQQPARKRLNFGQTGDSESVPDPQPLGEPPAAPSGVGPNTMAAGGGAPMADNNEGADGVGSSSGNWHCDSTWLGDRVITTSTRTWALPTYNNHLYKQISNGTSGGATNDNTYFGYSTPWGYFDFNRFHCHFSPRDWQRLINNNWGFRPKRLSFKLFNIQVKEVTQNEGTKTIANNLTSTIQVFTDSEYQLPYVLGSAHQGCLPPFPADVFTIPQYGYLTLNNGSQAVGRSSFYCLEYFPSQMLRTGNNFQFTYTFEDVPFHSSYAHSQSLDRLMNPLIDQYLYYLSRIQTTGGTANTQTLGFSQGGPNTMANQAKNWLPGPCYRQQRVSTTTGQNNNSNFAWTAGTKYHLNGRNSLANPGIAMATHKDDEERFFPSNGILIFGKQNAARDNADYSDVMPTSEEEIKTTNPVATEEYGIVADNLQQQNTAPQIGTVNSQGALPGMVWQNRDVYLQGPIWAKIPHTDGNFHPSPLMGGFGLKHPPPQILIKNTPVPADPPTTFNQSKLNSFITQYSTGQVSVEIEWELQKENSKRWNPEIQYTSNYYKSTSVDFAVNTEGVYSEPRPIGTRYLTRNL

SEQ ID NO: 11558 - protein, 738 aa, Artificial Sequence
  source: /note="Description of Artificial Sequence: Synthetic polypeptide"
MAADGYLPDWLEDNLSEGIREWWALKPGAPKPKANQQKQDDGRGLVLPGYKYLGPFNGLDKGEPVNAADAAALEHDKAYDQQLQAGDNPYLRYNHADAEFQERLQEDTSFGGNLGRAVFQAKKRVLEPLGLVEEGAKTAPGKKRPVEPSPQRSPDSSTGIGKKGQQPARKRLNFGQTGDSESVPDPQPLGEPPAAPSGVGPNTMAAGGGAPMADNNEGADGVGSSSGNWHCDSTWLGDRVITTSTRTWALPTYNNHLYKQISNGTSGGATNDNTYFGYGTPWGYFDFNRFHCHFSPRDWQRLINNNWGFRPKRLSFKLFNIQVKEVTQNEGTKTIANNLTSTIQVFTDSEYQLPYVLGSAHQGCLPPFPADVFTIPQYGYLTLNNGSQAVGRSSFYCLEYFPSQMLRTGNNFQFTYTFEDVPFHSSYAHSQSLDRLMNPLIDQYLYYLSRIQTTGGTANTQTLGFSQGGPNTMANQAKNWLPGPCYRQQRVSTTTGQNNNSNFAWTAGTKYHLNGRNSLANPGIAMATHKDDEERFFPSNGILIFGKQNAARDNADYSDVMPTSEEEIKTTNPVATEEYGIVADNLQQQNTAPQIGTVNSQGALPGMVWQNRDVYLQGPIWAKIPHTDGNFHPSPLMGGFGLKHPPPQILIKNTPVPADPPTTFNQSKLNSFITQYSTGQVSVEIEWELQKENSKRWNPEIQYTSNYYKSTSVDFAVNTEGVYSEPRPIGTRYLTRNL

SEQ ID NO: 11559 - protein, 738 aa, Artificial Sequence
  source: /note="Description of Artificial Sequence: Synthetic polypeptide"
MAADGYLPDWLEDNLSEGIREWWALKPGAPKPKANQQKQDDGRGLVLPGYKYLGPFNGLDKGEPVNAADAAALEHDKAYDQQLQAGDNPYLRYNHADAEFQERLQEDTSFGGNLGRAVFQAKKRVLEPLGLVEEGAKTAPGKKRPVEPSPQRSPDSSTGIGKKGQQPARKRLNFGQTGDSESVPDPQPLGEPPAAPSGVGPNTMAAGGGAPMADNNEGADGVGSSSGNWHCDSTWLGDRVITTSTRTWALPTYNNHLYKQISNGTSGGATNDNTYFGYSTPWGYFDFNRFHCHFSPRDWQRLINNNWGFRPKRLSFKLFNIQVKEVTQNEGTKTIANNLTSTIQVFTDSEYQLPYVLGSAHQGCLPPFPADVFTIPQYGYLTLNNGSQAVGRSSFYCLEYFPSQMLRTGNNFQFTYTFEDVPFHSSYAHSQSLDRPMNPLIDQYLYYLSRIQTTGGTANTQTLGFSQGGPNTMANQAKNWLPGPCYRQQRVSTTTGQNNNSNFAWTAGTKYHLNGRNSLANPGIAMATHKDDEERFFPSNGILIFGKQNAARDNADYSDVMPTSEEEIKTTNPVATEEYGIVADNLQQQNTAPQIGTVNSQGALPGMVWQNRDVYLQGPIWAKIPHTDGNFHPSPLMGGFGLKHPPPQILIKNTPVPADPPTTFNQSKLNSFITQYSTGQVSVEIEWELQKENSKRWNPEIQYTSNYYKSTSVDFAVNTEGVYSEPRPIGTRYLTRNL

SEQ ID NO: 11560 - protein, 738 aa, Artificial Sequence
  source: /note="Description of Artificial Sequence: Synthetic polypeptide"
MAADGYLPDWLEDNLSEGIREWWALKPGAPKPKANQQKQDDGRGLVLPGYKYLGPFNGLDKGEPVNAADAAALEHDKAYDQQLQAGDNPYLRYNHADAEFQERLQEDTSFGGNLGRAVFQAKKRVLEPLGLVEEGAKTAPGKKRPVEPSPQRSPDSSTGIGKKGQQPARKRLNFGQTGDSESVPDPQPLGEPPAAPSGVGPNTMAAGGGAPMADNNEGADGVGSSSGNWHCDSTWLGDRVITTSTRTWALPTYNNHLYKQISNGTSGGATNDNTYFGYSTPWGYFDFNRFHCHFSPRDWQRLINNNWGFRPKRLSLKLFNIQVKEVTQNEGTKTIANNLTSTIQVFTDSEYQLPYVLGSAHQGCLPPFPADVFTIPQYGYLTLNNGSQAVGRSSFYCLEYFPSQMLRTGNNFQFTYTFEDVPFHSSYAHSQSLDRLMNPLIDQYLYYLSRIQTTGGTANTQTLGFSQGGPNTMANQAKNWLPGPCYRQQRVSTTTGQNNNSNFAWTAGTKYHLNGRNSLANPGIAMATHKDDEERFFPSNGILIFGKQNAARDNADYSDVMPTSEEEIKTTNPVATEEYGIVADNLQQQNTAPQIGTVNSQGALPGMVWQNRDVYLQGPIWAKIPHTDGNFHPSPLMGGFGLKHPPPQILIKNTPVPADPPTTFNQSKLNSFITQYSTGQVSVEIEWELQKENSKRWNPEIQYTSNYYKSTSVDFAVNTEGVYSEPRPIGTRYLTRNL

SEQ ID NO: 11561 - protein, 738 aa, Artificial Sequence
  source: /note="Description of Artificial Sequence: Synthetic polypeptide"
MAADGYLPDWLEDNLSEGIREWWALKPGAPKPKANQQKQDDGRGLVLPGYKYLGPFNGLDKGEPVNAADAAALEHDKAYDQQLQAGDNPYLRYNHADAEFQERLQEDTSFGGNLGRAVFQAKKRVLEPLGLVEEGAKTAPGKKRPVEPSPQRSPDSSTGIGKKGQQPARKRLNFGQTGDSESVPDPQPLGEPPAAPSGVGPNTMAAGGGAPMADNNEGADGVGSSSGNWHCDSTWLGDRVITTSTRTWALPTYNNHLYKQISNGTSGGATNDNTYFGYSTPWGYFDFNRFHCHFSPRDWQRLINNNWGFRPKRLSFKLFNIQVKEVTQNEGTKTIANNLTSTIQVFTDSEYQLPYVLGSAHQGCLPPFPADVFTIPQYGYLTLNNGSQAVGRSSFYCLEYFPSQMLRTGNNFQFTYTFEDVPFHSSYAHSQSLDRLMNPLIDQYLYYLSRIQTTGGTANTQTLGFSQGGPNTMANQAKNWLPGPCYRQQRVSTTTGQNNNSNFAWTAGTKYHLNGRNSLANPGIAMATHKDDEERFFPSNGILIFGKQNAARDNADYSDVTPTSEEEIKTTNPVATEEYGIVADNLQQQNTAPQIGTVNSQGALPGMVWQNRDVYLQGPIWAKIPHTDGNFHPSPLMGGFGLKHPPPQILIKNTPVPADPPTTFNQSKLNSFITQYSTGQVSVEIEWELQKENSKRWNPEIQYTSNYYKSTSVDFAVNTEGVYSEPRPIGTRYLTRNL

SEQ ID NO: 11562 - protein, 738 aa, Artificial Sequence
  source: /note="Description of Artificial Sequence: Synthetic polypeptide"
MAADGYLPDWLEDNLSEGIREWWALKPGAPKPKANQQKQDDGRGLVLPGYKYLGPFNGLDKGEPVNAADAAALEHDKAYDQQLQAGDNPYLRYNHADAEFQERLQEDTSFGGNLGRAVFQAKKRVLEPLGLVEEGAKTAPGKKRPVEPSPQRSPDSSTGIGKKGQQPARKRLNFGQTGDSESVPDPQPLGEPPAAPSGVGPNTMAAGGGAPMADNNEGADGVGSSSGNWHCDSTWLGDRVITTSTRTWALPTYNNHLYKQISNGTSGGATNDNTYFGYSTPWGYFDFNRFHCHFSPRDWQRLINNNWGFRPKRLSFKLFNIQVKEVTQNEGTKTIANNLTSTIQVFTDSEYQLPYVLGSAHQGCLPPFPADVFTIPQYGYLTLNNGSQAVGRSSFYCLEYFPSQMLRTGNNFQFTYTFEDVPFHSSYAHSQSLDRLMNPLIDQYLYYLSRIQTTGGTANTQTLGFSQGGPNTMANQAKNWLPGPCYRQQRVSTTTGQNNNSNFAWTAGTKYHLNGRNSLANPGIAMATHKDDEERFFPSNGILIFGKQNAARDNADYSDVMPTSEEEIKTTNPVATEEYGIVADNLQQQNTAPQIGTVNSQGALPGMVRQNRDVYLQGPIWAKIPHTDGNFHPSPLMGGFGLKHPPPQILIKNTPVPADPPTTFNQSKLNSFITQYSTGQVSVEIEWELQKENSKRWNPEIQYTSNYYKSTSVDFAVNTEGVYSEPRPIGTRYLTRNL

SEQ ID NO: 11563 - protein, 738 aa, Artificial Sequence
  source: /note="Description of Artificial Sequence: Synthetic polypeptide"
MAADGYLPDWLEDNLSEGIREWWALKPGAPKPKANQQKQDDGRGLVLPGYKYLGPFNGLDKGEPVNAADAAALEHDKAYDQQLQAGDNPYLRYNHADAEFQERLQEDTSFGGNLGRAVFQAKKRVLEPLGLVEEGAKTAPGKKRPVEPSPQRSPDSSTDIGKKGQQPARKRLNFGQTGDSESVPDPQPLGEPPAAPSGVGPNTMAAGGGAPMADNNEGADGVGSSSGNWHCDSTWLGDRVITTSTRTWALPTYNNHLYKQISNGTSGGATNDNTYFGYSTPWGYFDFNRFHCHFSPRDWQRLINNNWGFRPKRLSFKLFNIQVKEVTQNEGTKTIANNLTSTIQVFTDSEYQLPYVLGSAHQGCLPPFPADVFTIPQYGYLTLNNGSQAVGRSSFYCLEYFPSQMLRTGNNFQFTYTFEDVPFHSSYAHSQSLDRLMNPLIDQYLYYLSRIQTTGGTANTQTLGFSQGGPNTMANQAKNWLPGPCYRQQRVSTTTGQNNNSNFAWTAGTKYHLNGRNSLANPGIAMATHKDDEERFFPSNGILIFGKQNAARDNADYSDVMPTSEEEIKTTNPVATEEYGIVADNLQQQNTAPQIGTVNSQGALPGMVWQNRDVYLQGPIWAKIPHTDGNFHPSPLMGGFGLKHPPPQILIKNTPVPADPPTTFNQSKLNSFITQYSTGQVSVEIEWELQKENSKRWNPEIQYTSNYYKSTSVDFAVNTEGVYSEPRPIGTRYLTRNL

SEQ ID NO: 11564 - protein, 738 aa, Artificial Sequence
  source: /note="Description of Artificial Sequence: Synthetic polypeptide"
MAADGYLPDWLEDNLSEGIREWWALKPGAPKPKANQQKQDDGRGLVLPGYKYLGPFNGLDKGEPVNAADAAALEHDKAYDQQLQAGDNPYLRYNHADAEFQERLQEDTSFGGNLGRAVFQAKKRVLEPLGLVEEGAKTAPGKKRPVEPSPQRSPDSSTGIGKKGQQPAGKRLNFGQTGDSESVPDPQPLGEPPAAPSGVGPNTMAAGGGAPMADNNEGADGVGSSSGNWHCDSTWLGDRVITTSTRTWALPTYNNHLYKQISNGTSGGATNDNTYFGYSTPWGYFDFNRFHCHFSPRDWQRLINNNWGFRPKRLSFKLFNIQVKEVTQNEGTKTIANNLTSTIQVFTDSEYQLPYVLGSAHQGCLPPFPADVFTIPQYGYLTLNNGSQAVGRSSFYCLEYFPSQMLRTGNNFQFTYTFEDVPFHSSYAHSQSLDRLMNPLIDQYLYYLSRIQTTGGTANTQTLGFSQGGPNTMANQAKNWLPGPCYRQQRVSTTTGQNNNSNFAWTAGTKYHLNGRNSLANPGIAMATHKDDEERFFPSNGILIFGKQNAARDNADYSDVMPTSEEEIKTTNPVATEEYGIVADNLQQQNTAPQIGTVNSQGALPGMVWQNRDVYLQGPIWAKIPHTDGNFHPSPLMGGFGLKHPPPQILIKNTPVPADPPTTFNQSKLNSFITQYSTGQVSVEIEWELQKENSKRWNPEIQYTSNYYKSTSVDFAVNTEGVYSEPRPIGTRYLTRNL

SEQ ID NO: 11565 - protein, 738 aa, Artificial Sequence
  source: /note="Description of Artificial Sequence: Synthetic polypeptide"
MAADGYLPDWLEDNLSEGIREWWALKPGAPKPKANQQKQDDGRGLVLPGYKYLGPFNGLDKGEPVNAADAAALEHDKAYDQQLQAGDNPYLRYNHADAEFQERLQEDTSFGGNLGRAVFQAKKRVLEPLGLVEEGAKTAPGKKRPVEPSPQRSPDSSTGIGKKGQQPARKRLNFGQTGDSESVPDPQPLGEPPAAPSGVGPNTMAAGGGAPMADNNEGADGVGSSSGNWHCDSTWLGDRVITTSTRTWALPTYNNHLYKQISNGTSGGATNDNTYFGYSTPWGYFDFNRFHCHFSPRDWQRLINNNWGFRPKRLSFKLFNIQVKEVTQNEGTKTIANNLTSTIQVFTDSEYQLPYVLGSAHQGCLPPFPADVFTIPQYGYLTLNNGSQAVGRPSFYCLEYFPSQMLRTGNNFQFTYTFEDVPFHSSYAHSQSLDRLMNPLIDQYLYYLSRIQTTGGTANTQTLGFSQGGPNTMANQAKNWLPGPCYRQQRVSTTTGQNNNSNFAWTAGTKYHLNGRNSLANPGIAMATHKDDEERFFPSNGILIFGKQNAARDNADYSDVMPTSEEEIKTTNPVATEEYGIVADNLQQQNTAPQIGTVNSQGALPGMVWQNRDVYLQGPIWAKIPHTDGNFHPSPLMGGFGLKHPPPQILIKNTPVPADPPTTFNQSKLNSFITQYSTGQVSVEIEWELQKENSKRWNPEIQYTSNYYKSTSVDFAVNTEGVYSEPRPIGTRYLTRNL

SEQ ID NO: 11566 - protein, 738 aa, Artificial Sequence
  source: /note="Description of Artificial Sequence: Synthetic polypeptide"
MAADGYLPDWLEDNLSEGIREWWALKPGAPKPKANQQKQDDGRGLVLPGYKYLGPFNGLDKGEPVNAADAAALEHDKAYDQQLQAGDNPYLRYNHADAEFQERLQEDTSFGGNLGRAVFQAKKRVLEPLGLVEEGAKTAPGKKRPVEPSPQRSPDSSTGIGKKGQQPARKRLNFGQTGDSESVPDPQPLGEPPAAPSGVGPNTMAAGGGAPMADNNEGADGVGSSSGNWHCDSTWLGDRVITTSTRTWALPTYNNHLYKQISNGTSGGATNDNTYFGYSTPWGYFDFNRFHCHFSPRDWQRLINNNWGFRPKRLSFKLFNIQVKAVTQNEGTKTIANNLTSTIQVFTDSEYQLPYVLGSAHQGCLPPFPADVFTIPQYGYLTLNNGSQAVGRSSFYCLEYFPSQMLRTGNNFQFTYTFEDVPFHSSYAHSQSLDRLMNPLIDQYLYYLSRIQTTGGTANTQTLGFSQGGPNTMANQAKNWLPGPCYRQQRVSTTTGQNNNSNFAWTAGTKYHLNGRNSLANPGIAMATHKDDEERFFPSNGILIFGKQNAARDNADYSDVMPTSEEEIKTTNPVATEEYGIVADNLQQQNTAPQIGTVNSQGALPGMVWQNRDVYLQGPIWAKIPHTDGNFHPSPLMGGFGLKHPPPQILIKNTPVPADPPTTFNQSKLNSFITQYSTGQVSVEIEWELQKENSKRWNPEIQYTSNYYKSTSVDFAVNTEGVYSEPRPIGTRYLTRNL

SEQ ID NO: 11567 - protein, 738 aa, Artificial Sequence
  source: /note="Description of Artificial Sequence: Synthetic polypeptide"
MAADGYLPDWLEDNLSEGIREWWALKPGAPKPKANQQKQDDGRGLVLPGYKYLGPFNGLDKGEPVNAADAAALEHDKAYDQQLQAGDNPYLRYNHADAEFQERLQEDTSFGGNLGRAVFQAKKRVLEPLGLVEEGAKTAPGKKRPVEPSPQRSPDSSTGIGKKGQQPARKRLNFGQTGDSESVPDPQPLGEPPAAPSGVGPNTMAAGGGAPMADNNEGADGVGSSSGNWHCDSTWLGDRVITTSTRTWALPTYNNHLYKQISNGTSGGATNDNTYFGYSTPWGYFDFNRFHCHFSPRDWQRLINNNWGFRPKRLSFKLFNIQVKEVTQNEGTKTIANNLTSTIQVFTDSEYQLPYVLGSAHQGCLPPFPADVFTIPQYGYLTLNNGSQAVGRSSFYCLEYFPSQMLRTGNNFQFTYTFEDVPFHSSYAHSQSLDRLMNPLIDQYLYYLSRIQTTGGTANTQTLGFSQGGPNTMANQAKNWLPGPCYRQQRVSTTTGQNNNSNFAWTAGTKYHLNGRNSLANPGIAMATHKDDEERFFPSNGILIFGKQNAARDNADYSDVMPTSEEEIKTTNPVATEEYGIVADNLQQQNTAPQIGTVNSQGALPGMVWQNRDVYLQGPIWAKIPHTDGNFHPSPLMGGFGLKHPPPQILIKNTPVPADPPTAFNQSKLNSFITQYSTGQVSVEIEWELQKENSKRWNPEIQYTSNYYKSTSVDFAVNTEGVYSEPRPIGTRYLTRNL

SEQ ID NO: 11568 - protein, 738 aa, Artificial Sequence
  source: /note="Description of Artificial Sequence: Synthetic polypeptide"
MAADGYLPDWLEDNLSEGIREWWALKPGAPKPKANQQKQDDGRGLVLPGYKYLGPFNGLDKGEPVNAADAAALEHDKAYDQQLQAGDNPYLRYNHADAEFQERLQEDTSFGGNLGRAVFQAKKRVLEPLGLVEEGAKTAPGKKRPVEPSPQRSPDSSTGIGKKGQQPARKRLNFGQTGDSESVPDPQPLGEPPAAPSGVGPNTMAAGGGAPMADNNEGADGVGSSSGNWHCDSTWLGDRVITTSTRTWALPTYNNHLYKQISNGTSGGATNDNTYFGYSTPWGYFDFNRFRCHFSPRDWQRLINNNWGFRPKRLSFKLFNIQVKEVTQNEGTKTIANNLTSTIQVFTDSEYQLPYVLGSAHQGCLPPFPADVFTIPQYGYLTLNNGSQAVGRSSFYCLEYFPSQMLRTGNNFQFTYTFEDVPFHSSYAHSQSLDRLMNPLIDQYLYYLSRIQTTGGTANTQTLGFSQGGPNTMANQAKNWLPGPCYRQQRVSTTTGQNNNSNFAWTAGTKYHLNGRNSLANPGIAMATHKDDEERFFPSNGILIFGKQNAARDNADYSDVMPTSEEEIKTTNPVATEEYGIVADNLQQQNTAPQIGTVNSQGALPGMVWQNRDVYLQGPIWAKIPHTDGNFHPSPLMGGFGLKHPPPQILIKNTPVPADPPTTFNQSKLNSFITQYSTGQVSVEIEWELQKENSKRWNPEIQYTSNYYKSTSVDFAVNTEGVYSEPRPIGTRYLTRNL

SEQ ID NO: 11569 - protein, 738 aa, Artificial Sequence
  source: /note="Description of Artificial Sequence: Synthetic polypeptide"
MAADGYLPDWLEDNLSEGIREWWALKPGAPKPKANQQKQDDGRGLVLPGYKYLGPFNGLDKGEPVNAADAAALEHDKAYDQQLQAGDNPYLRYNHADAEFQERLQEDTSFGGNLGRAVFQAKKRVLEPLGLVEEGAKTAPGKKRPVEPSPQRSPDSSTGIGKKGQQPARKRLNFGQTGDSESVPDPQPLGEPPAAPSGVGPNTMAAGGGAPMADNNEGADGVGSSSGNWHCDSTWLGDRVITTSTRTWALPTYNNHLYKQISNGTSGGATNDNTYFGYSTPWGYFDFNRFHCHFSPRDWQRLINNNWGFRPKRLSFKLFNIQVKEVTQNEGTKTIANNLTSTIQVFTDSEYQLPYVLGSAHQGCLPPFPADVFTIPQYGYLTLNNGSQAVGRSSFYCLEYFPSQMLRTGNNFQFTYTLEDVPFHSSYAHSQSLDRLMNPLIDQYLYYLSRIQTTGGTANTQTLGFSQGGPNTMANQAKNWLPGPCYRQQRVSTTTGQNNNSNFAWTAGTKYHLNGRNSLANPGIAMATHKDDEERFFPSNGILIFGKQNAARDNADYSDVMPTSEEEIKTTNPVATEEYGIVADNLQQQNTAPQIGTVNSQGALPGMVWQNRDVYLQGPIWAKIPHTDGNFHPSPLMGGFGLKHPPPQILIKNTPVPADPPTTFNQSKLNSFITQYSTGQVSVEIEWELQKENSKRWNPEIQYTSNYYKSTSVDFAVNTEGVYSEPRPIGTRYLTRNL

SEQ ID NO: 11570 - protein, 738 aa, Artificial Sequence
  source: /note="Description of Artificial Sequence: Synthetic polypeptide"
MAADGYLPDWLEDNLSEGIREWWALKPGAPKPKANQQKQDDGRGLVLPGYKYLGPFNGLDKGEPVNAADAAALEHDKAYDQQLQAGDNPYLRYNHADAEFQERLQEDTSFGGNLGRAVFQAKKRVLEPLGLVEEGAKTAPGKKRPVEPSPQRSPDSSTGIGKKGQQPARKRLNFGQTGDSESVPDPQPLGEPPAAPSGVGPNTMAAGGGAPMADNNEGADGVGSSSGNWHCDSTWLGDRVITTSTRTWALPTYNNHLYKQISNGTSGGATNDNTYFGYSTPWGYFDFNRFHCHFSPRDWQRLINNNWGFRPKRLSFKLFNIQVKEVTQNEGTKTIANNLTSTIQVFTDSEYQLPYVLGSAHQGCLPPFPADVFTIPQYGYLTLNNGSQAVGRSSFYCLEYFPSQMLRTGNNFQFTYTFEDVPFHSSYAHSQSLDRLMNPLIDQYLYYLSRIQTTGGTANTQTLGFSQGGPNTMANQAKNWLPGPCYRQQRVSTTTGQNNNSNFAWTAGTKYHLNGRNSLANPGIAMATHKDDEERFFPSNGILIFGKQNAARDNADYSDVMPTSEEEIKTTNPVATEEYGIVADNLQQQSTAPQIGTVNSQGALPGMVWQNRDVYLQGPIWAKIPHTDGNFHPSPLMGGFGLKHPPPQILIKNTPVPADPPTTFNQSKLNSFITQYSTGQVSVEIEWELQKENSKRWNPEIQYTSNYYKSTSVDFAVNTEGVYSEPRPIGTRYLTRNL

SEQ ID NO: 11571 - protein, 738 aa, Artificial Sequence
  source: /note="Description of Artificial Sequence: Synthetic polypeptide"
MAADGYLPDWLEDNLSEGIREWWALKPGAPKPKANQQKQDDGRGLVLPGYKYLGPFNGLDKGEPVNAADAAALEHDKAYDQQLQAGDNPYLRYNHADAEFQERLQEDTSFGGNLGRAVFQAKKRVLEPLGLVEEGAKTAPGKKRPVEPSPQRSPDSSTGIGKKGQQPARKRLNFGQTGDSESVPDPQPLGEPPAAPSGVGPNTMAAGGGAPMADNNEGADGVGSSSGNWHCDSTWLGDRVITTSTRTWALPTYNNHLYKQISNGTSGGATNDNTYFGYSTPWGYFDFNRFHCHFSPRDWQRLINNNWGFRPKRLSFKLFNIQVKEVTQNEGTKTIANNLTSTIQVFTDSEYQLPYVLGSAHQGCLPPFPADVFTIPQYGYLTLNNGSQAVGRSSFYCLEYFPSQMLRTGNNFQFTYTFEDVPFHSSYAHSQSLDRLMNPLIDQYLYYLSRIQTTGGTANTQTLGFSQGGPNTMANQAKNWLPGPCYRQQRVSTTTGQNNNSNFAWTAGTKYHLNGRNSLANPGIAMATHKDDEERFFPSNGILIFGKQNAARDNADYSDVMPTSEEEIKTTNPVATEEYGIVADNLQQQNTAPQIGTVSSQGALPGMVWQNRDVYLQGPIWAKIPHTDGNFHPSPLMGGFGLKHPPPQILIKNTPVPADPPTTFNQSKLNSFITQYSTGQVSVEIEWELQKENSKRWNPEIQYTSNYYKSTSVDFAVNTEGVYSEPRPIGTRYLTRNL

SEQ ID NO: 11572 - protein, 738 aa, Artificial Sequence
  source: /note="Description of Artificial Sequence: Synthetic polypeptide"
MAADGYLPDWLEDNLSEGIREWWALKPGAPKPKANQQKQDDGRGLVLPGYKYLGPFNGLDKGEPVNAADAAALEHDKAYDQQLQAGDNPYLRYNHADAEFQERLQEDTSFGGNLGRAVFQAKKRVLEPLGLVEEGAKTAPGKKRPVEPSPQRSPDSSTGIGKKGQQPARKRLNFGQTGDSESVPDPQPLGEPPAAPSGVGPNTMAAGGGAPMADNNEGADGVGSSSGNWHCDSTWLGDRVITTSTRTWALPTYNNHLYKQISNGTSGGATNDNTYFGYSTPWGYFDFNRFHCHFSPRDWQRLINNNWGFRPKRLSFKLFNIQVKEVTQNEGTKTIANNLTSTIQVFTDSEYQLPYVLGSAHQGCLPPFPADVFTIPQYGYLTLNNGSQAVGRSSFYCLEYFPSQMLRTGNNFQFTYTFEDVPFHSSYAHSQSLDRLMNPLIDQYLYYLSRIQTTGGTANTQTLGFSQGGPNTMANQAKNWLPGPCYRQQRVSTTTGQNNNSNFAWTAGTKYHLNGRNSLANPGIAMATHKDDEERFFPSNGILIFGKQSAARDNADYSDVMPTSEEEIKTTNPVATEEYGIVADNLQQQNTAPQIGTVNSQGALPGMVWQNRDVYLQGPIWAKIPHTDGNFHPSPLMGGFGLKHPPPQILIKNTPVPADPPTTFNQSKLNSFITQYSTGQVSVEIEWELQKENSKRWNPEIQYTSNYYKSTSVDFAVNTEGVYSEPRPIGTRYLTRNL

SEQ ID NO: 11573 - protein, 738 aa, Artificial Sequence
  source: /note="Description of Artificial Sequence: Synthetic polypeptide"
MAADGYLPDWLEDNLSEGIREWWALKPGAPKPKANQQKQDDGRGLVLPGYKYLGPFNGLDKGEPVNAADAAALEHDKAYDQQLQAGDNPYLRYNHADAEFQERLQEDTSFGGNLGRAVFQAKKRVLEPLGLVEEGAKTAPGKKRPVEPSPQRSPDSSTGIGKKGQQPARKRLNFGQTGDSESVPDPQPLGEPPAAPSGVGPNTMAAGGGAPMADNNEGADGVGSSSGNWHCDSTWLGDRVITTSTRTWALPTYNNHLYKQISNGTSGGATNDNTYFGYSTPWGYFDFNRFHCHFSPRDWQRLINNNWGFRPKRLSFKLFNIQVKEVTQNEGTKTIANNLTSTIQVFTDSEYQLPYVLGSAHQGCLPPFPADVFTIPQYGYLTLNNGSQAVGRSSFYCLEYFPSQMLRTGNNFQFTYTFEDVPFHSSYAHSQSLDRLMNPLIDQYLYYLSRIQTAGGTANTQTLGFSQGGPNTMANQAKNWLPGPCYRQQRVSTTTGQNNNSNFAWTAGTKYHLNGRNSLANPGIAMATHKDDEERFFPSNGILIFGKQNAARDNADYSDVMPTSEEEIKTTNPVATEEYGIVADNLQQQNTAPQIGTVNSQGALPGMVWQNRDVYLQGPIWAKIPHTDGNFHPSPLMGGFGLKHPPPQILIKNTPVPADPPTTFNQSKLNSFITQYSTGQVSVEIEWELQKENSKRWNPEIQYTSNYYKSTSVDFAVNTEGVYSEPRPIGTRYLTRNL

SEQ ID NO: 11574 - protein, 738 aa, Artificial Sequence
  source: /note="Description of Artificial Sequence: Synthetic polypeptide"
MAADGYLPDWLEDNLSEGIREWWALKPGAPKPKANQQKQDDGRGLVLPGYKYLGPFNGLDKGEPVNAADAAALEHDKAYDQQLQAGDNPYLRYNHADAEFQERLQEDTSFGGNLGRAVFQAKKRVLEPLGLVEEGAKTAPGKKRPVEPSPQRSPDSSTGIGKKGQQPARKRLNFGQTGDSESVPDPQPLGEPPAAPSGVGPNTMAAGGGAPMADNNEGADGVGSSSGNWHCDSTWLGDRVITTSTRTWALPTYNNHLYKQISNGTSGGATNDNTYFGYSTPWGYFDFNRFHCHFSPRDWQRLINNNWGFRPKRLSFKLFNIQVKEVTQNEGTKTIANNLTSTIQVFTDSEYQLPYVLGSAHQGCLPPFPADVFTIPQYGYLTLNNGSQAVGRSSFYCLEYFPSQMLRTGNNFQFTYTFEDVPFHSSYAHSQNLDRLMNPLIDQYLYYLSRIQTTGGTANTQTLGFSQGGPNTMANQAKNWLPGPCYRQQRVSTTTGQNNNSNFAWTAGTKYHLNGRNSLANPGIAMATHKDDEERFFPSNGILIFGKQNAARDNADYSDVMPTSEEEIKTTNPVATEEYGIVADNLQQQNTAPQIGTVNSQGALPGMVWQNRDVYLQGPIWAKIPHTDGNFHPSPLMGGFGLKHPPPQILIKNTPVPADPPTTFNQSKLNSFITQYSTGQVSVEIEWELQKENSKRWNPEIQYTSNYYKSTSVDFAVNTEGVYSEPRPIGTRYLTRNL

SEQ ID NO: 11575 - protein, 738 aa, Artificial Sequence
  source: /note="Description of Artificial Sequence: Synthetic polypeptide"
MAADGYLPDWLEDNLSEGIREWWALKPGAPKPKANQQKQDDGRGLVLPGYKYLGPFNGLDKGEPVNAADAAALEHDKAYDQQLQAGDNPYLRYNHADAEFQERLQEDTSFGGNLGRAVFQAKKRVLEPLGLVEEGAKTAPGKKRPVEPSPQRSPDSSTGIGKKGQQPARKRLNFGQTGDSESVPDPQPLGEPPAAPSGVGPNTMAAGGGAPMADNNEGADGVGSSSGNWHCDSTWLGDRVITTSTRTWALPTYNNHLYKQISNGTSGGATNDNTYFGYSTPWGYFDFNRFHCHFSPRDWQRLINNNWGFRPKRLSFKLFNIQVKAVTQNEGTKTIANNLTSTIQVFTDSEYQLPYVLGSAHQGCLPPFPADVFTIPQYGYLTLNNGSQAVGRSSFYCLEYFPSQMLRTGNNFQFTYTFEDVPFHSSYAHSQSLDRLMNPLIDQYLYYLSRIQTTGGTANTQTLGFSQGGPNTMANQAKNWLPGPCYRQQRVSTTTGQNNNSNFAWTAGTKYHLNGRNSLANPSIAMATHKDDEERFFPSNGILIFGKQNAARDNADYSDVMPTSEEEIKTTNPVATEEYGIVADNLQQQNTAPQIGTVNSQGALPGMVWQNRDVYLQGPIWAKIPHTDGNFHPSPLMGGFGLKHPPPQILIKNTPVPADPPTTFNQSKLNSFITQYSTGQVSVEIEWELQKENSKRWNPEIQYTSNYYKSTSVDFAVNTEGVYSEPRPIGTRYLTRNL

SEQ ID NO: 11576 - protein, 738 aa, Artificial Sequence
  source: /note="Description of Artificial Sequence: Synthetic polypeptide"
MAADGYLPDWLEDNLSEGIREWWALKPGAPKPKANQQKQDDGRGLVLPGYKYLGPFNGLDKGEPVNAADAAALEHDKAYDQQLQAGDNPYLRYNHADAEFQERLQEDTSFGGNLGRAVFQAKKRVLEPLGLVEEGAKTAPGKKRPVEPSPQRSPDSSTGIGKKGQQPARKRLNFGQTGDSESVPDPQPLGEPPAAPSGVGPNTMAAGGGAPMADNNEGADGVGSSSGNWHCDSTWLGDRVITTSTRTWALPTYNNHLYKQISNGTSGGATNDNTYFGYSTPWGYFDFNRFHCHFSPRDWQRLINNNWGFRPKRLSFKLFNIQVKEVTQNEGTKTIANNLTSTIQVFTDSEYQLPYVLGSAHQGCLPPFPADVFTIPQYGYLTLNNGSQAVGRSSFYCLEYFPSQMLRTGNNFQFTYTFEDVPFHSSYAHSQSLDRLMNPLIDQYLYYLSRIQTTGGTANTQTLGFSQGGPNTMANQAKNWLPGPCYRQQRVSTTTGQNNNSNFAWTAGTKYHLNGRNSLANPGIAMATHKDDEERFFPSNGILIFGKQNAARDNADYSDVMPTSEEEIKTTNPVATEEYDIVADNLQQQNTAPQIGTVNSQGALPGMVWQNRDVYLQGPIWAKIPHTDGNFHPSPLMGGFGLKHPPPQILIKNTPVPADPPTTFNQSKLNSFITQYSTGQVSVEIEWELQKENSKRWNPEIQYTSNYYKSTSVDFAVNTEGVYSEPRPIGTRYLTRNL

SEQ ID NO: 11577 - protein, 738 aa, Artificial Sequence
  source: /note="Description of Artificial Sequence: Synthetic polypeptide"
MAADGYLPDWLEDNLSEGIREWWALKPGAPKPKANQQKQDDGRGLVLPGYKYLGPFNGLDKGEPVNAADAAALEHDKAYDQQLQAGDNPYLRYNHADAEFQERLQEDTSFGGNLGRAVFQAKKRVLEPLGLVEEGAKTAPGKKRPVEPSPQRSPDSSTGIGKKGQQPARKRLNFGQTGDSESVPDPQPLGEPPAAPSGVGPNTMAAGGGAPMADNNEGADGVGSSSGNWHCDSTWLGDRVITTSTRTWALPTYNNHLYKQISNGTSGGATNDNTYFGYSTPWGYFDFNRFHCHFSPRDWQRLINNNWGFRPKRLSFKLFNIQVKEVTQNEGTKTIANNLTSTIQVFTDSEYQLPYVLGSAHQGCLPPFPADVFTIPQYGYLTLNNGSQAVGRSSFYCLEYFPSQMLRTGNNFQFTYTFEDVPFHSSYAHSQSLDRLMNPLIDQYLYYLSRIQTTGGTANTQTPGFSQGGPNTMANQAKNWLPGPCYRQQRVSTTTGQNNNSNFAWTAGTKYHLNGRNSLANPGIAMATHKDDEERFFPSNGILIFGKQNAARDNADYSDVMPTSEEEIKTTNPVATEEYGIVADNLQQQNTAPQIGTVNSQGALPGMVWQNRDVYLQGPIWAKIPHTDGNFHPSPLMGGFGLKHPPPQILIKNTPVPADPPTTFNQSKLNSFITQYSTGQVSVEIEWELQKENSKRWNPEIQYTSNYYKSTSVDFAVNTEGVYSEPRPIGTRYLTRNL

SEQ ID NO: 11578 - protein, 738 aa, Artificial Sequence
  source: /note="Description of Artificial Sequence: Synthetic polypeptide"
MAADGYLPDWLEDNLSEGIREWWALKPGAPKPKANQQKQDDGRGLVLPGYKYLGPFNGLDKGEPVNAADAAALEHDKAYDQQLQAGDNPYLRYNHADAEFQERLQEDTSFGGNLGRAVFQAKKRVLEPLGLVEEGAKTAPGKKRPVEPSPQRSPDSSTGIGKKGQQPARKRLNFGQTGDSESVPDPQPLGEPPAAPSGVGPNTMAAGGGAPMADNNEGADGVGSSSGNWHCDSTWLGDRVITTSTRTWALPTYNNHLYKQISNGTSGGATNDNTYFGYSTPWGYFDFNRFHCHFSPRDWQRLINNNWGFRPKRLSFKLFNIQVKEVTQNEGTKTIANNLTSTIQVFTDSEYQLPYVLGSAHQGCLPPFPADVFTIPQYGYLTLNNGSQAVGRSSSYCLEYFPSQMLRTGNNFQFTYTFEDVPFHSSYAHSQSLDRLMNPLIDQYLYYLSRIQTTGGTANTQTLGFSQGGPNTMANQAKNWLPGPCYRQQRVSTTTGQNNNSNFAWTAGTKYHLNGRNSLANPGIAMATHKDDEERFFPSNGILIFGKQNAARDNADYSDVMPTSEEEIKTTNPVATEEYGIVADNLQQQNTAPQIGTVNSQGALPGMVWQNRDVYLQGPIWAKIPHTDGNFHPSPLMGGFGLKHPPPQILIKNTPVPADPPTTFNQSKLNSFITQYSTGQVSVEIEWELQKENSKRWNPEIQYTSNYYKSTSVDFAVNTEGVYSEPRPIGTRYLTRNL

SEQ ID NO: 11579 - protein, 738 aa, Artificial Sequence
  source: /note="Description of Artificial Sequence: Synthetic polypeptide"
MAADGYLPDWLEDNLSEGIREWWALKPGAPKPKANQQKQDDGRGLVLPGYKYLGPFNGLDKGEPVNAADAAALEHDKAYDQQLQAGDNPYLRYNHADAEFQERLQEDTSFGGNLGRAAFQAKKRVLEPLGLVEEGAKTAPGKKRPVEPSPQRSPDSSTGIGKKGQQPARKRLNFGQTGDSESVPDPQPLGEPPAAPSGVGPNTMAAGGGAPMADNNEGADGVGSSSGNWHCDSTWLGDRVITTSTRTWALPTYNNHLYKQISNGTSGGATNDNTYFGYSTPWGYFDFNRFHCHFSPRDWQRLINNNWGFRPKRLSFKLFNIQVKEVTQNEGTKTIANNLTSTIQVFTDSEYQLPYVLGSAHQGCLPPFPADVFTIPQYGYLTLNNGSQAVGRSSFYCLEYFPSQMLRTGNNFQFTYTFEDVPFHSSYAHSQSLDRLMNPLIDQYLYYLSRIQTTGGTANTQTLGFSQGGPNTMANQAKNWLPGPCYRQQRVSTTTGQNNNSNFAWTAGTKYHLNGRNSLANPGIAMATHKDDEERFFPSNGILIFGKQNAARDNADYSDVMPTSEEEIKTTNPVATEEYGIVADNLQQQNTAPQIGTVNSQGALPGMVWQNRDVYLQGPIWAKIPHTDGNFHPSPLMGGFGLKHPPPQILIKNTPVPADPPTTFNQSKLNSFITQYSTGQVSVEIEWELQKENSKRWNPEIQYTSNYYKSTSVDFAVNTEGVYSEPRPIGTRYLTRNL

SEQ ID NO: 11580 - protein, 738 aa, Artificial Sequence
  source: /note="Description of Artificial Sequence: Synthetic polypeptide"
MAADGYLPDWLEDNLSEGIREWWALKPGAPKPKANQQKQDDGRGLVLPGYKYLGPFNGLDKGEPVNAADAAALEHDKAYDQQLQAGDNPYLRYNHADAEFQERLQEDTSFGGNLGRAVFQAKKRVLEPLGLVEEGAKTAPGKKRPVEPSPQRSPDSSTGIGKKGQQPARKRLNFGQTGDSESVPDPQPLGEPPAAPSGVGPNTMAAGGGAPMADNNEGADGVGSSSGNWHCDSTWLGDRVITTSTRTWALPTYNNHLYKQISNGTSGGATDDNTYFGYSTPWGYFDFNRFHCHFSPRDWQRLINNNWGFRPKRLSFKLFNIQVKEVTQNEGTKTIANNLTSTIQVFTDSEYQLPYVLGSAHQGCLPPFPADVFTIPQYGYLTLNNGSQAVGRSSFYCLEYFPSQMLRTGNNFQFTYTFEDVPFHSSYAHSQSLDRLMNPLIDQYLYYLSRIQTTGGTANTQTLGFSQGGPNTMANQAKNWLPGPCYRQQRVSTTTGQNNNSNFAWTAGTKYHLNGRNSLANPGIAMATHKDDEERFFPSNGILIFGKQNAARDNADYSDVMPTSEEEIKTTNPVATEEYGIVADNLQQQNTAPQIGTVNSQGALPGMVWQNRDVYLQGPIWAKIPHTDGNFHPSPLMGGFGLKHPPPQILIKNTPVPADPPTTFNQSKLNSFITQYSTGQVSVEIEWELQKENSKRWNPEIQYTSNYYKSTSVDFAVNTEGVYSEPRPIGTRYLTRNL

SEQ ID NO: 11581 - protein, 738 aa, Artificial Sequence
  source: /note="Description of Artificial Sequence: Synthetic polypeptide"
MAADGYLPDWLEDNLSEGIREWWALKPGAPKPKANQQKQDDGRGLVLPGYKYLGPFNGLDKGEPVNAADAAALEHDKAYDQQLQAGDNPYLRYNHADAEFQERLQEDTSFGGNLGRAVFQAKKRVLEPLGLVEEGAKTAPGKKRPVEPSPQRSPDSSTGIGKKGQQPARKRLNFGQTGDSESVPDPQPLGEPPAAPSGVGPNTMAAGGGAPMADNNEGADGVGSSSGNWHCDSTWLGDRVITTSTRTWALPTYNNHLYKQISNGTSGGATNDNTYFGYSTPWGYFDFNRFHCHFSPRDWQRLINNNWGFRPKRLSFKLFNIQVKEVTQNEGTKTIANNLTSTIQVFTDSEYQLPYVLGSAHQGCLPPFPADVFTIPQYGYLTLNNGSQAVGRSSFYCLEYFPSQMLRTGNNFQFTYTFEDVPFHSSYAHSQSLDRLMNPLIDQYLYYLSRIQTTGGTANTQTLGFSQGGPNTMANQAKNWLPGPCYRQQRVSTTTGQNNNSNFAWTAGTKYHLNGRNSLANPGIAMATHKDDEERFFPSNGILIFGKQNATRDNADYSDVMPTSEEEIKTTNPVATEEYGIVADNLQQQNTAPQIGTVNSQGALPGMVWQNRDVYLQGPIWAKIPHTDGNFHPSPLMGGFGLKHPPPQILIKNTPVPADPPTTFNQSKLNSFITQYSTGQVSVEIEWELQKENSKRWNPEIQYTSNYYKSTSVDFAVNTEGVYSEPRPIGTRYLTRNL

SEQ ID NO: 11582 - protein, 738 aa, Artificial Sequence
  source: /note="Description of Artificial Sequence: Synthetic polypeptide"
MAADGYLPDWLEDNLSEGIREWWALKPGAPKPKANQQKQDDGRGLVLPGYKYLGPFNGLDKGEPVNAADAAALEHDKAYDQQLQAGDNPYLRYNHADAEFQERLQEDTSFGGNLGRAVFQAKKRVLEPLGLVEEGAKTAPGKKRPVEPSPQRSPDSSTGIGKKGQQPARKRLNFGQTGDSESVPDPQPLGEPPAAPSGVGPNTMAAGGGAPMADNNEGADGVGSSSGNWHCDSTWLGDRVITTSTRTWALPTYNNHLYKQISNGTSGGATNDNTYFGYSTPWGYFDFNRFHCHFSPRDWQRLINNNWGFRPKRLSFKLFNIQVKEVTQNEGTKTIANNLTSTIQVFTDSEYQLPYVLGSAHQGCLPPFPADVFTIPQYGYLTLNNGSQAVGRSSFYCLEYFPSQMLRTGNNFQFTYTFEDVPFHSSYAHSQSLDRLMNPLIDQYLYYLSRIQTTGGTANTQTLGFSQGGPNTMANQAKNWLPGPCYRQQRVSTTTGQNNNSNFAWTAGTKYHLNGRNSLANPGIAMATHKDDEERFFPSNGILIFGKQNAARDNADYSDVMPTSEEEIKTTNPVATEEHGIVADNLQQQNTAPQIGTVNSQGALPGMVWQNRDVYLQGPIWAKIPHTDGNFHPSPLMGGFGLKHPPPQILIKNTPVPADPPTTFNQSKLNSFITQYSTGQVSVEIEWELQKENSKRWNPEIQYTSNYYKSTSVDFAVNTEGVYSEPRPIGTRYLTRNL

SEQ ID NO: 11583 - protein, 738 aa, Artificial Sequence
  source: /note="Description of Artificial Sequence: Synthetic polypeptide"
MAADGYLPDWLEDNLSEGIREWWALKPGAPKPKANQQKQDDGRGLVLPGYKYLGPFNGLDKGEPVNAADAAALEHDKAYDQQLQAGDNPYLRYNHADAEFQERLQEDTSFGGNLGRAVFQAKKRVLEPLGLVEEGAKTAPGKKRPVEPSPQRSPDSSTGIGKKGQQPARKRLNFGQTGDSESVPDPQPLGEPPAAPSGVGPNTMAAGGGAPMADNNEGADGVGSSSGNWHCDSTWLGDRVITTSTRTWALPTYNNHLYKQISNGTSGGATNDNTYFGYSTPWGYFDFNRFHCHFSPRDWQRLINNNWGFRPKRLSFKLFNIQVKEVTQNEGTKTIANNLTSTIQVFTDSEYQLPYVLGSAHQGCLPPFPADVFTIPQYGYLTLNNGSQAVGRSSFYCLEYFPSQMLRTGNNFQFTYTFEDVPFHSSYARSQSLDRLMNPLIDQYLYYLSRIQTTGGTANTQTLGFSQGGPNTMANQAKNWLPGPCYRQQRVSTTTGQNNNSNFAWTAGTKYHLNGRNSLANPGIAMATHKDDEERFFPSNGILIFGKQNAARDNADYSDVMPTSEEEIKTTNPVATEEYGIVADNLQQQNTAPQIGTVNSQGALPGMVWQNRDVYLQGPIWAKIPHTDGNFHPSPLMGGFGLKHPPPQILIKNTPVPADPPTTFNQSKLNSFITQYSTGQVSVEIEWELQKENSKRWNPEIQYTSNYYKSTSVDFAVNTEGVYSEPRPIGTRYLTRNL

SEQ ID NO: 11584 - protein, 738 aa, Artificial Sequence
  source: /note="Description of Artificial Sequence: Synthetic polypeptide"
MAADGYLPDWLEDNLSEGIREWWALKPGAPKPKANQQKQDDGRGLVLPGYKYLGPFNGLDKGEPVNAADAAALEHDKAYDQQLQAGDNPYLRYNHADAEFQERLQEDTSFGGNLGRAVFQAKKRVLEPLGLVEEGAKTAPGKKRPVEPSPQRSPDSSTGIGKKGQQPARKRLNFGQTGDSESVPDPQPLGEPPAAPSGVGPNTMAAGGGAPMADNNEGADGVGSSSGNWHCDSTWLGDRVITTSTRTWALPTYNNHLYKQISNGTSGGATNDNTYFGYSTPWGYFDFNRFHCHFSPRDWQRLINNNWGFRPKRLSFKLFNIQVKEVTQNEGTKTIANNLTSTIQVFTDSEYQLPYVLGSAHQGCLPPLPADVFTIPQYGYLTLNNGSQAVGRSSFYCLEYFPSQMLRTGNNFQFTYTFEDVPFHSSYAHSQSLDRLMNPLIDQYLYYLSRIQTTGGTANTQTLGFSQGGPNTMANQAKNWLPGPCYRQQRVSTTTGQNNNSNFAWTAGTKYHLNGRNSLANPGIAMATHKDDEERFFPSNGILIFGKQNAARDNADYSDVMPTSEEEIKTTNPVATEEYGIVADNLQQQNTAPQIGTVNSQGALPGMVWQNRDVYLQGPIWAKIPHTDGNFHPSPLMGGFGLKHPPPQILIKNTPVPADPPTTFNQSKLNSFITQYSTGQVSVEIEWELQKENSKRWNPEIQYTSNYYKSTSVDFAVNTEGVYSEPRPIGTRYLTRNL

SEQ ID NO: 11585 - protein, 738 aa, Artificial Sequence
  source: /note="Description of Artificial Sequence: Synthetic polypeptide"
MAADGYLPDWLEDNLSEGIREWWALKPGAPKPKANQQKQDDGRGLVLPGYKYLGPFNGLDKGEPVNAADAAALEHDKAYDQQLQAGDNPYLRYNHADAEFQERLQEDTSFGGNLGRAVFQAKKRVLEPLGLVEEGAKTAPGKKRPVEPSPQRSPDSSTGIGKKGQQPARKRLNFGQTGDSESVPDPQPLGEPPAAPSGVGPNTMAAGGGAPMADNNEGADGVGSSSGNWHCDSTWLGDRVITTSTRTRALPTYNNHLYKQISNGTSGGATNDNTYFGYSTPWGYFDFNRFHCHFSPRDWQRLINNNWGFRPKRLSFKLFNIQVKEVTQNEGTKTIANNLTSTIQVFTDSEYQLPYVLGSAHQGCLPPFPADVFTIPQYGYLTLNNGSQAVGRSSFYCLEYFPSQMLRTGNNFQFTYTFEDVPFHSSYAHSQSLDRLMNPLIDQYLYYLSRIQTTGGTANTQTLGFSQGGPNTMANQAKNWLPGPCYRQQRVSTTTGQNNNSNFAWTAGTKYHLNGRNSLANPGIAMATHKDDEERFFPSNGILIFGKQNAARDNADYSDVMPTSEEEIKTTNPVATEEYGIVADNLQQQNTAPQIGTVNSQGALPGMVWQNRDVYLQGPIWAKIPHTDGNFHPSPLMGGFGLKHPPPQILIKNTPVPADPPTTFNQSKLNSFITQYSTGQVSVEIEWELQKENSKRWNPEIQYTSNYYKSTSVDFAVNTEGVYSEPRPIGTRYLTRNL

SEQ ID NO: 11586 - protein, 738 aa, Artificial Sequence
  source: /note="Description of Artificial Sequence: Synthetic polypeptide"
MAADGYLPDWLEDNLSEGIREWWALKPGAPKPKANQQKQDDGRGLVLPGYKYLGPFNGLDKGEPVNAADAAALEHDKAYDQQLQAGDNPYLRYNHADAEFQERLQEDTSFGGNLGRAVFQAKKRVLEPLGLVEEGAKTAPGKKRPVEPSPQRSPDSSTGIGKKGQQPARKRLNFGQTGDSESVPDPQPLGEPPAAPSGVGPNTMAAGGGAPMADNNEGADGVGSSSGNWHCDSTWLGDRVITTSTRTWALPTYNNHLYKQISNGTSGGATNDNTYFGYSTPWGYFDFNRFHCHFSPRDWQRLINNNWGFRPKRLSFKLFNIQVKEVTQNEGTKTIANNLTSTIQVFTDSEYQLPYVLGSAHQGCLPPFPADVFTIPQYGYLTLNNGSQAVGRSSFYCLEYFPSQMLRTGNNFQFTYTFEDVPFHSSYAHSQSLDRLMNPLIDQYLYYLSRIQTTGGTANTQTLGFSQGGPNTMANQAKNWLPGPCYRQQRVSTTTGQNNNSNFAWTAGTKYHLNGRNSLANPGIAMTTHKDDEERFFPSNGILIFGKQNAARDNADYSDVMPTSEEEIKTTNPVATEEYGIVADNLQQQNTAPQIGTVNSQGALPGMVWQNRDVYLQGPIWAKIPHTDGNFHPSPLMGGFGLKHPPPQILIKNTPVPADPPTTFNQSKLNSFITQYSTGQVSVEIEWELQKENSKRWNPEIQYTSNYYKSTSVDFAVNTEGVYSEPRPIGTRYLTRNL

SEQ ID NO: 11587 - protein, 738 aa, Artificial Sequence
  source: /note="Description of Artificial Sequence: Synthetic polypeptide"
MAADGYLPDWLEDNLSEGIREWWALKPGAPKPKANQQKQDDGRGLVLPGYKYLGPFNGLDKGEPVNAADAAALEHDKAYDQQLQAGDNPYLRYNHADAEFQERLQEDTSFGGNLGRAVFQAKKRVLEPLGLVEEGAKTAPGKKRPVEPSPQRSPDSSTGIGKKGQQPARKRLNFGQTGDSESVPDPQPLGEPPAAPSGVGPNTMAAGGGAPMADNNEGADGVGSSSGNWHCDSTWLGDRVITTSTRTWALPTYNNHLYKQISNGTSGGATNDNTYFGYSTPWGYFDFNRFHCHFSPRDWQRLINNNWGFRPKRLSFKLFNIQVKEVTQNEGTKTIANNLTSTIQVFTDSEYQLPYVLGSAHQGCLPPFPADVFTIPQYGYLTLNNGSQAVGRSSFYCLEYFPSQMLRTGNNFQFTYTFEDVPFHSSYAHSQSLDRLMNPLIDQYLYYLSRIQTTGGTANTQTLGFSQGGPNTMANQAKNWLPGPCYRQQRVSTTTGQNNNSNFAWTAGTKYHLNGRNSLANPGIAMATHKDDEERFFPSNGILIFGKQNAARDNADYSDVMPTSEEEIKTTNPVATEEYGIVADNLQQQNTAPQIGTVNSQGVLPGMVWQNRDVYLQGPIWAKIPHTDGNFHPSPLMGGFGLKHPPPQILIKNTPVPADPPTTFNQSKLNSFITQYSTGQVSVEIEWELQKENSKRWNPEIQYTSNYYKSTSVDFAVNTEGVYSEPRPIGTRYLTRNL

SEQ ID NO: 11588 - protein, 738 aa, Artificial Sequence
  source: /note="Description of Artificial Sequence: Synthetic polypeptide"
MAADGYLPDWLEDNLSEGIREWWALKPGAPKPKANQQKQDDGRGLVLPGYKYLGPFNGLDKGEPVNAADAAALEHDKAYDQQLQAGDNPYLRYNHADAEFQERLQEDTSFGGNLGRAVFQAKKRVLEPLGLVEEGAKTAPGKKRPVEPSPQRSPDSSTGIGKKGQQPARKRLNFGQTGDSESVPDPQPLGEPPAAPSGVGPNTMAAGGGAPMADNNEGADGVGSSSGNWHCDSTWLGDRVITTSTRTWALPTYNNHLYKQISNGTSGGATNDNTYFGYSTPWGYFDFNRFHCHFSPRDWQRLVNNNWGFRPKRLSFKLFNIQVKEVTQNEGTKTIANNLTSTIQVFTDSEYQLPYVLGSAHQGCLPPFPADVFTIPQYGYLTLNNGSQAVGRSSFYCLEYFPSQMLRTGNNFQFTYTFEDVPFHSSYAHSQSLDRLMNPLIDQYLYYLSRIQTTGGTANTQTLGFSQGGPNTMANQAKNWLPGPCYRQQRVSTTTGQNNNSNFAWTAGTKYHLNGRNSLANPGIAMATHKDDEERFFPSNGILIFGKQNAARDNADYSDVMPTSEEEIKTTNPVATEEYGIVADNLQQQNTAPQIGTVNSQGALPGMVWQNRDVYLQGPIWAKIPHTDGNFHPSPLMGGFGLKHPPPQILIKNTPVPADPPTTFNQSKLNSFITQYSTGQVSVEIEWELQKENSKRWNPEIQYTSNYYKSTSVDFAVNTEGVYSEPRPIGTRYLTRNL

SEQ ID NO: 11589 - protein, 738 aa, Artificial Sequence
  source: /note="Description of Artificial Sequence: Synthetic polypeptide"
MAADGYLPDWLEDNLSEGIREWWALKPGAPKPKANQQKQDDGRGLVLPGYKYLGPFNGLDKGEPVNAADAAALEHDKAYDQQLQAGDNPYLRYNHADAEFRERLQEDTSFGGNLGRAVFQAKKRVLEPLGLVEEGAKTAPGKKRPVEPSPQRSPDSSTGIGKKGQQPARKRLNFGQTGDSESVPDPQPLGEPPAAPSGVGPNTMAAGGGAPMADNNEGADGVGSSSGNWHCDSTWLGDRVITTSTRTWALPTYNNHLYKQISNGTSGGATNDNTYFGYSTPWGYFDFNRFHCHFSPRDWQRLINNNWGFRPKRLSFKLFNIQVKEVTQNEGTKTIANNLTSTIQVFTDSEYQLPYVLGSAHQGCLPPFPADVFTIPQYGYLTLNNGSQAVGRSSFYCLEYFPSQMLRTGNNFQFTYTFEDVPFHSSYAHSQSLDRLMNPLIDQYLYYLSRIQTTGGTANTQTLGFSQGGPNTMANQAKNWLPGPCYRQQRVSTTTGQNNNSNFAWTAGTKYHLNGRNSLANPGIAMATHKDDEERFFPSNGILIFGKQNAARDNADYSDVMPTSEEEIKTTNPVATEEYGIVADNLQQQNTAPQIGTVNSQGALPGMVWQNRDVYLQGPIWAKIPHTDGNFHPSPLMGGFGLKHPPPQILIKNTPVPADPPTTFNQSKLNSFITQYSTGQVSVEIEWELQKENSKRWNPEIQYTSNYYKSTSVDFAVNTEGVYSEPRPIGTRYLTRNL

SEQ ID NO: 11590 - protein, 738 aa, Artificial Sequence
  source: /note="Description of Artificial Sequence: Synthetic polypeptide"
MAADGYLPDWLEDNLSEGIREWWALKPGAPKPKANQQKQDDGRGLVLPGYKYLGPFNGLDKGEPVNAADAAALEHDKAYDQQLQAGDNPYLRYNHADAEFQERLQEDTSFGGNLGRAVFQAKKRVLEPLGLVEEGAKTAPGKKRPVEPSPQRSPDSSTGIGKKGQQPARKRLNFGQTGDSESVPDPQPLGEPPAAPSGVGPNTMAAGGGAPMADNNEGADGVGSSSGNWHCDSTWLGDRVITTSTRTWALPTYNNHLYKQISNGTSGGATNDNTYFGYSTPWGYFDFNRFHCHFSPRDWQRLINNNWGFRPKRLSFKLFNIQVKEVTQNEGTKTIANNLTSTIQVFTDSEYQLPYVLGSAHQGCLPPFPADVFTIPQYGYPTLNNGSQAVGRSSFYCLEYFPSQMLRTGNNFQFTYTFEDVPFHSSYAHSQSLDRLMNPLIDQYLYYLSRIQTTGGTANTQTLGFSQGGPNTMANQAKNWLPGPCYRQQRVSTTTGQNNNSNFAWTAGTKYHLNGRNSLANPGIAMATHKDDEERFFPSNGILIFGKQNAARDNADYSDVMPTSEEEIKTTNPVATEEYGIVADNLQQQNTAPQIGTVNSQGALPGMVWQNRDVYLQGPIWAKIPHTDGNFHPSPLMGGFGLKHPPPQILIKNTPVPADPPTTFNQSKLNSFITQYSTGQVSVEIEWELQKENSKRWNPEIQYTSNYYKSTSVDFAVNTEGVYSEPRPIGTRYLTRNL

SEQ ID NO: 11591 - protein, 738 aa, Artificial Sequence
  source: /note="Description of Artificial Sequence: Synthetic polypeptide"
MAADGYLPDWLEDNLSEGIREWWALKPGAPKPKANQQKQDDGRGLVLPGYKYLGPFNGLDKGEPVNAADAAALEHDKAYDQQLQAGDNPYLRYNHADAEFQERLQEDTSFGGNLGRAVFQAKKRVLEPLGLVEEGAKTAPGKKRPVEPSPQRSPDSSTGIGKKGQQPARKRLNFGQTGDSESVPDPQPLGEPPAAPSGVGPNTMTAGGGAPMADNNEGADGVGSSSGNWHCDSTWLGDRVITTSTRTWALPTYNNHLYKQISNGTSGGATNDNTYFGYSTPWGYFDFNRFHCHFSPRDWQRLINNNWGFRPKRLSFKLFNIQVKEVTQNEGTKTIANNLTSTIQVFTDSEYQLPYVLGSAHQGCLPPFPADVFTIPQYGYLTLNNGSQAVGRSSFYCLEYFPSQMLRTGNNFQFTYTFEDVPFHSSYAHSQSLDRLMNPLIDQYLYYLSRIQTTGGTANTQTLGFSQGGPNTMANQAKNWLPGPCYRQQRVSTTTGQNNNSNFAWTAGTKYHLNGRNSLANPGIAMATHKDDEERFFPSNGILIFGKQNAARDNADYSDVMPTSEEEIKTTNPVATEEYGIVADNLQQQNTAPQIGTVNSQGALPGMVWQNRDVYLQGPIWAKIPHTDGNFHPSPLMGGFGLKHPPPQILIKNTPVPADPPTTFNQSKLNSFITQYSTGQVSVEIEWELQKENSKRWNPEIQYTSNYYKSTSVDFAVNTEGVYSEPRPIGTRYLTRNL

SEQ ID NO: 11592 - protein, 738 aa, Artificial Sequence
  source: /note="Description of Artificial Sequence: Synthetic polypeptide"
MAADGYLPDWLEDNLSEGIREWWALKPGAPKPKANQQKQDDGRGLVLPGYKYLGPFNGLDKGEPVNAADAAALEHDKAYDQQLQAGDNPYLRYNHADAEFQERLQEDTSFGGNLGRAVFQAKKRVLEPLGLVEEGAKTAPGKKRPVEPSPQRSPDSSTGIGKKGQQPARKRLNFGQTGDSESVPDPQPLGEPPAAPSGVGPNTMAAGGGAPMADNNEGADGVGSSSGNWHCDSTWLGDRVITTSTRTWALPTYNNHLYKQISNGTSGGATNDNTYFGYSTPWGYFDFNRFHCHFSPRDWQRLINNNWGFRPKRLSFKLFNIQVKEVTQNEGTKTIANNLTSTIQVFTDSEYQLPYVLGSAHQGCLPPFPADVFTIPQYGYLTLNNGSQAVGRSSFYCLEYFPSQMLRTGNNFQFTYTFEDVPFHSSYAHSQSLDRLMNPLIDQYLYYLSRIQTTGGTANTQTLGFSQGGPNTMANQAKNWLPGPCYRQQRVSTTTGQNNNSNFAWTAGTKYHLNGRNSLANPGIAMATHKDDEERFFPSNGILIFGKQNAARDNADYSDVMPTSEEEIKTTNPVATEEYGIVTDNLQQQNTAPQIGTVNSQGALPGMVWQNRDVYLQGPIWAKIPHTDGNFHPSPLMGGFGLKHPPPQILIKNTPVPADPPTTFNQSKLNSFITQYSTGQVSVEIEWELQKENSKRWNPEIQYTSNYYKSTSVDFAVNTEGVYSEPRPIGTRYLTRNL

SEQ ID NO: 11593 - protein, 738 aa, Artificial Sequence
  source: /note="Description of Artificial Sequence: Synthetic polypeptide"
MAADGYLPDWLEDNLSEGIREWWALKPGAPKPKANQQKQDDGRGLVLPGYKYLGPFNGLDKGEPVNAADAAALEHDKAYDQQLQAGDNPYLRYNHADAEFQERLQEDTSFGGNLGRAVFQAKKRVLEPLGLVEEGAKTAPGKKRPVEPSPQRSPDSSTGIGKKGQQPARKRLNFGQTGDSESVPDPQPLGEPPAAPSGVGPNTMAAGGGAPMADNNEGADGVGSSSGNWHCDSTWLGDRVITTSTRTWALPTYNNHLYKQISNGTSGGATNDNTYFGYSTPWGYFDFNRFHCHFSPRDWQRLINNNWGFRPKRLSFKLFNIQVKEVTQNEGTKTIANNLTSTIQVFTDSEYQLPYVLGSAHQGCLPPFPADVFTIPQYGYLTLNNGSQAVGRSSFYCLEYFPSQMLRTGNNFQFTYTFEDVPFHSSYAHSQSLDRLMNPLIDQYLYYLSRIQTTGGTANTQTLGFSQGGPNTMANQAKNWLPGPCYRQQRVSTTTGQNNNSNFAWTAGTKYHLNGRNSLANPGIAMATHKDDEERFFPSNGILIFGKQNAARDNADYSDVMPTSEEEIKTTNPVATEEYGIVADNLQQQNTAPQIGTVNSQGALPGMVWQNRDVYLQGPIWAKIPHTDGNFHPSPLMGGFGLKHPPPQILIKNTPVPADPPTTFNQSKLNSFITQYSTGQVSVEIEWELQKENSKRWNPEIQYTSNYYKSTSVDFAINTEGVYSEPRPIGTRYLTRNL

SEQ ID NO: 11594 - protein, 738 aa, Artificial Sequence
  source: /note="Description of Artificial Sequence: Synthetic polypeptide"
MAADGYLPDWLEDNLSEGIREWWALKPGAPKPKANQQKQDDGRGLVLPGYKYLGPFNGLDKGEPVNAADAAALEHDKAYDQQLQAGDNPYLRYNHADAEFQERLQEDTSFGGNLGRAVFQAKKRVLEPLGLVEEGAKTAPGKKRPVEPSPQRSPDSSTGIGKKGQQPARKRLNFGQTGDSESVPDPQPLGEPPAAPSGVGPNTMAAGGGAPMADNNEGADGVGSSSGNWHCDSTWLGDRVITTSTRTWALPTYNNHLYKQISNGTSGGATNDNTYFGYSTPWGYFDFNRFHCHFSPRDWQRLINNNWGFRPKRLSFKLFNIQVKEVTQNEGTKTIANNLTSTIQVFTDSEYQLPYVLGSAHQGCLPPFPADVFTIPQYGYLTLNNGSQAVGRSSFYCLEYFPSQMLRTGNNFQFTYTFEDVPFHSSYAHSQSLDRLMNPLIDQYLYYLSRIQTTGGTANTQTLGFSQGGPNTMANQAKNWLPGPCYRQQRVSTTTGQNNNSNFAWTAGTKYHLNGRNSLANPGIAMATHKDDEERFFPSNGILIFGKQNAARDNADYSDVMPTSEEEIKTTNPVATEEYGIVADNLQQQNTAPQIGTVNSQGALPGMVWQNRDVYLQGPIWAKIPHADGNFHPSPLMGGFGLKHPPPQILIKNTPVPADPPTTFNQSKLNSFITQYSTGQVSVEIEWELQKENSKRWNPEIQYTSNYYKSTSVDFAVNTEGVYSEPRPIGTRYLTRNL

SEQ ID NO: 11595 - protein, 738 aa, Artificial Sequence
  source: /note="Description of Artificial Sequence: Synthetic polypeptide"
MAADGYLPDWLEDNLSEGIREWWALKPGAPKPKANQQKQDDGRGLVLPGYKYLGPFNGLDKGEPVNAADAAALEHDKAYDQQLQAGDNPYLRYNHADAEFQERLQEDTSFGGNLGRAVFQAKKRVLEPLGLVEEGAKTAPGKKRPVEPSPQRSPDSSTGIGKKGQQPARKRLNFGQTGDSESVPDPQPLGEPPAAPSGVGPNTMAAGGGAPMADNNEGADGVGSSSGNWHCNSTWLGDRVITTSTRTWALPTYNNHLYKQISNGTSGGATNDNTYFGYSTPWGYFDFNRFHCHFSPRDWQRLINNNWGFRPKRLSFKLFNIQVKEVTQNEGTKTIANNLTSTIQVFTDSEYQLPYVLGSAHQGCLPPFPADVFTIPQYGYLTLNNGSQAVGRSSFYCLEYFPSQMLRTGNNFQFTYTFEDVPFHSSYAHSQSLDRLMNPLIDQYLYYLSRIQTTGGTANTQTLGFSQGGPNTMANQAKNWLPGPCYRQQRVSTTTGQNNNSNFAWTAGTKYHLNGRNSLANPGIAMATHKDDEERFFPSNGILIFGKQNAARDNADYSDVMPTSEEEIKTTNPVATEEYGIVADNLQQQNTAPQIGTVNSQGALPGMVWQNRDVYLQGPIWAKIPHTDGNFHPSPLMGGFGLKHPPPQILIKNTPVPADPPTTFNQSKLNSFITQYSTGQVSVEIEWELQKENSKRWNPEIQYTSNYYKSTSVDFAVNTEGVYSEPRPIGTRYLTRNL

SEQ ID NO: 11596 - protein, 738 aa, Artificial Sequence
  source: /note="Description of Artificial Sequence: Synthetic polypeptide"
MAADGYLPDWLEDNLSEGIREWWALKPGAPKPKANQQKQDDGRGLVLPGYKYLGPFNGLDKGEPVNAADAAALEHDKAYDQQLQAGDNPYLRYNHADAEFQERLQEDTSFGGNLGRAVFQAKKRVLEPLGLVEEGAKTAPGKKRPVEPSPQRSPDSSTGIGKKGQQPARKRLNFGQTGDSESVPDPQPLGEPPAAPSGVGPNTMAAGGGAPMADNNEGADGVGSSSGNWHCDSTWLGDRVITTSTRTWALPTYNNHLYKQISNGTSGGATNDNTYFGYSTPWGYFDFNRFHCHFSPRDWQRLINNNWGFRPKRLSFKLFNIQVKEVTQNEGTKTIANNLTSTIQVFTDSEYQLPYVLGSAHQGCLPPFPADVFTIPQYGYLTLNNGSQAVGRSSFYCLEYFPSQMLRTGNNFQFTYTFEDVPFHSSYAHSQSLDRLMNPLIDQYLYYLSRIQTTGGTANTQTLGFSQGGPNTMANQAKNWLPGPCYRQQRVSTTTGQNNNSNFAWTAGTKYHLNGRNSLANPGIAMATHKDDEERFFPSNGILIFGKQNAARDNADYSDVMPTSEEEIKTTNPVATEEYGIVADNLQQQNTAPQIGTVNSQGALPGMVWQNRDVYLQGPIWAKIPHTDGNFHPSPLMGGFGLKHPPPQILIKNTPVPADPPTTFNQSKLNSFITQYSTGQVSVEIEWELQKENSKRWNPEIQYTSNYYKSTSVDFAVNTEGAYSEPRPIGTRYLTRNL

SEQ ID NO: 11597 - protein, 738 aa, Artificial Sequence
  source: /note="Description of Artificial Sequence: Synthetic polypeptide"
MAADGYLPDWLEDNLSEGIREWWALKPGAPKPKANQQKQDDGRGLVLPGYKYLGPFNGLDKGEPVNAADAAALEHDKAYDQQLQAGDNPYLRYNHADAEFQERLQEDTSFGGNLGRAVFQAKKRVLEPLGLVEEGAKTAPGKKRPVEPSPQRSPDSSTGIGKKGQQPARKRLNFGQTGDSESVPDPQPLGEPPAAPSGVGPNTMAAGGGAPMADNNEGADGVGSSSGNWHCDSTWLGDRVITTSTRTWALPTYNNHLYKQISNGTSGGATNDNTYFGYSTPWGYFDFNRFHCHFSPRDWQRLINNNWGFRPKRLSFKLFNIQVKEVTQNEGTKTIANNLTSTIQVFTDSEYQLPYVLGSAHQGCLPPFPADVFTIPQYGYLTLNNGSQAVGRSSFYCLEYFPSQMLRTGNNFQFTYTFEDVPFHSSYAHSQSLDRLMNPLIDQYLYYLSRIQTTGGTANTQTLGFSQGGPNTMANQAKNWLPGPCYRQQRVSTTTGQNNNSNFAWTAGTKYHLNGRNSLANPGIAMATHKDDEERFFPSNGILIFGKQNAARDNADYSDVMPTSEEEIKTTNPVATEECGIVADNLQQQNTAPQIGTVNSQGALPGMVWQNRDVYLQGPIWAKIPHTDGNFHPSPLMGGFGLKHPPPQILIKNTPVPADPPTTFNQSKLNSFITQYSTGQVSVEIEWELQKENSKRWNPEIQYTSNYYKSTSVDFAVNTEGVYSEPRPIGTRYLTRNL

SEQ ID NO: 11598 - protein, 738 aa, Artificial Sequence
  source: /note="Description of Artificial Sequence: Synthetic polypeptide"
MAADGYLPDWLEDNLSEGIREWWALKPGAPKPKANQQKQDDGRGLVLPGYKYLGPFNGLDKGEPVNAADAAALEHDKAYDQQLQAGDNPYLRYNHADAEFQERLQEDTSFGGNLGRAVFQAKKRVLEPLGLVEEGAKTAPGKKRPVEPSPQRSPDSSTGIGKKGQQPARKRLNFGQTGDSESVPDPQPLGEPPAAPSGVGPNTMAAGGGAPMADNNEGADGVGSSSGNWHCDSTWLGDRVITTSTRTWALPTYNNHLYKQISNGTSGGATNDNTYFGYSTPWGYFDFNRFHCHFSPRDWQRLINNNWGFRPKRLSFKLFNIQVKEVTQNEGTKTIANNLTSTIQVFTDSEYQLPYVLGSAHQGCLPPFPADVFTIPQYGYLTLNNGSQAVGRSSFYCLEYFPSQMLRTGNNFQFTYTFEDVPFHSSYAHSQSLDRLMNPLIDQYLYYLSRIQTTGGTANTQTLGFSQGGPNTMANQAKNWLPGPCYRQQRVSTTTGQNNNSNFAWTAGTKYHLNGRNSLANPGIAMATHKDDEERFFPSNGILIFGKQNAARDNADYSDVMPTSEEEIKTTNPVATEEYGIVADNLQQQNTAPQIGTVNSQGALPGMVWQNRDVYLQGPIWAKIPHTDGNFHPSPLMGGFGLKHPPPQILIKNTPVPADPPTTFNQSKLNSFITQYSTGQVSVEIEWELQKENSKRWNPEIRYTSNYYKSTSVDFAVNTEGVYSEPRPIGTRYLTRNL

SEQ ID NO: 11599 - protein, 738 aa, Artificial Sequence
  source: /note="Description of Artificial Sequence: Synthetic polypeptide"
MAADGYLPDWLEDNLSEGIREWWALKPGAPKPKANQQKQDDGRGLVLPGYKYLGPFNGLDKGEPVNAADAAALEHDKAYDQQLQAGDNPYLRYNHADAEFQERLQEDTSFGGNLGRAVFQAKKRVLEPLGLVEEGAKTAPGKKRPVEPSPQRSPDSSTGIGKKGQQPARKRLNFGQTGDSESVPDPQPLGEPPAAPSGVGPNTMAAGGGAPMADNNEGADGVGSSSGNWHCDSTWLGDRVITTSTRTWALPTYNNHLYKQISNGTSGGATNDNTYFGYSTPWGYFDFNRFHCHFSPRDWQRLINNNWGFRPKRLSFKLFNIQVKEVTQNEGTKTIANNLTSTIQVFTDSEYQLPYVLGSAHQGCLPPFPADVFTIPQYGYLTLNNGSQAVGRSSFYCLEYFPSQMLRTGNNFQFTYTFEDVPFHSSYAHSQSLDRLMNPLIDQYLYYLSRIQTTGGTANTQTLGFSQGGPNTMANQAKNWLPGPCYRQQRVSTTTGQNNNSNFAWTAGTKYHLNGRNSLANPGIAMATHKDDEERFFPSNGILIFGKQNAARDNADCSDVMPTSEEEIKTTNPVATEEYGIVADNLQQQNTAPQIGTVNSQGALPGMVWQNRDVYLQGPIWAKIPHTDGNFHPSPLMGGFGLKHPPPQILIKNTPVPADPPTTFNQSKLNSFITQYSTGQVSVEIEWELQKENSKRWNPEIQYTSNYYKSTSVDFAVNTEGVYSEPRPIGTRYLTRNL

SEQ ID NO: 11600 - protein, 738 aa, Artificial Sequence
  source: /note="Description of Artificial Sequence: Synthetic polypeptide"
MAADGYLPDWLEDNLSEGIREWWALKPGAPKPKANQQKQDDGRGLVLPGYKYLGPFNGLDKGEPVNAADAAALEHDKAYDQQLQAGDNPYLRYNHADAEFQERLQEDTSFGGNLGRAVFQAKKRVLEPLGLVEEGAKTAPGKKRPVEPSPQRSPDSSTGIGKKGQQPARKRLNFGQTGDSESVPDPQPLGEPPAAPSGVGPNTMAAGGGAPMADNNEGADGVGSSSGNWHCDSTWLGDRVITTSTRTWALPTYNNHLYKQISNGTSGGATNDNTYFGYSTPWGYFDFNRFHCHFSPRDWQRLINNNWGFRPKRLSFKLFNIQVKEVTQNEGTKTIANNLTSTIQVFTDSEYQLPYVLGSAHQGCLPPFPADVFTIPQYGYLTLNNGSQAVGRSSFYCLEYFPSQMLRTGNNFQFTYTFEDVPFHSSYAHSQSLDRLMNPLIDQYLYYLSRIQTTGGTANTQTLGFSQGGPNTMANQAKNWLPGPCYRQQRVSTTTGQNNNSNFAWTAGTKYHLNGRNSLANPGIAMATHKDDEERFFPSNGILIFGKQNAARDNADYSDVMPTSEEEIKTTNPVATEEYGIAADNLQQQNTAPQIGTVNSQGALPGMVWQNRDVYLQGPIWAKIPHTDGNFHPSPLMGGFGLKHPPPQILIKNTPVPADPPTTFNQSKLNSFITQYSTGQVSVEIEWELQKENSKRWNPEIQYTSNYYKSTSVDFAVNTEGVYSEPRPIGTRYLTRNL

SEQ ID NO: 11601 - protein, 738 aa, Artificial Sequence
  source: /note="Description of Artificial Sequence: Synthetic polypeptide"
MAADGYLPDWLEDNLSEGIREWWALKPGAPKPKANQQKQDDGRGLVLPGYKYLGPFNGLDKGEPVNAADAAALEHDKAYDQQLQAGDNPYLRYNHADAEFQERLQEDTSFGGNLGRAVFQAKKRVLEPLGLVEEGAKTAPGKKRPVEPSPQRSPDSSTGIGKKGQQPARKRLNFGQTGDSESVPDPQPLGEPPAAPSGVGPNTMAAGGGAPMADNNEGADGVGSSSGNWHCDSTWLGDRVITTSTRTWALPTYNNHLYKQISNGTSGGATNDNTYFGYSTPWGYFDFNRFHCHFSPRDWQRLINNNWGFRPKRLSFKLFNIQVKEVTQNEGTKTIANNLTSTIQVFTDSEYQLPYVLGSAHQGCLPPFPADVFTIPQYGYLTLNNGSQAVGRSSFYCLEYFPSQMLRTGNNFQFTYTFEDVPFHSSYAHSQSLDRLMNPLIDQYLYYLSRIQTTGGTANTQTLGFSQGGPNTMANQAKNWLPGPCYRQQRVSTTTGQNNNSNFAWTAGTKYHLNGRNSLANPGIAMATHKDDEERFFPSNGILIFGKQNAARDNADYSDVMPTSEEEIKTTNPVATEEYGIVADNLQQQNTAPQIGTVNSQGALPGMIWQNRDVYLQGPIWAKIPHTDGNFHPSPLMGGFGLKHPPPQILIKNTPVPADPPTTFNQSKLNSFITQYSTGQVSVEIEWELQKENSKRWNPEIQYTSNYYKSTSVDFAVNTEGVYSEPRPIGTRYLTRNL

SEQ ID NO: 11602 - protein, 738 aa, Artificial Sequence
  source: /note="Description of Artificial Sequence: Synthetic polypeptide"
MAADGYLPDWLEDNLSEGIREWWALKPGAPKPKANQQKQDDGRGLVLPGYKYLGPFNGLDKGEPVNAADAAALEHDKAYDQRLQAGDNPYLRYNHADAEFQERLQEDTSFGGNLGRAVFQAKKRVLEPLGLVEEGAKTAPGKKRPVEPSPQRSPDSSTGIGKKGQQPARKRLNFGQTGDSESVPDPQPLGEPPAAPSGVGPNTMAAGGGAPMADNNEGADGVGSSSGNWHCDSTWLGDRVITTSTRTWALPTYNNHLYKQISNGTSGGATNDNTYFGYSTPWGYFDFNRFHCHFSPRDWQRLINNNWGFRPKRLSFKLFNIQVKEVTQNEGTKTIANNLTSTIQVFTDSEYQLPYVLGSAHQGCLPPFPADVFTIPQYGYLTLNNGSQAVGRSSFYCLEYFPSQMLRTGNNFQFTYTFEDVPFHSSYAHSQSLDRLMNPLIDQYLYYLSRIQTTGGTANTQTLGFSQGGPNTMANQAKNWLPGPCYRQQRVSTTTGQNNNSNFAWTAGTKYHLNGRNSLANPGIAMATHKDDEERFFPSNGILIFGKQNAARDNADYSDVMPTSEEEIKTTNPVATEEYGIVADNLQQQNTAPQIGTVNSQGALPGMVWQNRDVYLQGPIWAKIPHTDGNFHPSPLMGGFGLKHPPPQILIKNTPVPADPPTTFNQSKLNSFITQYSTGQVSVEIEWELQKENSKRWNPEIQYTSNYYKSTSVDFAVNTEGVYSEPRPIGTRYLTRNL

SEQ ID NO: 11603 - protein, 738 aa, Artificial Sequence
  source: /note="Description of Artificial Sequence: Synthetic polypeptide"
MAADGYLPDWLEDNLSEGIREWWALKPGAPKPKANQQKQDDGRGLVLPGYKYLGPFNGLDKGEPVNAADAAALEHDKAYDQQLQAGDNPYLRYNHADAEFQERLQEDTSFGGNLGRAVFQAKKRVLEPLGLVEEGAKTAPGKKRPVEPSPQRSPDSSTGIGKKGQQPARKRLNFGQTGDSESVPDPQPLGEPPAAPSGVGPNTMAAGGGAPMADNNEGADGVGSSSGNWHCDSTWLGDRVITTSTRTWALPTYNNHLYKQISNGTSGGATNDNTYFGYSTPWGYFDFNRFHCHFSPRDWQRLINNNWGFRPKRLSFKLFNIQVKEVTQNEGTKTIANNLTSTIQVFTDSEYQLPYVLGSAHQGCLPPFPADVFTIPQYGYLTLNNGSQAVGRSSFYCLEYFPSQMLRTGNNFQFTYTFEDVPFHSSYAHSQSLDRLMNPLIDQYLYYLSRIQTTGGTANTQTLGFSQGGPNTMANQAKNWLPGPCYRQQRVSTTTGQNNNSNFAWTAGTKYHLNGRNSLANPGIAMATHKDDEERFFPSNGILIFGKQNAARDNADYSDVMPTSEEEIKTTNPVATEEYGIVADNLQQQNTAPQIGTVNGQGALPGMVWQNRDVYLQGPIWAKIPHTDGNFHPSPLMGGFGLKHPPPQILIKNTPVPADPPTTFNQSKLNSFITQYSTGQVSVEIEWELQKENSKRWNPEIQYTSNYYKSTSVDFAVNTEGVYSEPRPIGTRYLTRNL

SEQ ID NO: 11604 - protein, 738 aa, Artificial Sequence
  source: /note="Description of Artificial Sequence: Synthetic polypeptide"
MAADGYLPDWLEDNLSEGIREWWALKPGAPKPKANQQKQDDGRGLVLPGYKYLGPFNGLDKGEPVNAADAAALEHDKAYDQQLQAGDNPYLRYNHADAEFQERLQEDTSFGGNLGRAVFQAKKRVLEPLGLVEEGAKTAPGKKRPVEPSPQRSPDSSTGIGKKGQQPARKRLNFGQTGDSESVPDPQPLGEPPAAPSGVGPNTMAAGGGAPMADNNEGADGVGSSSGNWHCDSTWLGDRVITTSTRTWALPTYNNHLYKQISNGTSGGATNDNTYFGYSTPWGYFDFNRFHCHFSPRDWQRLINNNWGFRPKRLSFKLFNIQVKEVTQNEGTKTIANNLTSTIQVFTDSEYQLPYVLGSAHQGCLPPFPADVFTIPQYGYLTLNNGSQAVGRSSFYCLEYFPSQMLRTGNNFQFTYTFEDVPFHSSYAHSQSLDRLMNPLIDQYLYYLSRIQTTGGTANTQTLGFSQGGPNTMANQAKNWLPGPCYRQQRVSTTTGQNNNSNFAWTAGTKYHLNGRNSLANPGIAMATHKDDEECFFPSNGILIFGKQNAARDNADYSDVMPTSEEEIKTTNPVATEEYGIVADNLQQQNTAPQIGTVNSQGALPGMVWQNRDVYLQGPIWAKIPHTDGNFHPSPLMGGFGLKHPPPQILIKNTPVPADPPTTFNQSKLNSFITQYSTGQVSVEIEWELQKENSKRWNPEIQYTSNYYKSTSVDFAVNTEGVYSEPRPIGTRYLTRNL

SEQ ID NO: 11605 - protein, 738 aa, Artificial Sequence
  source: /note="Description of Artificial Sequence: Synthetic polypeptide"
MAADGYLPDWLEDNLSEGIREWWALKPGAPKPKANQQKQDDGRGLVLPGYKYLGPFNGLDKGEPVNAADAAALEHDKAYDQQLQAGDNPYLRYNHADAEFQERLQEDTSFGGNLGRAVFQAKKRVLEPLGLVEEGAKTAPGKKRPVEPSPQRSPDSSTGIGKKGQQPARKRLNFGQTGDSESVPDPQPLGEPPAAPSGVGPNTMAAGGGAPMADNNEGADGVGSSSGNWHCDSTWLGDRVITTSTRTWALPTYNNHLYKQISNGTSGGATNDNTYFGYSTPWGYFDFNRFHCHFSPRDWQRLINNNWGFRPKRLSFKLFNIQVKEVTQNEGTKTIANNLTSTIQVFTDSEYQLPYVLGSAHQGCLPPFPADVFTIPQYGYLTLNNGSQAVGRSSFYCLEYFPSQMLRTGNNFQFTYTFEDVPFHSSYAHSQSLDRLMNPLIDQYLYYLSRIQTTGGTANTQTLGFSQGGPNTMANQAKNWLPGPCYRQQRVSTTTGQNNNSNFAWTAGTKYHLNGRNSLANPGIAMATHKDDEERFFPSNGILIFGKQNAARDNADYSDVMPTSEEEIKTTNPVATEEYGIVADNLQQQNTAPQIGTVNSQGALPGMVWQNRDAYLQGPIWAKIPHTDGNFHPSPLMGGFGLKHPPPQILIKNTPVPADPPTTFNQSKLNSFITQYSTGQVSVEIEWELQKENSKRWNPEIQYTSNYYKSTSVDFAVNTEGVYSEPRPIGTRYLTRNL

SEQ ID NO: 11606 - protein, 738 aa, Artificial Sequence
  source: /note="Description of Artificial Sequence: Synthetic polypeptide"
MAADGYLPDWLEDNLSEGIREWWALKPGAPKPKANQQKQDDGRGLVLPGYKYLGPFNGLDKGEPVNAADAAALEHDKAYDQQLQAGDNPYLRYNHADAEFQERLQEDTSFGGNLGRAVFQAKKRVLEPLGLVEEGAKTAPGKKRPVEPSPQRSPDSSTGIGKKGQQPARKRLNFGQTGDSESVPDPQPLGEPPAAPSGVGPNTMAAGGGAPMADNNEGADGVGSSSGNWHCDSTWLGDRVITTSTRTWALPTYNNHLYKQISNGTSGGATNDNTYFGYSTPWGYFDFNRFHCHFSPRDWQRLINNNWGFRPKRLSFKLFNIQVKEVTQNEGTKTIANNLTSTIQVFTDSEYQLPYVLGSAHQGCLPPFPADVFTIPQYGYLTLNNGSQAAGRSSFYCLEYFPSQMLRTGNNFQFTYTFEDVPFHSSYAHSQSLDRLMNPLIDQYLYYLSRIQTTGGTANTQTLGFSQGGPNTMANQAKNWLPGPCYRQQRVSTTTGQNNNSNFAWTAGTKYHLNGRNSLANPGIAMATHKDDEERFFPSNGILIFGKQNAARDNADYSDVMPTSEEEIKTTNPVATEEYGIVADNLQQQNTAPQIGTVNSQGALPGMVWQNRDVYLQGPIWAKIPHTDGNFHPSPLMGGFGLKHPPPQILIKNTPVPADPPTTFNQSKLNSFITQYSTGQVSVEIEWELQKENSKRWNPEIQYTSNYYKSTSVDFAVNTEGVYSEPRPIGTRYLTRNL

SEQ ID NO: 11607 - protein, 738 aa, Artificial Sequence
  source: /note="Description of Artificial Sequence: Synthetic polypeptide"
MAADGYLPDWLEDNLSEGIREWWALKPGAPKPKANQQKQDDGRGLVLPGYKYLGPFNGLDKGEPVNAADAAALEHDKAYDQQLQAGDNPYLRYNHADAEFQERLQEDTSFGGNLGRAVFQAKKRVLEPLGLVEEGAKTAPGKKRPVEPSPQRSPDSSTGIGKKGQQPARKRLNFGQTGDSESVPDPQPLGEPPAAPSGVGPNTMAAGGGAPMADNNEGADGVGSSSGNWHCDSTWLGDRVITTSTRTWALPTYNNHLYKQISNGTSGGATNDNTYFGYSTPWGYFDFNRFHCHFSPRDWQRLINNNWGFRPKRLSFKLFNIQVKEVTQNEGTKTIANNLTSTIQVFTDSEYQLPYVLGSAHQGCLPPFPADVFTIPQYGYLTLNNGSQAVGRSSFYCLEYFPSQMLRTGNNFQFTYTFEDVPFHSSYAHSQSLDRLMNPLIDQYLYYLSRIQTTGGTANTQTLGFSQGGPNTMANQAKNWLPGPCYRQQRVSTTTGQNNNSNFAWTAGTKYHLNGRNSLANPGIAMATHKDDEERFFPSNGILIFGKQNAARDNADYSDVMPTSEEEIKTTNPVATEEYGIVADNLQQQNTAPQIGTVNSQGALPGMVWQNRDVYLQGPIWAKIPHTDGNFHPSPLMGGFGLKHPPPQILIKNTPVPADPPTTFNQSKLNSFITQYSTGQVSVEIEWELQKENSKRWNPEIQYTSNYYKSTSVDLAVNTEGVYSEPRPIGTRYLTRNL

SEQ ID NO: 11608 - protein, 738 aa, Artificial Sequence
  source: /note="Description of Artificial Sequence: Synthetic polypeptide"
MAADGYLPDWLEDNLSEGIREWWALKPGAPKPKANQQKQDDGRGLVLPGYKYLGPFNGLDKGEPVNAADAAALEHDKAYDQQLQAGDNPYLRYNHADAEFQERLQEDTSFGGNLGRAVFQAKKRVLEPLGLVEEGAKTAPGKKRPVEPSPQRSPDSSTGIGKKGQQPARKRLNFGQTGDSESVPDPQPLGEPPAAPSGVGPNTMAAGGGAPMADNNEGADGVGSSSGNWHCDSTWLGDRVITTSTRTWALPTYNNHLYKQISNGTSGGATNDNTYFGYSTPWGYFDFNRFHCHFSPRDWQRLINNNWGFRPKRLSFKLFNIQVKEVTQNEGTKTIANNLTSTIQVFTDSEYQLPYVLGSAHQGCLPPFPADVFTIPQYGYLTLNNGSQAVGRSSFYCLEYFPSQMLRTGNNFQFTYTFEDVPFHSSYAHSQSLDRLMNPLIDQYLYYLSRIQTTGGTANTQTLGFSQGGPNTMANQAKNWLPGPCYRQQRVSTTTGQNNNSNFAWTAGTKYHLNGRNSLANPGIAMATHKDDEERFFPSNGILIFGKQNAARDNADYSDVMPTSEEEIKTTNPVATEEYGIVADNLQQQNTAPQIGTVNSQGALPGMVWQNRDVYLQGPIWAKIPHTDGNFHPSPLMGGFGLKHPPPQILIKNTPVPADPPTTFNQSKLNSFITQYSTGQVSVEIEWEPQKENSKRWNPEIQYTSNYYKSTSVDFAVNTEGVYSEPRPIGTRYLTRNL

SEQ ID NO: 11609 - protein, 738 aa, Artificial Sequence
  source: /note="Description of Artificial Sequence: Synthetic polypeptide"
MAADGYLPDWLEDNLSEGIREWWALKPGAPKPKANQQKQDDGRGLVLPGYKYLGPFNGLDKGEPVNAADAAALEHDKAYDQQLQAGDNPYLRYNHADAEFQERLQEDTSFGGNLGRAVFQAKKRVLEPLGLVEEGAKTAPGKKRPVEPSPQRSPDSSTGIGKKGQQPARKRLNFGQTGDSESVPDPQPLGEPPAAPSGVGPNTMAAGGGAPMADNNEGADGVGSSSGNWHCDSTWLGDRVITTSTRTWALPTYNNHLYKQISNGTSGGATNDNTYFGYSTPWGYFDFNRFHCHFSPRDWQRPINNNWGFRPKRLSFKLFNIQVKEVTQNEGTKTIANNLTSTIQVFTDSEYQLPYVLGSAHQGCLPPFPADVFTIPQYGYLTLNNGSQAVGRSSFYCLEYFPSQMLRTGNNFQFTYTFEDVPFHSSYAHSQSLDRLMNPLIDQYLYYLSRIQTTGGTANTQTLGFSQGGPNTMANQAKNWLPGPCYRQQRVSTTTGQNNNSNFAWTAGTKYHLNGRNSLANPGIAMATHKDDEERFFPSNGILIFGKQNAARDNADYSDVMPTSEEEIKTTNPVATEEYGIVADNLQQQNTAPQIGTVNSQGALPGMVWQNRDVYLQGPIWAKIPHTDGNFHPSPLMGGFGLKHPPPQILIKNTPVPADPPTTFNQSKLNSFITQYSTGQVSVEIEWELQKENSKRWNPEIQYTSNYYKSTSVDFAVNTEGVYSEPRPIGTRYLTRNL

SEQ ID NO: 11610 - protein, 738 aa, Artificial Sequence
  source: /note="Description of Artificial Sequence: Synthetic polypeptide"
MAADGYLPDWLEDNLSEGIREWWALKPGAPKPKANQQKQDDGRGLVLPGYKYLGPFNGLDKGEPVNAADAAALEHDKAYDQQLQAGDNPYLRYNHADAEFQERLQEDTSFGGNLGRAVFQAKKRVLEPLGLVEEGAKTAPGKKRPVEPSPQRSPDSSTGIGKKGQQPARKRLNFGQTGDSESVPDPQPLGEPPAAPSGVGPNTMAAGGGAPMADNNEGADGVGSSSGNWHCDSTWLGDRVITTSTRTWALPTYNNHLYKQISNGTSGGATNDNTYFGYSTPWGYFDFNRFHCHFSPRDWQRLINNNWGFRPKRLSFKLFNIQVKEVTQNEGTKTIANNLTSTIQVFTDSEYQLPYVLGSAHQGCLPPFPADVFTIPQYGYLTLNNGSQAVGRSSFYCLEYFPSQMLRTGNNFQFTYTFEDVPFHSSYAHSQSLDRLMNPLIDQYLYYLSRIQTTGGTANTQTLGFSQGGPNTMANQAKNWLPGPCYRQQRVSTTTGQNNNSNFAWTAGTKYHLNGRNSLANPGIAMATHKDDEERFFPSNGILIFGKQNAARDNADYSDVMPTSEEEIKTTNPAATEEYGIVADNLQQQNTAPQIGTVNSQGALPGMVWQNRDVYLQGPIWAKIPHTDGNFHPSPLMGGFGLKHPPPQILIKNTPVPADPPTTFNQSKLNSFITQYSTGQVSVEIEWELQKENSKRWNPEIQYTSNYYKSTSVDFAVNTEGVYSEPRPIGTRYLTRNL

SEQ ID NO: 11611 - protein, 738 aa, Artificial Sequence
  source: /note="Description of Artificial Sequence: Synthetic polypeptide"
MAADGYLPDWLEDNLSEGIREWWALKPGAPKPKANQQKQDDGRGLVLPGYKYLGPFNGLDKGEPVNAADAAALEHDKAYDQQLQAGDNPYLRYNHADAEFQERLQEDTSFGGNLGRAVFQAKKRVLEPLGLVEEGAKTAPGKKRPVEPSPQRSPDSSTGIGKKGQQPARKRLNFGQTGDSESVPDPQPLGEPPAAPSGVGPNTMAAGGGAPMADNNEGADGVGSSSGNWHCDSTWLGDRVITTSTRTWALPTYNNHLYKQISNGTSGGATNDNTYFGYSTPWGYFDFNRFHCHFSPRDWQRLINNNWGFRPKRLSFKLFNIQVKEVTQNEGTKTIANNLTSTIQVFTDSEYQLPYVLGSAHQGCLPPFPADVFTIPQYDYLTLNNGSQAVGRSSFYCLEYFPSQMLRTGNNFQFTYTFEDVPFHSSYAHSQSLDRLMNPLIDQYLYYLSRIQTTGGTANTQTLGFSQGGPNTMANQAKNWLPGPCYRQQRVSTTTGQNNNSNFAWTAGTKYHLNGRNSLANPGIAMATHKDDEERFFPSNGILIFGKQNAARDNADYSDVMPTSEEEIKTTNPVATEEYGIVADNLQQQNTAPQIGTVNSQGALPGMVWQNRDVYLQGPIWAKIPHTDGNFHPSPLMGGFGLKHPPPQILIKNTPVPADPPTTFNQSKLNSFITQYSTGQVSVEIEWELQKENSKRWNPEIQYTSNYYKSTSVDFAVNTEGVYSEPRPIGTRYLTRNL

SEQ ID NO: 11612 - protein, 738 aa, Artificial Sequence
  source: /note="Description of Artificial Sequence: Synthetic polypeptide"
MAADGYLPDWLEDNLSEGIREWWALKPGAPKPKANQQKQDDGRGLVLPGYKYLGPFNGLDKGEPVNAADAAALEHDKAYDQQLQAGDNPYLRYNHADAEFQERLQEDTSFGGNLGRAVFQAKKRVLEPLGLVEEGAKTAPGKKRPVEPSPQRSPDSSTGIGKKGQQPARKRLNFGQTGDSGSVPDPQPLGEPPAAPSGVGPNTMAAGGGAPMADNNEGADGVGSSSGNWHCDSTWLGDRVITTSTRTWALPTYNNHLYKQISNGTSGGATNDNTYFGYSTPWGYFDFNRFHCHFSPRDWQRLINNNWGFRPKRLSFKLFNIQVKEVTQNEGTKTIANNLTSTIQVFTDSEYQLPYVLGSAHQGCLPPFPADVFTIPQYGYLTLNNGSQAVGRSSFYCLEYFPSQMLRTGNNFQFTYTFEDVPFHSSYAHSQSLDRLMNPLIDQYLYYLSRIQTTGGTANTQTLGFSQGGPNTMANQAKNWLPGPCYRQQRVSTTTGQNNNSNFAWTAGTKYHLNGRNSLANPGIAMATHKDDEERFFPSNGILIFGKQNAARDNADYSDVMPTSEEEIKTTNPVATEEYGIVADNLQQQNTAPQIGTVNSQGALPGMVWQNRDVYLQGPIWAKIPHTDGNFHPSPLMGGFGLKHPPPQILIKNTPVPADPPTTFNQSKLNSFITQYSTGQVSVEIEWELQKENSKRWNPEIQYTSNYYKSTSVDFAVNTEGVYSEPRPIGTRYLTRNL

SEQ ID NO: 11613 - protein, 738 aa, Artificial Sequence
  source: /note="Description of Artificial Sequence: Synthetic polypeptide"
MAADGYLPDWLEDNLSEGIREWWALKPGAPKPKANQQKQDDGRGLVLPGYKYLGPFNGLDKGEPVNAADAAALEHDKAYDQQLQAGDNPYLRYNHADAEFQERLQEDTSFGGNLGRAVFQAKKRVLEPLGLVEEGAKTAPGKKRPVEPSPQRSPDSSTGIGKKGQQPARKRLNFGQTGDSESVPDPQPLGEPPAAPSGVGPNTMAAGGGAPMADNNEGADGVGSSSGNWHCDSTWLGDRVITTSTRTWALPTYNNHLYKQISNGTSGGATNDNTYFGYSTPWGYFDFNRFHCHFSPRDWQRLINNNWGFRPKRLSFKLFNIQVKEVTQNEGTKAIANNLTSTIQVFTDSEYQLPYVLGSAHQGCLPPFPADVFTIPQYGYLTLNNGSQAVGRSSFYCLEYFPSQMLRTGNNFQFTYTFEDVPFHSSYAHSQSLDRLMNPLIDQYLYYLSRIQTTGGTANTQTLGFSQGGPNTMANQAKNWLPGPCYRQQRVSTTTGQNNNSNFAWTAGTKYHLNGRNSLANPGIAMATHKDDEERFFPSNGILIFGKQNAARDNADYSDVMPTSEEEIKTTNPVATEEYGIVADNLQQQNTAPQIGTVNSQGALPGMVWQNRDVYLQGPIWAKIPHTDGNFHPSPLMGGFGLKHPPPQILIKNTPVPADPPTTFNQSKLNSFITQYSTGQVSVEIEWELQKENSKRWNPEIQYTSNYYKSTSVDFAVNTEGVYSEPRPIGTRYLTRNL

SEQ ID NO: 11614 - protein, 738 aa, Artificial Sequence
  source: /note="Description of Artificial Sequence: Synthetic polypeptide"
MAADGYLPDWLEDNLSEGIREWWALKPGAPKPKANQQKQDDGRGPVLPGYKYLGPFNGLDKGEPVNAADAAALEHDKAYDQQLQAGDNPYLRYNHADAEFQERLQEDTSFGGNLGRAVFQAKKRVLEPLGLVEEGAKTAPGKKRPVEPSPQRSPDSSTGIGKKGQQPARKRLNFGQTGDSESVPDPQPLGEPPAAPSGVGPNTMAAGGGAPMADNNEGADGVGSSSGNWHCDSTWLGDRVITTSTRTWALPTYNNHLYKQISNGTSGGATNDNTYFGYSTPWGYFDFNRFHCHFSPRDWQRLINNNWGFRPKRLSFKLFNIQVKEVTQNEGTKTIANNLTSTIQVFTDSEYQLPYVLGSAHQGCLPPFPADVFTIPQYGYLTLNNGSQAVGRSSFYCLEYFPSQMLRTGNNFQFTYTFEDVPFHSSYAHSQSLDRLMNPLIDQYLYYLSRIQTTGGTANTQTLGFSQGGPNTMANQAKNWLPGPCYRQQRVSTTTGQNNNSNFAWTAGTKYHLNGRNSLANPGIAMATHKDDEERFFPSNGILIFGKQNAARDNADYSDVMPTSEEEIKTTNPVATEEYGIVADNLQQQNTAPQIGTVNSQGALPGMVWQNRDVYLQGPIWAKIPHTDGNFHPSPLMGGFGLKHPPPQILIKNTPVPADPPTTFNQSKLNSFITQYSTGQVSVEIEWELQKENSKRWNPEIQYTSNYYKSTSVDFAVNTEGVYSEPRPIGTRYLTRNL

SEQ ID NO: 11615 - protein, 738 aa, Artificial Sequence
  source: /note="Description of Artificial Sequence: Synthetic polypeptide"
MAADGYLPDWLEDNLSEGIREWWALKPGAPKPKANQQKQDDGRGLVLPGYKYLGPFNGLDKGEPVNAADAAALEHDKAYDQQLQAGDNPYLRYNHADAEFQERLQEDTSFGGNLGRAVFQAKKRVLEPLGLVEEGAKTAPGKKRPVEPSPQRSPDSSTGIGKKGQQPARKRLNFGQTGDSESVPDPQPLGEPPAAPSGVGPNTMAAGGGAPMADNNEGADGVGSSSGNWHCDSTWLGDRVITTSTRTWALPTYNNHLYKQISNGTSGGATNDNTYFGYSTPWGYFDFNRFHCHFSPRDWQRLINNNWGFRPKRLSFKLFNIQVKEVTQNEGTKTIANNLTSTIQVFTDSEYQLPYVLGSAHQGCLPPFPADVFTIPQYGYLTLNNGSQAVGRSSFYCLEYFPSQMLRTGNNFQFTYTFEDVPFHSSYAHSQSLDRLMNPLIDQYLYYLSRIQTTGGTANTQTLGFSQGGPNTMANRAKNWLPGPCYRQQRVSTTTGQNNNSNFAWTAGTKYHLNGRNSLANPGIAMATHKDDEERFFPSNGILIFGKQNAARDNADYSDVMPTSEEEIKTTNPVATEEYGIVADNLQQQNTAPQIGTVNSQGALPGMVWQNRDVYLQGPIWAKIPHTDGNFHPSPLMGGFGLKHPPPQILIKNTPVPADPPTTFNQSKLNSFITQYSTGQVSVEIEWELQKENSKRWNPEIQYTSNYYKSTSVDFAVNTEGVYSEPRPIGTRYLTRNL

SEQ ID NO: 11616 - protein, 738 aa, Artificial Sequence
  source: /note="Description of Artificial Sequence: Synthetic polypeptide"
MAADGYLPDWLEDNLSEGIREWWALKPGAPKPKANQQKQDDGRGLVLPGYKYLGPFNGLDKGEPVNAADAAALEHDKAYDQQLQAGDNPYLRYNHADAEFQERLQEDTSFGGNLGRAVFQAKKRVLEPLGLVEEGAKTAPGKKRPVEPSPQRSPDSSTGIGKKGQQPARKRLNFGQTGDSESVPDPQPLGEPPAAPSGVGPNTMAAGGGAPMADNNEGADGVGSSSGNWHCDSTWLGDRVITTSTRTWALPTYNNHLYKQISNGTSGGATNDNTYFGYSTPWGYFDFNRFHCHFSPRDWQRLINNNWGFRPKRLSFKLFNIQVKEVTQNEGTKTIANNLTSTIQVFTDSEYQLPYVLGSAHQGCLPPFPADVFTIPQYGYLTLNNGSQAVGRSSFYCLEYFPSQMLRTGNNFQFTYTFEDVPFHSSYAHSQSLDRLMNPLIDQYLYYLSRIQTTGGTANTQTLGFSQGGPNTMANQAKNWLPGPCYRQQRVSTTTGQNNNSNFARTAGTKYHLNGRNSLANPGIAMATHKDDEERFFPSNGILIFGKQNAARDNADYSDVMPTSEEEIKTTNPVATEEYGIVADNLQQQNTAPQIGTVNSQGALPGMVWQNRDVYLQGPIWAKIPHTDGNFHPSPLMGGFGLKHPPPQILIKNTPVPADPPTTFNQSKLNSFITQYSTGQVSVEIEWELQKENSKRWNPEIQYTSNYYKSTSVDFAVNTEGVYSEPRPIGTRYLTRNL

SEQ ID NO: 11617 - protein, 738 aa, Artificial Sequence
  source: /note="Description of Artificial Sequence: Synthetic polypeptide"
MAADGYLPDWLEDNLSEGIREWWALKPGAPKPKANQQKQDDGRGLVLPGYKYLGPFNGLDKGEPVNAADAAALEHDKAYDQQLQAGDNPYLRYNHADAEFQERLQEDTSFGGNLGRAVFQAKKRVLEPLGLVEEGAKTAPGKKRPVEPSPQRSPDSSTGIGKKGQQPARKRLNFGQTGDSESVPDPQPLGEPPAAPSGVGPNTMAAGGGAPMADNNEGADGVGSSSGNWHCDSTWLGDRVITTSTRTWALPTYNNHLYKQISNGTSGGATNDNTYFGYSTPWGYFDFNRSHCHFSPRDWQRLINNNWGFRPKRLSFKLFNIQVKEVTQNEGTKTIANNLTSTIQVFTDSEYQLPYVLGSAHQGCLPPFPADVFTIPQYGYLTLNNGSQAVGRSSFYCLEYFPSQMLRTGNNFQFTYTFEDVPFHSSYAHSQSLDRLMNPLIDQYLYYLSRIQTTGGTANTQTLGFSQGGPNTMANQAKNWLPGPCYRQQRVSTTTGQNNNSNFAWTAGTKYHLNGRNSLANPGIAMATHKDDEERFFPSNGILIFGKQNAARDNADYSDVMPTSEEEIKTTNPVATEEYGIVADNLQQQNTAPQIGTVNSQGALPGMVWQNRDVYLQGPIWAKIPHTDGNFHPSPLMGGFGLKHPPPQILIKNTPVPADPPTTFNQSKLNSFITQYSTGQVSVEIEWELQKENSKRWNPEIQYTSNYYKSTSVDFAVNTEGVYSEPRPIGTRYLTRNL

SEQ ID NO: 11618 - protein, 738 aa, Artificial Sequence
  source: /note="Description of Artificial Sequence: Synthetic polypeptide"
MAADGYLPDWLEDNLSEGIREWWALKPGAPKPKANQQKQDDGRGLVLPGYKYLGPFNGLDKGEPVNAADAAALEHDKAYDQQLQAGDNPYLRYNHADAEFQERLQEDTSFGGNLGRAVFQAKKRVLEPLGLVEEGAKTAPGKKRPVEPSPQRSPDSSTGIGKKGQQPARKRLNFGQTGDSESVPDPQPLGEPPAAPSGVGPNTMAAGGGAPMADNNEGADGVGSSSGNWHCDSTWLGDRVITTSTRTWALPTYNNHLYKQISNGTSGGATNDNTYFGYSTPWGYFDFNRFHCHFSPRDWQRLINNNWGFRPKRLSFKLFNIQVKEVTQNEGTKTIANNLTSTIQVFTDSEYQLPYVLGSAHQGCLPPFPADVFTIPQYGYLTLNNGSQAVGRSSFYCLEYFPSQMLRTGNNFQFTYTFEDVPFHSSYAHSQSLDRLMNPLIDQYLYYLSRIQTTGGTANTQTLGFGQGGPNTMANQAKNWLPGPCYRQQRVSTTTGQNNNSNFAWTAGTKYHLNGRNSLANPGIAMATHKDDEERFFPSNGILIFGKQNAARDNADYSDVMPTSEEEIKTTNPVATEEYGIVADNLQQQNTAPQIGTVNSQGALPGMVWQNRDVYLQGPIWAKIPHTDGNFHPSPLMGGFGLKHPPPQILIKNTPVPADPPTTFNQSKLNSFITQYSTGQVSVEIEWELQKENSKRWNPEIQYTSNYYKSTSVDFAVNTEGVYSEPRPIGTRYLTRNL

SEQ ID NO: 11619 - protein, 738 aa, Artificial Sequence
  source: /note="Description of Artificial Sequence: Synthetic polypeptide"
MAADGYLPDWLEDNLSEGIREWWALKPGAPKPKANQQKQDDGRGLVLPGYKYLGPFNGLDKGEPVNAADAAALEHDKAYDQQLQAGDNPYLRYNHADAEFQERLQEDTSFGGNLGRAVFQAKKRVLEPLGLVEEGAKTAPGKKRPVEPSPQRSPDSSTGIGKKGQQPARKRLNFGQTGDSESVPDPQPLGEPPAAPSGVGPNTMAAGGGAPMADNNEGADGVGSSSGNWHCDSTWLGDRVITTSTRTWALPTYNNHLYKQISNGTSGGATNDNTYFGYSTPWGYFDFNRFHCHFSPRDWQRLINNNWGFRPKRLSFKLFNIQVKEVTQNEGTKTIANNLTSTIQVFTDSEYQLPYVLGSAHQGCLPPFPADVFTIPQYGYLTLNNGSQAVGRSSFYCLEYFPSQMLRTGNNFQFTYTFEDVPFHSSYAHSQSLDRLMNPLIDQYLYYLSRIQTTGGTANTQTLGFSQGGPNTMANQAKNWLPGPCYRQQRASTTTGQNNNSNFAWTAGTKYHLNGRNSLANPGIAMATHKDDEERFFPSNGILIFGKQNAARDNADYSDVMPTSEEEIKTTNPVATEEYGIVADNLQQQNTAPQIGTVNSQGALPGMVWQNRDVYLQGPIWAKIPHTDGNFHPSPLMGGFGLKHPPPQILIKNTPVPADPPTTFNQSKLNSFITQYSTGQVSVEIEWELQKENSKRWNPEIQYTSNYYKSTSVDFAVNTEGVYSEPRPIGTRYLTRNL

SEQ ID NO: 11620 - protein, 738 aa, Artificial Sequence
  source: /note="Description of Artificial Sequence: Synthetic polypeptide"
MAADGYLPDWLEDNLSEGIREWWALKPGAPKPKANQQKQDDGRGLVLPGYKYLGPFNGLDKGEPVNAADAAALEHDKAYDQQLQAGDNPYLRYNHADAEFQERLQEDTSFGGNLGRAVFQAKKRVLEPLGLVEEGAKTAPGKKRPVEPSPQRSPDSSTGIGKKGQQPARKRLNFGQTGDSESVPDPQPLGEPPAAPSGVGPNTMAAGGGAPMADNNEGADGVGSSSGNWHCDSTWLGDRVITTSTRTWALPTYNNHLYKQISNGTSGGATNDNTYFGYSTPWGYFDFNRFHCHFSPRDWQRLINNNWGFRPKRLSFKLFNIQVKEVTQNEGTKTIANNLTSTIQVFTDSEYQLPYVLGSAHQGCLPPFPADVFTIPQYGYLTLNNGSQAVGRSSFYCLEYFPSQMLRTGNNFQFTYTFEDVPFHSSYAHSQSLDRLMNPLIDQYLYYLSRIQTTGGTANTQTLGFSQGGPNTMANQAKNWLPGPCYRQQRVSTTTGQNNNSNFAWTAGTKYHLNGRNSLANPGIAMATHKDDEERFFPSNGILIFGKQNAARDNADYSDVIPTSEEEIKTTNPVATEEYGIVADNLQQQNTAPQIGTVNSQGALPGMVWQNRDVYLQGPIWAKIPHTDGNFHPSPLMGGFGLKHPPPQILIKNTPVPADPPTTFNQSKLNSFITQYSTGQVSVEIEWELQKENSKRWNPEIQYTSNYYKSTSVDFAVNTEGVYSEPRPIGTRYLTRNL

SEQ ID NO: 11621 - protein, 738 aa, Artificial Sequence
  source: /note="Description of Artificial Sequence: Synthetic polypeptide"
MAADGYLPDWLEDNLSEGIREWWALKPGAPKPKANQQKQDDGRGLVLPGYKYLGPFNGLDKGEPVNAADAAALEHDKAYDQQLQAGDNPYLRYNHADAEFQERLQEDTSFGGNLGRAVFQAKKRVLEPLGLVEEGAKTAPGKKRPVEPSPQRSPDSSTGIGKKGQQPARKRLNFGQTGDSESVPDPQPLGEPPAAPSGVGPNTMAAGGGAPMADNNEGADGVGSSSGNWHCDSTWLGDRVITTSTRTWALPTYNNHLYKQISNGTSGGATNDNTYFGYSTPWGYFDFNRFHCHFSPRDWQRLINNNWGFRPKRLSFKLFNIQVKEVTQNEGTKTIANNLTSTIQVFTDSEYQLPYVLGSAHQGCLPPFPADVFTIPQYGYLTLNNGSQAVGRSSFYCLEYFPSQMLRTGNNFQFTYTFEDVPFHSSYAHSQSLDRLMNPLIDQYLYYLSRIQTTGGTANTQTLGFSQGGPNTMANQAKNWLPGPCYRQQRVSTTTGQNNNSNFAWTAGTKYHLNGRNSLANPGIAMATHKDDEERFFPSNGILIFGKQNAARDNADYSDVMPTSEEEIKTTNPVATEEYGIVADNLQQQNTAPQIGTANSQGALPGMVWQNRDVYLQGPIWAKIPHTDGNFHPSPLMGGFGLKHPPPQILIKNTPVPADPPTTFNQSKLNSFITQYSTGQVSVEIEWELQKENSKRWNPEIQYTSNYYKSTSVDFAVNTEGVYSEPRPIGTRYLTRNL

SEQ ID NO: 11622 - protein, 738 aa, Artificial Sequence
  source: /note="Description of Artificial Sequence: Synthetic polypeptide"
MAADGYLPDWLEDNLSEGIREWWALKPGAPKPKANQQKQDDGRGLVLPGYKYLGPFNGLDKGEPVNAADAAALEHDKAYDQQLQAGDNPYLRYNHADAEFQERLQEDTSFGGNLGRAVFQAKKRVLEPLGLVEEGAKTAPGKKRPVEPSPQRSPDSSTGIGKKGQQPARKRLNFGQTGDSESVPDPQPLGEPPAAPSGVGPNTMAAGGGAPMADNNEGADGVGSSSGNWHCDSTWLGDRVITTSTRTWALPTYNNHLYKQISNGTSGGATNDNTYFGYSTPWGYFDFNRFHCHFSPRDWQRLINNNWGFRPKRLSFKLFNIQVKEVTQNEGTKTIANNLTSTIQVFTDSEYQLPYVLGSAHQGCLPPFPADVFTIPQYGYLTLNNGSQAVGRSSFYCLEYFPSQMLRTGNNFQFTYTFEDVPFHSSYAHSQSLDRLMNPLIDQYLYYLSRIQTTGGTANTQTLGFSQGGPNTMANQAKNWLPGPCYRQQRVSTTTGQNNNSNFAWTAGTKYHLNGRNSLANPGIAMATHKDDEERFFPSNGILIFGKQNAARDNADYSDVMPTSEEEIKTTNPVATEEYGIVADNLQQQNTAPQIGTVNSQGALPGMVWQNRDVYLQGPIWAKIPHTDGNFHPSPLMGGFGLKHPPPQILIKNTPVPADPPTTFNQSKLNSFITQYSTGQVGVEIEWELQKENSKRWNPEIQYTSNYYKSTSVDFAVNTEGVYSEPRPIGTRYLTRNL

SEQ ID NO: 11623 - protein, 738 aa, Artificial Sequence
  source: /note="Description of Artificial Sequence: Synthetic polypeptide"
MAADGYLPDWLEDNLSEGIREWWALKPGAPKPKANQQKQDDGRGLVLPGYKYLGPFNGLDKGEPVNAADAAALEHGKAYDQQLQAGDNPYLRYNHADAEFQERLQEDTSFGGNLGRAVFQAKKRVLEPLGLVEEGAKTAPGKKRPVEPSPQRSPDSSTGIGKKGQQPARKRLNFGQTGDSESVPDPQPLGEPPAAPSGVGPNTMAAGGGAPMADNNEGADGVGSSSGNWHCDSTWLGDRVITTSTRTWALPTYNNHLYKQISNGTSGGATNDNTYFGYSTPWGYFDFNRFHCHFSPRDWQRLINNNWGFRPKRLSFKLFNIQVKEVTQNEGTKTIANNLTSTIQVFTDSEYQLPYVLGSAHQGCLPPFPADVFTIPQYGYLTLNNGSQAVGRSSFYCLEYFPSQMLRTGNNFQFTYTFEDVPFHSSYAHSQSLDRLMNPLIDQYLYYLSRIQTTGGTANTQTLGFSQGGPNTMANQAKNWLPGPCYRQQRVSTTTGQNNNSNFAWTAGTKYHLNGRNSLANPGIAMATHKDDEERFFPSNGILIFGKQNAARDNADYSDVMPTSEEEIKTTNPVATEEYGIVADNLQQQNTAPQIGTVNSQGALPGMVWQNRDVYLQGPIWAKIPHTDGNFHPSPLMGGFGLKHPPPQILIKNTPVPADPPTTFNQSKLNSFITQYSTGQVSVEIEWELQKENSKRWNPEIQYTSNYYKSTSVDFAVNTEGVYSEPRPIGTRYLTRNL

SEQ ID NO: 11624 - protein, 738 aa, Artificial Sequence
  source: /note="Description of Artificial Sequence: Synthetic polypeptide"
MAADGYLPDWLEDNLSEGIREWWALKPGAPKPKANQQKQDDGRGLVLPGYKYLGPFNGLDKGEPVNAADAAALEHDKAYDQQLQAGDNPYLRYNHADAEFQERLQEDTSFGGNLGRAVFQAKKRVLEPLGLVEEGAKTAPGKKRPVEPSPQRSPDSSTGIGKKGQQPARKRLNFGQTGDSESVPDPQPLGEPPAAPSGVGPNTMAAGGGAPMADNNEGADGVGSSSGNWHCDSTWLGDRVITTSTRTWALPTYNNHLYKQISNGTSGGATNDNTYFGYSTPWGYFDFNRFHCHFSPRDWQRLINNNWGFRPKRLSFKLFNIQVKEVTQNEGTKTIANNLTSTIQVFTDSEYQLPYVLGSAHQGCLPPFPADVFTIPQYGYLTLNNGSQAVGRSSFYCLEYFPSQMLRTGNNFQFTYTFEDVPFHSSYAHSQSLDRLMNPLIDQYLYYLSRIQTTGGTANTQTLGFSQGGPNTMANQAKNWLPGPCYRQQRVSTTTGQNNNSNFAWTAGTKYHLNGRNSLANPGIAMATHKDDEERFFPSNGILIFGKQNAARDNADYSDVMPTSEEEIKTTNPVATGEYGIVADNLQQQNTAPQIGTVNSQGALPGMVWQNRDVYLQGPIWAKIPHTDGNFHPSPLMGGFGLKHPPPQILIKNTPVPADPPTTFNQSKLNSFITQYSTGQVSVEIEWELQKENSKRWNPEIQYTSNYYKSTSVDFAVNTEGVYSEPRPIGTRYLTRNL

SEQ ID NO: 11625 - protein, 738 aa, Artificial Sequence
  source: /note="Description of Artificial Sequence: Synthetic polypeptide"
MAADGYLPDWLEDNLSEGIREWWALKPGAPKPKANQQKQDDGRGLVLPGYKYLGPFNGLDKGEPVNAADAAALEHDKAYDQQLQAGDNPYLRYNHADAEFQERLQEDTSFGGNLGRAVFQAKKRVLEPLGLVEEGAKTAPGKKRPVEPSPQRSPDSSTGIGKKGQQPARKRLNFGQTGDSESVPDPQPLGEPPAAPSGVGPNTMAAGGGAPMADNNEGADGVGSSSGNWHCDSTWLGDRVITTSTRTWALPTHNNHLYKQISNGTSGGATNDNTYFGYSTPWGYFDFNRFHCHFSPRDWQRLINNNWGFRPKRLSFKLFNIQVKEVTQNEGTKTIANNLTSTIQVFTDSEYQLPYVLGSAHQGCLPPFPADVFTIPQYGYLTLNNGSQAVGRSSFYCLEYFPSQMLRTGNNFQFTYTFEDVPFHSSYAHSQSLDRLMNPLIDQYLYYLSRIQTTGGTANTQTLGFSQGGPNTMANQAKNWLPGPCYRQQRVSTTTGQNNNSNFAWTAGTKYHLNGRNSLANPGIAMATHKDDEERFFPSNGILIFGKQNAARDNADYSDVMPTSEEEIKTTNPVATEEYGIVADNLQQQNTAPQIGTVNSQGALPGMVWQNRDVYLQGPIWAKIPHTDGNFHPSPLMGGFGLKHPPPQILIKNTPVPADPPTTFNQSKLNSFITQYSTGQVSVEIEWELQKENSKRWNPEIQYTSNYYKSTSVDFAVNTEGVYSEPRPIGTRYLTRNL

SEQ ID NO: 11626 - protein, 738 aa, Artificial Sequence
  source: /note="Description of Artificial Sequence: Synthetic polypeptide"
MAADGYLPDWLEDNLSEGIREWWALKPGAPKPKANQQKQDDGRGLVLPGYKYLGPFNGLDKGEPVNAADAAALEHDKAYDQQLQAGDNPYLRYNHADAEFQERLQEDTSFGGNLGRAVFQAKKRVLEPLGLVEEGAKTAPGKKRPVEPSPQRSPDSSTGIGKKGQQPARKRLNFGQTGDSESVPDPQPLGEPPAAPSGVGPNTMAAGGGAPMADNNEGADGVGSSSGNWHCDSTWLGDRVITTSTRTWALPTYNNHLYKQISNGTSGGATNDNTYFGYSTPWGYFDFNRFHCHFSPRDWQRLINNNWGFRPKRLSFKLFNIQVKEVTQNEGTKTIANNLTSTIQVFTDSEYQLPYVLGSAHQGCLPPFPADVFTIPQYGYLTLNNGSQAVGRSSFYCLEYFPSQMLRTGNNFQFTYTFEDVPFHSSYAHSQSLDRLMNPLIDQYLYYLSRIQTTGGTANTQTLGFSQGGPNTMANQAKNWLPGPCYRQQRVSTTTGQNNNSNFAWTAGTKYHLNGRNSLANPGIAMATHKDDEERFFPSNGILIFGKQNAAIDNADYSDVMPTSEEEIKTTNPVATEEYGIVADNLQQQNTAPQIGTVNSQGALPGMVWQNRDVYLQGPIWAKIPHTDGNFHPSPLMGGFGLKHPPPQILIKNTPVPADPPTTFNQSKLNSFITQYSTGQVSVEIEWELQKENSKRWNPEIQYTSNYYKSTSVDFAVNTEGVYSEPRPIGTRYLTRNL

SEQ ID NO: 11627 - protein, 738 aa, Artificial Sequence
  source: /note="Description of Artificial Sequence: Synthetic polypeptide"
MAADGYLPDWLEDNLSEGIREWWALKPGAPKPKANQQKQDDGRGLVLPGYKYLGPFNGLDKGEPVNAADAAALEHDKAYDQQLQAGDNPYLRYNHADAEFQERLQEDTSFGGNLGRAVFQAKKRVLEPLGLVEEGAKTAPGKKRPVEPSPQRSPDSSTGIGKKGQQPARKRLNFGQTGDSESVPDPQPLGEPPAAPSGVGPNTMAAGGGAPMADNNEGADGVGSSSGNWHCDSTWLGDRVITTSTRTWALPTYNNHLYKQISNGTSGGATNDNTYFGYSTPWGYFDFNRFHCHFSPRDWQRLINNNWGFRPKRLSFKLFNIQVKEVTQNEGTKTIANNLTSTIQVFTDSEYQLPYVLGSAHQGCLPPFPADVFTIPQYGYLTLNNGSQAVGRSSFYCLEYFPSQMLRTGNNFQFTYTFEDVPFHSSYAHSQSLDRLMNPLIDQYLYYLSRIQTTGGTANTQTLGFSQGGPNTMANQAKNWLPGPCYRQQRVSTTTGQNNNSNFAWTAGTKYHLNGRNSLANPGIAMATHKDDEGRFFPSNGILIFGKQNAARDNADYSDVMPTSEEEIKTTNPVATEEYGIVADNLQQQNTAPQIGTVNSQGALPGMVWQNRDVYLQGPIWAKIPHTDGNFHPSPLMGGFGLKHPPPQILIKNTPVPADPPTTFNQSKLNSFITQYSTGQVSVEIEWELQKENSKRWNPEIQYTSNYYKSTSVDFAVNTEGVYSEPRPIGTRYLTRNL

SEQ ID NO: 11628 - protein, 738 aa, Artificial Sequence
  source: /note="Description of Artificial Sequence: Synthetic polypeptide"
MAADGYLPDWLEDNLSEGIREWWALKPGAPKPKANQQKQDDGRGLVLPGYKYLGPFNGLDKGEPVNAADAAALEHDKAYDQQLQAGDNPYLRYNHADAEFQERLQEDTSFGGNLGRAVFQAKKRVLEPLGLVEEGAKTAPGKKRPVEPSPQRSPDSSTGIGKKGQQPARKRLNFGQTGDSESVPDPQPLGEPPAAPSGVGPNTMAAGGGAPMADNNEGADGVGSSSGNWHCDSTWLGDRVITTSTRTWALPTYNNHLYKQISNGTSGGATNDNTYFGYSTPWGYFDFNRFHCHFSPRDWQRLINNNWGFRTKRLSFKLFNIQVKEVTQNEGTKTIANNLTSTIQVFTDSEYQLPYVLGSAHQGCLPPFPADVFTIPQYGYLTLNNGSQAVGRSSFYCLEYFPSQMLRTGNNFQFTYTFEDVPFHSSYAHSQSLDRLMNPLIDQYLYYLSRIQTTGGTANTQTLGFSQGGPNTMANQAKNWLPGPCYRQQRVSTTTGQNNNSNFAWTAGTKYHLNGRNSLANPGIAMATHKDDEERFFPSNGILIFGKQNAARDNADYSDVMPTSEEEIKTTNPVATEEYGIVADNLQQQNTAPQIGTVNSQGALPGMVWQNRDVYLQGPIWAKIPHTDGNFHPSPLMGGFGLKHPPPQILIKNTPVPADPPTTFNQSKLNSFITQYSTGQVSVEIEWELQKENSKRWNPEIQYTSNYYKSTSVDFAVNTEGVYSEPRPIGTRYLTRNL

SEQ ID NO: 11629 - protein, 738 aa, Artificial Sequence
  source: /note="Description of Artificial Sequence: Synthetic polypeptide"
MAADGYLPDWLEDNLSEGIREWWALKPGAPKPKANQQKQDDGRGLVLPGYKYLGPFNGLDKGEPVNAADAAALEHDKAYDQQLQAGDNPYLRYNHADAEFQERLQEDTSFGGNLGRAVFQAKKRVLEPLGLVEEGAKTAPGKKRPVEPSPQRSPDSSTGIGKKGQQPARKRLNFGQTGDSESVPDPQPLGEPPAAPSGVGPNTMAAGGGAPMADNNEGADGVGSSSGNWHCDSTWLGDRVITTSTRTWALPTYNNHLYKQISNGTSGGATNDNTYFGYSTPWGYFDFNRFHCHFSPRDWQRLINNNWGFRPKRLSFKLFNIQVKEVTQNEGTKTIANNLTSTIQVFTDSEYQLPYVLGSAHQGCLPPFPADVFTIPQYGYLTLNNGSQAVGRSSFYCLEYFPSQMLRTGNNFQFTYTFEDVPFHSSYAHSQSLDRLMNPLIDQYLYYLSRIQTTGGTANTQTLGFSQGGPNTMANQAKNWLPGPCYRQQRVSTTTGQNNNSNFAWTAGTKYHLNGRNSLANPGIAMATHKDDEERFFPSNGILIFGKQNAARDNADYSDVMPTSEEEIKTTNPVATEEYGIVADNLQQQNTAPQIGTVNSQGALPGMVWQNRDVYLQGPIWAKIPHTDGNFHPSPLMGGFGLKHPPPQILIKNTPVPADPPTTFNQSKLNSFITQCSTGQVSVEIEWELQKENSKRWNPEIQYTSNYYKSTSVDFAVNTEGVYSEPRPIGTRYLTRNL

SEQ ID NO: 11630 - protein, 738 aa, Artificial Sequence
  source: /note="Description of Artificial Sequence: Synthetic polypeptide"
MAADGYLPDWLEDNLSEGIREWWALKPGAPKPKANQQKQDDGRGLVLPGYKYLGPFNGLDKGEPVNAADAAALEHDKAYDQQLQAGDNPYLRYNHADAEFQERLQEDTSFGGNLGRAVFQAKKRVLEPLGLVEEGAKTAPGKKRPVEPSPQRSPDSSTGIGKKGQQPARKRLNFGQTGDSESVPDPQPLGEPPAAPSGVGPNTMAAGGGAPMADNNEGADGVGSSSGNWHCDSTWLGDRVITTSTRTWALPTYNNHLYKQISNGTSGGATNDNTYFGYSTPWGYFDFNRFHCHFSPRDWQRLINNNWGFRPKRLSFKLFNIQVKEVTQNEGTKTIANNLTSTIQVFTDSEYQLPYVLGSAHQGCLPPFPADVFTIPQYGYLTLNNGSQAVGRSSFYCLEYFPSQMLRTGNNFQFTYTFEDVPFRSSYAHSQSLDRLMNPLIDQYLYYLSRIQTTGGTANTQTLGFSQGGPNTMANQAKNWLPGPCYRQQRVSTTTGQNNNSNFAWTAGTKYHLNGRNSLANPGIAMATHKDDEERFFPSNGILIFGKQNAARDNADYSDVMPTSEEEIKTTNPVATEEYGIVADNLQQQNTAPQIGTVNSQGALPGMVWQNRDVYLQGPIWAKIPHTDGNFHPSPLMGGFGLKHPPPQILIKNTPVPADPPTTFNQSKLNSFITQYSTGQVSVEIEWELQKENSKRWNPEIQYTSNYYKSTSVDFAVNTEGVYSEPRPIGTRYLTRNL

SEQ ID NO: 11631 - protein, 738 aa, Artificial Sequence
  source: /note="Description of Artificial Sequence: Synthetic polypeptide"
MAADGYLPDWLEDNLSEGIREWWALKPGAPKPKANQQKQDDGRGLVLPGYKHLGPFNGLDKGEPVNAADAAALEHDKAYDQQLQAGDNPYLRYNHADAEFQERLQEDTSFGGNLGRAVFQAKKRVLEPLGLVEEGAKTAPGKKRPVEPSPQRSPDSSTGIGKKGQQPARKRLNFGQTGDSESVPDPQPLGEPPAAPSGVGPNTMAAGGGAPMADNNEGADGVGSSSGNWHCDSTWLGDRVITTSTRTWALPTYNNHLYKQISNGTSGGATNDNTYFGYSTPWGYFDFNRFHCHFSPRDWQRLINNNWGFRPKRLSFKLFNIQVKEVTQNEGTKTIANNLTSTIQVFTDSEYQLPYVLGSAHQGCLPPFPADVFTIPQYGYLTLNNGSQAVGRSSFYCLEYFPSQMLRTGNNFQFTYTFEDVPFHSSYAHSQSLDRLMNPLIDQYLYYLSRIQTTGGTANTQTLGFSQGGPNTMANQAKNWLPGPCYRQQRVSTTTGQNNNSNFAWTAGTKYHLNGRNSLANPGIAMATHKDDEERFFPSNGILIFGKQNAARDNADYSDVMPTSEEEIKTTNPVATEEYGIVADNLQQQNTAPQIGTVNSQGALPGMVWQNRDVYLQGPIWAKIPHTDGNFHPSPLMGGFGLKHPPPQILIKNTPVPADPPTTFNQSKLNSFITQYSTGQVSVEIEWELQKENSKRWNPEIQYTSNYYKSTSVDFAVNTEGVYSEPRPIGTRYLTRNL

SEQ ID NO: 11632 - protein, 738 aa, Artificial Sequence
  source: /note="Description of Artificial Sequence: Synthetic polypeptide"
MAADGYLPDWLEDNLSEGIREWWALKPGAPKPKANQQKQDDGRGLVLPGYKYLGPFNGLDKGEPVNAADAAALEHDKAYDQQLQAGDNPYLRYNHADAEFQERLQEDTSFGGNLGRAVFQAKKRVLEPLGLVEEGAKTAPGKKRPVEPSPQRSPDSSTGIGKKGQQPARKRLNFGQTGDSESVPDPQPLGEPPAAPSGVGPNTMAAGGGAPMADNNEGADGVGSSSGNWHCDSTWLGDRVITTSTRTWALPTYNNHLYKQISNGTSGGATNDNTYFGYSTPWGYFDFNRFHCHFSPRDWQRLINNNWGFRPKRLSFKLFNIQVKEVTQNEGTKTIANNLTSTIQVFTDSEYQLPYVLGSAHQGCLPPFPADVFTIPQYGYLTLNNGSQAVGRSSFYCLEYFPSQMLRTGNNFQFTYTFEDVPFHSSYAHSQSLDRLMNPLIDQYLYYLSRIQTTGGTANTQTLGFSQGGPNTMANQAKNWLPGPCYRQQRVSATTGQNNNSNFAWTAGTKYHLNGRNSLANPGIAMATHKDDEERFFPSNGILIFGKQNAARDNADYSDVMPTSEEEIKTTNPVATEEYGIVADNLQQQNTAPQIGTVNSQGALPGMVWQNRDVYLQGPIWAKIPHTDGNFHPSPLMGGFGLKHPPPQILIKNTPVPADPPTTFNQSKLNSFITQYSTGQVSVEIEWELQKENSKRWNPEIQYTSNYYKSTSVDFAVNTEGVYSEPRPIGTRYLTRNL

SEQ ID NO: 11633 - protein, 738 aa, Artificial Sequence
  source: /note="Description of Artificial Sequence: Synthetic polypeptide"
MAADGYLPDWLEDNLSEGIREWWALKPGAPKPKANQQKQDDGRGLVLPGYKYLGPFNGLDKGEPVNAADAAALEHDKAYDQQLQAGDNPYLRYNHADAEFQERLQEDTSFGGNLGRAVFQAKKRVLEPLGLVEEGAKTAPGKKRPVEPSPQRSPDSSTGIGKKGQQPARKRLNFGQTGGSESVPDPQPLGEPPAAPSGVGPNTMAAGGGAPMADNNEGADGVGSSSGNWHCDSTWLGDRVITTSTRTWALPTYNNHLYKQISNGTSGGATNDNTYFGYSTPWGYFDFNRFHCHFSPRDWQRLINNNWGFRPKRLSFKLFNIQVKEVTQNEGTKTIANNLTSTIQVFTDSEYQLPYVLGSAHQGCLPPFPADVFTIPQYGYLTLNNGSQAVGRSSFYCLEYFPSQMLRTGNNFQFTYTFEDVPFHSSYAHSQSLDRLMNPLIDQYLYYLSRIQTTGGTANTQTLGFSQGGPNTMANQAKNWLPGPCYRQQRVSTTTGQNNNSNFAWTAGTKYHLNGRNSLANPGIAMATHKDDEERFFPSNGILIFGKQNAARDNADYSDVMPTSEEEIKTTNPVATEEYGIVADNLQQQNTAPQIGTVNSQGALPGMVWQNRDVYLQGPIWAKIPHTDGNFHPSPLMGGFGLKHPPPQILIKNTPVPADPPTTFNQSKLNSFITQYSTGQVSVEIEWELQKENSKRWNPEIQYTSNYYKSTSVDFAVNTEGVYSEPRPIGTRYLTRNL

SEQ ID NO: 11634 - protein, 738 aa, Artificial Sequence
  source: /note="Description of Artificial Sequence: Synthetic polypeptide"
MAADGYLPDWLEDNLSEGIREWWALKPGAPKPKANQQKQDDGRGLVLPGYKYLGPFNGLDKGEPVNAADAAALEHDKAYDQQLQAGDNPYLRYNHADAEFQERLQEDTSFGGNLGRAVFQAKKRVLEPLGLVEEGAKTAPGKKRPVEPSPQRSPDSSTGIGKKGQQPARKRLNFGQTGDSESVPDPQPLGEPPAAPSGVGPNTMAAGGGAPMADNNEGADGVGSSSGNWHCDSAWLGDRVITTSTRTWALPTYNNHLYKQISNGTSGGATNDNTYFGYSTPWGYFDFNRFHCHFSPRDWQRLINNNWGFRPKRLSFKLFNIQVKEVTQNEGTKTIANNLTSTIQVFTDSEYQLPYVLGSAHQGCLPPFPADVFTIPQYGYLTLNNGSQAVGRSSFYCLEYFPSQMLRTGNNFQFTYTFEDVPFHSSYAHSQSLDRLMNPLIDQYLYYLSRIQTTGGTANTQTLGFSQGGPNTMANQAKNWLPGPCYRQQRVSTTTGQNNNSNFAWTAGTKYHLNGRNSLANPGIAMATHKDDEERFFPSNGILIFGKQNAARDNADYSDVMPTSEEEIKTTNPVATEEYGIVADNLQQQNTAPQIGTVNSQGALPGMVWQNRDVYLQGPIWAKIPHTDGNFHPSPLMGGFGLKHPPPQILIKNTPVPADPPTTFNQSKLNSFITQYSTGQVSVEIEWELQKENSKRWNPEIQYTSNYYKSTSVDFAVNTEGVYSEPRPIGTRYLTRNL

SEQ ID NO: 11635 - protein, 738 aa, Artificial Sequence
  source: /note="Description of Artificial Sequence: Synthetic polypeptide"
MAADGYLPDWLEDNLSEGIREWWALKPGAPKPKANQQKQDDGRGLVLPGYKYLGPFNGLDKGEPVNAADAAALEHDKAYDQQLQAGDNPYLRYNHADAEFQERLQEDTSFGGNLGRAVFQAKKRVLEPLGLVEEGAKTAPGKKRPVEPSPQRSPDSSTGIGKKGQQPARKRLNFGQTGDSESVPDPQPLGEPPAAPSGVGPNTMAAGGGAPMADNNEGADGVGSSSGNWHCDSTWLGDRVITTSTRTWALPTYNNHLYKQISNGTSGGATNDNTYFGYSTPWGYFDFNRFHCHFSPRDWQRLINNNWGFRPKRLSFKLFNIQVKEVTQNEGTKTIANNLTSTIQVFTDSEYQLPYVLGSAHRGCLPPFPADVFTIPQYGYLTLNNGSQAVGRSSFYCLEYFPSQMLRTGNNFQFTYTFEDVPFHSSYAHSQSLDRLMNPLIDQYLYYLSRIQTTGGTANTQTLGFSQGGPNTMANQAKNWLPGPCYRQQRVSTTTGQNNNSNFAWTAGTKYHLNGRNSLANPGIAMATHKDDEERFFPSNGILIFGKQNAARDNADYSDVMPTSEEEIKTTNPVATEEYGIVADNLQQQNTAPQIGTVNSQGALPGMVWQNRDVYLQGPIWAKIPHTDGNFHPSPLMGGFGLKHPPPQILIKNTPVPADPPTTFNQSKLNSFITQYSTGQVSVEIEWELQKENSKRWNPEIQYTSNYYKSTSVDFAVNTEGVYSEPRPIGTRYLTRNL

SEQ ID NO: 11636 - protein, 738 aa, Artificial Sequence
  source: /note="Description of Artificial Sequence: Synthetic polypeptide"
MAADGYLPDWLEDNLSEGIREWWALKPGAPKPKANQQKQDDGRGLVLPGYKYLGPFNGLDKGEPVNAADAAALEHDKAYDQQLQAGDNPYLRYNHADAEFQERLQEDTSFGGNLGRAVFQAKKRVLEPLGLVEEGAKTAPGKKRPVEPSPQRSPDSSTGIGKKGQQPARKRLNFGQTGDSESVPDPQPLGEPPAAPSGVGPNTMAAGGGAPMADNNEGADGVGSSSGNWHCDSTWLGDRVITTSTRTWALPTYNNHLYKQISNGTSGGATNDNTYFGYSTPWGYFDFNRFHCHFSPRDWQRLINNNWGFRPKRLSFKLFNIQVKEVTQNEGTKTIANNLTSTIQVFTDSEYQLPYVLGSAHQGCLPPFPADVFTIPQYGYLTLNNGSQAVGRSSFYCLEYFPSQMLRTGNNFQFTYTFEDVPFHSSYAHSQSLDRLMNPLIDQYLYYLSRIQTTGGTANTQTLGFSQGGPNTMANQAKNWLPGPCYRQQRVSTTTGQNNNSNFAWTAGTKYHLNGRNSLANPGIAMATHKDDEERFFPSNGILIFGKQNAARDNADYSDVMPTSEEEIKTTNPVATEEYGIVADNLQQQNTAPQIGTVNSQGALPGMVWQNRDVYLQGPIWAKIPHTDGNFHPSPLMGGFGLKHPPPQILIKNTPVSADPPTTFNQSKLNSFITQYSTGQVSVEIEWELQKENSKRWNPEIQYTSNYYKSTSVDFAVNTEGVYSEPRPIGTRYLTRNL

SEQ ID NO: 11637 - protein, 738 aa, Artificial Sequence
  source: /note="Description of Artificial Sequence: Synthetic polypeptide"
MAADGYLPDWLEDNLSEGIREWWALKPGAPKPKANQQKQDDGRGLVLPGYRYLGPFNGLDKGEPVNAADAAALEHDKAYDQQLQAGDNPYLRYNHADAEFQERLQEDTSFGGNLGRAVFQAKKRVLEPLGLVEEGAKTAPGKKRPVEPSPQRSPDSSTGIGKKGQQPARKRLNFGQTGDSESVPDPQPLGEPPAAPSGVGPNTMAAGGGAPMADNNEGADGVGSSSGNWHCDSTWLGDRVITTSTRTWALPTYNNHLYKQISNGTSGGATNDNTYFGYSTPWGYFDFNRFHCHFSPRDWQRLINNNWGFRPKRLSFKLFNIQVKEVTQNEGTKTIANNLTSTIQVFTDSEYQLPYVLGSAHQGCLPPFPADVFTIPQYGYLTLNNGSQAVGRSSFYCLEYFPSQMLRTGNNFQFTYTFEDVPFHSSYAHSQSLDRLMNPLIDQYLYYLSRIQTTGGTANTQTLGFSQGGPNTMANQAKNWLPGPCYRQQRVSTTTGQNNNSNFAWTAGTKYHLNGRNSLANPGIAMATHKDDEERFFPSNGILIFGKQNAARDNADYSDVMPTSEEEIKTTNPVATEEYGIVADNLQQQNTAPQIGTVNSQGALPGMVWQNRDVYLQGPIWAKIPHTDGNFHPSPLMGGFGLKHPPPQILIKNTPVPADPPTTFNQSKLNSFITQYSTGQVSVEIEWELQKENSKRWNPEIQYTSNYYKSTSVDFAVNTEGVYSEPRPIGTRYLTRNL

SEQ ID NO: 11638 - protein, 738 aa, Artificial Sequence
  source: /note="Description of Artificial Sequence: Synthetic polypeptide"
MAADGYLPDWLEDNLSEGIREWWALKPGAPKPKANQQKQDDGRGLVLPGYKYLGPFNGLDKGEPVNAADAAALEHDKAYDQQLQAGDNPYLRYNHADAEFQERLQEDTSFGGNLGRAVFQAKKRVLEPLGLVEEGAKTAPGKKRPVEPSPQRSPDSSTGIGKKGQQPARKRLNFGQTGDSESVPDPQPLGEPPAAPSGVGPNTMAAGGGAPMADNNEGADGVGSSSGNWHCDSTWLGDRVITTSTRTWALPTYNNHLYKQISNGTSGGATNDNTYFGYSTPWGYFDFNRFHCHFSPRDWQRLINNNWGFRPKRLSFKLFNIQVKEVTQNEGTKTIANNLTSTIQVFTDSEYQLPYVLGSAHQGCLPPFPADVFTIPQYGYLTLNNGSQAVGRSSFYCLEYFPSQMLRTGNNFQFTYTFEDVPFHSSYAHSQSLDRLMNPLIDQYLYYLSRIQTTGGTANTQTLGFSQGGPNTMANQAKNWLPGPCYRQQRVSTTTGQNNNSNFAWTAGTKYRLNGRNSLANPGIAMATHKDDEERFFPSNGILIFGKQNAARDNADYSDVMPTSEEEIKTTNPVATEEYGIVADNLQQQNTAPQIGTVNSQGALPGMVWQNRDVYLQGPIWAKIPHTDGNFHPSPLMGGFGLKHPPPQILIKNTPVPADPPTTFNQSKLNSFITQYSTGQVSVEIEWELQKENSKRWNPEIQYTSNYYKSTSVDFAVNTEGVYSEPRPIGTRYLTRNL

SEQ ID NO: 11639 - protein, 738 aa, Artificial Sequence
  source: /note="Description of Artificial Sequence: Synthetic polypeptide"
MAADGYLPDWLEDNLSEGIREWWALKPGAPKPKANQQKQDDGRGLVLPGYKYLGPFNGLDKGEPVNAADAAALEHDKAYDQQLQAGDNPYLRYNHADAEFQERLQEDTSFGGNLGRAVFQAKKRVLEPLGLVEEGAKTAPGKKRPVEPSPQRSPDSSTGIGKKGQQPARKRLNFGQTGDSESAPDPQPLGEPPAAPSGVGPNTMAAGGGAPMADNNEGADGVGSSSGNWHCDSTWLGDRVITTSTRTWALPTYNNHLYKQISNGTSGGATNDNTYFGYSTPWGYFDFNRFHCHFSPRDWQRLINNNWGFRPKRLSFKLFNIQVKEVTQNEGTKTIANNLTSTIQVFTDSEYQLPYVLGSAHQGCLPPFPADVFTIPQYGYLTLNNGSQAVGRSSFYCLEYFPSQMLRTGNNFQFTYTFEDVPFHSSYAHSQSLDRLMNPLIDQYLYYLSRIQTTGGTANTQTLGFSQGGPNTMANQAKNWLPGPCYRQQRVSTTTGQNNNSNFAWTAGTKYHLNGRNSLANPGIAMATHKDDEERFFPSNGILIFGKQNAARDNADYSDVMPTSEEEIKTTNPVATEEYGIVADNLQQQNTAPQIGTVNSQGALPGMVWQNRDVYLQGPIWAKIPHTDGNFHPSPLMGGFGLKHPPPQILIKNTPVPADPPTTFNQSKLNSFITQYSTGQVSVEIEWELQKENSKRWNPEIQYTSNYYKSTSVDFAVNTEGVYSEPRPIGTRYLTRNL

SEQ ID NO: 11640 - protein, 738 aa, Artificial Sequence
  source: /note="Description of Artificial Sequence: Synthetic polypeptide"
MAADGYLPDWLEDNLSEGIREWWALKPGAPKPKANQQKQDDGRGLVLPGYKYLGPFNGLDKGEPVNAADAAALEHDKAYDQQLQAGDNPYLRYNHADAEFQERLQEDTSFGGNLGRAVFQAKKRVLEPLGLVEEGAKTAPGKKRPVEPSPQRSPDPSTGIGKKGQQPARKRLNFGQTGDSESVPDPQPLGEPPAAPSGVGPNTMAAGGGAPMADNNEGADGVGSSSGNWHCDSTWLGDRVITTSTRTWALPTYNNHLYKQISNGTSGGATNDNTYFGYSTPWGYFDFNRFHCHFSPRDWQRLINNNWGFRPKRLSFKLFNIQVKEVTQNEGTKTIANNLTSTIQVFTDSEYQLPYVLGSAHQGCLPPFPADVFTIPQYGYLTLNNGSQAVGRSSFYCLEYFPSQMLRTGNNFQFTYTFEDVPFHSSYAHSQSLDRLMNPLIDQYLYYLSRIQTTGGTANTQTLGFSQGGPNTMANQAKNWLPGPCYRQQRVSTTTGQNNNSNFAWTAGTKYHLNGRNSLANPGIAMATHKDDEERFFPSNGILIFGKQNAARDNADYSDVMPTSEEEIKTTNPVATEEYGIVADNLQQQNTAPQIGTVNSQGALPGMVWQNRDVYLQGPIWAKIPHTDGNFHPSPLMGGFGLKHPPPQILIKNTPVPADPPTTFNQSKLNSFITQYSTGQVSVEIEWELQKENSKRWNPEIQYTSNYYKSTSVDFAVNTEGVYSEPRPIGTRYLTRNL

SEQ ID NO: 11641 - protein, 738 aa, Artificial Sequence
  source: /note="Description of Artificial Sequence: Synthetic polypeptide"
MAADGYLPDWLEDNLSEGIREWWALKPGAPKPKANQQKQDDGRGLVLPGYKYLGPFNGLDKGEPVNAADAAALEHDKAYDQQLQAGDNPYLRYNHADAEFQERLQEDTSFGGNLGRAVFQAKKRVLEPLGLVEEGAKTAPGKKRPVEPSPQRSPDSSTGIGKKGQQPARKRLNFGQTGDSESVPDPQPLGEPPAAPSGVGPNTMAAGGGAPMADNNEGADGVGSSSGNWHCDSTWLGDRVITTSTRTWALPTYNNHLYKQISNGTSGGATNDNTYFGYSTPWGYFDFNRFHCHFSPRDWQRLINNNWGFRPKRLSFKLFNIQVKEVTQNEGTKTIANNLTSTIQVFTDSEYRLPYVLGSAHQGCLPPFPADVFTIPQYGYLTLNNGSQAVGRSSFYCLEYFPSQMLRTGNNFQFTYTFEDVPFHSSYAHSQSLDRLMNPLIDQYLYYLSRIQTTGGTANTQTLGFSQGGPNTMANQAKNWLPGPCYRQQRVSTTTGQNNNSNFAWTAGTKYHLNGRNSLANPGIAMATHKDDEERFFPSNGILIFGKQNAARDNADYSDVMPTSEEEIKTTNPVATEEYGIVADNLQQQNTAPQIGTVNSQGALPGMVWQNRDVYLQGPIWAKIPHTDGNFHPSPLMGGFGLKHPPPQILIKNTPVPADPPTTFNQSKLNSFITQYSTGQVSVEIEWELQKENSKRWNPEIQYTSNYYKSTSVDFAVNTEGVYSEPRPIGTRYLTRNL

SEQ ID NO: 11642 - protein, 738 aa, Artificial Sequence
  source: /note="Description of Artificial Sequence: Synthetic polypeptide"
MAADGYLPDWLEDNLSEGIREWWALKPGAPKPKANQQKQDDGRGLVLPGYKYLGPFNGLDKGEPVNAADAAALEHDKAYDQQLQAGDNPYLRYNHADAEFQERLQEDTSFGGNLGRAVFQAKKRVLEPLGLVEEGAKTAPGKKRPVEPSPQRSPDSSTGIGKKGQQPARKRLNFGQTGDSESVPDPQPLGEPPAAPSGVGPNTMAAGGGAPMADNNEGADGVGSSSGNWHCDSTWLGDRVITTSTRTWALPTYNNHLYKQISNGTSGGATNDNTYFGYSTPWGYFDFNRFHCHFSPRDWQRLINNNWGFRPKRLSFKLFNIQVKEVTQNEGTKTIANNLTSTIQVFTDSEYQLPYVLGSAHQGCLPPFPADVFTIPQYGYLTLNNGSQAVGRSSFYCLEYFPSQMLRTGNNFQFTYTFEDVPFHSSYAHSQSLDRLMNPLIDQYLYYLSRIQTTGGTANTQTLGFSQGGPNTMANQAKNWLPGPCYRQQRVSTTTGQNNNSNFAWTAGTKYHLNGRNSLANPGIAMATHKDDEERFFPSNGILIFGKQNAARDNADYSDVMPTSEEEIKTTNPVATEEYGIVADNLQQQNTAPQIGTVNSQGALPGMVWQNRDVYLQGPIWAKIPHTDGNFHPSPLMGGFGLKHPPPQILIKNTPVPADPPTTFNQPKLNSFITQYSTGQVSVEIEWELQKENSKRWNPEIQYTSNYYKSTSVDFAVNTEGVYSEPRPIGTRYLTRNL

SEQ ID NO: 11643 - protein, 738 aa, Artificial Sequence
  source: /note="Description of Artificial Sequence: Synthetic polypeptide"
MAADGYLPDWLEDNLSEGIREWWALKPGAPKPKANQQKQDDGRGLVLPGYKYLGPFNGLDKGEPVNAADAAALEHDKAYDQQLQAGGNPYLRYNHADAEFQERLQEDTSFGGNLGRAVFQAKKRVLEPLGLVEEGAKTAPGKKRPVEPSPQRSPDSSTGIGKKGQQPARKRLNFGQTGDSESVPDPQPLGEPPAAPSGVGPNTMAAGGGAPMADNNEGADGVGSSSGNWHCDSTWLGDRVITTSTRTWALPTYNNHLYKQISNGTSGGATNDNTYFGYSTPWGYFDFNRFHCHFSPRDWQRLINNNWGFRPKRLSFKLFNIQVKEVTQNEGTKTIANNLTSTIQVFTDSEYQLPYVLGSAHQGCLPPFPADVFTIPQYGYLTLNNGSQAVGRSSFYCLEYFPSQMLRTGNNFQFTYTFEDVPFHSSYAHSQSLDRLMNPLIDQYLYYLSRIQTTGGTANTQTLGFSQGGPNTMANQAKNWLPGPCYRQQRVSTTTGQNNNSNFAWTAGTKYHLNGRNSLANPGIAMATHKDDEERFFPSNGILIFGKQNAARDNADYSDVMPTSEEEIKTTNPVATEEYGIVADNLQQQNTAPQIGTVNSQGALPGMVWQNRDVYLQGPIWAKIPHTDGNFHPSPLMGGFGLKHPPPQILIKNTPVPADPPTTFNQSKLNSFITQYSTGQVSVEIEWELQKENSKRWNPEIQYTSNYYKSTSVDFAVNTEGVYSEPRPIGTRYLTRNL

SEQ ID NO: 11644 - protein, 738 aa, Artificial Sequence
  source: /note="Description of Artificial Sequence: Synthetic polypeptide"
MAADGYLPDWLEDNLSEGIREWWALKPGAPKPKANQQKQDDGRGLVLPGYKYLGPFNGLDKGEPVNAADAAALEHDKAYDQQLQAGDNPYLRYNHADAEFQERLQEDTSFGGNLGRAVFQAKKRVLEPLGLVEEGAKTAPGKKRPVEPSPQRSPDSSTGIGKKGQQPARKRLNFGQTGDSESVPDPQPLGEPPAAPSGVGPNTMAAGGGAPMADNNEGADGVGSSSGNWHCDSTWLGDRVITTSTRTWALPTYNNHLYKQISNGTSGGATNDNTYFGYSTPWGYFDFNRFHCHFSPRDWQRLINNNWGFRPKRLSFKLFNIQVKEVTQNEGTKTIANNLTSTIQVFTDSEYQLPYVLGSAHQGCLPPFPADVFTIPQYGYLTLNNGSQAVGRSSFYCLEYFPSQMLRTGNNFQFTYTFEDVPFHSSYAHSQSLDRLMNPLIDQYLYYLSRIQTTGGTANTQTLGFSQGGPNTMANQAKNWLPGPCYRQQRVSTATGQNNNSNFAWTAGTKYHLNGRNSLANPGIAMATHKDDEERFFPSNGILIFGKQNAARDNADYSDVMPTSEEEIKTTNPVATEEYGIVADNLQQQNTAPQIGTVNSQGALPGMVWQNRDVYLQGPIWAKIPHTDGNFHPSPLMGGFGLKHPPPQILIKNTPVPADPPTTFNQSKLNSFITQYSTGQVSVEIEWELQKENSKRWNPEIQYTSNYYKSTSVDFAVNTEGVYSEPRPIGTRYLTRNL

SEQ ID NO: 11645 - protein, 738 aa, Artificial Sequence
  source: /note="Description of Artificial Sequence: Synthetic polypeptide"
MAADGYLPDWLEDNLSEGIREWWALKPGAPKPKANQQKQDDGRGLVLPGYKYLGPFNGLDKGEPVNAADAAALEHDKAYDQQLQAGDNPYLRYNHADAEFQERLQEDTSFGGNLGRAVFQAKKRVLEPLGLVEEGAKTAPGKKRPVEPSPQRSPDSSTGIGKKGQQPARKRLNFGQTGDSESVPDPQPLGEPPAAPSGVGPNTMAAGGGAPMADNNEGADGVGSSSGNWHCDSTWLGDRVITTSTRTWALPTYNNHLYKQISNGTSGGATNDNTYFGYSTPWGYFDFNRFHCHFSPRDWQRLINNNWGFRPKRLSFKLFNIQVKEVTQNEGTKTIANNLTSTIQVFTDSEYQLPYVLGSAHQGCPPPFPADVFTIPQYGYLTLNNGSQAVGRSSFYCLEYFPSQMLRTGNNFQFTYTFEDVPFHSSYAHSQSLDRLMNPLIDQYLYYLSRIQTTGGTANTQTLGFSQGGPNTMANQAKNWLPGPCYRQQRVSTTTGQNNNSNFAWTAGTKYHLNGRNSLANPGIAMATHKDDEERFFPSNGILIFGKQNAARDNADYSDVMPTSEEEIKTTNPVATEEYGIVADNLQQQNTAPQIGTVNSQGALPGMVWQNRDVYLQGPIWAKIPHTDGNFHPSPLMGGFGLKHPPPQILIKNTPVPADPPTTFNQSKLNSFITQYSTGQVSVEIEWELQKENSKRWNPEIQYTSNYYKSTSVDFAVNTEGVYSEPRPIGTRYLTRNL

SEQ ID NO: 11646 - protein, 738 aa, Artificial Sequence
  source: /note="Description of Artificial Sequence: Synthetic polypeptide"
MAADGYLPDWLEDNLSEGIREWWALKPGAPKPKANQQKQDDGRGLVLPGYKYLGPFNGLDKGEPVNAADAAALEHDKAYDQQPQAGDNPYLRYNHADAEFQERLQEDTSFGGNLGRAVFQAKKRVLEPLGLVEEGAKTAPGKKRPVEPSPQRSPDSSTGIGKKGQQPARKRLNFGQTGDSESVPDPQPLGEPPAAPSGVGPNTMAAGGGAPMADNNEGADGVGSSSGNWHCDSTWLGDRVITTSTRTWALPTYNNHLYKQISNGTSGGATNDNTYFGYSTPWGYFDFNRFHCHFSPRDWQRLINNNWGFRPKRLSFKLFNIQVKEVTQNEGTKTIANNLTSTIQVFTDSEYQLPYVLGSAHQGCLPPFPADVFTIPQYGYLTLNNGSQAVGRSSFYCLEYFPSQMLRTGNNFQFTYTFEDVPFHSSYAHSQSLDRLMNPLIDQYLYYLSRIQTTGGTANTQTLGFSQGGPNTMANQAKNWLPGPCYRQQRVSTTTGQNNNSNFAWTAGTKYHLNGRNSLANPGIAMATHKDDEERFFPSNGILIFGKQNAARDNADYSDVMPTSEEEIKTTNPVATEEYGIVADNLQQQNTAPQIGTVNSQGALPGMVWQNRDVYLQGPIWAKIPHTDGNFHPSPLMGGFGLKHPPPQILIKNTPVPADPPTTFNQSKLNSFITQYSTGQVSVEIEWELQKENSKRWNPEIQYTSNYYKSTSVDFAVNTEGVYSEPRPIGTRYLTRNL

SEQ ID NO: 11647 - protein, 738 aa, Artificial Sequence
  source: /note="Description of Artificial Sequence: Synthetic polypeptide"
MAADGYLPDWLEDNLSEGIREWWALKPGAPKPKANQQKQDDGRGLVLPGYKYLGPFNGLDKGEPVNAADAAALEHDKAYDQQLQAGDNPYLRYNHADAEFQERLQEDTSFGGNLGRAVFQAKKRVLEPLGLVEEGAKTAPGKKRPVEPSPQRSPDSSTGIGKKGQQPARKRLNFGQTGDSESVPDPQPLGEPPAAPSGVGPNTMAAGGGAPMADNNEGADGVGSSSGNWHCDSTWLGDRVITTSTRTWALPTYNNHLYKQISNGTSGGATNDNTYFGYSTPWGYFDFNRFHCHFSPRDWQRLINNNWGFRPKRLSFKLFNIQVKEVTQNEGTKTIANNLTSTIQVFTDSEYQLPYVLGSAHQGCLPPFPADVFTIPQYGYLTLNNGSQAVGRSSFYCLEYLPSQMLRTGNNFQFTYTFEDVPFHSSYAHSQSLDRLMNPLIDQYLYYLSRIQTTGGTANTQTLGFSQGGPNTMANQAKNWLPGPCYRQQRVSTTTGQNNNSNFAWTAGTKYHLNGRNSLANPGIAMATHKDDEERFFPSNGILIFGKQNAARDNADYSDVMPTSEEEIKTTNPVATEEYGIVADNLQQQNTAPQIGTVNSQGALPGMVWQNRDVYLQGPIWAKIPHTDGNFHPSPLMGGFGLKHPPPQILIKNTPVPADPPTTFNQSKLNSFITQYSTGQVSVEIEWELQKENSKRWNPEIQYTSNYYKSTSVDFAVNTEGVYSEPRPIGTRYLTRNL

SEQ ID NO: 11648 - protein, 738 aa, Artificial Sequence
  source: /note="Description of Artificial Sequence: Synthetic polypeptide"
MAADGYLPDWLEDNLSEGIREWWALKPGAPKPKANQQKQDDGRGLVLPGYKYLGPFNGLDKGEPVNAADAAALEHDKAYDQQLRAGDNPYLRYNHADAEFQERLQEDTSFGGNLGRAVFQAKKRVLEPLGLVEEGAKTAPGKKRPVEPSPQRSPDSSTGIGKKDQQPARKRLNFGQTGDSESVPDPQPLGEPPAAPSGVGPNTMAAGGGAPMADNNEGADGVGSSSGNWHCDSTWLGDRVITTSTRTWALPTYNNHLYKQISNGTSGGATNDNTYFGYSTPWGYFDFNRFHCHFSPRDWQRLINNNWGFRPKRLSFKLFNIQVKEVTQNEGTKTIANNLTSTIQVFTDSEYQLPYVLGSAHQGCLPPFPADVFTIPQYGYLTLNNGSQAVGRSSFYCLEYFPSQMLRTGNNFQFTYTFEDVPFHSSYAHSQSLDRLMNPLIDQYLYYLSRIQTTGGTANTQTLGFSQGGPNTMANQAKNWLPGPCYRQQRVSTTTGQNNNSNFAWTAGTKYHLNGRNSLANPGIAMATHKDDEERFFPSNGILIFGKQNAARDNADYSDVMPTSEEEIKTTNPVATEEYGIVADNLQQQNTAPQIGTVNSQGALPGMVWQNRDVYLQGPIWAKIPHTDGNFHPSPLMGGFGLKHPPPQILIKNTPVPADPPTTFNQSKLNSFITQYSTGQVSVEIEWELQKENSKRWNPEIQYTSNYYKSTSVDFAVNTEGVYSEPRPIGTRYLTRNL

SEQ ID NO: 11649 - protein, 738 aa, Artificial Sequence
  source: /note="Description of Artificial Sequence: Synthetic polypeptide"
MAADGYLPDWLEDNLSEGIREWWALKPGAPKPKANQQKQDDGRGLVLPGYKYLGPFNGLDKGEPVNAADAAALEHDKAYDQQLQAGDNPYLRYNHADAEFQERLQEDTSFGGNLGRAVFQAKKRVLEPLGLVEEGAKTAPGKKRPVEPSPQRSPDSSTGIGKKGQQPARKRLNFGQTGDSESVPDPQPLGEPPAAPSGVGPNTMAAGGGAPMADNNEGADGVGSSSGNWHCDSTWLGDRVITTSTRTWALPTYNNHLYKQISNGTSGGATNDNTYFGYSTPWGYFDFNRFHCHFSPRDWQRLINNNWGFRPKRLSFKLFNIQVKEVTQNEGTKTIANNLTSTIQVFTDSEYQLPYVLGSAHQGCLPPFPADVFTIPQYGYLTLNNGSQAVGRSSFYCLEYFPSQMLRTGNNFQFTYTFEDVPFHSSYAHSQSLDRLMNPLIDQYLYYLSRIQTTGGTANTQTLGFSQGGPNTMANQAKNWLPGPCYRQQRVSTTTGQNNNSNFAWTAGTKYHLNGRNSLANPGIAMATHKDDEERFFPSNGILIFGKQNAARDNADYSDVMPTSEEEIKTTNPVATEEYGIVADNLQQQNTAPQIGTVNSQGALPGMVWQNRDVYLQGPIWAKIPRTDGNFHPSPLMGGFGLKHPPPQILIKNTPVPADPPTTFNQSKLNSFITQYSTGQVSVEIEWELQKENSKRWNPEIQYTSNYYKSTSVDFAVNTEGVYSEPRPIGTRYLTRNL

SEQ ID NO: 11650 - protein, 738 aa, Artificial Sequence
  source: /note="Description of Artificial Sequence: Synthetic polypeptide"
MAADGYLPDWLEDNLSEGIREWWALKPGAPKPKANQQKQDDGRGLVLPGYKYLGPFNGLDKGEPVNAADAAALEHDKAYDQQLQAGDNPYLRYNHADAEFQERLQEDTSFGGNLGRAVFQAKKRVLEPLGLVEEGAKTAPGKKRPVEPSPQRSPDSSTGIGKKGQQPARKRLNFGQTGDSESVPDPQPLGEPPAAPSGVGPNTMAAGGGAPMADNNEGADGVGSSSGNWHCDSTWLGDRVITTSTRTWALPTYNNHLYKQISNGTSGGATNDNTYFGYSTPWGYFDFNRFHCHFSPRDWQRLINNNWGFRPKRLSFKLFNIQVKEVTQNEGTKTIANNLTSTIQVFTDSEYQLPYVLGSAHQGCLPPFPADVFTIPQYGYLTLNNGSQAVGRSSFYCLEYFPSQMLRTGNNFQFTYTFEDVPFHSSYAHSQSLDRLMNPLIDQYLYYLSRIQTTGGTANTQTLGFSQGGPNTMANQAKNWLPGPCYRQQRVSTTTGQNNNSNFAWTAGTKYHLNGRNSLANPGIAMATHKDDEERFFPSNGILIFGKQNAARDNADYSDVMPTSEEEIKTTNPVATEEYGIVADNLQQQNTAPQIGTVNSQGALPGMVWQNRDVYLQGPIWAKIPHTDGNFHPSPLMGGFGLKHPPPQILIKNTPVPADPPTTFNQSKLNSFITQYSTGQVSVEIGWELQKENSKRWNPEIQYTSNYYKSTSVDFAVNTEGVYSEPRPIGTRYLTRNL

SEQ ID NO: 11651 - protein, 738 aa, Artificial Sequence
  source: /note="Description of Artificial Sequence: Synthetic polypeptide"
MAADGYLPDWLEDNLSEGIREWWALKPGAPKPKANQQKQDDGRGLVLPGYKYLGPFNGLDKGEPVNAADAAALEHDKAYDQQLQAGDNPYLRYNHADAEFQERLQEDTSFGGNLGRAVFQAKKRVLEPLGLVEEGAKTAPGKKRPVEPSPQRSPDSSTGIGKKGQQPARKRLNFGQTGDSESVPDPQPLGEPPAAPSGVGPNTMATGGGAPMADNNEGADGVGSSSGNWHCDSTWLGDRVITTSTRTWALPTYNNHLYKQISNGTSGGATNDNTYFGYSTPWGYFDFNRFHCHFSPRDWQRLINNNWGFRPKRLSFKLFNIQVKEVTQNEGTKTIANNLTSTIQVFTDSEYQLPYVLGSAHQGCLPPFPADVFTIPQYGYLTLNNGSQAVGRSSFYCLEYFPSQMLRTGNNFQFTYTFEDVPFHGSYAHSQSLDRLMNPLIDQYLYYLSRIQTTGGTANTQTLGFSQGGPNTMANQAKNWLPGPCYRQQRVSTTTGQNNNSNFAWTAGTKYHLNGRNSLANPGIAMATHKDDEERFFPSNGILIFGKQNAARDNADYSDVMPTSEEEIKTTNPVATEEYGIVADNLQQQNTAPQIGTVNSQGALPGMVWQNRDVYLQGPIWAKIPHTDGNFHPSPLMGGFGLKHPPPQILIKNTPVPADPPTTFNQSKLNSFITQYSTGQVSVEIEWELQKENSKRWNPEIQYTSNYYKSTSVDFAVNTEGVYSEPRPIGTRYLTRNL

SEQ ID NO: 11652 - protein, 738 aa, Artificial Sequence
  source: /note="Description of Artificial Sequence: Synthetic polypeptide"
MAADGYLPDWLEDNLSEGIREWWALKPGAPKPKANQQKQDDGRGLVLPGYKYLGPFNGLDKGEPVNAADAAALEHDKAYDQQLQAGDNPYLRYNHADAEFQERLQEDTSFGGNLGRAVFQAKKRVLEPLGLVEEGAKTAPGKKRPVEPSPQRSPDSSTGIGKKGQQPARKRLNFGQTGDSESVPDPQPLGEPPAAPSGVGPNTMAAGGGAPMADNNEGADGVGSSSGNWHCDSTWLGDRVITTSTRTWALPTYNNHLYKQISNGTSGGATNDNTYFGYSTPWGYFDFNRFHCHFSPRDWQRLINNNWGFRPKRLSFKLFNIQVKEVTQNEGTKTIANNLTSTIQVFTDSEYLLPYVLGSAHQGCLPPFPADVFTIPQYGYLTLNNGSQAVGRSSFYCLEYFPSQMLRTGNNFQFTYTFEDVPFHSSYAHSQSLDRLMNPLIDQYLYYLSRIQTTGGTANTQTLGFSQGGPNTMANQAKNWLPGPCYRQQRVSTTTGQNNNSNFAWTAGTKYHLNGRNSLANPGIAMATHKDDEERFFPSNGILIFGKQNAARDNADYSDVMPTSEEEIKTTNPVATEEYGIVADNLQQQNTAPQIGTVNSQGALPGMVWQNRDVYLQGPIWAKIPHTDGNFHPSPLMGGFGLKHPPPQILIKNTPVPADPPTTFNQSKLNSFITQYSTGQVSVEIEWELQKENSKRWNPEIQYTSNYYKSTSVDFAVNTEGVYSEPRPIGTRYLTRNL

SEQ ID NO: 11653 - protein, 738 aa, Artificial Sequence
  source: /note="Description of Artificial Sequence: Synthetic polypeptide"
MAADGYPPDWLEDNLSEGIREWWALKPGAPKPKANQQKQDDGRGLVLPGYKYLGPFNGLDKGEPVNAADAAALEHDKAYDQQLQAGDNPYLRYNHADAEFQERLQEDTSFGGNLGRAVFQAKKRVLEPLGLVEEGAKTAPGKKRPVEPSPQRSPDSSTGIGKKGQQPARKRLNFGQTGDSESVPDPQPLGEPPAAPSGVGPNTMAAGGGAPMADNNEGADGVGSSSGNWHCDSTWLGDRVITTSTRTWALPTYNNHLYKQISNGTSGGATNDNTYFGYSTPWGYFDFNRFHCHFSPRDWQRLINNNWGFRPKRLSFKLFNIQVKEVTQNEGTKTIANNLTSTIQVFTDSEYQLPYVLGSAHQGCLPPFPADVFTIPQYGYLTLNNGSQAVGRSSFYCLEYFPSQMLRTGNNFQFTYTFEDVPFHSSYAHSQSLDRLMNPLIDQYLYYLSRIQTTGGTANTQTLGFSQGGPNTMANQAKNWLPGPCYRQQRVSTTTGQNNNSNFAWTAGTKYHLNGRNSLANPGIAMATHKDDEERFFPSNGILIFGKQNAARDNADYSDVMPTSEEEIKTTNPVATEEYGIVADNLQQQNTAPQIGTVNSQGALPGMVWQNRDVYLQGPIWAKIPHTDGNFHPSPLMGGFGLKHPPPQILIKNTPVPADPPTTFNQSKLNSFITQYSTGQVSVEIEWELQKENSKRWNPEIQYTSNYYKSTSVDFAVNTEGVYSEPRPIGTRYLTRNL

SEQ ID NO: 11654 - protein, 738 aa, Artificial Sequence
  source: /note="Description of Artificial Sequence: Synthetic polypeptide"
MAADGYLPDWLEDNLSEGIREWWALKPGAPKPKANQQKQDDGRGLVLPGYKYLGPFNGLDKGEPVNAADAAALEHDKAYDQQLQAGDNPYLRYNHADAEFQERLQEDTSFGGNLGRAVFQAKKRVLEPLGLVEEGAKTAPGKKRPVEPSPQRSPDSSTGIGKKGQQPARKRLNFGQTGDSESVPDPQPLGEPPAAPSGVGPNTMAAGGGAPMADNNEGADGVGSSSGNWHCDSTWLGDRVITTSTRTWALPTYNNHLYKQISNGTSGGATNDNTYFGYSTPWGYFDFNRFHCHFSPRDWQRLINNNWGFRPKRLSFKLFNIQVKEVTQNEGTKTIANNLTSTIQVFTDSEYQLPYVLGSAHQGCLPPFPADVFTIPQYGYLTLNNGSQAVGRSSFYCLEYFPSQMLRTGNNFQFTYTFEDVPFHSSYAHSQSLDRLMNPLIDQYLYYLSRIQTTGGTANTQTLGSSQGGPNTMANQAKNWLPGPCYRQQRVSTTTGQNNNSNFAWTAGTKYHLNGRNSLANPGIAMATHKDDEERFFPSNGILIFGKQNAARDNADYSDVMPTSEEEIKTTNPVATEEYGIVADNLQQQNTAPQIGTVNSQGALPGMVWQNRDVYLQGPIWAKIPHTDGNFHPSPLMGGFGLKHPPPQILIKNTPVPADPPTTFNQSKLNSFITQYSTGQVSVEIEWELQKENSKRWNPEIQYTSNYYKSTSVDFAVNTEGVYSEPRPIGTRYLTRNL

SEQ ID NO: 11655 - protein, 738 aa, Artificial Sequence
  source: /note="Description of Artificial Sequence: Synthetic polypeptide"
MAADGYLPDWLEDNLSEGIREWWALKPGAPKPKANQQKQDDGRGLVLPGYKYLGPFNGLDKGEPVNAADAAALEHDKAYDQQLQAGDNPYLRYNHADAEFQERLQEDTSFGGNLGRAVFQAKKRVLEPLGLVEEGAKTAPGKKRPVEPSPQRSPDSSTGIGKKGQQPARKRLNFGQTGDSESVPDPQPLGEPPAAPSGVGPNTMAAGGGAPMADNNEGADGVGSSSGNWHCDSTWLGDRVITTSTRTWALPTYNNHLYKQISNGTSGGATNDNTYFGYSTPWGYFDFNRFHCHFSPRDWQRLINNNWGFRPKRLSFKLFNIQVKEVTQNEGTKTIANNLTSTIQVFTDSEYQLPYVLGSAHQGCLPPFPADVFTIPQYGYLTLNNGSQAVGRSSFYCLEYFPSQMLRTGNNFQFTYTFEDVPFHSSYAHSQSLDRLMNPLIGQYLYYLSRIQTTGGTANTQTLGFSQGGPNTMANQAKNWLPGPCYRQQRVSTTTGQNNNSNFAWTAGTKYHLNGRNSLANPGIAMATHKDDEERFFPSNGILIFGKQNAARDNADYSDVMPTSEEEIKTTNPVATEEYGIVADNLQQQNTAPQIGTVNSQGALPGMVWQNRDVYLQGPIWAKIPHTDGNFHPSPLMGGFGLKHPPPQILIKNTPVPADPPTTFNQSKLNSFITQYSTGQVSVEIEWELQKENSKRWNPEIQYTSNYYKSTSVDFAVNTEGVYSEPRPIGTRYLTRNL

SEQ ID NO: 11656 - protein, 738 aa, Artificial Sequence
  source: /note="Description of Artificial Sequence: Synthetic polypeptide"
MAADGYLPDWLEDNLSEGIREWWALKPGAPKPKANQQKQDDGRGLVLPGYKYLGPFNGLDKGEPVNAADAAALEHDKAYDQQLQAGDNPYLRYNHADAEFQERLQEDTSFGGNLGRAVFQAKKRVLEPLGLVEEGAKTAPGKKRPVEPSPQRSPDSSTGIGKKGQQPARKRLNFGQTGDSESVPDPQPLGEPPAAPSGVGPNTMAAGGGAPMADNNEGADGVGSSSGNWHCDSTWLGDRVITTSTRTWALPTYNNHLYKQISNGTSGGATNDNTYFGYSTPWGYFDFNRFHCHFSPRDWQRLINNNWGFRPKRPSFKLFNIQVKEVTQNEGTKTIANNLTSTIQVFTDSEYQLPYVLGSAHQGCLPPFPADVFTIPQYGYLTLNNGSQAVGRSSFYCLEYFPSQMLRTGNNFQFTYTFEDVPFHSSYAHSQSLDRLMNPLIDQYLYYLSRIQTTGGTANTQTLGFSQGGPNTMANQAKNWLPGPCYRQQRVSTTTGQNNNSNFAWTAGTKYHLNGRNSLANPGIAMATHKDDEERFFPSNGILIFGKQNAARDNADYSDVMPTSEEEIKTTNPVATEEYGIVADNLQQQNTAPQIGTVNSQGALPGMVWQNRDVYLQGPIWAKIPHTDGNFHPSPLMGGFGLKHPPPQILIKNTPVPADPPTTFNQSKLNSFITQYSTGQVSVEIEWELQKENSKRWNPEIQYTSNYYKSTSVDFAVNTEGVYSEPRPIGTRYLTRNL

SEQ ID NO: 11657 - protein, 738 aa, Artificial Sequence
  source: /note="Description of Artificial Sequence: Synthetic polypeptide"
MAADGYLPDWLEDNLSEGIREWWALKPGAPKPKANQQKQDDGRGLVLPGYKYLGPFNGLDKGEPVNAADAAALEHDKAYDQQLQAGDNPYLRYNHADAEFQERLQEDTSFGGNLGRAVFQAKKRVLEPLGLVEEGAKTAPGKKRPVEPSPQRSPDSSTGIGKKGQQPARKRLNFGQTGDSESVPDPQPLGEPPAAPSGVGPNTMAAGGGAPMADNNEGADGVGSSSGNWHCDSTWLGDRVITTSTRTWALPTYNNHLYKQISNGTSGGATNDNTYFGYSTPWGYFDFNRFHCHFSPRDWQRLINNNWGFRPKRLSFKLFNIQVKEVTQNEGTKTIANNLTSTIQVFTDSEYQLPYVLGSAHQGCLPPFPADVFTIPQYGYLTLNNGSQAVGRSSFYCLEYFPSQMLRTGNNFQFTYTFEDVPFHSSYAHSQSLDRLMNPLIDQYLYYLSRIQTTGGTANTQTLGFSQGGPNTMANQAKNWLPGPCYRQQRVSTTTGQNNNSNFAWTAGTKYHLNGRNSLANPGIAMATHKDDGERFFPSNGILIFGKQNAARDNADYSDVMPTSEEEIKTTNPVATEEYGIVADNLQQQNTAPQIGTVNSQGALPGMVWQNRDVYLQGPIWAKIPHTDGNFHPSPLMGGFGLKHPPPQILIKNTPVPADPPTTFNQSKLNSFITQYSTGQVSVEIEWELQKENSKRWNPEIQYTSNYYKSTSVDFAVNTEGVYSEPRPIGTRYLTRNL

SEQ ID NO: 11658 - protein, 738 aa, Artificial Sequence
  source: /note="Description of Artificial Sequence: Synthetic polypeptide"
MAADGYLPDWLEDNLSEGIREWWALKPGAPKPKANQQKQDDGRGLVLPGYKYLGPFNGLDKGEPVNAADAAALEHDKAYDQQLQAGDNPYLRYNHADAEFQERLQEDTSFGGNLGRAVFQAKKRVLEPLGLVEEGAKTAPGKKRPVEPSPQRSPDSSTGIGKKGQQPARKRLNFGQTGDSESVPDPQPLGEPPAAPSGVGPNTMAAGGGAPMADNNEGADGVGSSSGNWHCDSTWLGDRVITTSTRTWAPPTYNNHLYKQISNGTSGGATNDNTYFGYSTPWGYFDFNRFHCHFSPRDWQRLINNNWGFRPKRLSFKLFNIQVKEVTQNEGTKTIANNLTSTIQVFTDSEYQLPYVLGSAHQGCLPPFPADVFTIPQYGYLTLNNGSQAVGRSSFYCLEYFPSQMLRTGNNFQFTYTFEDVPFHSSYAHSQSLDRLMNPLIDQYLYYLSRIQTTGGTANTQTLGFSQGGPNTMANQAKNWLPGPCYRQQRVSTTTGQNNNSNFAWTAGTKYHLNGRNSLANPGIAMATHKDDEERFFPSNGILIFGKQNAARDNADYSDVMPTSEEEIKTTNPVATEEYGIVADNLQQQNTAPQIGTVNSQGALPGMVWQNRDVYLQGPIWAKIPHTDGNFHPSPLMGGFGLKHPPPQILIKNTPVPADPPTTFNQSKLNSFITQYSTGQVSVEIEWELQKENSKRWNPEIQYTSNYYKSTSVDFAVNTEGVYSEPRPIGTRYLTRNL

SEQ ID NO: 11659 - protein, 738 aa, Artificial Sequence
  source: /note="Description of Artificial Sequence: Synthetic polypeptide"
MAADGYLPDWLEDNLSEGIREWWALKPGAPKPKANQQKQDDGRGLVLPGYKYLGPFNGLDKGEPVNAADAAALEHDKAYDQQLQAGDNPYLRYNHADAEFQERLQEDTSFGGNLGRAVFQAKKRVLEPLGLVEEGAKTAPGKKRPVEPSPQRSPDSSTGIGKKGQQPARKRLNFGQTGDSESVPDPQPLGEPPAAPSGVGPNTMAAGGGAPMADNNEGADGVGSSSGNWHCDSTWLGDRVITTSTRTWALPTYNNHLYKQISNGTSGGATNDNTYFGYSTPWGYFDFNRFHCHFSPRDWQRLINNNWGFRPKRLGFKLFNIQVKEVTQNEGTKTIANNLTSTIQVFTDSEYQLPYVLGSAHQGCLPPFPADVFTIPQYGYLTLNNGSQAVGRSSFYCLEYFPSQMLRTGNNFQFTYTFEDVPFHSSYAHSQSLDRLMNPLIDQYLYYLSRIQTTGGTANTQTLGFSQGGPNTMANQAKNWLPGPCYRQQRVSTTTGQNNNSNFAWTAGTKYHLNGRNSLANPGIAMATHKDDEERFFPSNGILIFGKQNAARDNADYSDVMPTSEEEIKTTNPVATEEYGIVADNLQQQNTAPQIGTVNSQGALPGMVWQNRDVYLQGPIWAKIPHTDGNFHPSPLMGGFGLKHPPPQILIKNTPVPADPPTTFNQSKLNSFITQYSTGQVSVEIEWELQKENSKRWNPEIQYTSNYYKSTSVDFAVNTEGVYSEPRPIGTRYLTRNL

SEQ ID NO: 11660 - protein, 738 aa, Artificial Sequence
  source: /note="Description of Artificial Sequence: Synthetic polypeptide"
MAADGYLPDWLEDNLSEGIREWWALKPGAPKPKANQQKQDDGRGLVLPGYKYLGPFNGLDKGEPVNAADAAALEHDKAYDQQLQAGDNPYLRYNHADAEFQERLQEDTSFGGNLGRAVFQAKKRVLEPLGLVEEGAKTAPGKKRPVEPSPQRSPDSSTGIGKKGQQPARKRLNFGRTGDSESVPDPQPLGEPPAAPSGVGPNTMAAGGGAPMADNNEGADGVGSSSGNWHCDSTWLGDRVITTSTRTWALPTYNNHLYKQISNGTSGGATNDNTYFGYSTPWGYFDFNRFHCHFSPRDWQRLINNNWGFRPKRLSFKLFNIQVKEVTQNEGTKTIANNLTSTIQVFTDSEYQLPYVLGSAHQGCLPPFPADVFTIPQYGYLTLNNGSQAVGRSSFYCLEYFPSQMLRTGNNFQFTYTFEDVPFHSSYAHSQSLDRLMNPLIDQYLYYLSRIQTTGGTANTQTLGFSQGGPNTMANQAKNWLPGPCYRQQRVSTTTGQNNNSNFAWTAGTKYHLNGRNSLANPGIAMATHKDDEERFFPSNGILIFGKQNAARDNADYSDVMPTSEEEIKTTNPVATEEYGIVADNLQQQNTAPQIGTVNSQGALPGMVWQNRDVYLQGPIWAKIPHTDGNFHPSPLMGGFGLKHPPPQILIKNTPVPADPPTTFNQSKLNSFITQYSTGQVSVEIEWELQKENSKRWNPEIQYTSNYYKSTSVDFAVNTEGVYSEPRPIGTRYLTRNL

SEQ ID NO: 11661 - protein, 738 aa, Artificial Sequence
  source: /note="Description of Artificial Sequence: Synthetic polypeptide"
MAADGYLPDWLEDNLSEGIREWWALKPGAPKPKANQQKQDDGRGLVLPGYKYLGPFNGLDKGEPVNAADAAALEHDKAYDQQLQAGDNPYLRYNHADAEFQERLQEDTSFGGNLGRAVFQAKKRVLEPLGLVEEGAKTAPGKKRPVEPSPQRSPDSSTGIGKKGQQPARKRLNFGQTGDSESVPDPQPLGEPPAAPSGVGPNTMAAGGGAPMADNNEGADGVGSSSGNWHCDSTWLGDRVITTSTRTWALPTYNNHLYKQISNGTSGGATNDNTYFGYSTPWGYFDFNRFHCHFSPRDWQRLINNNWGFRPKRLSFKLFNIQVKEVTQNEGTKTIANNLTSTIQVFTDSEYQLPYVLGSAHQGCLPPFPADVFTIPQYGYLTLNNGSQAVGRSSFYCLEYFPSQMLRTGNNFQFTYTFEDVPFHSSYAHSQSLDRLMNPLIDQYLYYLSRIQTTGGTANTQTLGFSQGGPNTVANQAKNWLPGPCYRQQRVSTTTGQNNNSNFAWTAGTKYHLNGRNSLANPGIAMATHKDDEERFFPSNGILIFGKQNAARDNADYSDVMPTSEEEIKTTNPVATEEYGIVADNLQQQNTAPQIGTVNSQGALPGMVWQNRDVYLQGPIWAKIPHTDGNFHPSPLMGGFGLKHPPPQILIKNTPVPADPPTTFNQSKLNSFITQYSTGQVSVEIEWELQKENSKRWNPEIQYTSNYYKSTSVDFAVNTEGVYSEPRPIGTRYLTRNL

SEQ ID NO: 11662 - protein, 738 aa, Artificial Sequence
  source: /note="Description of Artificial Sequence: Synthetic polypeptide"
MAADGYLPDWLEDNLSEGIREWWALKPGAPKPKANQQKQDDGRGLVLPGYKYLGPFNGLDKGEPVNAADAAALEHDKAYDQQLQAGDNPYLRYNHADAEFQERLQEDTSFGGNLGRAVFQAKKRVLEPLGLVEEGAKTAPGKKRPVEPSPQRSPDSSTGIGKKGQQPARKRLNFGQTGDSESVPDPQPLGEPPAAPSGVGPNTMAAGGGAPMADNNEGADGVGSSSGNWHCDSTWLGDRVITTSTRTWALPTYNNHLYKQISNGTSGGATNDNTYFGYSTPWGYFDFNRFHCHFSPRDWQRLINNNWGFRPKRLSFKLFNIQVKEVTQNEGTKTIANNLTSTIQVFTDSEYQLPYVLGSAHQGCLPPFPADVFTIPQYGYLTLNNGSQAVGRSSFYCPEYFPSQMLRTGNNFQFTYTFEDVPFHSSYAHSQSLDRLMNPLIDQYLYYLSRIQTTGGTANTQTLGFSQGGPNTMANQAKNWLPGPCYRQQRVSTTTGQNNNSNFAWTAGTKYHLNGRNSLANPGIAMATHKDDEERFFPSNGILIFGKQNAARDNADYSDVMPTSEEEIKTTNPVATEEYGIVADNLQQQNTAPQIGTVNSQGALPGMVWQNRDVYLQGPIWAKIPHTDGNFHPSPLMGGFGLKHPPPQILIKNTPVPADPPTTFNQSKLNSFITQYSTGQVSVEIEWELQKENSKRWNPEIQYTSNYYKSTSVDFAVNTEGVYSEPRPIGTRYLTRNL

SEQ ID NO: 11663 - protein, 738 aa, Artificial Sequence
  source: /note="Description of Artificial Sequence: Synthetic polypeptide"
MAADGYLPDWLEDNLSEGIREWWALKPGAPKPKANQQKQDDGRGLVLPGYKYLGPFNGLDKGEPVNAADAAALEHDKAYDQQLQAGDNPYLRYNHADAEFQERLQEDTSFGGNLGRAVFQAKKRVLEPLGLVEEGAKTAPGKKRPVEPSPQRSPDSSTGIGKKGQQPARKRLNFGQTGDSESVPDPQPLGEPPAAPSGVGPNTMAAGGGAPMADNNEGADGVGSSSGNWHCDSTWLGDRVITTSTRTWALPTYNNHLYKQISNGTSGGATNDNTYFGYSTPWGYFDFNRFHCHFSPRDWQRLINNNWGFRPKRLSFKLFNIQVKEVTQNEGTKTIANNLTSTIQVFTDSEYQLPYVLGSAHQGCLPPFPADVFTIPQYGYLTLNNGSQAVGRSSFYCLEYFPSQMLRTGNNFQFTYTFEDVPFHSSYAHSQSLDRLMNPLIDQYLYYLSRIQTTGGTANTQTLGFSQGGPNTMANQAKNWLPGPCYRQQRVSTTTGQNNNSNFAWTAGTKYHLNGRNSLANPGIAMATHKDDEERFFPSNGILIFGKQNAARDNADYSDVMPTSEEEIKTTNPVATEEYGIVADSLQQQNTAPQIGTVNSQGALPGMVWQNRDVYLQGPIWAKIPHTDGNFHPSPLMGGFGLKHPPPQILIKNTPVPADPPTTFNQSKLNSFITQYSTGQVSVEIEWELQKENSKRWNPEIQYTSNYYKSTSVDFAVNTEGVYSEPRPIGTRYLTRNL

SEQ ID NO: 11664 - protein, 738 aa, Artificial Sequence
  source: /note="Description of Artificial Sequence: Synthetic polypeptide"
MAADGYLPDWLEDNLSEGIREWWALKPGAPKPKANQQKQGDGRGLVLPGYKYLGPFNGLDKGEPVNAADAAALEHDKAYDQQLQAGDNPYLRYNHADAEFQERLQEDTSFGGNLGRAVFQAKKRVLEPLGLVEEGAKTAPGKKRPVEPSPQRSPDSSTGIGKKGQQPARKRLNFGQTGDSESVPDPQPLGEPPAAPSGVGPNTMAAGGGAPMADNNEGADGVGSSSGNWHCDSTWLGDRVITTSTRTWALPTYNNHLYKQISNGTSGGATNDNTYFGYSTPWGYFDFNRFHCHFSPRDWQRLINNNWGFRPKRLSFKLFNIQVKEVTQNEGTKTIANNLTSTIQVFTDSEYQLPYVLGSAHQGCLPPFPADVFTIPQYGYLTLNNGSQAVGRSSFYCLEYFPSQMLRTGNNFQFTYTFEDVPFHSSYAHSQSLDRLMNPLIDQYLYYLSRIQTTGGTANTQTLGFSQGGPNTMANQAKNWLPGPCYRQQRVSTTTGQNNNSNFAWTAGTKYHLNGRNSLANPGIAMATHKDDEERFFPSNGILIFGKQNAARDNADYSDVMPTSEEEIKTTNPVATEEYGIVADNLQQQNTAPQIGTVNSQGALPGMVWQNRDVYLQGPIWAKIPHTDGNFHPSPLMGGFGLKHPPPQILIKNTPVPADPPTTFNQSKLNSFITQYSTGQVSVEIEWELQKENSKRWNPEIQYTSNYYKSTSVDFAVNTEGVYSEPRPIGTRYLTRNL

SEQ ID NO: 11665 - protein, 738 aa, Artificial Sequence
  source: /note="Description of Artificial Sequence: Synthetic polypeptide"
MAADGYLPDWLEDNLSEGIREWWALKPGAPKPKANQQKQDDGRGLVLPGYKYLGPFNGLDKGEPVNAADAAALEHDKAYDQQLQAGDNPYLRYNHADAEFQERLQEDTSFGGNLGRAVFQAKKRVLEPLGLVEEGAKTAPGKKRPVEPSPQRSPDSSTGIGKKGQQPARKRLNFGQTGDSESVPDPQPLGEPPAAPSGVGPNTMAAGGGAPMADNNEGADGVGSSSGNWHCDSTWLGDRVITTSTRTWALPTYNNHLYKQISNGTSGGATNDNTYFGYSTPWGYFDFNRFHCHFSPRDWQRLINNNWGFRPKRLSSKLFNIQVKEVTQNEGTKTIANNLTSTIQVFTDSEYQLPYVLGSAHQGCLPPFPADVFTIPQYGYLTLNNGSQAVGRSSFYCLEYFPSQMLRTGNNFQFTYTFEDVPFHSSYAHSQSLDRLMNPLIDQYLYYLSRIQTTGGTANTQTLGFSQGGPNTMANQAKNWLPGPCYRQQRVSTTTGQNNNSNFAWTAGTKYHLNGRNSLANPGIAMATHKDDEERFFPSNGILIFGKQNAARDNADYSDVMPTSEEEIKTTNPVATEEYGIVADNLQQQNTAPQIGTVNSQGALPGMVWQNRDVYLQGPIWAKIPHTDGNFHPSPLMGGFGLKHPPPQILIKNTPVPADPPTTFNQSKLNSFITQYSTGQVSVEIEWELQKENSKRWNPEIQYTSNYYKSTSVDFAVNTEGVYSEPRPIGTRYLTRNL

SEQ ID NO: 11666 - protein, 738 aa, Artificial Sequence
  source: /note="Description of Artificial Sequence: Synthetic polypeptide"
MAADGYLPDWLEDNLSEGIREWWALKPGAPKPKANQQKQDDGRGLVLPGYKYLGPFNGLDKGEPVNAADAAALEHDKAYDQQLQAGDNPYLRYNHADAEFQERLQEDTSFGGNLGRAVFQAKKRVLEPLGLVEEGAKTAPGKKRPVEPSPQRSPDSSTGIGKKGQQPARKRLNFGQTGDSESVPDPQPLGEPPAAPSGVGPNTMAAGGGAPMADNNEGADGVGSSSGNWHCDSTWLGDRVITTSTRTWALPTYNNHLYKQISNGTSGGATNDNTYFGYSTPWGYFDFNRFHCHFSPRDWQRLINNNWGFRPKRLSFKLFNIQVKEVTQNEGTKTIANNLTSTIQVFTDSEYQLPYVLGSAHQGCLPPFPADVFTIPQYGYLTLNNGSQAVGRSSFYCLEYFPSQMLRTGNNFQFTYAFEDVPFHSSYAHSQSLDRLMNPLIDQYLYYLSRIQTTGGTANTQTLGFSQGGPNTMANQAKNWLPGPCYRQQRVSTTTGQNNNSNFAWTAGTKYHLNGRNSLANPGIAMATHKDDEERFFPSNGILIFGKQNAARDNADYSDVMPTSEEEIKTTNPVATEEYGIVADNLQQQNTAPQIGTVNSQGALPGMVWQNRDVYLQGPIWAKIPHTDGNFHPSPLMGGFGLKHPPPQILIKNTPVPADPPTTFNQSKLNSFITQYSTGQVSVEIEWELQKENSKRWNPEIQYTSNYYKSTSVDFAVNTEGVYSEPRPIGTRYLTRNL

SEQ ID NO: 11667 - protein, 738 aa, Artificial Sequence
  source: /note="Description of Artificial Sequence: Synthetic polypeptide"
MAADGYLPDWLEDNLSEGIREWWALKPGAPKPKANQQKQDDGRGLVLPGYKYLGPFNGLDKGEPVNAADAAALEHDKAYDQQLQAGDNPYLRYNHADAEFQERLQEDTSFGGNLGRAVFQAKKRVLEPLGLVEEGAKTAPGKKRPVEPSPQRSPDSSTGIGKKGQQPARKRLNFGQTGDSESVPDPQPLGEPPAAPSGVGPNTMAAGGGAPMADNNEGADGVGSSSGNWHCDSTWLGDRVITTSTRTWALPAYNNHLYKQISNGTSGGATNDNTYFGYSTPWGYFDFNRFHCHFSPRDWQRLINNNWGFRPKRLSFKLFNIQVKEVTQNEGTKTIANNLTSTIQVFTDSEYQLPYVLGSAHQGCLPPFPADVFTIPQYGYLTLNNGSQAVGRSSFYCLEYFPSQMLRTGNNFQFTYTFEDVPFHSSYAHSQSLDRLMNPLIDQYLYYLSRIQTTGGTANTQTLGFSQGGPNTMANQAKNWLPGPCYRQQRVSTTTGQNNNSNFAWTAGTKYHLNGRNSLANPGIAMATHKDDEERFFPSNGILIFGKQNAARDNADYSDVMPTSEEEIKTTNPVATEEYGIVADNLQQQNTAPQIGTVNSQGALPGMVWQNRDVYLQGPIWAKIPHTDGNFHPSPLMGGFGLKHPPPQILIKNTPVPADPPTTFNQSKLNSFITQYSTGQVSVEIEWELQKENSKRWNPEIQYTSNYYKSTSVDFAVNTEGVYSEPRPIGTRYLTRNL

SEQ ID NO: 11668 - protein, 738 aa, Artificial Sequence
  source: /note="Description of Artificial Sequence: Synthetic polypeptide"
MAADGYLPDWLEDNLSEGIREWWALKPGAPKPKANQQKQDDGRGLVLPGYKYLGPFNGLDKGEPVNAADAAALEHDKAYDQQLQAGDNPYLRYNHADAEFQERLQEDTSFGGSLGRAVFQAKKRVLEPLGLVEEGAKTAPGKKRPVEPSPQRSPDSSTGIGKKGQQPARKRLNFGQTGDSESVPDPQPLGEPPAAPSGVGPNTMAAGGGAPMADNNEGADGVGSSSGNWHCDSTWLGDRVITTSTRTWALPTYNNHLYKQISNGTSGGATNDNTYFGYSTPWGYFDFNRFHCHFSPRDWQRLINNNWGFRPKRLSFKLFNIQVKEVTQNEGTKTIANNLTSTIQVFTDSEYQLPYVLGSAHQGCLPPFPADVFTIPQYGYLTLNNGSQAVGRSSFYCLEYFPSQMLRTGNNFQFTYTFEDVPFHSSYAHSQSLDRLMNPLIDQYLYYLSRIQTTGGTANTQTLGFSQGGPNTMANQAKNWLPGPCYRQQRVSTTTGQNNNSNFAWTAGTKYHLNGRNSLANPGIAMATHKDDEERFFPSNGILIFGKQNAARDNADYSDVMPTSEEEIKTTNPVATEEYGIVADNLQQQNTAPQIGTVNSQGALPGMVWQNRDVYLQGPIWAKIPHTDGNFHPSPLMGGFGLKHPPPQILIKNTPVPADPPTTFNQSKLNSFITQYSTGQVSVEIEWELQKENSKRWNPEIQYTSNYYKSTSVDFAVNTEGVYSEPRPIGTRYLTRNL

SEQ ID NO: 11669 - protein, 738 aa, Artificial Sequence
  source: /note="Description of Artificial Sequence: Synthetic polypeptide"
MAADGYLPDWLEDNLSEGIREWWALKPGAPKPKANQQKQDDGRGLVLPGYKYLGPFNGLDKGEPVNAADAAALEHDKAYDQQLQAGDNPYLRYNHADAEFQERLQEDTSFGGNLGRAVFQAKKRVLEPLGLVEEGAKTAPGKKRPVEPSPQRSPDSSTGIGKKGQQPARKRLNFGQTGDSESVPDPQPLGEPPAAPSGVGPNTMAAGGGAPMADNNEGADGVGSSSGNWHCDSTWLGDRVITTSTRTWALPTYNNHLYKQISNGTSGGATNDNTYFGYSTPWGYFDFNRFHCHFSPRDWQRLINNNWGFRPKRLSFKLFNIQVKEVTQNEGTKTIANNLTSTIQVFTDSEYQLPYVLGSAHQGCLPPFPADVFTIPQYGYLTLNNGSQAVGRSSFYCLEYFPSQMLRTGNNFQFTYTFEDVPFHSSYAHSQSLDRLMNPLIDQYLYYLSRIQTTGGTANTQTLGFSQGGPNTMANQATNWLPGPCYRQQRVSTTTGQNNNSNFAWTAGTKYHLNGRNSLANPGIAMATHKDDEERFFPSNGILIFGKQNAARDNADYSDVMPTSEEEIKTTNPVATEEYGIVADNLQQQNTAPQIGTVNSQGALPGMVWQNRDVYLQGPIWAKIPHTDGNFHPSPLMGGFGLKHPPPQILIKNTPVPADPPTTFNQSKLNSFITQYSTGQVSVEIEWELQKENSKRWNPEIQYTSNYYKSTSVDFAVNTEGVYSEPRPIGTRYLTRNL

SEQ ID NO: 11670 - protein, 738 aa, Artificial Sequence
  source: /note="Description of Artificial Sequence: Synthetic polypeptide"
MAADGYLPDWLEDNLSEGIREWWALKPGAPKPKANQQKQDDGRGLVLPGYKYLGPFNGLDKGEPVNAADAAALEHDKAYGQQLQAGDNPYLRYNHADAEFQERLQEDTSFGGNLGRAVFQAKKRVLEPLGLVEEGAKTAPGKKRPVEPSPQRSPDSSTGIGKKGQQPARKRLNFGQTGDSESVPDPQPLGEPPAAPSGVGPNTMAAGGGAPMADNNEGADGVGSSSGNWHCDSTWLGDRVITTSTRTWALPTYNNHLYKQISNGTSGGATNDNTYFGYSTPWGYFDFNRFHCHFSPRDWQRLINNNWGFRPKRLSFKLFNIQVKEVTQNEGTKTIANNLTSTIQVFTDSEYQLPYVLGSAHQGCLPPFPADVFTIPQYGYLTLNNGSQAVGRSSFYCLEYFPSQMLRTGNNFQFTYTFEDVPFHSSYAHSQSLDRLMNPLIDQYLYYLSRIQTTGGTANTQTLGFSQGGPNTMANQAKNWLPGPCYRQQRVSTTTGQNNNSNFAWTAGTKYHLNGRNSLANPGIAMATHKDDEERFFPSNGILIFGKQNAARDNADYSDVMPTSEEEIKTTNPVATEEYGIVADNLQQQNTAPQIGTVNSQGALPGMVWQNRDVYLQGPIWAKIPHTDGNFHPSPLMGGFGLKHPPPQILIKNTPVPADPPTTFNQSKLNSFITQYSTGQVSVEIEWELQKENSKRWNPEIQYTSNYYKSTSVDFAVNTEGVYSEPRPIGTRYLTRNL

SEQ ID NO: 11671 - protein, 738 aa, Artificial Sequence
  source: /note="Description of Artificial Sequence: Synthetic polypeptide"
MAADGYLPDWLEDNLSEGIREWWALKPGAPKPKANQQKQDDGRGLVLPGYKYLGPFNGLDKGEPVNAADAAALEHDKAYDQQLQAGDNPYLRYNHADAEFQERLQEDTSFGGNLGRAVFQAKKRVLEPLGLVEEGAKTAPGKKRPVEPSPQRSPDSSTGIGKKGQQPARKRLNFGQTGDSESVPDPQPLGEPPAAPSGVGPNTMAAGGGAPMADNNEGADGVGSSSGNWHCDSTWLGDRVITTSTRTWALPTYNNHLYKQISNGTSGGATNDNTYFGYSTPWGYFDFNRFHCHFSPRDWQRLINNNWGFRPKRLSFKLLNIQVKEVTQNEGTKTIANNLTSTIQVFTDSEYQLPYVLGSAHQGCLPPFPADVFTIPQYGYLTLNNGSQAVGRSSFYCLEYFPSQMLRTGNNFQFTYTFEDVPFHSSYAHSQSLDRLMNPLIDQYLYYLSRIQTTGGTANTQTLGFSQGGPNTMANQAKNWLPGPCYRQQRVSTTTGQNNNSNFAWTAGTKYHLNGRNSLANPGIAMATHKDDEERFFPSNGILIFGKQNAARDNADYSDVMPTSEEEIKTTNPVATEEYGIVADNLQQQNTAPQIGTVNSQGALPGMVWQNRDVYLQGPIWAKIPHTDGNFHPSPLMGGFGLKHPPPQILIKNTPVPADPPTTFNQSKLNSFITQYSTGQVSVEIEWELQKENSKRWNPEIQYTSNYYKSTSVDFAVNTEGVYSEPRPIGTRYLTRNL

SEQ ID NO: 11672 - protein, 738 aa, Artificial Sequence
  source: /note="Description of Artificial Sequence: Synthetic polypeptide"
MAADGYLPDWLEDNLSEGIREWWALKPGAPKPKANQQKQDDGRGLVLPGYKYLGPFNGLDKGEPVNAADAAALEHDKAYDQQLQAGDNPYLRYNHADAEFQERLQEDTSFGGNLGRAVFQAKKRVLEPLGLVEEGAKTAPGKKRPVEPSPQRSPDSSTGIGKKGQQPARKRLNFGQTGDSESVPDPQPLGEPPAAPSGVGPNTMAAGGGAPMADNNEGADGVGSSSGNWHCDSTWLGDRVITTSTRTWALPTYNNHLYKQISNGTSGGATNDNTYFGYSTPWGYFDFNRFHCHFSPRDWQRLINNNWGFRPKRLSFKLFNIQVKEVTQNEGTKTIANNLTSTIQVFTDSEYQLPYVLGSAHQGCLPPFPADVFTIPQYGYLTLNNGSQAVGRSSFYCLEYFPSQMLRTGNNFQFTYTFEDVPFHSSYAHSQSLDRLMNPLIDQYLYYLSRIQTTGGTANTQTLGFSQGGPNTMANQAKNWLPGPCYRQQRVSTTTGQNNNSNFAWTAGTKYHLNGRNSLANPGIAMATHKDDEERFFPSNGILIFGKQNAARDNADYSDVVPTSEEEIKTTNPVATEEYGIVADNLQQQNTAPQIGTVNSQGALPGMVWQNRDVYLQGPIWAKIPHTDGNFHPSPLMGGFGLKHPPPQILIKNTPVPADPPTTFNQSKLNSFITQYSTGQVSVEIEWELQKENSKRWNPEIQYTSNYYKSTSVDFAVNTEGVYSEPRPIGTRYLTRNL

SEQ ID NO: 11673 - protein, 738 aa, Artificial Sequence
  source: /note="Description of Artificial Sequence: Synthetic polypeptide"
MAADGYLPDWLEDNLSEGIREWWALKPGAPKPKANQQKQDDGRGLVLPGYKYLGPFNGLDKGEPVNAADAAALEHDKAYDQQLQAGDNPYLRYNHADAEFQERLQEDTSFGGNLGRAVFQAKKRVLEPLGLVEEGAKTAPGKKRPVEPSPQRSPDSSTGIGKKGRQPARKRLNFGQTGDSESVPDPQPLGEPPAAPSGVGPNTMAAGGGAPMADNNEGADGVGSSSGNWHCDSTWLGDRVITTSTRTWALPTYNNHLYKQISNGTSGGATNDNTYFGYSTPWGYFDFNRFHCHFSPRDWQRLINNNWGFRPKRLSFKLFNIQVKEVTQNEGTKTIANNLTSTIQVFTDSEYQLPYVLGSAHQGCLPPFPADVFTIPQYGYLTLNNGSQAVGRSSFYCLEYFPSQMLRTGNNFQFTYTFEDVPFHSSYAHSQSLDRLMNPLIDQYLYYLSRIQTTGGTANTQTLGFSQGGPNTMANQAKNWLPGPCYRQQRVSTTTGQNNNSNFAWTAGTKYHLNGRNSLANPGIAMATHKDDEERFFPSNGILIFGKQNAARDNADYSDVMPTSEEEIKTTNPVATEEYGIVADNLQQQNTAPQIGTVNSQGALPGMVWQNRDVYLQGPIWAKIPHTDGNFHPSPLMGGFGLKHPPPQILIKNTPVPADPPTTFNQSKLNSFITQYSTGQVSVEIEWELQKENSKRWNPEIQYTSNYYKSTSVDFAVNTEGVYSEPRPIGTRYLTRNL

SEQ ID NO: 11674 - protein, 738 aa, Artificial Sequence
  source: /note="Description of Artificial Sequence: Synthetic polypeptide"
MAADGYLPDWLEDNLSEGIREWWALKPGAPKPKANQQKQDDGRGLVLPGYKYLGPFNGLDKGEPVNAADAAALEHDKAYDQQLQAGDNPYLRYNHADAEFQERLQEDTSFGGNLGRAVFQAKKRVLEPLGLVEEGAKTAPGKKRPVESSPQRSPDSSTGIGKKGQQPARKRLNFGQTGDSESVPDPQPLGEPPAAPSGVGPNTMAAGGGAPMADNNEGADGVGSSSGNWHCDSTWLGDRVITTSTRTWALPTYNNHLYKQISNGTSGGATNDNTYFGYSTPWGYFDFNRFHCHFSPRDWQRLINNNWGFRPKRLSFKLFNIQVKEVTQNEGTKTIANNLTSTIQVFTDSEYQLPYVLGSAHQGCLPPFPADVFTIPQYGYLTLNNGSQAVGRSSFYCLEYFPSQMLRTGNNFQFTYTFEDVPFHSSYAHSQSLDRLMNPLIDQYLYYLSRIQTTGGTANTQTLGFSQGGPNTMANQAKNWLPGPCYRQQRVSTTTGQNNNSNFAWTAGTKYHLNGRNSLANPGIAMATHKDDEERFFPSNGILIFGKQNAARDNADYSDVMPTSEEEIKTTNPVATEEYGIVADNLQQQNTAPQIGTVNSQGALPGMVWQNRDVYLQGPIWAKIPHTDGNFHPSPLMGGFGLKHPPPQILIKNTPVPADPPTTFNQSKLNSFITQYSTGQVSVEIEWELQKENSKRWNPEIQYTSNYYKSTSVDFAVNTEGVYSEPRPIGTRYLTRNL

SEQ ID NO: 11675 - protein, 738 aa, Artificial Sequence
  source: /note="Description of Artificial Sequence: Synthetic polypeptide"
MAADGYLPDWLEDNLSEGIREWWALKPGAPKPKANQQKQDDGRGLVLPGYKYLGPFNGLDKGEPVNAADAAALEHDKAYDQQLQAGDNPYLRYNHADAEFQERLQEDTSFGGNLGRAVFQAKKRVLEPLGLVEEGAKTAPGKKRPVEPSPQRSPDSSTGIGKKGQQPARKRLNFGQTGDSESVPDPQPLGEPPAAPSGAGPNTMAAGGGAPMADNNEGADGVGSSSGNWHCDSTWLGDRVITTSTRTWALPTYNNHLYKQISNGTSGGATNDNTYFGYSTPWGYFDFNRFHCHFSPRDWQRLINNNWGFRPKRLSFKLFNIQVKEVTQNEGTKTIANNLTSTIQVFTDSEYQLPYVLGSAHQGCLPPFPADVFTIPQYGYLTLNNGSQAVGRSSFYCLEYFPSQMLRTGNNFQFTYTFEDVPFHSSYAHSQSLDRLMNPLIDQYLYYLSRIQTTGGTANTQTLGFSQGGPNTMANQAKNWLPGPCYRQQRVSTTTGQNNNSNFAWTAGTKYHLNGRNSLANPGIAMATHKDDEERFFPSNGILIFGKQNAARDNADYSDVMPTSEEEIKTTNPVATEEYGIVADNLQQQNTAPQIGTVNSQGALPGMVWQNRDVYLQGPIWAKIPHTDGNFHPSPLMGGFGLKHPPPQILIKNTPVPADPPTTFNQSKLNSFITQYSTGQVSVEIEWELQKENSKRWNPEIQYTSNYYKSTSVDFAVNTEGVYSEPRPIGTRYLTRNL

SEQ ID NO: 11676 - protein, 738 aa, Artificial Sequence
  source: /note="Description of Artificial Sequence: Synthetic polypeptide"
MAADGYLPDWLEDNLSEGIREWWALKPGAPKPKANQQKQDDGRGLVLPGYKYLGPFNGLDKGEPVNAADAAALEHDKAYDQQLQAGDNPYLRYNHADAEFQERLQEDTSFGGNLGRAVFQAKKRVLEPLGLVEEGAKTAPGKKRPVEPSPQRSPDSSTGIGKKGQQPARKRLNFGQTGDSESVPDPQPLGEPPAAPSGVGPNTMAAGGGAPMADNNEGADGVGSSSGNWHCDSTWLGDRVITTSTRTWALPTYNNHLYKQISNGTSGGATNDNTYFGYSTPWGYFDFNRFHCHFSPRDWQRLINNNWGFRPKRLSFKLFNIQVKEVTQNEGTKTIANNLTSTIQVFTDSEYQLPYVLGSAHQGCLPPFPADVFTIPQYGYLTLNNGSQAVGRSSFYCLEYFPSQMLRTGNNFQFTYTFEDVPFHSSYAHSQSLDRLMNPLIDQYPYYLSRIQTTGGTANTQTLGFSQGGPNTMANQAKNWLPGPCYRQQRVSTTTGQNNNSNFAWTAGTKYHLNGRNSLANPGIAMATHKDDEERFFPSNGILIFGKQNAARDNADYSDVMPTSEEEIKTTNPVATEEYGIVADNLQQQNTAPQIGTVNSQGALPGMVWQNRDVYLQGPIWAKIPHTDGNFHPSPLMGGFGLKHPPPQILIKNTPVPADPPTTFNQSKLNSFITQYSTGQVSVEIEWELQKENSKRWNPEIQYTSNYYKSTSVDFAVNTEGVYSEPRPIGTRYLTRNL

SEQ ID NO: 11677 - protein, 738 aa, Artificial Sequence
  source: /note="Description of Artificial Sequence: Synthetic polypeptide"
MAADGYLPDWLEDNLSEGIREWWALKPGAPKPKANQQKQDDGRGLVLPGYKYLGPFNGLDKGEPVNAADAAALEHDKAYDQQLQAGDNPYLRYNHADAEFQERLQEDTSFGGNLGRAVFQAKKRVLEPLGLVEEGAKTAPGKKRPVEPSPQRSPDSSTGIGKKGQQPARKRLNFGQTGDSESVPDPQPLGEPPAAPSGVGPNTMAAGGGAPMADNNEGADGVGSSSGNWHCDSTWLGDRVITTSTRTWALPTYNNHLYKQISNGTSGGATNDNTYFGYSTPWGYFDFNRFHCHFSPRDWQRLINNNWGFRPKRLSFKLFNIQVKEVTQNEGTKTIANNLTSTIQVFTDSEYQLPYVLGSAHQGCLPPFPADVFTIPQYGYLTLNNGSQAVGRSSFYCLEYFPSQMLRTGNNFQFTYTFEDVPFHSSYAHSQSLDRLMNPLIDQYLYYLSRIQTTGGTANTQTLGFSQGGPNTMANQAKNWLPGPCYRQQRVSTTTGQSNNSNFAWTAGTKYHLNGRNSLANPGIAMATHKDDEERFFPSNGILIFGKQNAARDNADYSDVMPTSEEEIKTTNPVATEEYGIVADNLQQQNTAPQIGTVNSQGALPGMVWQNRDVYLQGPIWAKIPHTDGNFHPSPLMGGFGLKHPPPQILIKNTPVPADPPTTFNQSKLNSFITQYSTGQVSVEIEWELQKENSKRWNPEIQYTSNYYKSTSVDFAVNTEGVYSEPRPIGTRYLTRNL

SEQ ID NO: 11678 - protein, 738 aa, Artificial Sequence
  source: /note="Description of Artificial Sequence: Synthetic polypeptide"
MAADGYLPDWLEDNLSEGIREWWALKPGAPKPKANQQKQDDGRGLVLPGYKYLGPFNGLDKGEPVNAADAAALEHDKAYDQQLQAGDNPYLRYNHADAEFQERLQEDTSFGGNLGRAVFQAKKRVLEPLGLVEEGAKTAPGKKRPVEPSPQRSPDSSTGIGKKGQQPARKRLNFGQTGDSESVPDPQPLGEPPAAPSGVGPNTMAAGGGAPMADNNEGADGVGSSSGNWHCDSTWLGDRVITTSTRTWALPTYNNHLYKQISNGTSGGATNDNTYFGYSTPWGYFDFNRFHCHFSPRDWQRLINNNWGFRPKRLSFKLFNIQVKEVTQNEGTKTIANNLTSTIQVFTDSEYQLPYVLGSAHQGCLPPFPADVFTIPQYGYLTLNNGSQAVGRSSFYCLEYFPSQMLRTGNNFQFTYTFEDVPFHSSYAHSQSLDRLMNPLIDQYLYYLSRIQTTGGTANTQTLGFSQGGPNTMANQAKNWLPGPRYRQQRVSTTTGQNNNSNFAWTAGTKYHLNGRNSLANPGIAMATHKDDEERFFPSNGILIFGKQNAARDNADYSDVMPTSEEEIKTTNPVATEEYGIVADNLQQQNTAPQIGTVNSQGALPGMVWQNRDVYLQGPIWAKIPHTDGNFHPSPLMGGFGLKHPPPQILIKNTPVPADPPTTFNQSKLNSFITQYSTGQVSVEIEWELQKENSKRWNPEIQYTSNYYKSTSVDFAVNTEGVYSEPRPIGTRYLTRNL

SEQ ID NO: 11679 - protein, 738 aa, Artificial Sequence
  source: /note="Description of Artificial Sequence: Synthetic polypeptide"
MAADGYLPDWLEDNLSEGIREWWALKPGAPKPKANQQKQDDGRGLVLPGYKYLGPFNGLDKGEPVNAADAAALEHDKAYDQQLQAGDNPYLRYNHADAEFQERLQEDTSFGGNLGRAVFQAKKRVLEPLGLVEEGAKTAPGKKRPVEPSPQRSPDSSTGIGKKGQQPARKRLNFGQTGDSESVPDPQPLGEPPAAPSGVGPNTMAAGGGAPMADNNEGADGVGSSSGNWHCDSTWLGDRVITTSTRTWALPTYNNHLYKQISNGTSGGATNDNTYFGYSTPWGYFDFNRFHCHFSPRDWQRLINNNWGFRPKRLSFKLFNIQVKEVTQNEGTKTIANNLTSTIQVFTDSEYQLPYVLGSAHQGCLPPFPADVFTIPQYGYLTLNNGSQAVGRSSFYCLEYFPSQMLRTGNNFQFTYTFEDVPFHSSYAHSQSLDRLMNPLIDQYLYYLSRIQTTGGTANTQTLGFSQGGPNTMANQAKNWLPGPCYRQQRVSTTTGQNNNSNFAWTAGTKYHLNGRNSLANPGIAMATHKDDEERFFPSNGILIFGKQNAARDNADYSDVMPTSEEEIKTTNPVATEEYGIVADNLQQQNTAPQIGTVNSQGALPGMVWQNRDVYLQGPIWAKIPHTDGNFHPSPLMGGFGLKHPPPQILIKNAPVPADPPTTFNQSKLNSFITQYSTGQVSVEIEWELQKENSKRWNPEIQYTSNYYKSTSVDFAVNTEGVYSEPRPIGTRYLTRNL

SEQ ID NO: 11680 - protein, 738 aa, Artificial Sequence
  source: /note="Description of Artificial Sequence: Synthetic polypeptide"
MAADGYLPDWLEDNLSEGIREWWALKPGAPKPKANQQKQDDGRGLVLPGYKYLGPFNGLDKGEPVNAADAAALEHDKAYDQQLQAGDNPYLRYNHADAEFQERLQEDTSFGGNLGRAVFQAKKRVLEPLGLVEEGAKTAPGKKRPVEPSPQRSPDSSTGIGKKGQQPARKRLNFGQTGDSESVPDPQPLGEPPAAPSGVGPNTMAAGGGAPMADNNEGADGVGSSSGNWHCDSTWLGDRVITTSTRTWALPTYNNHLYKQISNGTSGGATNDNTYFGYSTPWGYFDFNRFHCHFSPRDRQRLINNNWGFRPKRLSFKLFNIQVKEVTQNEGTKTIANNLTSTIQVFTDSEYQLPYVLGSAHQGCLPPFPADVFTIPQYGYLTLNNGSQAVGRSSFYCLEYFPSQMLRTGNNFQFTYTFEDVPFHSSYAHSQSLDRLMNPLIDQYLYYLSRIQTTGGTANTQTLGFSQGGPNTMANQAKNWLPGPCYRQQRVSTTTGQNNNSNFAWTAGTKYHLNGRNSLANPGIAMATHKDDEERFFPSNGILIFGKQNAARDNADYSDVMPTSEEEIKTTNPVATEEYGIVADNLQQQNTAPQIGTVNSQGALPGMVWQNRDVYLQGPIWAKIPHTDGNFHPSPLMGGFGLKHPPPQILIKNTPVPADPPTTFNQSKLNSFITQYSTGQVSVEIEWELQKENSKRWNPEIQYTSNYYKSTSVDFAVNTEGVYSEPRPIGTRYLTRNL

SEQ ID NO: 11681 - protein, 738 aa, Artificial Sequence
  source: /note="Description of Artificial Sequence: Synthetic polypeptide"
MAADGYLPDWLEDNLSEGIREWWALKPGAPKPKANQQKQDDGRGLVLPGYKYLGPFNGLDKGEPVNAADAAALEHDKAYDQQLQAGDNPYLRYNHADAEFQERLQEDTSFGGNLGRAVFQAKKRVLEPLGLVEEGAKTAPGKKRPVEPSPQRSPDSSTGIGKKGQQPARKRLNFGQTGDSESVPDPQPLGEPPAAPSGVGPNTMAAGGGAPMADNNEGADGVGSSSGNWHCDSTWLGDRVITTSTRTWALPTYNNHLYKQISNGTSGGATNDNTYFGYSTPWGYFDFNRFHCHFSPRDWQRLINNNWGFRPKRLSFKLFNIQVKEVTQNEGTKTIANNLTSTIQVFTDSEYQLPYVLGSAHQGCLPPFPADVFTIPQYGYLTLNNGSQAVGRSSFYCLEYFPSQMLRTGNNFQFTYTFEDVPFHSSYAHSQSLDRLMNPLIDQYLYYLSRIQTTGGTANTQTLGFSQGGPNTMANQAKNWLPGPCYRQQRVSTTTGQNNNSNFAWTAGTKYHLNGRNSLANPGIAMATHKDDEERFFPSNGILIFGKQNAARDNADYSDVMPTSEEEIKTTNPVATEEYGIVADNLQQQNTAPQIGTVNSQGALPGMVWQNRDVYLQGPIWAKIPHTDGSFHPSPLMGGFGLKHPPPQILIKNTPVPADPPTTFNQSKLNSFITQYSTGQVSVEIEWELQKENSKRWNPEIQYTSNYYKSTSVDFAVNTEGVYSEPRPIGTRYLTRNL

SEQ ID NO: 11682 - protein, 738 aa, Artificial Sequence
  source: /note="Description of Artificial Sequence: Synthetic polypeptide"
MAADGYLPDWLEDNLSEGIREWWALKPGAPKPKANQQKQDDGRGLVLPGYKYLGPFNGLDKGEPVNAADAAALEHDKAYDQQLQAGDNPYLRYNHADAEFQERLQEDTSFGGNLGRAVFQAKKRVLEPLGLVEEGAKTAPGKKRPVEPSPQRSPDSSTGIGKKGQQPARKRLNFGQTGDSESVPDPQPLGEPPTAPSGVGPNTMAAGGGAPMADNNEGADGVGSSSGNWHCDSTWLGDRVITTSTRTWALPTYNNHLYKQISNGTSGGATNDNTYFGYSTPWGYFDFNRFHCHFSPRDWQRLINNNWGFRPKRLSFKLFNIQVKEVTQNEGTKTIANNLTSTIQVFTDSEYQLPYVLGSAHQGCLPPFPADVFTIPQYGYLTLNNGSQAVGRSSFYCLEYFPSQMLRTGNNFQFTYTFEDVPFHSSYAHSQSLDRLMNPLIDQYLYYLSRIQTTGGTANTQTLGFSQGGPNTMANQAKNWLPGPCYRQQRVSTTTGQNNNSNFAWTAGTKYHLNGRNSLANPGIAMATHKDDEERFFPSNGILIFGKQNAARDNADYSDVMPTSEEEIKTTNPVATEEYGIVADNLQQQNTAPQIGTVNSQGALPGMVWQNRDVYLQGPIWAKIPHTDGNFHPSPLMGGFGLKHPPPQILIKNTPVPADPPTTFNQSKLNSFITQYSTGQVSVEIEWELQKENSKRWNPEIQYTSNYYKSTSVDFAVNTEGVYSEPRPIGTRYLTRNL

SEQ ID NO: 11683 - protein, 738 aa, Artificial Sequence
  source: /note="Description of Artificial Sequence: Synthetic polypeptide"
MAADGYLPDWLEDNLSEGIREWWALKPGAPKPKANQQKQDDGRGLVLPGYKYLGPFNGLDKGEPVNAADAAALEHDKAYDQQLQAGDNPYLRYNHADAEFQERLQEDTSFGGNLGRAVFQAKKRVLEPLGLVEEGAKTAPGKKRPVEPSPQRSPDSSTGIGKKGQQPARKRLNFGQTGDSESVPDPQPLGEPPAAPSGVGPNTMAAGGGAPMADNNEGADGVGSSSGNWHCDSTWLGDRVITTSTRTWALPTYNNHLYKQISNGTSGGATNDNTYFGYSTPWGYFDFNRFHCHFSPRDWQRLINNNWGFRPKRLSFKLFNIQVKEVTQNEGTKTIANNLTSTIQVFTDSEYQLPYVLGSAHQGCLPPFPADVFTIPQYGYLTLNNGSQAVGRSSFYCLEYFPSQMLRTGNNFQFTYTFEDVPFHSSYAHSQSLDRLMNPLIDQYLYYLSRIQTTGGTANTQTLGFSQGGPNTMANQAKNWLPGPCYRQQRVSTTTGQNNNSNFAWTAGTKYHLNGRNSLANPGIAMATHKDDEERFFPSNGILIFGKQNAARDNADYSDVMPTSEEEIKTTNPVATEEYGIVADNLQQQNTAPQIGTVNSQGALPGMVWQNRDVYLQGPIWAKIPHTDGNFHPSPLMGGFGLKHPPPQILIKNTPVPADPPTTFNQSKLNSFITQYSTGQVSVEIEWELQKENSKRWNPEIQYTSNYYKSTSVDFAVNAEGVYSEPRPIGTRYLTRNL

SEQ ID NO: 11684 - protein, 738 aa, Artificial Sequence
  source: /note="Description of Artificial Sequence: Synthetic polypeptide"
MAADGYLPDWLEDNLSEGIREWWALKPGAPKPKANQQKQDDGRGLVLPGYKYLGPFNGLDKGEPVNAADAAALEHDKAYDQQLQAGDNPYLRYNHADAEFQERLQEDTSFGGNLGRAVFQAKKRVLEPLGLVEEGAKTAPGKKRPVEPSPQRSPDSSTGIGKKGQQPARKRLNFGQTGDSESVPDPQPLGEPPAAPSGVGPNTMAAGGGAPMADNNEGADGAGSSSGNWHCDSTWLGDRVITTSTRTWALPTYNNHLYKQISNGTSGGATNDNTYFGYSTPWGYFDFNRFHCHFSPRDWQRLINNNWGFRPKRLSFKLFNIQVKEVTQNEGTKTIANNLTSTIQVFTDSEYQLPYVLGSAHQGCLPPFPADVFTIPQYGYLTLNNGSQAVGRSSFYCLEYFPSQMLRTGNNFQFTYTFEDVPFHSSYAHSQSLDRLMNPLIDQYLYYLSRIQTTGGTANTQTLGFSQGGPNTMANQAKNWLPGPCYRQQRVSTTTGQNNNSNFAWTAGTKYHLNGRNSLANPGIAMATHKDDEERFFPSNGILIFGKQNAARDNADYSDVMPTSEEEIKTTNPVATEEYGIVADNLQQQNTAPQIGTVNSQGALPGMVWQNRDVYLQGPIWAKIPHTDGNFHPSPLMGGFGLKHPPPQILIKNTPVPADPPTTFNQSKLNSFITQYSTGQVSVEIEWELQKENSKRWNPEIQYTSNYYKSTSVDFAVNTEGVYSEPRPIGTRYLTRNL

SEQ ID NO: 11685 - protein, 738 aa, Artificial Sequence
  source: /note="Description of Artificial Sequence: Synthetic polypeptide"
MAADGYLPDWLEDNLSEGIREWWALKPGAPKPKANQQKQDDGRGLVLPGYKYLGPFNGLDKGEPVNAADAAALEHDKAYDQQLQAGDNPYLRYNHADAEFQERLQEDTSFGGNLGRAVFQAKKRVLEPLGLVEEGAKTAPGKKRPVEPSPQRSPDSSTGIGKKGQQPARKRLNFGQTGDSESVPDPQPLGEPPAAPSGVGPNTMAAGGGAPMADNNEGADGVGSSSGNWHCDSTWLGDRAITTSTRTWALPTYNNHLYKQISNGTSGGATNDNTYFGYSTPWGYFDFNRFHCHFSPRDWQRLINNNWGFRPKRLSFKLFNIQVKEVTQNEGTKTIANNLTSTIQVFTDSEYQLPYVLGSAHQGCLPPFPADVFTIPQYGYLTLNNGSQAVGRSSFYCLEYFPSQMLRTGNNFQFTYTFEDVPFHSSYAHSQSLDRLMNPLIDQYLYYLSRIQTTGGTANTQTLGFSQGGPNTMANQAKNWLPGPCYRQQRVSTTTGQNNNSNFAWTAGTKYHLNGRNSLANPGIAMATHKDDEERFFPSNGILIFGKQNAARDNADYSDVMPTSEEEIKTTNPVATEEYGIVADNLQQQNTAPQIGTVNSQGALPGMVWQNRDVYLQGPIWAKIPHTDGNFHPSPLMGGFGLKHPPPQILIKNTPVPADPPTTFNQSKLNSFITQYSTGQVSVEIEWELQKENSKRWNPEIQYTSNYYKSTSVDFAVNTEGVYSEPRPIGTRYLTRNL

SEQ ID NO: 11686 - protein, 738 aa, Artificial Sequence
  source: /note="Description of Artificial Sequence: Synthetic polypeptide"
MAADGYLPDWLEDNLSEGIREWWALKPGAPKPKANQQKQDDGRGLVLPGYKYLGPFNGLDKGEPVNAADAAALEHDKAYDQQLQAGDNPYLRYNHADAEFQERLQEDTSFGGNLGRAVFQAKKRVLEPLGLVEEGAKTAPGKKRPVEPSPQRSPDSSTGIGKKGQQPARKRLNFGQTGDSESVPDPQPLGEPPAAPSGVGPNTMAAGGGAPMADNNEGADGVGSSSGNWHCDSTWLGDRVITTSTRTWALPTYNNHLYKQISNGTSGGATNDNTYFGYSTPWGYFDFNRFHCHFSPRDWQRLINNNWGFRPKRLSFKLFNIQVKEVTQNEGTKTIANNLTSTIQVFTDSEYQLPYVLGSAHQGCLPPFPADVFTIPQYGYLTLNNGSQAVGRSSFYCLEYFPSQMLRTGNNFQFTYTFEDVPFHSSYAHSQSLDRLMNPLIDQYLYYLSRIQTTGGTANTQTLGFSQGGPNTMANQAKNWLPGPCYRQQRVSTTTGQNNNSNFAWTAGTKYHLNGRNSLANPGVAMATHKDDEERFFPSNGILIFGKQNAARDNADYSDVMPTSEEEIKTTNPVATEEYGIVADNLQQQNTAPQIGTVNSQGALPGMVWQNRDVYLQGPIWAKIPHTDGNFHPSPLMGGFGLKHPPPQILIKNTPVPADPPTTFNQSKLNSFITQYSTGQVSVEIEWELQKENSKRWNPEIQYTSNYYKSTSVDFAVNTEGVYSEPRPIGTRYLTRNL

SEQ ID NO: 11687 - protein, 738 aa, Artificial Sequence
  source: /note="Description of Artificial Sequence: Synthetic polypeptide"
MAADGYLPDWLEDNLSEGIREWWALKPGAPKPKANQQKQDDGRGLVLPGYKYLGPFNGLDKGEPVNAADAAALEHDKAYDQQLQAGDNPYLRYNHADAEFQERLQEDTSFGGNLGRAVFQAKKRVLEPLGLVEEGAKTAPGKKRPVEPSPQRSPDSSTGIGKKGQQPARKRLNFGQTGDSESVPDPQPLGEPPAAPSGVGPNTMAAGGGAPMADNNEGADGVGSSSGNWHCDSTWLGDRVITTSTRTWALPTYNNHLYKQISNGTSGGATNDNTYFGYSTPWGYFDFNRFHCHFSPRDWQRLINNNWGFRPKRLSFKLFNIQVKEVTQNEGTKTIANNLTGTIQVFTDSEYQLPYVLGSAHQGCLPPFPADVFTIPQYGYLTLNNGSQAVGRSSFYCLEYFPSQMLRTGNNFQFTYTFEDVPFHSSYAHSQSLDRLMNPLIDQYLYYLSRIQTTGGTANTQTLGFSQGGPNTMANQAKNWLPGPCYRQQRVSTTTGQNNNSNFAWTAGTKYHLNGRNSLANPGIAMATHKDDEERFFPSNGILIFGKQNAARDNADYSDVMPTSEEEIKTTNPVATEEYGIVADNLQQQNTAPQIGTVNSQGALPGMVWQNRDVYLQGPIWAKIPHTDGNFHPSPLMGGFGLKHPPPQILIKNTPVPADPPTTFNQSKLNSFITQYSTGQVSVEIEWELQKENSKRWNPEIQYTSNYYKSTSVDFAVNTEGVYSEPRPIGTRYLTRNL

SEQ ID NO: 11688 - protein, 738 aa, Artificial Sequence
  source: /note="Description of Artificial Sequence: Synthetic polypeptide"
MAADGYLPDWLEDNLSEGIREWWALKPGAPKPKANQQKQDDGRGLVLPGYKYLGPFNGLDKGEPVNAADAAALEHDKAYDQQLQAGDNPYLRYNHADAEFQERLQEDTSFGGNLGRAVFQAKKRVLEPLGLVEEGAKTAPGKKRPVEPSPQRSPDSSTGIGKKGQQPARKRLNFGQTGDSESVPDPQPLGEPPAAPSGVGPNTMAAGGGAPMADNNEGADGVGSSSGNWHCDSTWLGDRVITTSTRTWALPTYNNHLYKQISNGTSGGATNDNTYFGYSTPWGYFDFNRFHCHFSPRDWQRLINNNWGFRPKRLSFKLFNIQVKEVTQNEGTKTIANNLTSTIQVFTDSEYQLPYVLGSAHQGCLPPFPADVFTIPQYGYLTLNNGSQAVGRSSFYCLEYFPSQMLRTGNNFQFTYTFEDVPFHSSYAHSQSLDRLMNPLIDQYLYYLSRIQTTGGTANTQTLGFSQGGPNTMANQAKNWLPGPCYRQQRVSTTTGQNNNSNFAWTAGTKYHLNGRNSLANPGIAMATHKDDEERFFPSNGILIFGKQNAVRDNADYSDVMPTSEEEIKTTNPVATEEYGIVADNLQQQNTAPQIGTVNSQGALPGMVWQNRDVYLQGPIWAKIPHTDGNFHPSPLMGGFGLKHPPPQILIKNTPVPADPPTTFNQSKLNSFITQYSTGQVSVEIEWELQKENSKRWNPEIQYTSNYYKSTSVDFAVNTEGVYSEPRPIGTRYLTRNL

SEQ ID NO: 11689 - protein, 738 aa, Artificial Sequence
  source: /note="Description of Artificial Sequence: Synthetic polypeptide"
MAADGYLPDWLEDNLSEGIREWWALKPGAPKPKANQQKQDDGRGLVLPGYKYLGPFNGLDKGEPVNAADAAALEHDKAYDQQLQAGDNPYLRYNHADAEFQERLQEDTSFGGNLGRAVFQAKKRVLEPLGLVEEGAKTAPGKKRPVEPSPQRSPDSSTGIGKKGQQPARKRLNFGQTGDSESVPDPQPLGEPPAAPSGVGPNTMAAGGGAPMADNNEGADGVGSSSGNWHCDSTWLGDRVITTSTRTWALPTYNNHLYKQISNGTSGGATNDNTYFGYSTPWGYFDFNRFHCHFSPRDWQRLINNNWGFRPKRLSFKLFNIQVKEVTQNEGTKTIANNLTSTIQVFTDSEYQLPYVLGSAHQGCLPPFPADVFTIPQYGYLTLNNGSQAVGRSSFYCLEYFPSQMLRTGNNFQFTYTFEDVPFHSSYAHSQSLDRLMNPLIDQYLYYLSRIQTTGGTANTQTLGFSQGGPNTMANQAKNWLPGPCYRQQRVSTTTGQNNNSNFAWTAGTKYHLNGRNSLANPGIAMATHKDDEERFFPSNGILIFGKQNAARDNADYSDVMPTSEEEIKTTNPVATEEYGIVADNLQQQNTAPQIGTVNSQGALPGMVWQNRDVYLQGPIWAKIPHTDGNFHPSPLMGGFGLKHPPPQILIKNTPVPADPPTTFNQSKLNSFIAQYSTGQVSVEIEWELQKENSKRWNPEIQYTSNYYKSTSVDFAVNTEGVYSEPRPIGTRYLTRNL

SEQ ID NO: 11690 - protein, 738 aa, Artificial Sequence
  source: /note="Description of Artificial Sequence: Synthetic polypeptide"
MAADGYLPDWLEDNLSEGIREWWALKPGAPKPKANQQKQDDGRGLVLPGYKYLGPFNGLDKGEPVNAADAAALEHDKAYDQQLQAGDNPYLRYNHADAEFQERLQEDTSFGGNLGRAVFQAKKRVLEPLGLVEEGAKTAPGKKRPVEPSPQRSPDSSTGIGKKGQQPARKRLNFGQTGDSESVPDPQPLGEPPAAPSGVGPNTMAAGGGAPMADNNEGADGVGSSSGNWHCDSTWLGDRVITTSTRTWALPTYNNHLYKQISNGTSGGATNDNTYFGYSTPWGYFDFNRFHCHFSPRDWQRLINNNWGFRPKRLSFKLFNIQVKEVTQNEGTKTIANNLTSTIQVFTDSEYQLPYVLGSAHQGCLPPFPADVFTIPQYGYLTLNNGSQAVGRSSFYCLEYFPSQMLRTGNNFQFTYTFEDVPFHSSYAHSQSLDRLMNPLIDQYLYYLSRIQTTGGTANTQTLGFSQGGPNTMANQAKNWLPGPCYRQQRVSTTTGQNNNSNFAWTAGTKYHLNGRNSLANPGIAMATHKDGEERFFPSNGILIFGKQNAARDNADYSDVMPTSEEEIKTTNPVATEEYGIVADNLQQQNTAPQIGTVNSQGALPGMVWQNRDVYLQGPIWAKIPHTDGNFHPSPLMGGFGLKHPPPQILIKNTPVPADPPTTFNQSKLNSFITQYSTGQVSVEIEWELQKENSKRWNPEIQYTSNYYKSTSVDFAVNTEGVYSEPRPIGTRYLTRNL

SEQ ID NO: 11691 - protein, 738 aa, Artificial Sequence
  source: /note="Description of Artificial Sequence: Synthetic polypeptide"
MAADGYLPDWLEDNLSEGIREWWALKPGAPKPKANQQKQDDGRGLVLPGYKYLGPFNGLDKGEPVNAADAAALEHDKAYDQQLQAGDNPYLRYNHADAEFQERLQEDTSFGGNLGRAVFQAKKRVLEPLGLVEEGAKTAPGKKRPVEPSPQRSPDSSTGIGKKGQQPARKRLNFGQTGDSESVPDPQPLGEPPAAPSGVGPNTMAAGGGAPMADNNEGADGVGSSSGNWHCDSTWLGDRVITTSTRTWALPTYNNHLYKQISNGTSGGATNDNTYFGYSTPWGYFDFNRFHCHFSPRDWQRLINNNWGFRPKRLSFKLFNIQVKEVTQNEGTKTIANNLTSTIQVFTDSEYQLPYVLGSAHQGCLPPFPADVFTIPQYGYLTLNNGSQAVGRSSFYCLEYFPSQMLRTGNNFQFTYTFEDVPFHSSYAHSQSLDRLMNPLIDQYLYYLSRIQTTGGTANTQTLGFSQGGPNTMANQAKNWLPGPCYRQQRVSTTTGQNNNSNFAWTAGTKYHLNGRNSLANPGIAMATHKGDEERFFPSNGILIFGKQNAARDNADYSDVMPTSEEEIKTTNPVATEEYGIVADNLQQQNTAPQIGTVNSQGALPGMVWQNRDVYLQGPIWAKIPHTDGNFHPSPLMGGFGLKHPPPQILIKNTPVPADPPTTFNQSKLNSFITQYSTGQVSVEIEWELQKENSKRWNPEIQYTSNYYKSTSVDFAVNTEGVYSEPRPIGTRYLTRNL

SEQ ID NO: 11692 - protein, 738 aa, Artificial Sequence
  source: /note="Description of Artificial Sequence: Synthetic polypeptide"
MAADGYLPDWLEDNLSEGIREWWALKPGAPKPKANQQKQDDGRGLVLPGYKYLGPFNGLDKGEPVNAADAAALEHDKAYNQQLQAGDNPYLRYNHADAEFQERLQEDTSFGGNLGRAVFQAKKRVLEPLGLVEEGAKTAPGKKRPVEPSPQRSPDSSTGIGKKGQQPARKRLNFGQTGDSESVPDPQPLGEPPAAPSGVGPNTMAAGGGAPMADNNEGADGVGSSSGNWHCDSTWLGDRVITTSTRTWALPTYNNHLYKQISNGTSGGATNDNTYFGYSTPWGYFDFNRFHCHFSPRDWQRLINNNWGFRPKRLSFKLFNIQVKEVTQNEGTKTIANNLTSTIQVFTDSEYQLPYVLGSAHQGCLPPFPADVFTIPQYGYLTLNNGSQAVGRSSFYCLEYFPSQMLRTGNNFQFTYTFEDVPFHSSYAHSQSLDRLMNPLIDQYLYYLSRIQTTGGTANTQTLGFSQGGPNTMANQAKNWLPGPCYRQQRVSTTTGQNNNSNFAWTAGTKYHLNGRNSLANPGIAMATHKDDEERFFPSNGILIFGKQNAARDNADYSDVMPTSEEEIKTTNPVATEEYGIVADNLQQQNTAPQIGTVNSQGALPGMVWQNRDVYLQGPIWAKIPHTDGNFHPSPLMGGFGLKHPPPQILIKNTPVPADPPTTFNQSKLNSFITQYSTGQVSVEIEWELQKENSKRWNPEIQYTSNYYKSTSVDFAVNTEGVYSEPRPIGTRYLTRNL

SEQ ID NO: 11693 - protein, 738 aa, Artificial Sequence
  source: /note="Description of Artificial Sequence: Synthetic polypeptide"
MAADGYLPDWLEDNLSEGIREWWALKPGAPKPKANQQKQDDGRGLVLPGYKYLGPFNGLDKGEPVNAADAAALEHDKAYDQQLQAGDNPYLRYNHADAEFQERLQEDTSFGGNLGRAVFQAKKRVLEPLGLVEEGAKTAPGKKRPVEPSPQRSPDSSTGIGKKGQQPARKRLNFGQTGDSESVPDPQPLGEPPAAPSGVGPNTMAAGGGAPMADNNEGADGVGSSSGNWHCDSTWLGDRVITTSTRTWALPTYNNHLYKQISNGTSGGATNDNTYFGYSTPWGYFDFNRFHCHFSPRDWQRLINNNWGFRPKRLSFKLFNIQVKEVTQNEGTKTIANNLTSTIQVFTDSEYQLPYVLGSAHQGCLPPFPADVFTIPQYGYLTLNNGSQAVGRSSFYCLEYFPSQMLRTGNNFQFTYTFEDVPFHSSYAHSQSLDRLMNPLIDQYLYYLSRIQTTGGTANTQTLGFSQGGPNTMANQAKNWLPGPCYRQQRVSTTTGQNNNSNFAWTAGTKYHLNGRNSLANPGIAMATHKDDEERFFPSNGILIFGKQNAARDNADYSDVMPTSEEEIKTTNPVATEEYGIVADNLQQQNTAPQIGTVNSQGALPGMVWQNRDVYLQGPTWAKIPHTDGNFHPSPLMGGFGLKHPPPQILIKNTPVPADPPTTFNQSKLNSFITQYSTGQVSVEIEWELQKENSKRWNPEIQYTSNYYKSTSVDFAVNTEGVYSEPRPIGTRYLTRNL

SEQ ID NO: 11694 - protein, 738 aa, Artificial Sequence
  source: /note="Description of Artificial Sequence: Synthetic polypeptide"
MAADGYLPDWLEDNLSEGIREWWALKPGAPKPKANQQKQDDGRGLVLPGYKYLGPFNGLDKGEPVNAADAAALEHDKAYDQQLQAGDNPYLRYNHADAEFQERLQEDTSFGGNLGRAVFQAKKRVLEPLGLVEEGAKTAPGKKRPVEPSPQRSPDSSTGIGKKGQQPARKRLNFGQTGDSESVPDPQPLGEPPAAPSGVGPNTMAAGGGAPMADNNEGADGVGSSSGNWHCDSTWLGDRVITTSTRTWALPTYNNHLYKQISNGTSGGATNDNTYFGYSTPWGYFDFNRFHCHFSPRDWQRLINNNWGFRPKRLSFKLFNIQVKEVTQNEGTKTIANNLTSTIQVFTDSEYQLPYVLGSAHQGCLPPFPADVFTIPQYGYLTLNNGSQAVGRSSFYCLEYFPSQMLRTGNNFQFTYTFEDVPFHSSYAHSQSLDRLMNPLIDQYLYYLSRIQTTGGTANTQTLGFSQGGPNTMANQAKNWLPGPCYRQQRVSTTTGQNNNSNFAWTAGTKYHLNGRNSLANPGIAMATHKDDEERFFPSNGILIFGKQNAARDNADYSDVMPTSEEEIKTTNPVATEEYGIVADNLRQQNTAPQIGTVNSQGALPGMVWQNRDVYLQGPIWAKIPHTDGNFHPSPLMGGFGLKHPPPQILIKNTPVPADPPTTFNQSKLNSFITQYSTGQVSVEIEWELQKENSKRWNPEIQYTSNYYKSTSVDFAVNTEGVYSEPRPIGTRYLTRNL

SEQ ID NO: 11695 - protein, 738 aa, Artificial Sequence
  source: /note="Description of Artificial Sequence: Synthetic polypeptide"
MAADGYLPDWLEDNLSEGIREWWALKPGAPKPKANQQKQDDGRGLVLPGYKYLGPFNGLDKGEPVNAADAAALEHDKAYDQQLQAGDNPYLRYNHADAEFQERLQEDTSFGGNLGRAVFQAKKRVLEPLGLVEEGAKTAPGKKRPVEPSPQRSPDSSTGIGKKGQQPARKRLNFGQTGDSESVPDPQPLGEPPAAPSGVGPNTMAAGGGAPMADNNEGADGVGSSSGNWHCDSTWLGDRVITTSTRTWALPTYNNHLYKQISNGTSGGATNDNTYFGYSTPWGYFDFNRFHCHFSPRDWQRLINNNWGFRPKRLSFKLFNIQVKEVTQNEGTKTIANNLTSTIQVFTDSEYQLPYVLGSAHQGCLPPFPADVFTIPQYGYLTLNNGSQAVGRSSFYCLEYFPSQMLRTGNNFQFTYTFEDVPFHSSYAHSQSLDRLMNPLIDQYLYYLSRIQTTGGTANTQTLGFSQGGPNTMANQAKNWLPGPCYRQQRVSTTTGQNNNSNFAWTAGTKYHLNGRNSLANPGIAMATHKDDEERFFPSNGILIFGKQNAARDNADYSDAMPTSEEEIKTTNPVATEEYGIVADNLQQQNTAPQIGTVNSQGALPGMVWQNRDVYLQGPIWAKIPHTDGNFHPSPLMGGFGLKHPPPQILIKNTPVPADPPTTFNQSKLNSFITQYSTGQVSVEIEWELQKENSKRWNPEIQYTSNYYKSTSVDFAVNTEGVYSEPRPIGTRYLTRNL

SEQ ID NO: 11696 - protein, 738 aa, Artificial Sequence
  source: /note="Description of Artificial Sequence: Synthetic polypeptide"
MAADGYLPDWLEDNLSEGIREWWALKPGAPKPKANQQKQDDGRGLVLPGYKYLGPFNGLDKGEPVNAADAAALEHDKAYDQQLQAGDNPYLRYNHADAEFQERLQEDTSFGGNLGRAVFQAKKRVLEPLGLVEEGAKTAPGKKRPVEPSPQRSPDSSTGIGKKGQQPARKRLNFGQTGDSESVPDPQPLGEPPAAPSGVGPNTMAAGGGAPMADNNEGADGVGSSSGNWHCDSTWLGDRVITTSTRTWALPTYNNHLYKQISNGTSGGATNGNTYFGYSTPWGYFDFNRFHCHFSPRDWQRLINNNWGFRPKRLSFKLFNIQVKEVTQNEGTKTIANNLTSTIQVFTDSEYQLPYVLGSAHQGCLPPFPADVFTIPQYGYLTLNNGSQAVGRSSFYCLEYFPSQMLRTGNNFQFTYTFEDVPFHSSYAHSQSLDRLMNPLIDQYLYYLSRIQTTGGTANTQTLGFSQGGPNTMANQAKNWLPGPCYRQQRVSTTTGQNNNSNFAWTAGTKYHLNGRNSLANPGIAMATHKDDEERFFPSNGILIFGKQNAARDNADYSDVMPTSEEEIKTTNPVATEEYGIVADNLQQQNTAPQIGTVNSQGALPGMVWQNRDVYLQGPIWAKIPHTDGNFHPSPLMGGFGLKHPPPQILIKNTPVPADPPTTFNQSKLNSFITQYSTGQVSVEIEWELQKENSKRWNPEIQYTSNYYKSTSVDFAVNTEGVYSEPRPIGTRYLTRNL

SEQ ID NO: 11697 - protein, 738 aa, Artificial Sequence
  source: /note="Description of Artificial Sequence: Synthetic polypeptide"
MAADGYLPDWLEDNLSEGIREWWALKPGAPKPKANQQKQDDGRGLVLPGYKYLGPFNGLDKGEPVNAADAAALEHDKAYDQQLQAGDNPYLRYNHADAEFQERLQEDTSFGGNLGRAVFQAKKRVLEPLGLVEEGAKTAPGKKRPVEPSPQRSPDSSTGIGKKGQQPARKRLNFGQTGDSESVPDPQPLGEPPAAPSGVGPNTMAAGGGAPMADNNEGADGVGSSSGNWHCDSTWLGDRVITTSTRTWALPTYNNHLYKQISNGTSGGATNDNTYFGYSTPWGYFDFNRFHCHFSPRDWQRLINNNWGFRPKRLSFKLFNIQVKEVAQNEGTKTIANNLTSTIQVFTDSEYQLPYVLGSAHQGCLPPFPADVFTIPQYGYLTLNNGSQAVGRSSFYCLEYFPSQMLRTGNNFQFTYTFEDVPFHSSYAHSQSLDRLMNPLIDQYLYYLSRIQTTGGTANTQTLGFSQGGPNTMANQAKNWLPGPCYRQQRVSTTTGQNNNSNFAWTAGTKYHLNGRNSLANPGIAMATHKDDEERFFPSNGILIFGKQNAARDNADYSDVMPTSEEEIKTTNPVATEEYGIVADNLQQQNTAPQIGTVNSQGALPGMVWQNRDVYLQGPIWAKIPHTDGNFHPSPLMGGFGLKHPPPQILIKNTPVPADPPTTFNQSKLNSFITQYSTGQVSVEIEWELQKENSKRWNPEIQYTSNYYKSTSVDFAVNTEGVYSEPRPIGTRYLTRNL

SEQ ID NO: 11698 - protein, 738 aa, Artificial Sequence
  source: /note="Description of Artificial Sequence: Synthetic polypeptide"
MAADGYLPDWLEDNLSEGIREWWALKPGAPKPKANQQKQDDGRGLVLPGYKYLGPFNGLDKGEPVNAADAAALEHDKAYDQQLQAGDNPYLRYNHADAEFQERLQEDTSFGGNLGRAVFQAKKRVLEPLGLVEEGAKTAPGKKRPVEPSPQRSPDSSTGIGKKGQQPARKRLNFGQTGDSESVPDPQPLGEPPAAPSGVGPNTMAAGGGAPMADNNEGADGVGSSSGNWHCDSTWLGDRVITTSTRTWALPTYNNHLYKQISNGTSGGATNDNTYFGYSTPWGYFDFNRFHCHFSPRDWQRLINNNWGFRPKRLSFKLFNIQVKEVTQNEGTKTIANNLTSTIQVFTDSEYQLPYVLGSAHQGCLPPFPADVFTIPQYGYLTLNNGSQAVGRSSFYCLEYFPSQMLRTGNNFQFTYTFEDVPFHSSYAHSQSLDRLMNPLIDQYLYYLSRIQTTGGTANTQTLGFSQGGPNTMANQAKNWLPGPCYRQQRVSTTTGQNNNSNFAWTAGTKYHLNGRNSLANPGIAMATHKDDEERFFPSNGILIFGKQNAARDNADYSDVMPTSEEEIKTTNPVATEEYGIVADNLQQQNTAPQIGTVNSQGALPGMVWQNRDVYLQGPIWAKIPHTDGNFHPSPLMGGFGLKHPPPQILIKNTPVPADPPTTFNQSKLNSFITQYSTGQVSAEIEWELQKENSKRWNPEIQYTSNYYKSTSVDFAVNTEGVYSEPRPIGTRYLTRNL

SEQ ID NO: 11699 - protein, 738 aa, Artificial Sequence
  source: /note="Description of Artificial Sequence: Synthetic polypeptide"
MAADGYLPDWLEDNLSEGIREWWALKPGAPKPKANQQKQDDGRGLVLPGYKYLGPFNGLDKGEPVNAADAAALEHDKAYDQQLQAGDNPYLRYNHADAEFQERLQEDTSFGGNLGRAVFQAKKRVLEPLGLVEEGAKTAPGKKRPVEPSPQRSPDSSTGIGKKGQQPARKRLNFGQTGDSESVPDPQPLGEPPAAPSGVGPNTMAAGGGAPMADNNEGADGVGSSSGNWHCDSTWLGDRVITTSTRTWALPTYNNHLYKQISNGTSGGATNDNTYFGYSTPWGYFDFNRFHCHFSPRDWQRLINNNWGFRPKRLSFKLFNIQVKEVTQNEGTKTIANNLTSTIQVFTDSEYQLPYVLGSAHQGCLPPFPADVFTIPQYGYLTLNNGSQAVGRSSFYCLEYFPSQMLRTGNNFQFTYTFEDVPFHSSYAHSQGLDRLMNPLIDQYLYYLSRIQTTGGTANTQTLGFSQGGPNTMANQAKNWLPGPCYRQQRVSTTTGQNNNSNFAWTAGTKYHLNGRNSLANPGIAMATHKDDEERFFPSNGILIFGKQNAARDNADYSDVMPTSEEEIKTTNPVATEEYGIVADNLQQQNTAPQIGTVNSQGALPGMVWQNRDVYLQGPIWAKIPHTDGNFHPSPLMGGFGLKHPPPQILIKNTPVPADPPTTFNQSKLNSFITQYSTGQVSVEIEWELQKENSKRWNPEIQYTSNYYKSTSVDFAVNTEGVYSEPRPIGTRYLTRNL

SEQ ID NO: 11700 - protein, 738 aa, Artificial Sequence
  source: /note="Description of Artificial Sequence: Synthetic polypeptide"
MAADGYLPDWLEDNLSEGIREWWALKPGAPKPKANQQKQDDGRGLVLPGYKYLGPFNGLDKGEPVNAADAAALEHDKAYDQQLQAGDNPYLRYNHADAEFQERLQEDTSFGGNLGRAVFQAKKRVLEPLGLVEEGAKTAPGKKRPVEPSPQRSPDSSTGIGKKGQQPARKRLNFGQTGDSESVPDPQPLGEPPAAPSGVGPNTMAAGGGAPMADNNEGADGVGSSSGNWHCDSTWLGDRVITTSTRTWALPTYNNHLYKQISNGTSGGATNDNTYFGYSTPWGYFDFNRFHCHFSPRDWQRLINNNWGFRPKRLSFKLFNIQVKEVTQNEGTKTIANNLTSTIQVFTDSEYQLPYVLGSAHQGCLPPFPADVFTIPQYGYLTLNNGSQAVGRSSFYCLEYFPSQMLRTGSNFQFTYTFEDVPFHSSYAHSQSLDRLMNPLIDQYLYYLSRIQTTGGTANTQTLGFSQGGPNTMANQAKNWLPGPCYRQQRVSTTTGQNNNSNFAWTAGTKYHLNGRNSLANPGIAMATHKDDEERFFPSNGILIFGKQNAARDNADYSDVMPTSEEEIKTTNPVATEEYGIVADNLQQQNTAPQIGTVNSQGALPGMVWQNRDVYLQGPIWAKIPHTDGNFHPSPLMGGFGLKHPPPQILIKNTPVPADPPTTFNQSKLNSFITQYSTGQVSVEIEWELQKENSKRWNPEIQYTSNYYKSTSVDFAVNTEGVYSEPRPIGTRYLTRNL

SEQ ID NO: 11701 - protein, 738 aa, Artificial Sequence
  source: /note="Description of Artificial Sequence: Synthetic polypeptide"
MAADGYLPDWLEDNLSEGIREWWALKPGAPKPKANQQKQDDGRGLVLPGYKYLGPFNGLDKGEPVNAADAAALEHDKAYDQQLQAGDNPYLRYNHADAEFQERLQEDTSFGGNLGRAVFQAKKRVLEPLGLVEEGAKTAPGKKRPVEPSPQRSPDSSTGIGKKGQQPARKRLNFGQTGDSESVPDPQPLGEPPAAPSGVGPNTMAAGGGAPMADNNEGADGVGSSSGNWHCDSTWLGDRVITTSTRTWALPTYNNHLYKQISNGTSGGATNDNTYFGYSTPWGYFDFNRFHCHFSPRDWQRLINNNWGFRPKRLSFKLFNIQVKEVTQNEGTKTIANNLTSTIQVFTDSEYQLPYVLGSAHQGCLPPFPADVFTIPQYGYLTLNNGSQAVGRSSFYCLEYFPSQMLRTGNNFQFTYTFEDVPFHSSYAHSQSLDRLMNPLIDQYLYYLSRIQTTGGTANTQTLGFSQGGPNTMANQAKNWLPGPCYRQQRVSTTTGQNNNSNFAWTAGTKYHLNGRNSLANPGIAMATHKDDEERFFPSNGILIFGKQNAARDNADYSDVMPTSEEEIKTTNPVATEEYGIVADNLQQQNTAPQIGTVNSQGALPGMVWQNRDVYLQGPIWAKIPHTDGNFHPSPLMGGFGLKHPPPQILIKNTPVPADPPTTFNQSKLNSFITQYSTGQVSVEIEWELRKENSKRWNPEIQYTSNYYKSTSVDFAVNTEGVYSEPRPIGTRYLTRNL

SEQ ID NO: 11702 - protein, 738 aa, Artificial Sequence
  source: /note="Description of Artificial Sequence: Synthetic polypeptide"
MAADGYLPDWLEDNLSEGIREWWALKPGAPKPKANQQKQDDGRGLVLPGYKYLGPFNGLDKGEPVNAADAAALEHDKAYDQQLQAGDNPYLRYNHADAEFQERLQEDTSFGGNLGRAVFQAKKRVLEPLGLVEEGAKTAPGKKRPVEPSPQRSPDSSTGIGKKGQQPARKRLNFGQTGDSESVPDPQPLGEPPAAPSGVGPNTMAAGGGAPMADNNEGADGVGSSSGNWHCDSTWLGDRVITTSTRTWALPTYNNHLYKQISNGTSGGATNDNTYFGYSTPWGYFDFNRFHCHFSPRDWQRLINNNWGFRPKRLSFKLFNIQVKEVTQNEGTKTIANNLTSTIQVFTDSEYQLPYVLGSAHQGCLPPFPADVFTIPQYGYLTLNNGSQAVGRSSFYCLEYFPSQMLRTGNNFQFTYTFEDAPFHSSYAHSQSLDRLMNPLIDQYLYYLSRIQTTGGTANTQTLGFSQGGPNTMANQAKNWLPGPCYRQQRVSTTTGQNNNSNFAWTAGTKYHLNGRNSLANPGIAMATHKDDEERFFPSNGILIFGKQNAARDNADYSDVMPTSEEEIKTTNPVATEEYGIVADNLQQQNTAPQIGTVNSQGALPGMVWQNRDVYLQGPIWAKIPHTDGNFHPSPLMGGFGLKHPPPQILIKNTPVPADPPTTFNQSKLNSFITQYSTGQVSVEIEWELQKENSKRWNPEIQYTSNYYKSTSVDFAVNTEGVYSEPRPIGTRYLTRNL

SEQ ID NO: 11703 - protein, 738 aa, Artificial Sequence
  source: /note="Description of Artificial Sequence: Synthetic polypeptide"
MAADGYLPDWLEDNLSEGIREWWALKPGAPKPKANQQKQDDGRGLVLPGYKYLGPFNGLDKGEPVNAADAAALEHDKAYDQQLQAGDNPYLRYNHADAEFQERLQEDTSFGGNLGRAVFQAKKRVLEPLGLVEEGAKTAPGKKRPVEPSPQRSPDSSTGIGKKGQQPARKRLNFGQTGDSESVPDPQPLGEPPAAPSGVGPNTMAAGGGAPMADNNEGADGVGSSSGNWHCDSTWLGDRVITASTRTWALPTYNNHLYKQISNGTSGGATNDNTYFGYSTPWGYFDFNRFHCHFSPRDWQRLINNNWGFRPKRLSFKLFNIQVKEVTQNEGTKTIANNLTSTIQVFTDSEYQLPYVLGSAHQGCLPPFPADVFTIPQYGYLTLNNGSQAVGRSSFYCLEYFPSQMLRTGNNFQFTYTFEDVPFHSSYAHSQSLDRLMNPLIDQYLYYLSRIQTTGGTANTQTLGFSQGGPNTMANQAKNWLPGPCYRQQRVSTTTGQNNNSNFAWTAGTKYHLNGRNSLANPGIAMATHKDDEERFFPSNGILIFGKQNAARDNADYSDVMPTSEEEIKTTNPVATEEYGIVADNLQQQNTAPQIGTVNSQGALPGMVWQNRDVYLQGPIWAKIPHTDGNFHPSPLMGGFGLKHPPPQILIKNTPVPADPPTTFNQSKLNSFITQYSTGQVSVEIEWELQKENSKRWNPEIQYTSNYYKSTSVDFAVNTEGVYSEPRPIGTRYLTRNL

SEQ ID NO: 11704 - protein, 738 aa, Artificial Sequence
  source: /note="Description of Artificial Sequence: Synthetic polypeptide"
MAADGYLPDWLEDNLSEGIREWWALKPGAPKPKANQQKQDDGRGLVLPGYKYLGPFNGLDKGEPVNAADAAALEHDKAYDQQLQAGDNPYLRYNHADAEFQERLQEDTSFGGNLGRAVFQAKKRVLEPLGLVEEGAKTAPGKKRPVEPSPQRSPDSSTGIGKKGQQPARKRLNFGQTGDSESVPDPQPLGEPPAAPSGVGPNTMAAGGGAPMADNNEGADGVGSSSGNWHCDSTWLGDRVITTSTRTWALPTYNNHLYKQISNGTSGGATNDNTYFGYSTPWGYFDFNRFHCHFSPRDWQRLINNNWGFRPKRLSFKLFNIQVKEVTQNEGTKTIANNLTSTIQVFTDSEYQLPYVLGSAHQGCLPPFPADVFTIPQYGYLTLNNGSQAVGRSSFYCLEYFPSQMLRTGNNFQFTYTFEDVPFHSSYAHSQSLDRLMNPLIDQYLYYLSRIQTTGGTANTQTLGFSQGGPNTMANQAKNWLPGPCYRQQRVSTTTGQNNNSNFAWTAGTKYHLNGRNSLANPGIAMATHKDDEERFFPSNGILIFGKQNAARDNADYSDVMPTSEEEIKTTNPVATEEYGIVADNLQQQNTAPQIGTVNSQGALPGMVWQNRDVYLQGPIWAKIPHTDGNFHPSPLMGGFGLKHPPPQILIKNTPVPADPPTTFNQSKLNSFITQYSTGQVSVEIEWELQKENSKRRNPEIQYTSNYYKSTSVDFAVNTEGVYSEPRPIGTRYLTRNL

SEQ ID NO: 11705 - protein, 738 aa, Artificial Sequence
  source: /note="Description of Artificial Sequence: Synthetic polypeptide"
MAADGYLPDWLEDNLSEGIREWWALKPGAPKPKANQQKQDDGRGLVLPGYKYLGPFNGLDKGEPVNAADAAALEHDKAYDQQLQAGDNPYLRYNHADAEFQERLQEDTSFGGNLGRAVFQAKKRVLEPLGLVEEGAKTAPGKKRPVEPSPQRSPDSSTGIGKKGQQPARKRLNFGQTGDSEPVPDPQPLGEPPAAPSGVGPNTMAAGGGAPMADNNEGADGVGSSSGNWHCDSTWLGDRVITTSTRTWALPTYNNHLYKQISNGTSGGATNDNTYFGYSTPWGYFDFNRFHCHFSPRDWQRLINNNWGFRPKRLSFKLFNIQVKEVTQNEGTKTIANNLTSTIQVFTDSEYQLPYVLGSAHQGCLPPFPADVFTIPQYGYLTLNNGSQAVGRSSFYCLEYFPSQMLRTGNNFQFTYTFEDVPFHSSYAHSQSLDRLMNPLIDQYLYYLSRIQTTGGTANTQTLGFSQGGPNTMANQAKNWLPGPCYRQQRVSTTTGQNNNSNFAWTAGTKYHLNGRNSLANPGIAMATHKDDEERFFPSNGILIFGKQNAARDNADYSDVMPTSEEEIKTTNPVATEEYGIVADNLQQQNTAPQIGTVNSQGALPGMVWQNRDVYLQGPIWAKIPHTDGNFHPSPLMGGFGLKHPPPQILIKNTPVPADPPTTFNQSKLNSFITQYSTGQVSVEIEWELQKENSKRWNPEIQYTSNYYKSTSVDFAVNTEGVYSEPRPIGTRYLTRNL

SEQ ID NO: 11706 - protein, 738 aa, Artificial Sequence
  source: /note="Description of Artificial Sequence: Synthetic polypeptide"
MAADGYLPDWLEDNLSEGIREWWALKPGAPKPKANQQKQDDGRGLVLPGYKYLGPFNGLDKGEPVNAADAAALEHDKAYDQQLQAGDNPYLRYNHADAEFQERLQEDTSFGGNLGRAVFQAKKRVLEPLGLVEEGAKTAPGKKRPVEPSPQRSPDSSTGIGKKGQQPARKRLNFGQTGDSESVPDPQPLGEPPAAPSGVGPNTMAAGGGAPMADNNEGADGVGSSSGNWHCDSTWLGDRVITTSTRTWALPTYNNHLYKQISNGTSGGATNDNTYFGYSTPWGYFDFNRFHCHFSPRDWQRLINNNWGFRPKRLSFKLFNIQVKEVTQNEGTKTIANNLTSTIQVFTDSEYQLPYVLGSAHQGCLPPFPADVFTIPQYGYLTLNNGSQAVGRSSFYCLEYFPSQMLRTGNNFQFTYTFEDVPFHSSYAHSQSLDRLMNPLIDQYLYYLSRIQTTGGTANTQTLGFSQGGPNTMANQAKNWLPGPCYRQQRVSTTTGQNNNSNFAWTAGTKYHLNGRNSLANPGIAMATHKDDEERFFPSNGIPIFGKQNAARDNADYSDVMPTSEEEIKTTNPVATEEYGIVADNLQQQNTAPQIGTVNSQGALPGMVWQNRDVYLQGPIWAKIPHTDGNFHPSPLMGGFGLKHPPPQILIKNTPVPADPPTTFNQSKLNSFITQYSTGQVSVEIEWELQKENSKRWNPEIQYTSNYYKSTSVDFAVNTEGVYSEPRPIGTRYLTRNL

SEQ ID NO: 11707 - protein, 738 aa, Artificial Sequence
  source: /note="Description of Artificial Sequence: Synthetic polypeptide"
MAADGYLPDWLEDNLSEGIREWWALKPGAPKPKANQQKQDDGRGLVLPGYKYLGPFNGLDKGEPVNAADAAALEHDKAYDQQLQAGDNPYLRYNHADAEFQERLQEDTSFGGNLGRAVFQAKKRVLEPLGLVEEGAKTAPGKKRPVEPSPQRSPDSSTGIGKKGQQPARKRLNFGQTGDSESVPDPQPLGEPPAAPSGVGPNTMAAGGGAPMADNNEGADGVGSSSGNWHCDSTWLGDRVITTSTRTWALPTYNNHLYKQISNGTSGGATNDNTYFGYSTPWGYFDFNRFHCHFSPRDWQRLINNNWGFRPKRLSFKLFNIQVKEVTQNEGTKTIANNLTSTIQVFTDSEYQLPYVLGSAHQGCLPPFPADVFTIPQYGYLTLNNGSQAVGRSSFYCLEYFPSQMLRTGNNFQFTYTFEDVPFHSSYAHSQSLDRLMNPLIDQYLYYLSRIQTTGGTANTQTLGFSQGGPNTMANQAKNWLPGPCYRQQRVSTTTGQNNNSNFAWTAGTKYHLNGRNSLANPGIAMATHKDDEERFFPSNGILIFGKQNAARDNADYSDVMPTSEEEIKTTNPVATEEYGIVADNLQQQNTAPQIGTVNSQGALPGMVWQNRDVYLQGPIWAKIPHTDGNFHPSPLMGGFGLKHPPPQILIKNTPVPADPPTTFNQSKLNSFITQYSTGQVSVEIEWELQKENSKRWNPEIQHTSNYYKSTSVDFAVNTEGVYSEPRPIGTRYLTRNL

SEQ ID NO: 11708 - protein, 738 aa, Artificial Sequence
  source: /note="Description of Artificial Sequence: Synthetic polypeptide"
MAADGYLPDWLEDNLSEGIREWWALKPGAPKPKANQQKQDDGRGLVLPGYKYLGPFNGLDKGEPVNAADAAALEHDKAYDQQLQAGDNPYLRYNHADAEFQERLQEDTSFGGNLGRAVFQAKKRVLEPLGLVEEGAKTAPGKKRPVEPSPQRSPDSSTGIGKKGQQPARKRLNFGQTGDSESVPDPQPLGEPPAAPSGVGPNTMAAGGGAPMADNNEGADGVGSSSGNWHCDSTWLGDRVITTSTRTWALPTYNNHLYKQISNGTSGGATNDNTYFGYSTPWGYFDFNRFHCHFSPRDWQRLINNNWGFRPKRLSFKLFNIQVKEVTQNEGTKTIANNLTSTIQVFTDSEYQLPYVLGSAHQGCLPPFPADVFTIPQYGYLTLNNGSQAVGRSSFYCLEYFPSQMLRTGNNFQFTYTFEDVPFHSSYAHSQSLDRLMNPLIDQYLYYLSRIQTTGGTANTQTLGFSQGGPNTMANQAKNWLPGPCYRQQRVSTTTGQNNNSNFAWTAGTKYHLNGRNSLANPGIAMATHKDDEERFFPSNGILIFGKQNAARDNADYSDVMPTSEEEIKTTNPVATEEYGIVADNLQQQNTAPQIGTVNSQGALPGMVWQNRDVYLQGPIWAKIPHTDGNFHPSPLMGGFGLKHPPPQILIKNTPVPADPPTTFNQSKLNPFITQYSTGQVSVEIEWELQKENSKRWNPEIQYTSNYYKSTSVDFAVNTEGVYSEPRPIGTRYLTRNL

SEQ ID NO: 11709 - protein, 738 aa, Artificial Sequence
  source: /note="Description of Artificial Sequence: Synthetic polypeptide"
MAADGYLPDWLEDNLSEGIREWWALKPGAPKPKANQQKQDDGRGLVLPGYKYLGPFNGLDKGEPVNAADAAALEHDKAYDQQLQAGDNPYLRYNHADAEFQERLQEDTSFGGNLGRAVFQAKKRVLEPLGLVEEGAKTAPGKKRPVEPSPQRSPDSSTGIGKKGQQPARKRLNFGQTGDSESVPDPQPLGEPPAAPSGVGPNTMAAGGGAPMADNNEGADGVGSSSGNWHCDSTWLGDRVITTSTRTWALPTYNNHLYKQISNGTSGGATNDNTYFGYSTPWGYFDFNRFHCHFSPRDWQRLINNNWGFRPKRLSFKLFNIQVKEVTQNEGTKTIANNLTSTIQVFTDSEYQLPYVLGSAHQGCLPPFPADVFTIPQYGYLTLNNGSQAVGRSSFYCLEYFPSQMLRTGNNFQFTYTFEDVPFHSSYAHSQSLDRLMNPLIDQYLYYLSRIQTTGGTANTQTLGFSQGGPNTMANQAKNWLPGPCYRQQRVSTTTGQNNNSNFAWTAGTKYHLNGRNSLANPGIAMATHKDDEERFFPSNGILIFGKQNAARDNADYSDVMPTSEEEIKTTNPVATEEYGIVADNLQQQNTAPQIGTVNSQGALPGMVWQNRDVYLQGPIWAKIPHTDGNFRPSPLMGGFGLKHPPPQILIKNTPVPADPPTTFNQSKLNSFITQYSTGQVSVEIEWELQKENSKRWNPEIQYTSNYYKSTSVDFAVNTEGVYSEPRPIGTRYLTRNL

SEQ ID NO: 11710 - protein, 738 aa, Artificial Sequence
  source: /note="Description of Artificial Sequence: Synthetic polypeptide"
MAADGYLPDWLEDNLSEGIREWWALKPGAPKPKANQQKQDDGRGLVLPGYKYLGPFNGLDKGEPVNAADAAALEHDKAYDQQLQAGDNPYLRYNHADAEFQERLQEDTSFGGNLGRAVFQAKKRVLEPLGLVEEGAKTAPGKKRPVEPSPQRSPDSSTGIGKKGQQPARKRLNFGQTGDSESVPDPQPLGEPPAAPSGVGPNTMAAGGGAPMADNNEGADGVGSSSGNWHCDSTWLGDRVITTSTRTWALPTYNNHLYKQISNGTSGGATNDNTYFGYSTPWGYFDFNRFHCHFSPRDWQRLINNNWGFRPKRLSFKLFNIQVKEVTQNEGTKTIANNLTSTIQVFTDSEYQLPYVLGSAHQGCLPPFPADVFTIPQYGYLTLNNGSQAVGRSSFYCLEYFPSQMLRTGNNFQFTYTFEDVPFHSSYAHSQSLDRLMNPLIDQYLYYLSRIQTTGGTANTQTLGFSQGGPNTMANQAKNWLPGPCYRQQRVSTTTGQNNNSNFAWTAGTKYHLNGRNSLANPGIAMATHKDDEERFFPSNGILIFGKQNAARDNADYSDVMPTSEEEIKTTNPVATEEYGIVADNLQQQNTAPQIGTVNSQGALPGMVWQNRDVYLQGPIWAKIPHTDGNFHPSPLMGGFGLKHPPPQILIKNTPVPADPPTTFNQSKLNSFITQYSTGQVSVEIEWELQKENSKRWNPEIQYTSNYYKSTSVDFAVNTEGVYSEPRPIGARYLTRNL

SEQ ID NO: 11711 - protein, 738 aa, Artificial Sequence
  source: /note="Description of Artificial Sequence: Synthetic polypeptide"
MAADGYLPDWLEDNLSEGIREWWALKPGAPKPKANQQKQDDGRGLVLPGYKYLGPFNGLDKGESVNAADAAALEHDKAYDQQLQAGDNPYLRYNHADAEFQERLQEDTSFGGNLGRAVFQAKKRVLEPLGLVEEGAKTAPGKKRPVEPSPQRSPDSSTGIGKKGQQPARKRLNFGQTGDSESVPDPQPLGEPPAAPSGVGPNTMAAGGGAPMADNNEGADGVGSSSGNWHCDSTWLGDRVITTSTRTWALPTYNNHLYKQISNGTSGGATNDNTYFGYSTPWGYFDFNRFHCHFSPRDWQRLINNNWGFRPKRLSFKLFNIQVKEVTQNEGTKTIANNLTSTIQVFTDSEYQLPYVLGSAHQGCLPPFPADVFTIPQYGYLTLNNGSQAVGRSSFYCLEYFPSQMLRTGNNFQFTYTFEDVPFHSSYAHSQSLDRLMNPLIDQYLYYLSRIQTTGGTANTQTLGFSQGGPNTMANQAKNWLPGPCYRQQRVSTTTGQNNNSNFAWTAGTKYHLNGRNSLANPGIAMATHKDDEERFFPSNGILIFGKQNAARDNADYSDVMPTSEEEIKTTNPVATEEYGIVADNLQQQNTAPQIGTVNSQGALPGMVWQNRDVYLQGPIWAKIPHTDGNFHPSPLMGGFGLKHPPPQILIKNTPVPADPPTTFNQSKLNSFITQYSTGQVSVEIEWELQKENSKRWNPEIQYTSNYYKSTSVDFAVNTEGVYSEPRPIGTRYLTRNL

SEQ ID NO: 11712 - protein, 738 aa, Artificial Sequence
  source: /note="Description of Artificial Sequence: Synthetic polypeptide"
MAADGYLPDWLEDNLSEGIREWWALKPGAPKPKANQQKQDDGRGLVLPGYKYLGPFNGLDKGEPVNAADAAALEHDKAYDQQLQAGDNPYLRYNHADAEFQERLQEDTSFGGNLGRAVFQAKKRVLEPLGLVEEGAKTAPGKKRPVEPSPQRSPDSSTGIGKKGQQPARKRLNFGQTGDSESVPDPQPLGEPPAAPSGVGPNTMAAGGGAPMADNSEGADGVGSSSGNWHCDSTWLGDRVITTSTRTWALPTYNNHLYKQISNGTSGGATNDNTYFGYSTPWGYFDFNRFHCHFSPRDWQRLINNNWGFRPKRLSFKLFNIQVKEVTQNEGTKTIANNLTSTIQVFTDSEYQLPYVLGSAHQGCLPPFPADVFTIPQYGYLTLNNGSQAVGRSSFYCLEYFPSQMLRTGNNFQFTYTFEDVPFHSSYAHSQSLDRLMNPLIDQYLYYLSRIQTTGGTANTQTLGFSQGGPNTMANQAKNWLPGPCYRQQRVSTTTGQNNNSNFAWTAGTKYHLNGRNSLANPGIAMATHKDDEERFFPSNGILIFGKQNAARDNADYSDVMPTSEEEIKTTNPVATEEYGIVADNLQQQNTAPQIGTVNSQGALPGMVWQNRDVYLQGPIWAKIPHTDGNFHPSPLMGGFGLKHPPPQILIKNTPVPADPPTTFNQSKLNSFITQYSTGQVSVEIEWELQKENSKRWNPEIQYTSNYYKSTSVDFAVNTEGVYSEPRPIGTRYLTRNL

SEQ ID NO: 11713 - protein, 738 aa, Artificial Sequence
  source: /note="Description of Artificial Sequence: Synthetic polypeptide"
MAADGYLPDWLEDNLSEGIREWWALKPGAPKPKANQQKQDDGRGLVLPGYKYLGPFNGLDKGEPVNAADAAALEHDKAYDQQLQAGDNPYLRYNHADAEFQERLQEDTSFGGNLGRAVFQAKKRVLEPLGLVEEGAKTAPGKKRPVEPSPQRSPDSSTGIGKKGQQPARKRLNFGQTGDSESVPDPQPLGEPPAAPSGVGPNTMAAGGGAPMADNNEGADGVGSSSGNWHCDSTWLGDRVITTSTRTWALPTYNNHLYKQISNGTSGGATNDNTYFGYSTPWGYFDFNRFHCHFSPRDWQRLINNNWGFRPKRLSFKLFNIQVKEVTQNEGTKTIANNLTSTIQVFTDSEYQLPYVLGSAHQGCLPPFPADVFTIPQYGYLTLNNGSQAVGRSSFYCLEYFPSQMLRTGNNFQFTYTFEDVPFHSSYAHSQSLDRLMNPLIDQYLYYLSRIQTTGGTANTQTLGFSQGGPNTMANQAKNWLPGPCYRQQRVSTTTGQNNNSNFAWTAGTKYHLNGRNSLANPGIAMATHKDDEERFFPSNGILIFGKQNAARDNADYGDVMPTSEEEIKTTNPVATEEYGIVADNLQQQNTAPQIGTVNSQGALPGMVWQNRDVYLQGPIWAKIPHTDGNFHPSPLMGGFGLKHPPPQILIKNTPVPADPPTTFNQSKLNSFITQYSTGQVSVEIEWELQKENSKRWNPEIQYTSNYYKSTSVDFAVNTEGVYSEPRPIGTRYLTRNL

SEQ ID NO: 11714 - protein, 738 aa, Artificial Sequence
  source: /note="Description of Artificial Sequence: Synthetic polypeptide"
MAADGYLPDWLEDNLSEGIREWWALKPGAPKPKANQQKQDDGRGLVLPGYKYLGPFNGLDKGEPVNAADAAALEHDKAYDQQLQAGDNPYLRYNHADAEFQERLQEDTSFGGNLGRAVFQAKKRVLEPLGLVEEGAKTAPGKRRPVEPSPQRSPDSSTGIGKKGQQPARKRLNFGQTGDSESVPDPQPLGEPPAAPSGVGPNTMAAGGGAPMADNNEGADGVGSSSGNWHCDSTWLGDRVITTSTRTWALPTYNNHLYKQISNGTSGGATNDNTYFGYSTPWGYFDFNRFHCHFSPRDWQRLINNNWGFRPKRLSFKLFNIQVKEVTQNEGTKTIANNLTSTIQVFTDSEYQLPYVLGSAHQGCLPPFPADVFTIPQYGYLTLNNGSQAVGRSSFYCLEYFPSQMLRTGNNFQFTYTFEDVPFHSSYAHSQSLDRLMNPLIDQYLYYLSRIQTTGGTANTQTLGFSQGGPNTMANQAKNWLPGPCYRQQRVSTTTGQNNNSNFAWTAGTKYHLNGRNSLANPGIAMATHKDDEERFFPSNGILIFGKQNAARDNADYSDVMPTSEEEIKTTNPVATEEYGIVADNLQQQNTAPQIGTVNSQGALPGMVWQNRDVYLQGPIWAKIPHTDGNFHPSPLMGGFGLKHPPPQILIKNTPVPADPPTTFNQSKLNSFITQYSTGQVSVEIEWELQKENSKRWNPEIQYTSNYYKSTSVDFAVNTEGVYSEPRPIGTRYLTRNL

SEQ ID NO: 11715 - protein, 738 aa, Artificial Sequence
  source: /note="Description of Artificial Sequence: Synthetic polypeptide"
MAADGYLPDWLEDNLSEGIREWWALKPGAPKPKANQQKQDDGRGLVLPGYKYLGPFNGLDKGEPVNAADAAALEHDKAYDQQLQAGDNPYLRYNHADAEFQERLQEDTSFGGNLGRAVFQAKKRVLEPLGLVEEGAKTAPGKKRPVEPSPQRSPDSSTGIGKKGQQPARKRLNFGQTGDSESVPDPQPLGEPPAAPSGVGPNTMAAGGGAPMADNNEGADGVGSSSGNWHCDSTWLGDRVITTSTRTWALPTYNNHLYKQISNGTSGGATNDNTYFGYSTPWGYFDFNRFHCHFSPRDWQRLINNNWGFRPKRLSFKLFNIQVKEVTQNEGTKTIANNLTSTIQVFTDSEYQLPYVLGSAHQGCLPPFPADVFTIPQYGYLTLNNGSQAVGRSSFYCLEYFPSQMLRTGNNFQFTYTFEDVPFHSSYAHSQSLDRLMNPLIDQYLYYLSRIQTTGGTANTQTLGFSQGGPNTMANQAKNWLPGPCYRQQRVPTTTGQNNNSNFAWTAGTKYHLNGRNSLANPGIAMATHKDDEERFFPSNGILIFGKQNAARDNADYSDVMPTSEEEIKTTNPVATEEYGIVADNLQQQNTAPQIGTVNSQGALPGMVWQNRDVYLQGPIWAKIPHTDGNFHPSPLMGGFGLKHPPPQILIKNTPVPADPPTTFNQSKLNSFITQYSTGQVSVEIEWELQKENSKRWNPEIQYTSNYYKSTSVDFAVNTEGVYSEPRPIGTRYLTRNL

SEQ ID NO: 11716 - protein, 738 aa, Artificial Sequence
  source: /note="Description of Artificial Sequence: Synthetic polypeptide"
MAADGYLPDWLEDNLSEGIREWWALKPGAPKPKANQQKQDDGRGLVLPGYKYLGPFNGLDKGEPVNAADAAALEHDKAYDQQLQAGDNPYLRYNHADAEFQERLQEDTSFGGNLGRAVFQAKKRVLEPLGLVEEGAKTAPGKKRPVEPSPQRSPDSSTGIGKKGQQPARKRLNFGQTGDSESVPDPQPLGEPPAAPSGVGPNTMAAGGGAPMADNNEGADGVGSSSGNWHCDSTWLGDRVITTSTRTWALPTYNNHLYKQISNGTSGGATNDNTYFGYSTPWGYFDFNRFHCHFSPRDWQRLINNNWGFRPKRLSFKLFNIQVKEVTQNEGTKTIANNLTSTIQVFTDSEYQLPYVLGSAHQGCLPPFPADVFTIPQYGYLTLNNGSQAVGRSSFYCLEYFPSQMLRTGNNFQFTYTFEDVPFHSSYAHSQSLDRLMNPLIDQYLYYLSRIQTTGGTANTQTLGFSQGGPNTMANQAKNWLPGPCYRQQRVSTTTGQNNNSNFAWTAGTKYHLNGRNSLANPGIAMATHKDDEERFFPSNGILIFGKQNAARDNADYSDVMPTSEEEIKTTNPVATEEYGIVADNLQQQNTAPQIGTVNSQGALPGMVWQNRDVYLQGPIWAKIPHTDGNFHPSPLMGGFGLKHPPPQILIKNTPVPADPPTTFNQSKLNSFITQYSTGQVSVEIEWELQKENSKRWNPEIQYTSNYYKSTSVDFAVNTEGVYSEPRPIGTRYLTRNL

SEQ ID NO: 11717 - protein, 738 aa, Artificial Sequence
  source: /note="Description of Artificial Sequence: Synthetic polypeptide"
MAADGYLPDWLEDNLSEGIREWWALKPGAPKPKANQQKQDDGRGLVLPGYKYLGPFNGLDKGEPVNAADAAALEHDKAYDQQLQAGDNPYLRYNHADAEFQERLQEDTSFGGNLGRAVFQAKKRVLEPLGLVEEGAKTAPGKKRPVEPSPQRSPDSSTGIGKKGQQPARKRLNFGQTGDSESVPDPQPLGEPPAAPSGVGPNTMAAGGGAPMADNNEGADGVGSSSGNWHCDSTWLGDRVITTSTRTWALPTYNNHLYKQISNGTSGGATNDNTYFGYSTPWGYFDFNRFHRHFSPRDWQRLINNNWGFRPKRLSFKLFNIQVKEVTQNEGTKTIANNLTSTIQVFTDSEYQLPYVLGSAHQGCLPPFPADVFTIPQYGYLTLNNGSQAVGRSSFYCLEYFPSQMLRTGNNFQFTYTFEDVPFHSSYAHSQSLDRLMNPLIDQYLYYLSRIQTTGGTANTQTLGFSQGGPNTMANQAKNWLPGPCYRQQRVSTTTGQNNNSNFAWTAGTKYHLNGRNSLANPGIAMATHKDDEERFFPSNGILIFGKQNAARDNADYSDVMPTSEEEIKTTNPVATEEYGIVADNLQQQNTAPQIGTVNSQGALPGMVWQNRDVYLQGPIWAKIPHTDGNFHPSPLMGGFGLKHPPPQILIKNTPVPADPPTTFNQSKLNSFITQYSTGQVSVEIEWELQKENSKRWNPEIQYTSNYYKSTSVDFAVNTEGVYSEPRPIGTRYLTRNL

SEQ ID NO: 11718 - protein, 738 aa, Artificial Sequence
  source: /note="Description of Artificial Sequence: Synthetic polypeptide"
MAADGYLPDWLEDNLSEGIREWWALKPGAPKPKANQQKQDDGRGLVLPGYKYLGPFNGLDKGEPVNAADAAALEHDKAYDQQLQAGDNPYLRYNHADAEFQERLQEDTSFGGNLGRAVFQAKKRVLEPLGLVEEGAKTAPGKKRPVEPSPQRSPDSSTGIGKKGQQPARKRLNFGQTGDSESVPDPQPLGEPPAAPSGVGPNTMAAGGGAPMADNNEGADGVGSSSGNWHCDSTWLGDRVITTSTRTWALPTYNNHLYKQISNGTSGGATNDNTYFGYSTPWGYFDFNRFHCHFSPRDWQRLINNNWGFRPKRLSFKLFNIQVKEVTQNEGTKTIANNLTSTIQVFTDSECQLPYVLGSAHQGCLPPFPADVFTIPQYGYLTLNNGSQAVGRSSFYCLEYFPSQMLRTGNNFQFTYTFEDVPFHSSYAHSQSLDRLMNPLIDQYLYYLSRIQTTGGTANTQTLGFSQGGPNTMANQAKNWLPGPCYRQQRVSTTTGQNNNSNFAWTAGTKYHLNGRNSLANPGIAMATHKDDEERFFPSNGILIFGKQNAARDNADYSDVMPTSEEEIKTTNPVATEEYGIVADNLQQQNTAPQIGTVNSQGALPGMVWQNRDVYLQGPIWAKIPHTDGNFHPSPLMGGFGLKHPPPQILIKNTPVPADPPTTFNQSKLNSFITQYSTGQVSVEIEWELQKENSKRWNPEIQYTSNYYKSTSVDFAVNTEGVYSEPRPIGTRYLTRNL

SEQ ID NO: 11719 - protein, 738 aa, Artificial Sequence
  source: /note="Description of Artificial Sequence: Synthetic polypeptide"
MAADGYLPDWLEDNLSEGIREWWALKPGAPKPKANQQKQDDGRGLVLPGYKYLGPFNGLDKGEPVNAADAAALEHDKAYDQQLQAGDNPYLRYNHADAEFQERLQEDTSFGGNLGRAVFQAKKRVLEPLGLVEEGAKTAPGKKRPVEPSPQRSPDSSTGIGKKGQQPARKRLNFGQTGDSESVPDPQPLGEPPAAPSGVGPNTMAAGGGAPMADNNEGADGVGSSSGNWHCDSTWLGDRVITTSTRTWALPTYNNHLYKQISNGTSGGATNDNAYFGYSTPWGYFDFNRFHCHFSPRDWQRLINNNWGFRPKRLSFKLFNIQVKEVTQNEGTKTIANNLTSTIQVFTDSEYQLPYVLGSAHQGCLPPFPADVFTIPQYGYLTLNNGSQAVGRSSFYCLEYFPSQMLRTGNNFQFTYTFEDVPFHSSYAHSQSLDRLMNPLIDQYLYYLSRIQTTGGTANTQTLGFSQGGPNTMANQAKNWLPGPCYRQQRVSTTTGQNNNSNFAWTAGTKYHLNGRNSLANPGIAMATHKDDEERFFPSNGILIFGKQNAARDNADYSDVMPTSEEEIKTTNPVATEEYGIVADNLQQQNTAPQIGTVNSQGALPGMVWQNRDVYLQGPIWAKIPHTDGNFHPSPLMGGFGLKHPPPQILIKNTPVPADPPTTFNQSKLNSFITQYSTGQVSVEIEWELQKENSKRWNPEIQYTSNYYKSTSVDFAVNTEGVYSEPRPIGTRYLTRNL

SEQ ID NO: 11720 - protein, 738 aa, Artificial Sequence
  source: /note="Description of Artificial Sequence: Synthetic polypeptide"
MAADGYLPDWLEDNLSEGIREWWALKPGAPKPKANQQKQDDGRGLVLPGYKYLGPFNGLDKGEPVNAADAAALEHDKAYDQQLQAGDNPYLRYNHADAEFQERLQEDTSFGGNLGRAVFQAKKRVLEPLGLVEEGAKTAPGKKRPVEPSPQRSPDSSTGIGKKGQQPARKRLNFGQTGDSESVPDPQPLGEPPAAPSGVGPNTMAAGGGAPMADNNEGADGVGSSSGNWHCDSTWLGDRVITTSTRTWALPTYNNHLYKQISNGTSGGATNDNTYFGYSTPWGYFDFNRFHCHFSPRDWQRLINNNWGFRPKRLSFKLFNIQVKEVTQNEGTKTIANNLTSTIQVFTDSEYQLPYVLGSAHQGCLPPFPADVFTIPQYGYLTLNNGSQAVGRSSFYCLEYFPSQMLRTGNNFQFTYTFEDVPFHSSYAHSQSLDRLMNPLIDQYLYYLSRIQTTGGTANTQTLGFSQGGPNTMANQAKNWLPGPCYRQQRVSTTTGQNNNSNFAWTAGTKYHLNGRNSLANPGIAMATHKDDEERFFPSNGILIFGKQNAARGNADYSDVMPTSEEEIKTTNPVATEEYGIVADNLQQQNTAPQIGTVNSQGALPGMVWQNRDVYLQGPIWAKIPHTDGNFHPSPLMGGFGLKHPPPQILIKNTPVPADPPTTFNQSKLNSFITQYSTGQVSVEIEWELQKENSKRWNPEIQYTSNYYKSTSVDFAVNTEGVYSEPRPIGTRYLTRNL

SEQ ID NO: 11721 - protein, 738 aa, Artificial Sequence
  source: /note="Description of Artificial Sequence: Synthetic polypeptide"
MAADGYLPDWLEDNLSEGIREWWALKPGAPKPKANQQKQDDGRGLVLPGYKYLGPFNGLDKGEPVNAADAAALEHDKAYDQQLQAGDNPYLRYNHADAEFQERLQEDTSFGGNLGRAVFQAKKRVLEPLGLVEEGAKTAPGKKRPVEPSPQRSPDSSTGIGKKGQQPARKRLNFGQTGDSESVPDPQPLGEPPAAPSGVGPNTMAAGGGAPMADNNEGADGVGSSSGNWHCDSTWLGDRVITTSTRTWALPTYNNHLYKQISNGTSGGATNDNTYFGYSTPWGYFDFNRFHCHFSPRDWQRLINNNWGFRPKRLSFKLFNIQVKEVTQNEGTKTIANNLTSTIQVFTDSEYQLPYVLGSAHQGCLPPFPADVFTIPQYGYLTLNNGSQAVGRSSFYCLEYFPSQMLGTGNNFQFTYTFEDVPFHSSYAHSQSLDRLMNPLIDQYLYYLSRIQTTGGTANTQTLGFSQGGPNTMANQAKNWLPGPCYRQQRVSTTTGQNNNSNFAWTAGTKYHLNGRNSLANPGIAMATHKDDEERFFPSNGILIFGKQNAARDNADYSDVMPTSEEEIKTTNPVATEEYGIVADNLQQQNTAPQIGTVNSQGALPGMVWQNRDVYLQGPIWAKIPHTDGNFHPSPLMGGFGLKHPPPQILIKNTPVPADPPTTFNQSKLNSFITQYSTGQVSVEIEWELQKENSKRWNPEIQYTSNYYKSTSVDFAVNTEGVYSEPRPIGTRYLTRNL

SEQ ID NO: 11722 - protein, 738 aa, Artificial Sequence
  source: /note="Description of Artificial Sequence: Synthetic polypeptide"
MAADGYLPDWLEDNLSEGIREWWALKPGAPKPKANQQKQDDGRGLVLPGYKYLGPFNGLDKGEPVNAADAAALEHDKAYDQQLQAGDNPHLRYNHADAEFQERLQEDTSFGGNLGRAVFQAKKRVLEPLGLVEEGAKTAPGKKRPVEPSPQRSPDSSTGIGKKGQQPARKRLNFGQTGDSESVPDPQPLGEPPAAPSGVGPNTMAAGGGAPMADNNEGADGVGSSSGNWHCDSTWLGDRVITTSTRTWALPTYNNHLYKQISNGTSGGATNDNTYFGYSTPWGYFDFNRFHCHFSPRDWQRLINNNWGFRPKRLSFKLFNIQVKEVTQNEGTKTIANNLTSTIQVFTDSEYQLPYVLGSAHQGCLPPFPADVFTIPQYGYLTLNNGSQAVGRSSFYCLEYFPSQMLRTGNNFQFTYTFEDVPFHSSYAHSQSLDRLMNPLIDQYLYYLSRIQTTGGTANTQTLGFSQGGPNTMANQAKNWLPGPCYRQQRVSTTTGQNNNSNFAWTAGTKYHLNGRNSLANPGIAMATHKDDEERFFPSNGILIFGKQNAARDNADYSDVMPTSEEEIKTTNPVATEEYGIVADNLQQQNTAPQIGTVNSQGALPGMVWQNRDVYLQGPIWAKIPHTDGNFHPSPLMGGFGLKHPPPQILIKNTPVPADPPTTFNQSKLNSFITQYSTGQVSVEIEWELQKENSKRWNPEIQYTSNYYKSTSVDFAVNTEGVYSEPRPIGTRYLTRNL

SEQ ID NO: 11723 - protein, 738 aa, Artificial Sequence
  source: /note="Description of Artificial Sequence: Synthetic polypeptide"
MAADGYLPDWLEDNLSEGIREWWALKPGAPKPKANQQKQDDGRGLVLPGYKYLGPFNGLDKGEPVNAADAAALEHDKAYDQQLQAGDNPYLRYNHADAEFQERLQEDTSFGGNLGRAVFQAKKRVLEPLGLVEEGAKTAPGKKRPVEPSPQRSPDSSTGIGKKGQQPARKRLNFGQTGDSESVPDPQPLGEPPAAPSGVGPNTMAAGGGAPMADNNEGADGVGSSSGNWHCDSTWLGDRVITTSTRTWALPTYNNHLYKQISNGTSGGATNDNTYFGYSTPWGYFDFNRFHCHFSPRDWQRLINNNWGFRPKRLSFKLFNIQVKEVTQNEGTKTIANNLTSTIQVFTDSEYQLPYVLGPAHQGCLPPFPADVFTIPQYGYLTLNNGSQAVGRSSFYCLEYFPSQMLRTGNNFQFTYTFEDVPFHSSYAHSQSLDRLMNPLIDQYLYYLSRIQTTGGTANTQTLGFSQGGPNTMANQAKNWLPGPCYRQQRVSTTTGQNNNSNFAWTAGTKYHLNGRNSLANPGIAMATHKDDEERFFPSNGILIFGKQNAARDNADYSDVMPTSEEEIKTTNPVATEEYGIVADNLQQQNTAPQIGTVNSQGALPGMVWQNRDVYLQGPIWAKIPHTDGNFHPSPLMGGFGLKHPPPQILIKNTPVPADPPTTFNQSKLNSFITQYSTGQVSVEIEWELQKENSKRWNPEIQYTSNYYKSTSVDFAVNTEGVYSEPRPIGTRYLTRNL

SEQ ID NO: 11724 - protein, 738 aa, Artificial Sequence
  source: /note="Description of Artificial Sequence: Synthetic polypeptide"
MAADGYLPDWLEDNLSEGIREWWALKPGAPKPKANQQKQDDGRGLVLPGYKYLGPFNGLDKGEPVNAADAAALEHDKAYDQQLQAGDNPYLRYNHADAEFQERLQEDTSFGGNLGRAVFQAKKRVLEPLGLVGEGAKTAPGKKRPVEPSPQRSPDSSTGIGKKGQQPARKRLNFGQTGDSESVPDPQPLGEPPAAPSGVGPNTMAAGGGAPMADNNEGADGVGSSSGNWHCDSTWLGDRVITTSTRTWALPTYNNHLYKQISNGTSGGATNDNTYFGYSTPWGYFDFNRFHCHFSPRDWQRLINNNWGFRPKRLSFKLFNIQVKEVTQNEGTKTIANNLTSTIQVFTDSEYQLPYVLGSAHQGCLPPFPADVFTIPQYGYLTLNNGSQAVGRSSFYCLEYFPSQMLRTGNNFQFTYTFEDVPFHSSYAHSQSLDRLMNPLIDQYLYYLSRIQTTGGTANTQTLGFSQGGPNTMANQAKNWLPGPCYRQQRVSTTTGQNNNSNFAWTAGTKYHLNGRNSLANPGIAMATHKDDEERFFPSNGILIFGKQNAARDNADYSDVMPTSEEEIKTTNPVATEEYGIVADNLQQQNTAPQIGTVNSQGALPGMVWQNRDVYLQGPIWAKIPHTDGNFHPSPLMGGFGLKHPPPQILIKNTPVPADPPTTFNQSKLNSFITQYSTGQVSVEIEWELQKENSKRWNPEIQYTSNYYKSTSVDFAVNTEGVYSEPRPIGTRYLTRNL

SEQ ID NO: 11725 - protein, 738 aa, Artificial Sequence
  source: /note="Description of Artificial Sequence: Synthetic polypeptide"
MAADGYLPDWLEDNLSEGIREWWALKPGAPKPKANQQKQDDGRGLVLPGYKYLGPFNGLDKGEPVNAADAAALEHDKAYDQQLQAGDNPYLRYNHADAEFQERLQEDTSFGGNLGRAVFQAKKRVLEPLGLVEEGAKTAPGKKRPVEPSPQRSPDSSTGIGKKGQQPARKRLNFGQTGDSESVPDPQPLGEPPAAPSGVGPNTMAAGGGAPMADNNEGADGVGSSSGNWHCDSTWLGDRVITTSTRTWALPTYNNHLYKQISNGTSGGATNDNTYFGYSTPWGYFDFNRFHCHFSPRDWQRLINNNWGFRPKRLSFKLFNIQVKEVTQNEGTKTIANNLTSTIQVFTDSEYQLPYVLGSAHQGCLPPFPADVFTIPQYGYLTLNNGSQAVGRSSFYCLEYFPSQMLRTGNNFQFTYTFEDVPFHSSYAHSQSLDRLMNPLIDQYLYYLSRIQTTGGTANTQTLGFSQGGPNTMANQAKNWLPGPCYRQQRVSTTTGQNNNSNFAWTAGTKYHLNGRNSLANPGIAMATHKDDEERFFPSNGILIFGKQNAARDNADYSDVMPTSEEEIKTTNPVATEEYGIVADNLQQQNTAPQIGTVNSQGALPGMVWQNRDVYLQGPIWAKIPHTDGNFHPSPLMGGFGLKHPPPQILIKNTPVPADPPTTFNQSKLNSFITQYSTGQVSVEIEWELQKESSKRWNPEIQYTSNYYKSTSVDFAVNTEGVYSEPRPIGTRYLTRNL

SEQ ID NO: 11726 - protein, 738 aa, Artificial Sequence
  source: /note="Description of Artificial Sequence: Synthetic polypeptide"
MAADGYLPDWLEDNLSEGIREWWALKPGAPKPKANQQKQDDGRGLVLPGYKYLGPFNGLDKGEPVNAADAAALEHDKAYDQQLQAGDNPYLRYNHADAEFQERLQEDTSFGGNLGRAVFQAKKRVLEPLGLVEEGAKTAPGKKRPVEPSPQRSPDSSTGIGKKGQQPARKRLNFGQTGDSESVPDPQPLGEPPAAPSGVGPNTMAAGGGAPMADNNEGADGVGSSSGNWHCDSTWLGDRVITTSTRTWALPTYNNHLYKQISNGTSGGATNDNTYFGYSTPWGYFDFNRFHCHFSPRDWQRLINNNWGFRPKRLSFKLFNIQVKEVTQNEGTKTIANNLTSTIQVFTDSEYQLPYVLGSAHQGCLPPFPADVFTIPQYGYLTLNNGSQAVGRSSFYCLEYFPSQMLRTGNNFQFTYTFEDVPFHSSYAHSQSLDRLMNPLIDQYLYYLSRIQTTGGTANTQTLGFSQGGPNTMANQAKNWLPGPCYRQQRVSTTTGQNNNSNFAWTAGTKYHLNGRNSLANPGIAMATHKDDEERFFPSNGILIFGKQNAARDNADYSDVMPASEEEIKTTNPVATEEYGIVADNLQQQNTAPQIGTVNSQGALPGMVWQNRDVYLQGPIWAKIPHTDGNFHPSPLMGGFGLKHPPPQILIKNTPVPADPPTTFNQSKLNSFITQYSTGQVSVEIEWELQKENSKRWNPEIQYTSNYYKSTSVDFAVNTEGVYSEPRPIGTRYLTRNL

SEQ ID NO: 11727 - protein, 738 aa, Artificial Sequence
  source: /note="Description of Artificial Sequence: Synthetic polypeptide"
MAADGYLPDWLEDNLSEGIREWWALKPGAPKPKANQQKQDDGRGLVLPGYKYLGPFNGLDKGEPVNAADAAALEHDKAYDQQLQAGDNPYLRYNHADAEFQERLQEDTSFGGNLGRAVFQAKKRVLEPLGLVEEGAKTAPGKKRPVEPSPQRSPDSSTGIGKKGQQPARKRLNFGQTGDSESVPDPQPLGEPPAAPSGVGPNTMAAGGGAPMADNNEGADGVGSSSGNWHCDSTWLGDRVITTSTRTWALPTYNNHLYKQISNGTSGGATNDNTYFGYSTPWGYFDFNRFHCHFSPRDWQRLINNNWGFRPKRLSFKLFNIQVKEVTQNEGTKTIANNLTSTIQVFTDSEYQLPYVLGSAHQGCLPPFPADVLTIPQYGYLTLNNGSQAVGRSSFYCLEYFPSQMLRTGNNFQFTYTFEDVPFHSSYAHSQSLDRLMNPLIDQYLYYLSRIQTTGGTANTQTLGFSQGGPNTMANQAKNWLPGPCYRQQRVSTTTGQNNNSNFAWTAGTKYHLNGRNSLANPGIAMATHKDDEERFFPSNGILIFGKQNAARDNADYSDVMPTSEEEIKTTNPVATEEYGIVADNLQQQNTAPQIGTVNSQGALPGMVWQNRDVYLQGPIWAKIPHTDGNFHPSPLMGGFGLKHPPPQILIKNTPVPADPPTTFNQSKLNSFITQYSTGQVSVEIEWELQKENSKRWNPEIQYTSNYYKSTSVDFAVNTEGVYSEPRPIGTRYLTRNL

SEQ ID NO: 11728 - protein, 738 aa, Artificial Sequence
  source: /note="Description of Artificial Sequence: Synthetic polypeptide"
MAADGYLPDWLEDNLSEGIREWWALKPGAPKPKANQQKQDDGRGLVLPGYKYLGPFNGLDKGEPVNAADAAALEHDKAYDQQLQAGDNPYLRYNHADAEFQERLQEDTSFGGNLGRAVFQAKKRVLEPLGLVEEGAKTAPGKKRPVEPSPQRSPDSSTGIGKKGQQPARKRLNFGQTGDSESVPDPQPLGEPPAAPSGVGPNTMAAGGGAPMADNNEGADGVGSSSGNWHCDSTWLGDRVITTSTRTWALPTYNNHLYKQISNGTSGGATNDNTYFGYSTPWGYFDFNRFHCHFSPRDWQRLINNNWGFRPKRLSFKLFNIQVKEVTQNEGTKTIANNLTSTIRVFTDSEYQLPYVLGSAHQGCLPPFPADVFTIPQYGYLTLNNGSQAVGRSSFYCLEYFPSQMLRTGNNFQFTYTFEDVPFHSSYAHSQSLDRLMNPLIDQYLYYLSRIQTTGGTANTQTLGFSQGGPNTMANQAKNWLPGPCYRQQRVSTTTGQNNNSNFAWTAGTKYHLNGRNSLANPGIAMATHKDDEERFFPSNGILIFGKQNAARDNADYSDVMPTSEEEIKTTNPVATEEYGIVADNLQQQNTAPQIGTVNSQGALPGMVWQNRDVYLQGPIWAKIPHTDGNFHPSPLMGGFGLKHPPPQILIKNTPVPADPPTTFNQSKLNSFITQYSTGQVSVEIEWELQKENSKRWNPEIQYTSNYYKSTSVDFAVNTEGVYSEPRPIGTRYLTRNL

SEQ ID NO: 11729 - protein, 738 aa, Artificial Sequence
  source: /note="Description of Artificial Sequence: Synthetic polypeptide"
MAADGYLPDWLEDNLSEGIREWWALKPGAPKPKANQQKQDDGRGLVLPGYKYLGPFNGLDKGEPVNAADAAALEHDKAYDQQLQAGDNPYLRYNHADAEFQERLQEDTSFGGNLGRAVFQAKKRVLEPLGLVEEGAKTAPGKKRPVEPSPQRSPDSSTGIGKKGQQPARKRLNFGQTGDSESVPDPQPLGEPPAAPSGVGPNTMAAGGGAPMADNNEGADGVGSSSGNWHCDSTWLGDRVITTSTRTWALPTYNNHLYKQISNGTSGGATNDNTYFGYSTPWGYFDFNRFHCHFSPRDWRRLINNNWGFRPKRLSFKLFNIQVKEVTQNEGTKTIANNLTSTIQVFTDSEYQLPYVLGSAHQGCLPPFPADVFTIPQYGYLTLNNGSQAVGRSSFYCLEYFPSQMLRTGNNFQFTYTFEDVPFHSSYAHSQSLDRLMNPLIDQYLYYLSRIQTTGGTANTQTLGFSQGGPNTMANQAKNWLPGPCYRQQRVSTTTGQNNNSNFAWTAGTKYHLNGRNSLANPGIAMATHKDDEERFFPSNGILIFGKQNAARDNADYSDVMPTSEEEIKTTNPVATEEYGIVADNLQQQNTAPQIGTVNSQGALPGMVWQNRDVYLQGPIWAKIPHTDGNFHPSPLMGGFGLKHPPPQILIKNTPVPADPPTTFNQSKLNSFITQYSTGQVSVEIEWELQKENSKRWNPEIQYTSNYYKSTSVDFAVNTEGVYSEPRPIGTRYLTRNL

SEQ ID NO: 11730 - protein, 738 aa, Artificial Sequence
  source: /note="Description of Artificial Sequence: Synthetic polypeptide"
MAADGYLPDWLEDNLSEGIREWWALKPGAPKPKANQQKQDDGRGLVLPGYKYLGPFNGLDKGEPVNAADAAALEHDKAYDQQLQAGDNPYLRYNHADAEFQERLQEDTSFGGNLGRAVFQAKKRVLEPLGLVEEGAKTAPGKKRPVEPSPQRSPDSSTGIGKKGQQPARKRLNFGQTGDSESVPDPQPLGEPPAAPSGVGPNTMAAGGGAPMADNNEGADGVGSSSGNWHCDSTWLGDRVITTSTRTWALPTYNNHLYKQISNGTSGGATNDNTYFGYSTPWGYFDFNRFHCHFSPRDWQRLINNNWGFRPKRLSFKLFNIQVKEVTQNEGTKTIANNLTSTIQVFTDSEYQLPYVLGSAHQGCLPPFPADVFMIPQYGYLTLNNGSQAVGRSSFYCLEYFPSQMLRTGNNFQFTYTFEDVPFHSSYAHSQSLDRLMNPLIDQYLYYLSRTQTTGGTASTQTLGFSQGGPNTMANQAKNWLPGPCYRQQRVSTTTGQNNNSNFAWTAGTKYHLNGRNSLANPGIAMATHKDDEERFFPSNGILIFGKQNAARDNADYSDVMLTSEEEIKTTNPVATEEYGIVADNLQQQNTAPQIGTVNSQGALPGMVWQNRDVYLQGPIWAKIPHTDGNFHPSPLMGGFGLKHPPPQILIKNTPVPADPPTTFNQSKLNSFITQYSTGQVSVEIEWELQKENSKRWNPEIQYTSNYYKSTSVDFAVNTEGVYSEPRPIGTRYLTRNL

SEQ ID NO: 11731 - protein, 738 aa, Artificial Sequence; identical to SEQ ID NO: 116
  source: /note="Description of Artificial Sequence: Synthetic polypeptide"

SEQ ID NO: 11732 - protein, 738 aa, Artificial Sequence
  source: /note="Description of Artificial Sequence: Synthetic polypeptide"
MAADGYLPDWLEDNLSEGIREWWALKPGAPKPKANQQKQDDGRGQVLPGYKYLGPFNGLDKGEPVNAADAAALEHDKAYDQQLQAGDNPYLRYNHADAEFQERLQEDTSFGGNLGRAVFQAKKRVLEPLGLVEEGAKTAPGKKRPVEPSPQRSPDSSTGIGKKGQQPARKRLNFGQTGDSESVPDPQPLGEPPAAPSGVGPNTMAAGGGAPMADNNEGADGVGSSSGNWHCDSTWLGDRVITTSTRTWALPTYNNHLYKQISNGTSGGATNDNTYFGYSTPWGYFDFNRFHCHFSPRDWQRLINNNWGFRPKRLSFKLFNIQVKEVTQNEGTKTIANNLTSTIQVFTDSEYQLPYVLGSAHQGCLPPFPADVFMIPQYGYLTLNNGSQAVGRSSFYCLEYFPSQMLRTGNNFQFTYTFEDVPFHSSYAHSQSLDRLMNPLIDQYLYYLSRTQTTGGTANTQTLGFSQGGPNTMANQAKNWLPGPCYRQQRVSTTTGQNNNSNFAWTAGTKYHLNGRNSLANPGIAMATHKDDEERFFPSNGILIFGKQNAARDNADYSDVMLTSEEEIKTTNPVATEEYGIVADNLQQQNTAPQIGTVNSQGALPGMVWQNRDVYLQGPVWAKIPHTDGNFHPSPLMGGFGLKHPPPQILIKNTPVPADPPTTFNQSKLNSFITQYSTGQVSVEIEWELQKENSKRWNPEIQYTSNYYKSTSVDFAVNTEGVYSEPRPIGTRYLTRNL

SEQ ID NO: 11733 - protein, 738 aa, Artificial Sequence
  source: /note="Description of Artificial Sequence: Synthetic polypeptide"
MAADGYLPDWLEDNLSEGIREWWALKPGAPKPKANQQKQDDGRGLVLPGYKYLGPFNGLDKGEPVNAADAAALEHDKAYDQQLQAGDNPYLRYNHADAEFQERLQEDTSFGGNLGRAVFQAKKRVLEPLGLVEEGAKTAPGKKRPVEPSPQRSPDSSTGIGKKGQQPARKRLNFGQTGDSESVPDPQPLGEPPAAPSGVGPNTMAAGGGAPMADNNEGADGVGSSSGNWHCDSTWLGDRVITTSTRTWALPTYNNHLYKQISNGTSGGATNDNTYFGYSTPWGYFDFNRFHCHFSPRDWQRLINSNWGFRPKRLSFKLFNIQVKEVTQNEGTKTIANNLTSTIQVFTDSEYQLPYVLGSAHQGCLPPFPADVFMIPQYGYLTLNNGSQAVGRSSFYCLEYFPSQMLRTGNNFQFTYTFEDVPFHSSYAHSQSLDRLMNPLIDQYLYYLSRTQTTGGTANTQTLGFSQGGPNTMANQAKNWLPGPCYRQQRVSTTTGQNNNSNFAWTAGTKYHLNGRNSLANPGIAMATHKDDEERFFPSNGILIFGKQNAARDNADYSDVMLTSEEEIKTTNPVATEEYGIVADNLQQQNTAPQIGTVNSQGALPGMVWQNRDVYLQGPIWAKIPHTDGNFHPSPLMGGFGLKHPPPQILIKNTPVPADPPTTFNQSKLNSFITQYSTGQVSVEIEWELQKENSKRWNPEIQYTSNYYKSTSVDFAVNTEGVYSEPRPIGTRYLTRNL

SEQ ID NO: 11734 - protein, 738 aa, Artificial Sequence
  source: /note="Description of Artificial Sequence: Synthetic polypeptide"
MAADGYLPDWLEDNLSEGIREWWALKPGAPKPKANQQKQDDGRGLVLPGYKYLGPFNGLDKGEPVNAADAAALEHDKAYDQQLQAGDNPYLRYNHADAEFQERLQEDTSFGGNLGRAVFQAKKRVLEPLGLVEEGAKTAPGKKRPVEPSPQRSPDSSTGIGKKGQQPARKRLNFGQTGDSESVPDPQPLGEPPAAPSGVGPNTMAAGGGAPMADNNEGADGVGSSSGNWHCDSTWLGDRVITTSTRTWALPTYNNHLYKQISNGTSGGATNDNTYFGYSTPWGYFDFNRFHCHFSPRDWQRLINNNWGFRPKRLSFKLFNIQVKEVTQNEGTKTIANNLTSTIQVFTDSEYQLPYVLGSAHQGCLPPFPADVFTIPQYGYLTLNNGSQAVGRSSFYCLEYFPSQMLRTGNNFQFTYTFEDVPFHSSYAHSQSLDRLMNPLIDQYLYYLSRTQTTGGTANTQTLGFSQGGPNTMANQAKNWLPGPCYRQQRVSTTTGQNNNSNFAWTAGTKYHLNGRNSLANPGIAMATHKDDEERFFPSNGILIFGKQNAARDNADYSDVMLTSEEEIKTTNPVATEEYGIVADNLQQQNTAPQIGTVNSQGALPGMVWQNRDVYLQGPIWAKIPHTDGNFHPSPLMGGFGLKHPPPQILIKNTPVPADPPTTFNQSKLNSFITQYSTGQVSVEIEWELQKENSKRWNPEIQYTSNYYKSTSVDFAVNTEGVYSEPRPIGTRYLTRNL

SEQ ID NO: 11735 - protein, 738 aa, Artificial Sequence
  source: /note="Description of Artificial Sequence: Synthetic polypeptide"
MAADGYLPDWLEDNLSEGIREWWALKPGAPKPKANQQKQDDGRGLVLPGYKYLGPFNGLDKGEPVNAADAAALEHDKAYDQQLQAGDNPYLRYNHADAEFQERLQEDTSFGGNLGRAVFQAKKRVLEPLGLVEEGAKTAPGKKRPVEPSPQRSPDSSTGIGKKGQQPARKRLNFGQTGDSESVPDPQPLGEPPAAPSGVGPNTMAAGGGAPMADNNEGADGVGSSSGNWHCDSTWLGDRVITTSTRTWALPTYNNHLYKQISNGTSGGATNDNTYFGYSTPWGYFDFNRFHCHFSPRDWQRLIDNNWGFRPKRLSFKLFNIQVKEVTQNEGTKTIANNLTSTIQVFTDSEYQLPYVLGSAHQGCLPPFPADVFMIPQYGYLTLNNGSQAVGRSSFYCLEYFPSQMLRTGNNFQFTYTFEDVPFHSSYAHSQSLDRLMNPLIDQYLYYLSRTQTTGGTANTQTLGFSQGGPNTMANQAKNWLPGPCYRQQRVSTTTGQNNNSNFAWTAGTKYHLNGRNSLANPGIAMATHKDDEERFFPSNGILIFGKQNAARDNADYSDVMLTSEEEIKTTNPVATEEYGIVADNLQQQNTAPQIGTVNSQGALPGMVWQNRDVYLQGPIWAKIPHTDGNFHPSPLMGGFGLKHPPPQILIKNTPVPADPPTTFNQSKLNSFITQYSTGQVSVEIEWELQKENSKRWNPEIQYTSNYYKSTSVDFAVNTEGVYSEPRPIGTRYLTRNL

SEQ ID NO: 11736 - protein, 738 aa, Artificial Sequence
  source: /note="Description of Artificial Sequence: Synthetic polypeptide"
MAADGYLPDWLEDNLSEGIREWWALKPGAPKPKANQQKQDDGRGLVLPGYKYLGPFNGLDKGEPVNAADAAALEHDKAYDQQLQAGDNPYLRYNHADAEFQERLQEDTSFGGNLGRAVFQAKKRVLEPLGLVEEGAKTAPGKKRPVEPSPQRSPDSSTGIGKKGQQPARKRLNFGQTGDSESVPDPQPLGEPPAAPSGVGPNTMAAGGGAPMADNNEGADGVGSSSGNWHCDSTWLGDRVITTSTRTWALPAYNNHLYKQISNGTSGGATNDNTYFGYSTPWGYFDFNRFHCHFSPRDWQRLINNNWGFRPKRLSFKLFNIQVKEVTQNEGTKTIANNLTSTIQVFTDSEYQLPYVLGSAHQGCLPPFPADVFTIPQYGYLTLNNGSQAVGRSSFYCLEYFPSQMLRTGNNFQFTYTFEDVPFHSSYAHSQSLDRLMNPLIDQYLYYLSRTQTTGGTANTQTLGFSQGGPNTMANQAKNWLPGPCYRQQRVSTTTGQNNNSNFAWTAGTKYHLNGRNSLANPGIAMATHKDDEERFFPSNGILIFGKQNAARDNADYSDVMLTSEEEIKTTNPVATEEYGIVADNLQQQNTAPQIGTVNSQGALPGMVWQNRDVYLQGPIWAKIPHTDGNFHPSPLMGGFGLKHPPPQILIKNTPVPADPPTTFNQSKLNSFITQYSTGQVSVEIEWELQKENSKRWNPEIQYTSNYYKSTNVDFAVNTEGVYSEPRPIGTRYLTRNL

SEQ ID NO: 11737 - protein, 738 aa, Artificial Sequence
  source: /note="Description of Artificial Sequence: Synthetic polypeptide"
MAADGYLPDWLEDNLSEGIREWWALKPGAPKPKANQQKQDDGRGLVLPGYKYLGPFNGLDKGEPVNAADAAALEHDKAYDQQLQAGDNPYLRYNHADAEFQERLQEDTSFGGNLGRAVFQAKKRVLEPLGLVEEGAKTAPGKKRPVEPSPQRSPDSSTGIGKKGQQPARKRLNFGQTGDSESVPDPQPLGEPPAAPSGVGPNTMAAGGGAPMADNNEGADGVGSSSGNWHCDSTWLGDRVITTSTRTWALPTYNNHLYKQISNGTSGGATNDNTYFGYSTPWGYFDFNRFHCHFSPRDWQRLINNNWGFRPKRLSFKLFNIQVKEVTQNEGTKTIANNLTSTIQVFTDSEYQLPYVLGSAHQGCLPPFPADVFMIPQYGYLTLNDGSQAVGRSSFYCLEYFPSQMLRTGNNFQFTYTFEDVPFHSSYAHSQSLDRLMNPLIDQYLYYLSRTQTTGGTANTQTLGFSQGGPNTMANQAKNWLPGPCYRQQRVSTTTGQNNNSNFAWTAGTKYHLNGRNSLANPGIAMATHKDDEERFFPSNGILIFGKQNAARDNADYSDVMLTSEEEIKTTNPVATEEYGIVADNLQQQNTAPQIGTVNSQGALPGMVWQNRDVYLQGPIWAKIPHTDGNFHPSPLMGGFGLKHPPPQILIKNTPVPADPPTTFNQSKLNSFITQYSTGQVSVEIEWELQKENSKRWNPEIQYTSNYYKSTSVDFAVNTEGVYSEPRPIGTRYLTRNL

SEQ ID NO: 11738 - protein, 738 aa, Artificial Sequence
  source: /note="Description of Artificial Sequence: Synthetic polypeptide"
MAADGYLPDWLEDNLSEGIREWWALKPGAPKPKANQQKQDDGRGLVLPGYKYLGPFNGLDKGEPVNAADAAALEHDKAYDQQLQAGDNPYLRYNHADAEFQERLQEDTSFGGNLGRAVFQAKKRVLEPLGLVEEGAKTAPGKKRPVEPSPQRSPDSSTGIGKKGQQPARKRLNFGQTGDSESVPDPQPLGEPPAAPSGVGPNTMAAGGGAPMADNNEGADGVGSSSGNWHCDSTWLGDRVITTSTRTWAQPTYNNHLYKQISNGTSGGATNDNTYFGYSTPWGYFDFNRFHCHFSPRDWQRLINNNWGFRPKRLSFKLFNIQVKEVTQNEGTKTIANNLTSTIQVFTDSEYQLPYVLGSAHQGCLPPFPADVFMIPQYGYLTLNNGSQAVGRSSFYCLEYFPSQMLRTGNNFQFTYTFEDVPFHSSYAHSQSLDRLMNPLIDQYLYYLSRTQTTGGTANTQTLGFSQGGPNTMANQAKNWLPGPCYRQQRVSTTTGQNNNSNFAWTAGTKYHLNGRNSLANPGIAMATHKDDEERFFPSNGILIFGKQNAARDNADYSDVMLTSEEEIKTTNPVATEEYGIVADNLQQQNTAPQIGTVNSQGALPGMVWQNRDVYLQGPIWAKIPHTDGNFHPSPLMGGFGLKHPPPQILIKNTPVPADPPTTFNQSKLNSFITQYSTGQVSVEIEWELQKENSKRWNPEIQYTSNYYKSTSVDFAVNTEGVYSEPRPIGTRYLTRNL

SEQ ID NO: 11739 - protein, 735 aa, Artificial Sequence
  source: /note="Description of Artificial Sequence: Synthetic polypeptide"
MAADGYLPDWLEDTLSEGIRQWWKLKPGPPPPKPAERHKDDSRGLVLPGYKYLGPFNGLDKGEPVNEADAAALEHDKAYDRQLDSGDNPYLKYNHADAEFQERLKEDTSFGGNLGRAVFQAKKRVLEPLGLVEEPVKTAPGKKRPVEHSPAEPDSSSGTGKAGQQPARKRLNFGQTGDADSVPDPQPLGQPPAAPSGLGTNTMATGSGAPMADNNEGADGVGNSSGNWHCDSTWMGDRVITTSTRTWALPTYNNHLYKQISSQSGASNDNHYFGYSTPWGYFDFNRFHCHFSPRDWQRLINNNWGFRPKRLSFKLFNIQVKEVTQNDGTTTIANNLTSTVQVFTDSEYQLPYVLGSAHQGCLPPFPADVFMVPQYGYLTLNNGSQAVGRSSFYCLEYFPSQMLRTGNNFTFSYTFEDVPFHSSYAHSQSLDRLMNPLIDQYLYYLSKTNAPSGTTTMSRLQFSQAGASDIRDQSRNWLPGPCYRQQRVSKTAADNNNSDYSWTGATKYHLNGRDSLVNPGPAMASHKDDEEKYFPQSGVLIFGKQGSNKTNVDIEKVMITDEEEIRTTNPVATEQYGAVSTNLQSGNTQAATSDVNTQGVLPGMVWQDRDVYLQGPIWAKIPHTDGHFHPSPLMGGFGLKHPPPQILIKNTPVPANPSTTFSAAKFASFITQYSTGQVSVEIEWELQKENSKRWNPEIQYTSNYNKSVNVDFTVDTNGVYSEPRPIGTRYLTRNL

SEQ ID NO: 11740 - protein, 735 aa, Artificial Sequence
  source: /note="Description of Artificial Sequence: Synthetic polypeptide"
MAADGYLPDWLEDTLSEGIRQWWKLKPGPPPPKPAERHKDDSRGLVLPGYKYLGPFNGLDKGEPVNEADAAALEHDKAYDRQLDSGDNPYLKYNHADAEFQERLKEDTSFGGNLGRAVFQAKKRVLEPLGLVEEPVKTAPGKKRPVEHSPAEPDSSSGTGKAGQQPARKRLNFGQTGDADSVPDPQPLGQPPAAPSGLGTNTMATGSGAPMADNNEGADGVGNSSGNWHCDSTWMGDRVITTSTRTWALPTYNNHLYKQISSQSGASNDNHYFGYSTPWGYFDFNRFHCHFSPRDWQRLINNNWGFRPKRLSFKLFNIQVKEVTQNDGTTTIANNLTSTVQVFTDSEYQLPYVLGSAHQGCLPPFPADVFMVPQYGYLTLNNGSQAVGRSSFYCLEYFPSQMLRTGNNFTFSYTFEDVPFHSSYAHSQSLDRLMNPLIDQYLYYLSKTNAPSGTTTMSRLQFSQAGASDIRDQSRNWLPGPCYRQQRVSKTAADNNNSDYSWTGATKYHLNGRDSLVNPGPAMASHKDDEEKIFPQSGVLIFGKQGSNKTNVDIEKVMITDEEEIRTTNPVATEQYGAVSTNLQSGNTQAATSDVNTQGVLPGMVWQDRDVYLQGPIWAKIPHTDGHFHPSPLMGGFGLKHPPPQILIKNTPVPANPSTTFSAAKFASFITQYSTGQVSVEIEWELQKENSKRWNPEIQYTSNYNKSVNVDFTVDTNGVYSEPRPIGTRYLTRNL

SEQ ID NO: 11741 - protein, 735 aa, Artificial Sequence
  source: /note="Description of Artificial Sequence: Synthetic polypeptide"
MAADGYLPDWLEDTLSEGIRQWWKLKPGPPPPKPAERHKDDSRGLVLPGYKYLGPFNGLDKGEPVNEADAAALEHDKAYDRQLDSGDNPYLKYNHADAEFQERLKEDTSFGGNLGRAVFQAKKRVLEPLGLVEEPVKTAPGKKRPVEHSPAEPDSSSGTGKAGQQPARKRLNFGQTGDADSVPDPQPLGQPPAAPSGLGTNTMATGSGAPMADNNEGADGVGNSSGNWHCDSTWMGDRVITTSTRTWALPTYNNHLYKQISSQSGASNDNHYFGYSTPWGYFDFNRFHCHFSPRDWQRLINNNWGFRPKRLSFKLFNIQVKEVTQNDGTTTIANNLTSTVQVFTDSEYQLPYALGSAHQGCLPPFPADVFMVPQYGYLTLNNGSQAVGRSSFYCLEYFPSQMLRTGNNFTFSYTFEDVPFHSSYAHSQSLDRLMNPLIDQYLYYLSKTNAPSGTTTMSRLQFSQAGASDIRDQSRNWLPGPCYRQQRVSKTAADNNNSDYSWTGATKYHPNGRDSLVNPGPAMASHKDDEEKYFPQSGVLIFGKQGSNKTNVDIEKVMITDEEEIRTTNPVATEQYGAVSTNLQSGNTQAATSDVNTQGVLPGMVWQDRDVYLQGPIWAKIPHTDGHSHPSPLMGGFGLKHPPPQILIKNTPVPANPSTTFSAAKFASFITQYSTGQVSVEIEWELQKENSKRWNPEIQYTSNYNKSVNVDFTVDTNGVYSEPRPIGTRYLTRNL

SEQ ID NO: 11742 - protein, 734 aa, Artificial Sequence
  source: /note="Description of Artificial Sequence: Synthetic polypeptide"
MAADGYLPDWLEDTLSEGIRQWWKLKPGPPPPKPAERHKDDSRGLVLPGYKYLGPFNGLDKGEPVNEADAAALEHDKAYDRQLDSGDNPYLKYNHADAEFQERLKEDTSFGGNLGRAVFQAKKRVLEPLGLVEEPVKTAPGKKRPVEHSPAEPDSSSGTGKAGQQPARKRLNFGQTGDADSVPDPQPLGQPPAAPSGLGTNTMATGSGAPMADNNEGADGVGNSSGNWHCDSTWMGDRVITTSTRTWALPTYNNHLYKQISSQSGASNDNHYFGYSTPWGYFDFNRFHCHFSPRDWQRLINNNWGFRPKRLSFKLFNIQVKEVTQNDGTTTIANNLTSTVQVFTDSEYQLPYVLGSAHQGCLPPFPADVFMVPQYGYLTLNNGSQAVGRSSFYCLEYFPSQMLRTGNNFTFSYTFEDVPFHSSYAHSQSLDRLMNPLIDQYLYYLSKTNAPSGTTTMSRLQFSQAGASDIRDQSRNWLPGPCYRQQRVSKTAADNNSDYSWTGATKYHLNGRDSLVNPGPAMASHKDDEEKYFPQSGVLIFGKQGSNKTNVDIEKVMITDEEEIRTTNPVATEQYGAVSTNLQSGNTQAATSDVNTQGVLPGMVWQDRDVYLQGPIWAKIPHTDGHFHPSPLMGGFGLKHPPPQILIKNTPVPANPSTTFSAAKFASFITQYSTGQVSVEIEWELQKENSKRWNPEIQYTSNYNKSVNVDFTVDTNGVYSEPRPIGTRYLTRNL

SEQ ID NO: 11743 - protein, 735 aa, Artificial Sequence
  source: /note="Description of Artificial Sequence: Synthetic polypeptide"
MAADGYLPDWLEDTLSEGIRQWWKLKPGPPPPKPAERHKDDSRGLVLPGYKYLGPFNGLDKGEPVNEADAAALEHDKAYDRQLDSGDNPYLKYNHADAEFQERLKEDTSFGGNLARAVFQAKKRVLEPLGLVEEPVKTAPGKKRPVEHSPAEPDSSSGTGKSGQQPARKRLNFGQTGDADSVPDPQPLGQPPAAPSGLGTNTMASGSGAPMADNNEGADGVGNSSGNWHCDSTWMGDRVITTSTRTWALPTYNNHLYKQISSQSGASNDNHYFGYSTPWGYFDFNRFHCHFSPRDWQRLINNNWGFRPKRLNFKLFNIQVKEVTQNDGTTTIANNLTSTVQVFTDSEYQLPYVLGSAHQGCLPPFPADVFMVPQYGYLTLNNGSQAVGRSSFYCLEYFPSQMLRTGNNFTFSYTFEDVPFHSSYAHSQSLDRLMNPLIDQYLYYLSRTNTPSGTTTQSRLQFSQAGASDIRDQSRNWLPGPCYRQQRVSKTAADNNNSDYSWTGATKYHLNGRDSLVNPGTAMASHKDDEEKYFPQSGVLIFRKQDSGKTNVDIEKVMITDEEEIRTTNPVATEQYGSVSTNLQSGNTQAATSDVNTQGVLPGMVWQDRDVYLQGPIWAKIPHTDGHFHPSPLMGGLGQKHPPPQSLIKNTPVPANPSTTFSAAKFASFITQYSTGQVSVEIEWELQKENSKRWNPEIQYTSNYNKSVNVDFTVDTNGVYSEPRPIGTRYLTRNL

SEQ ID NO: 11744 - protein, 735 aa, Artificial Sequence
  source: /note="Description of Artificial Sequence: Synthetic polypeptide"
MAADGYLPDWLEDTLSEGIRQWWKLKPGPPPPKPAERHKDDSRGLVLPGYKYLGPFNGLDKGEPVNEADAAALEHDKAYDRQLDSGDNPYLKYNHADAEFQERLKEDTSFGGNLARAVFQAKKRVLEPLGLVEEPVKTAPGKKRPVEHSPAEPDSSSGTGKSGQQPARKRLNFGQTGDADSVPDPQPLGQPPAAPSGLGTNTMASGSGAPMADNNEGADGVGNSSGNWHCDSTWMGDRVITTSTRTWALPTYNNHLYKQISSQSGASNDNHYFGYSTPWGYFDFNRFHCHFSPRDWQRLINNNWGFRPKRLNFKLFNIQVKEVTQNDGTTTIANNLTSTVQVFTDSEYQLPYVLGSAHQGCLPPFPADVFMVPQYGYLTLNNGSQAVGRSSFYCLEYFPSQMLRTGNNFTFSYTFEDVPFHSSYAHSQSLDRLMNPLIDQYLYYLSRTNTPSGTTTQSRLQFSQAGASDIRDQSRNWLPGPCYRQQRVSKTAADNNNSDYSWTGATKYHLNGRDSLVNPGTAMASHKDDEEKYFPQSGVLIFGKQDSGKTNVDIEKVMITDEEEIRTTNPVATEQYGSVSTNLQSGNTQAATSDVNTQGVLPGMVWQDRDVYLQGPIWAKIPHTDGHFHPSPLMGGLGQKHPPPQILIKNTPVPANPSTTFSAAKFASFITQYSTGQVSVEIEWELQKENSKRWNPEIQYTSNYNKSVNVDFTVDTNGVYSEPRPIGTRYLTRNL

SEQ ID NO: 11745 - protein, 735 aa, Artificial Sequence
  source: /note="Description of Artificial Sequence: Synthetic polypeptide"
MAADGYLPDWLEDTLSEGIRQWWKLKPGPPPPKPAERHKDDSRGLVLPGYKYLGPFNGLDKGEPVNEADAAALEHDKAYDRQLDSGDNPYLKYNHADAEFQERLKEDTSFGGNLARAVFQAKKRVLEPLGLVEEPVKTAPGKKRPVEHSPAEPDSSSGTGKSGQQPARKRLNFGQTGDADSVPDPQPLGQPPAAPSGLGTNTMASGSGAPMADNNEGADGVGNSSGNWHCDSTWMGDRVITTSTRTWALPTYNNHLYKQISSQSGASNDNHYFGYSTPWGYFDFNRFHCHFSPRDWQRLINNNWGFRPKRLNFKLFNIQVKEVTQNDGTTTIANNLTSTVQVFTDSEYQLPYVLGSAHQGCLPPFPADVFMVPRYGYLTLNNGSQAVGRSSFYCLEYFPSQMLRTGNNFTFSYTFEDVPFHSSYAHSQSLDRLMNPLIDQYLYYLSRTNTPSGTTTQSRLQFSQAGASDIRDQSRNWLPGPCYRQQRVSKTAADNNNSDYSWTGATKYHLNGRDSLVNPGTAMASHKDDEEKYFPQSGVLIFRKQDSGKTNVDIEKVMITDEEEIRTTNPVATEQYGSVSTNLQSGNTQAATSDVNTQGVLPGMVWQDRDVYLQGPIWAKIPHTDGHFHPSPLMGGFGLKHPPPQILIKNTPVPANPSTTFSAAKFASFITQYSTGQVSVEIEWELQKENSKRWNPEIQYTSNYNKSVNVDFTVDTNGVYSEPRPIGTRYLTRNL

SEQ ID NO: 11746 - protein, 735 aa, Artificial Sequence
  source: /note="Description of Artificial Sequence: Synthetic polypeptide"
MAADGYLPDWLEDTLSEGIRQWWKLKPGPPPPKPAERHKDDSRGLVLPGYKYLGPFNGLDKGEPVNEADAAALEHDKAYDRQLDSGDNPYLKYNHADAEFQERLKEDTSFGGNLARAVFQAKKRVLEPLGLVEEPVKTAPGKKRPVEHSPAEPDSSSGTGKSGQQPARKRLNFGQTGDADSVPDPQPLGQPPAAPSGLGTNTMASGSGAPMADNNEGADGVGNSSGNWHCDSTWMGDRVITTSTRTWALPTYNNHLYKQISSQSGASNDNHYFGYSTPWGYFDFNRFHCHFSPRDWQRLINNNWGFRPKRLNFKLFNIQVKEVTQNDGTTTIANNLTSTVQVFTDSEYQLPYVLGSAHQGCLPPFPADVFMVPQYGYLTLNNGSQAVGRSSFYCLEYFPSQMLRTGNNFTFSYTFEDVPFHSSYAHSQSLDRLMNPLIDQYLYYLSRTNTPSGTTTQSRLQFSQAGASDIRDQSRNWLPGPCYRQQRVSKTAADNNNSDYSWTGATKYHLNGRDSLVNPGTAMASHKDDEEKYFPQSGVLIFRKQDSGKTNVDIEKVMITDEEEIRTTNPVATEQYGSVSTNLQSGNTQAATSDVNTQGVLPGMVWQDRDVYLQGPIWAKIPHTDGHFHPSPLMGGFGLKHPPPQILIKNTPVPANPSTTFSAAKFASFITQYSTGQVSVEIEWELQKENSKRWNPEIQYTSNYNKSVNVDFTVDTNGVYSEPRPIGTRYLTRNL

SEQ ID NO: 11747 - protein, 735 aa, Artificial Sequence
  source: /note="Description of Artificial Sequence: Synthetic polypeptide"
MAADGYLPDWLEDTLSEGIRQWWKLKPGPPPPKPAERHKDDSRGLVLPGYKYLGPFNGLDKGEPVNEADAAALEHDKAYDRQLDSGDNPYLKYNHADAEFQERLKEDTSFGGNLARAVFQAKKRVLEPLGLVEEPVKTAPGKKRPVEHSPAEPDSSSGTGKSGQQPARKRLNFGQTGDADSVPDPQPLGQPPAAPSGLGTNTMASGSGAPMADNNEGADGVGNSSGNWHCDSTWMGDRVITTSTRTWALPTYNNHLYKQISSQSGASNDNHYFGYSTPWGYFDFNRFHCHFSPRDWQRLINNNWGFRPKRLNFKLFNIQVKEVTQNDGTTTIANNLTSTVQVFTDSEYQLPYVLGSAHQGCLPPFPADVFMVPRYGYLTLNNGSQAVGRSSFYCLEYFPSQMLRTGNNFTFSYTFEDVPFHSSYAHSQSLDRLMNPLIDQYLYYLSRTNTPSGTTTQSRLQFSQAGASDIRDQSRNWLPGPCYRQQRVSKTAADNNNSDYSWTGATKYHLNGRDSLVNPGTAMASHKDDEEKYFPQSGVLIFGKQDSGKTNVDIEKVMITDEEEIRTTNPVATEQYGSVSTNLQSGNTQAATSDVNTQGVLPGMVWQDRDVYLQGPIWAKIPHTDGHFHPSPLMGGFGLKHPPPQILIKNTPVPANPSTTFSAAKFASFITQYSTGQVSVEIEWELQKENSKRWNPEIQYTSNYNKSVNVDFTVDTNGVYSEPRPIGTRYLTRNL

SEQ ID NO: 11748 - protein, 735 aa, Artificial Sequence
  source: /note="Description of Artificial Sequence: Synthetic polypeptide"
MAADGYLPDWLEDTLSEGIRQWWKLKPGPPPPKPAERHKDDSRGLVLPGYKYLGPFNGLDKGEPVNEADAAALEHDKAYDRQLDSGDNPYLKYNHADAEFQERLKEDTSFGGNLARAVFQAKKRVLEPLGLVEEPVKTAPGKKRPVEHSPAEPDSSSGTGKSGQQPARKRLNFGQTGDADSVPDPQPLGQPPAAPSGLGTNTMASGSGAPMADNNEGADGVGNSSGNWHCDSTWMGDRVITTSTRTWALPTYNNHLYKQISSQSGASNDNHYFGYSTPWGYFDFNRFHCHFSPRDWQRLINNNWGFRPKRLNFKLFNIQVKEVTQNDGTTTIANNLTSTVQVFTDSEYQLPYVLGSAHQGCLPPFPADVFMVPQYGYLTLNNGSQAVGRSSFYCLEYFPSQMLRTGNNFTFSYTFEDVPFHSSYAHSQSLDRLMNPLIDQYLYYLSRTNTPSGTTTQSRLQFSQAGASDIRDQSRNWLPGPCYRQQRVSKTAADNNNSDYSWTGATKYHLNGRDSLVNPGTAMASHKDDEEKYFPQSGVLIFGKQDSGKTNVDIEKVMITDEEEIRTTNPVATEQYGSVSTNLQSGNTQAATSDVNTQGVLPGMVWQDRDVYLQGPIWAKIPHTDGHFHPSPLMGGLGQKHPPPQSLIKNTPVPANPSTTFSAAKFASFITQYSTGQVSVEIEWELQKENSKRWNPEIQYTSNYNKSVNVDFTVDTNGVYSEPRPIGTRYLTRNL

SEQ ID NO: 11749 - protein, 735 aa, Artificial Sequence
  source: /note="Description of Artificial Sequence: Synthetic polypeptide"
MAADGYLPDWLEDTLSEGIRQWWKLKPGPPPPKPAERHKDDSRGLVLPGYKYLGPFNGLDKGEPVNEADAAALEHDKAYDRQLDSGDNPYLKYNHADAEFQERLKEDTSFGGNLARAVFQAKKRVLEPLGLVEEPVKTAPGKKRPVEHSPAEPDSSSGTGKSGQQPARKRLNFGQTGDADSVPDPQPLGQPPAAPSGLGTNTMASGSGAPMADNNEGADGVGNSSGNWHCDSTWMGDRVITTSTRTWALPTYNNHLYKQISSQSGASNDNHYFGYSTPWGYFDFNRFHCHFSPRDWQRLINNNWGFRPKRLNFKLFNIQVKEVTQNDGTTTIANNLTSTVQVFTDSEYQLPYVLGSAHQGCLPPFPADVFMVPQYGYLTLNNGSQAVGRSSFYCLEYFPSQMLRTGNNFTFSYTFEDVPFHSSYAHSQSLDRLMNPLIDQYLYYLSRTNTPSGTTTQSRLQFSQAGASDIRDQSRNWLPGPCYRQQRVSKTAADNNNSDYSWTGATKYHLNGRDSLVNPGTAMASHKDDEEKYFPQSGVLIFGKQDSEKTNVDIEKVMITDEEEIRTTNPVATEQYGSVSTNLQSGNTQAATSDVNTQGVLPGMVWQDRDVYLQGPIWAKIPHTDGHFHPSPLMGGFGLKHPPPQILIKNTPVPANPSTTFSAAKFASFITQYSTGQVSVEIEWELQKENSKRWNPEIQYTSNYNKSVNVDFTVDTNGVYSEPRPIGTRYLTRNL

SEQ ID NO: 11750 - protein, 735 aa, Artificial Sequence
  source: /note="Description of Artificial Sequence: Synthetic polypeptide"
MAADGYLPDWLEDTLSEGIRQWWKLKPGPPPPKPAERHKDDSRGLVLPGYKYLGPFNGLDKGEPVNEADAAALEHDKAYDRQLDSGDNPYLKYNHADAEFQERLKEDTSFGGNLARAVFQAKKRVLEPLGLVEEPVKTAPGKKRPVEHSPAEPDSSSGTGKSGQQPARKRLNFGQTGDADSVPDPQPLGQPPAAPSGLGTNTMASGSGAPMADNNEGADGVGNSSGNWHCDSTWMGDRVITTSTRTWALPTYNNHLYKQISSQSGASNDNHYFGYSTPWGYFDFNRFHCHFSPRDWQRLINNNWGFRPKRLNFKLFNIQVKEVTQNDGTTTIANNLTSTVQVFTDSEYQLPYVLGSAHQGCLPPFPADVFMVPQYGYLTLNNGSQAVGRSSFYCLEYFPSQMLRTGNNFTFSYTFEDVPFHSSYAHSQSLDRLMNPLIDQYLYYLSRTNTPSGTTTQSRLQFSQAGASDIRDQSRNWLPGPCYRQQRVSKTAADNNNSDYSWTGATKYHLNGRDSLVNPGTAMASHKDDEEKYFPQSGVLIFGKQDSGKTNVDIEKVMITDEEEIRTTNPVATEQYGSVSTNLQSGNTQAATSDVNTQGVLPGMVWQDRDVYLQGPIWAKIPHTDGHFHPSPLMGGFGLKHPPPQILIKNTPVPANPSTTFSAAKFASFITQYSTGQVSVEIEWELQKENSKRWNPEIQYTSNYNKSVNVDFTVDTNGVYSEPRPIGTRYLTRNL

SEQ ID NO: 11751 - protein, 735 aa, Artificial Sequence
  source: /note="Description of Artificial Sequence: Synthetic polypeptide"
MAADGYLPDWLEDTLSEGIRQWWKLKPGPPPPKPAERHKDDSRGLVLPGYKYLGPFNGLDKGEPVNEADAAALEHDKAYDRQLDSGDNPYLKYNHADAEFQERLKEDTSFGGNLARAVFQAKKRVLEPLGLVEEPVKTAPGKKRPVEHSPAEPDSSSGTGKSGQQPARKRLNFGQTGDADSVPDPQPLGQPPAAPSGLGTNTMASGSGAPMADNNEGADGVGNSSGNWHCDSTWMGDRVITTSTRTWALPTYNNHLYKQISSQSGASNDNHYFGYSTPWGYFDFNRFHCHFSPRDWQRLINNNWGFRPKRLNFKLFNIQVKEVTQNDGTTTIANNLTSTVQVFTDSEYQLPYVLGSAHQGCLPPFPADVFMVPQYGYLTLNNGSQAVGRSSFYCLEYFPSQMLRTGNNFTFSYTFEDVPFHSSYAHSQSLDRLMNPLIDQYLYYLSRTNTPSGTTTQSRLQFSQAGASDIRDQSRNWLPGPCYRQQRVSKTAADNNNSDYSWTGATKYHLNGRDSLVNPGTAMASHKDDEEKYFPQSGVLIFGKQDSGKTNVDIEKVMITDEEEIRTTNPVATEQYGSVSTNLQSGNTQAATSDVNTQGVLPGMVWQDRDVYLQGPIWAKIPHTDGHFHPSPLMGGFGQKHPPPQSLIKNTPVPANPSTTFSAAKFASFITQYSTGQVSVEIEWELQKENSKRWNPEIQYTSNYNKSVNVDFTVDTNGVYSEPRPIGTRYLTRNL

SEQ ID NO: 11752 - protein, 735 aa, Artificial Sequence
  source: /note="Description of Artificial Sequence: Synthetic polypeptide"
MAADGYLPDWLEDTLSEGIRQWWKLKPGPPPPKPAERHKDDSRGLVLPGYKYLGPFNGLDKGEPVNEADAAALEHDKAYDRQLDSGDNPYLKYNHADAEFQERLKEDTSFGGNLARAVFQAKKRVLEPLGLVEEPVKTAPGKKRPVEHSPAEPDSSSGTGKSGQQPARKRLNFGQTGDADSVPDPQPLGQPPAAPSGLGTNTMASGSGAPMADNNEGADGVGNSSGNWHCDSTWMGDRVITTSTRTWALPTYNNHLYKQISSQSGASNDNHYFGYSTPWGYFDFNRFHCHFSPRDWQRLINNNWGFRPKRLNFKLFNIQVKEVTQNDGTTTIANNLTSTVQVFTDSEYQLPYVLGSAHQGCLPPFPADVFMVPQYGYLTLNNGSQAVGRSSFYCLEYFPSQMLRTGNNFTFSHTFEDVPFHSSYAHSQSLDRLMNPLIDQYLYYLSRTNTPSGTTTQSRLQFSQAGASDIRDQSRNWLPGPCYRQQRVSKTAADNNNSDYSWTGATKYHLNGRDSLVNPGTAMASHKDDEEKYFPQSGVLIFGKQDSGKTNVDIEKVMITDEEEIRTTNPVATEQYGSVSTNLQSGNTQAATSDVNTQGVLPGMVWQDRDVYLQGPIWAKIPHTDGHFHPSPLMGGFGLKHPPPQILIKNTPVPANPSTTFSAAKFASFITQYSTGQVSVEIEWELQKENSKRWNPEIQYTSNYNKSVNVDFTVDTNGVYSEPRPIGTRYLTRNL

SEQ ID NO: 11753 - protein, 735 aa, Artificial Sequence
  source: /note="Description of Artificial Sequence: Synthetic polypeptide"
MAADGYLPDWLEDTLSEGIRQWWKLKPGPPPPKPAERHKDDSRGLVLPGYKYLGPFNGLDKGEPVNEADAAALEHDKAYDRQLDSGDNPYLKYNHADAEFQERLKEDTSFGGNLARAVFQAKKRVLEPLGLVEEPVKTAPGKKRPVEHSPAEPDSSSGTGKSGQQPAGKRLNFGRTGDADSVPDPQPLGQPPAAPSGLGTNTMASGSGAPMADNNEGADGVGNSSGNWHCDSTWMGDRVITTSTRTWALPTYNNHLYKQISSQSGASNDNHYFGYSTPWGYFDFNRFHCHFSPRDWQRLINNNWGFRPKRLNFKLFNIQVKEVTQNDGTTTIANNLTSTVQVFTDSEYQLPYVLGSAHQGCLPPFPADVFMVPQYGYLTLNNGSQAVGRSSFYCLEYFPSQMLRTGNNFTFSYTFEDVPFHSSYAHSQSLDRLMNPLIDQYLYYLSRTNTPSGTTTQSRLQFSPAGASDIRDQSRNWLPGPCYRQQRVSKTAADNNNSDYSWTGATKYHLNGRDSLVNPGTAMASHKDDEEKYFPQSGVLIFGKQDSGKTNVDIEKVMITDEEEIRTTNPVATEQYGSVSTNLQSGNTQAATSDVNTQGVLPGMVWQDRDVYLQGPIWAKIPHTDGHFHPSPLMGGFGLKHPPPQILIKNTPVPANPSTTFSAAKFASFITQYSTGQVSVEIEWELQKENSKRWNPEIQYTSNYNKSVNVDFTVDTNGVYSEPRPIGTRYLTRNL

SEQ ID NO: 11754 - protein, 734 aa, Artificial Sequence
  source: /note="Description of Artificial Sequence: Synthetic polypeptide"
MAADGYLPDWLEDTLSEGIRQWWKLKPGPPPPKPAERHKDDSRGLVLPGYKYLGPFNGLDKGEPVNEADAAALEHDKAYDRQLDSGDNPYLKYNHADAEFQERLKEDTSFGGNLARAVFQAKKRVLEPLGLVEEPVKTAPGKKRPVEHSPAEPDSSSGTGKSGQQPARKRLNFGQTGDADSVPDPQPLGQPPAAPSGLGTNTMASGSGAPMADNNEGADGVGNSSGNWHCDSTWMGDRVITTSTRTWALPTYNNHLYKQISSQSGASNDNHYFGYSTPWGYFDFNRFHCHFSPRDWQRLINNNWGFRPKRLNFKLFNIQVKEVTQNDGTTTIANNLTSTVQVFTDSEYQLPYVLGSAHQGCLPPFPADVFMVPQYGYLTLNNGSQAVGRSSFYCLEYFPSQMLRTGNNFTFSYTFEDVPFHSSYAHSQSLDRLMNPLIDQYLYYLSRTNTPSGTTTQSRLQFSQAGASDIRDQSRNWLPGPCYRQQRVSKTAADNNSDYSWTGATKYHLNGRDSLVNPGTAMASHKDDEEKYFPQSGVLIFGKQDSGKTNVDIEKVMITDEEEIRTTNPVATEQYGSVSTNLQSGNTQAATSDVNTQGVLPGMVWQDRDVYLQGPIWAKIPHTDGHFHPSPLMGGFGLKHPPPQILIKNTPVPANPSTTFSAAKFASFITQYSTGQVSVEIEWELQKENSKRWNPEIQYTSNYNKSVNVDFTVDTNGVYSEPRPIGTRYLTRNL

SEQ ID NO: 11755 - protein, 738 aa, Artificial Sequence
  source: /note="Description of Artificial Sequence: Synthetic polypeptide"
MAADGYLPDWLEDNLSEGIREWWALKPGAPKPKANQQKQDDGRGLVLPGYKYLGPFNGLDKGEPVNAADAAALEHDKAYDQQLQAGDNPYLRYNHADAEFQERLQEDTSFGGNLGRAVFQAKKRVLEPLGLVEEGAKTAPGKKRPVEPSPQRSPDSSTGIGKKGQQPARKRLNFGQTGDSESVPDPQPLGEPPAAPSGVGPNTMAAGGGAPMADNNEGADGVGSSSGNWHCDSTWLGDRVITASTRTWALPTYNNHLYKQISNGTSGGATNDNTYFGYSTPWGYFDFNRFHCHFSPRDWQRLINNNWGFRPKRLSFKLFNIQVKEVTQNEGTKTIANNLTSTIQVFTDSEYQLPYVLGSAHQGCLPPFPADVFTIPQYGYLTLNNGSQAVGRSSFYCLEYFPSQMLRTGNNFQFTYTFEDVPFHSSYAHSQSLDRLMNPLIDQYLYYLSRTQTTGGTANTQTLGFSQGGPNTMANQAKNWLPGPCYRQQRVSTTTGQNNNSNFAWTAGTKYHLNGRNSLANPGIAMATHKDDEERFFPSNGILIFGKQNAARDNADYSDVMLTSEEEIKTTNPVATEEYGIVADNLQQQNTAPQIGTVNSQGALPGMVWQNRDVYLQGPIWAKIPHTDGNFHPSPLMGGFGLKHPPPQILIKNTPVPADPPTTFNQSKLNSFITQYSTGQVSVEIEWELQKENSKRWNPEIQYTSNYYKSTSVDFAVNTEGVYSEPRPIGTRYLTRNL

SEQ ID NO: 11756 - protein, 738 aa, Artificial Sequence
  source: /note="Description of Artificial Sequence: Synthetic polypeptide"
MAADGYLPDWLEDNLSEGIREWWALKPGAPKPKANQQKQDDGRGLVLPGYKYLGPFNGLDKGGPVNAADAAALEHDKAYDQQLQAGDNPYLRYNHADAEFQERLQEDTSFGGNLGRAVFQAKKRVLEPLGLVEEGAKTAPGKKRPVEPSPQRSPDSSTGIGKKGQQPARKRLNFGQTGDSESVPDPQPLGEPPAAPSGVGPNTMAAGGGAPMADNNEGADGVGSSSGNWHCDSTWLGDRVITTSTRTWALPTYNNHLYKQISNGTSGGATNDNTYFGYSTPWGYFDFNRFHCHFSPRDWQRLINNNWGFRPKRLSFKLFNIQVKEVTQNEGTKTIANNLTSTIQVFTDSEYQLPYVLGSAHQGCLPPFPADVFMIPQYGYLTLNNGSQAVGRSSFYCLEYFPSQMLRTGNNFQFTYTFEDVPFHSSYAHSQSLDRLMNPLIDQYLYYLSRTQTTGGTANTQTLGFSQGGPNTMANQAKNWLPGPCYRQQRVSTTTGQNNNSNFAWTAGTKYHLNGRNSLANPGIAMATHKDDEERFFPSNGILIFGKQNAARDNADYSDVMLTSEEEIKTTNPVATEEYGIVADNLQQQNTAPQIGTVNSQGALPGMVWQNRDVYLQGPIWAKIPHTDGNFHPSPLMGGFGLKHPPPQILIKNTPVPADPPTTFNQSKLNSFITQYSTGQVSVEIEWELQKENSKRWNPEIQYTSNYYKSTSVDFAVNTEGVYSEPRPIGTRYLTRNL

SEQ ID NO: 11757 - protein, 738 aa, Artificial Sequence
  source: /note="Description of Artificial Sequence: Synthetic polypeptide"
MAADGYLPDWLEDNLSEGIREWWALKPGAPKPKANQQKQDDGRGLVLPGYKYLGPFNGLDKGEPVNAADAAALEHDKAYDQQLQAGDNPYLRYNHADAEFQERLQEDTSFGGNLGRAVFQAKKRVLEPLGLVEEGAKTAPGKKRPVEPSPQRSPDSSTGIGKKGQQPARKRLNFGQTGDSESVPDPQPLGEPPAAPSGVGPNTMAAGGGAPMADNNEGADGVGSSSGNWHCDSTWLGDRVITTSTRTWALPTYNNHLYRQISNGTSGGATNDNTYFGYSTPWGYFDFNRFHCHFSPRDWQRLINNNWGFRPKRLSFKLFNIQVKEVTQNEGTKTIANNLTSTIQVFTDSEYQLPYVLGSAHQGCLPPFPADVFMIPQYGYLTLNNGSQAVGRSSFYCLEYFPSQMLRTGNNFQFTYTFEDVPFHSSYAHSQSLDRLMNPLIDQYLYYLSRTQTTGGTANTQTLGFSQGGPNTMANQAKNWLPGPCYRQQRVSTTTGQNNNSNFAWTAGTKYHLNGRNSLANPGIAMATHKDDEERFFPSNGILIFGKQNAARDNADYSDVMLTSEEEIKTTNPVATEEYGIVADNLQQQNTAPQIGTVNSQGALPGMVWQNRDVYLQGPIWAKIPHTDGNFHPSPLMGGFGLKHPPPQILIKNTPVPADPPTTFNQSKLNSFITQYSTGQVSVEIEWELQKENSKRWNPEIQYTSNYYKSTSVDFAVNTEGVYSEPRPIGTRYLTRNL

SEQ ID NO: 11758 - protein, 738 aa, Artificial Sequence
  source: /note="Description of Artificial Sequence: Synthetic polypeptide"
MAADGYLPDWLEDNLSEGIREWWALKPGAPKPKANQQKQDDGRGLVLPGYKYLGPFNGLDKGEPVNAADAAALEHDKAYDQQLQAGDNPYLRYNHADAEFQERLQEDTSFGGNLGRAVFQAKKRVLEPLGLVEEGAKTAPGKKRPVEPSPQRSPDSSTGIGKKGQQPARKRLNFGQTGDSESVPDPQPLGEPPAAPSGVGPNTMAAGGGAPMADSNEGADGVGSSSGNWHCDSTWLGDRVITTSTRTWALPTYNNHLYKQISNGTSGGATNDNTYFGYSTPWGYFDFNRFHCHFSPRDWQRLINNNWGFRPKRLSFKLFNIQVKEVTQNEGTKTIANNLTSTIQVFTDSEYQLPYVLGSAHQGCLPPFPADVFMIPQYGYLTLNNGSQAVGRSSFYCLEYFPSQMLRTGNNFQFTYTFEDVPFHSSYAHSQSLDRLMNPLIDQYLYYLSRTQTTGGTANTQTLGFSQGGPNTMANQAKNWLPGPCYRQQRVSTTTGQNNNSNFAWTAGTKYHLNGRNSLANPGIAMATHKDDEERFFPSNGILIFGKQNAARDNADYSDVMLTSEEEIKTTNPVATEEYGIVADNLQQQNTAPQIGTVNSQGALPGMVWQNRDVYLQGPIWAKIPHTDGNFHPSPLMGGFGLKHPPPQILIKNTPVPADPPTTFNQSKLNSFITQYSTGQVSVEIEWELQKENSKRWNPEIQYTSNYYKSTSVDFAVNTEGVYSEPRPIGTRYLTRNL

SEQ ID NO: 11759 - protein, 738 aa, Artificial Sequence
  source: /note="Description of Artificial Sequence: Synthetic polypeptide"
MAADGYLPDWLEDNLSEGIREWWALKPGAPKPKANQQKQDDGRGLVLPGYKYLGPFNGLDKGEPVNAADAAALEHDKAYDQQLQAGDNPYLRYNHADAEFQERLQEDTSFGGNLGRAVFQAKKRVLEPLGLVEEGAKTAPGKKRPVEPSPQRSPDSSTGIGKKGQQPARKRLNFGQTGDSESVPDPQPLGEPPAAPSGVGPNTMAAGGGAPMADNNEGADGVGSSSGNWHCDSTWLGDRVITTSTRTWALPTYNNHLYKQISNGTSGGATNDNTYFGYSTPWGYFDFNRFHCHFSPRDWQRLINNNWGFRPKRLSFKLFNIQVKEVTQNEGTKTIANNLTSTIQVFTDSEYQLPYVLGSAHQGCLPPFPADVFMIPQYGYLTLNNGSQAMGRSSFYCLEYFPSQMLRTGNNFQFTYTFEDVPFHSSYAHSQSLDRLMNPLIDQYLYYLSRTQATGGTANTQTLGFSQGGPNTMANQAKNWLPGPCYRQQRVSTTTGQNNNSNFAWTAGTKYHLNGRNSLANPGIAMATHKDDEERFFPSNGILIFGKQNAARDNADYSDVMLTSEEEIKTTNPVATEEYGIVADNLQQQNTAPQIGTVNSQGALPGMVWQNRDVYLQGPIWAKIPHTDGNFHPSPLMGGFGLKHPPPQILIKNTPVPADPPTTFNQSKLNSFITQYSTGQVSVEIEWELQKENSKRWNPEIQYTSNYYKSTSVDFAVNTEGVYSEPRPIGTRYLTRNL

SEQ ID NO: 11760 - protein, 738 aa, Artificial Sequence
  source: /note="Description of Artificial Sequence: Synthetic polypeptide"
MAADGYLPDWLEDNLSEGIREWWALKPGAPKPKANQQKQDDGRGLVLPGYKYLGPFNGLDKGEPVNAADAAALEHDKAYDQQLQAGNNPYLRYNHADAEFQERLQEDTSFGGNLGRAVFQAKKRVLGPLGLVEEGAKTAPGKKRPVEPSPQRSPDSSTGIGKKGQQPARKRLNFGQTGDSESVPDPQPLGEPPAAPSGVGPNTMAAGGGAPMADNNEGADGVGSSSGNWHCDSTWLGDRVITTSTRTWALPTYNNHLYKQISNGTSGGATNDNTYFGYSTPWGYFDFNRFHCHFSPRDWQRLINNNWGFRPKRLSFKLFNIQVKEVTQNEGTKTIANNLTSTIQVFTDSEYQLPYVLGSAHQGCLPPFPADVFMIPQYGYLTLNNGSRAVGRSSFYCLEYFPSQMLRTGNNFQFTYTFEDVPFHSSYAHSQSLDRLMNPLIDQYLYYLSRTQTTGGTANTQTLGFSQGGPNTMANQAKNWLPGPCYRQQRVSTTTGQNNNSNFAWTAGTKYHLNGRNSLANPGIAMATHKDDEERFFPSNGILIFGKQNAARDNADYSDVMLTSEEEIKTTNPVATEEYGIVADNLQQQNTAPQIGTVNSQGALPGMVWQNRDVYLQGPIWAKIPHTDGNFHPSPLMGGFGLKHPPPQILIKNTPVPADPPTTFNQSKLNSFITQYSTGQVSVEIEWELQKENSKRWNPEIQYTSNYYKSTSVDFAVNTEGVYSEPRPIGTRYLTRNL

SEQ ID NO: 11761 - protein, 738 aa, Artificial Sequence
  source: /note="Description of Artificial Sequence: Synthetic polypeptide"
MAADGYLPDWLEDNLSEGIREWWALKPGAPKPKANQQKQDDGRGLVLPGYKYLGPFNGLDKGEPVNAADAAALEHDKAYDQQLQAGDNPYLRYNHADAEFQERLQEDTSFGGNLGRAVFQAKKRVLEPLGLVEEGAKTAPGKKRPVEPSPQRSPDSSTGIGKKGQQPARKRLNFGQTGDSESVPDPQPLGEPPAAPSGVGPNTMAAGGGAPMADNNEGADGVGSSSGNWHCDSTWLGDRVITTSTRTWALPTYNNHLYKQISNGTSGGATNDNTYFGYSTPWGYFDFNRFHCHFSPRDWQRLINNNWGFRPKRLSFKLFNIQVKEVTQNEGTKTIANNLTSTIQVFTDSEYQLPYVLGSAHQGCLPPFPADVFMIPQYGYLTLNNGSQAVGRSSFYCLEYFPSQMLRTGNNFQFTYTFEDVPFHSSYAHSQSLDRLMNPLIDQYLYYLSRTQTTGGTANTQTLGFSQGGPNTMANQAKNWLPGPCYRQQRVSTTTGQNNNSDFAWTAGTKYHLNGRNSLANPGIAMATHKDDEERFFPSNGILIFGKQNAARDNADYSDVMLTSEEEIKTTNPVATEEYGIVADNLQQQNTAPQIGTVNSQGALPGMVWQNRDVYLQGPVWAKIPHTDGNFHPSPLMGGFGLKHPPPQILIKNTPVPADPPTTFNQSKLNSFITQYSTGQVSVEIEWELQKENSKRWNPEIQYTSNYYKSTSVDFAVNTEGVYSEPRPIGTRYLTRNL

SEQ ID NO: 11762 - protein, 738 aa, Artificial Sequence
  source: /note="Description of Artificial Sequence: Synthetic polypeptide"
MAADGYLPDWLEDNLSEGIREWWALKPGAPKPKANQQKQDDGRGLVLPGYKYLGPFNGLDKGEPVNAADAAALEHDKAYDQQLQAGDNPYLRYNHADAEFQERLQEDTSFGGSLGRAVFQAKKRVLEPLGLVEEGAKTAPGKKRPVEPSPQRSPDSSTGIGKKGQQPARKRLNFGQTGDSESVPDPQPLGEPPAAPSGVGPNTMAAGGGAPMADNNEGADGVGSSSGNWHCDSTWLGDRVITTSTRTWALPTYNNHLYKQISNGTSGGATNDNTYFGYSTPWGYFDFNRFHCHFSPRDWQRLINNNWGFRPKRLSFKLFNIQVKEVTQNEGTKTIANNLTSTIQVFTDSEYQLPYVLGSAHQGCLPPFPADVFMIPQYGYLTLNNGSQAVGRSSFYCLEYFPSQMLRTGNNFQFTYTFEDVPFHSSYAHSQSLDRLMNPLIDQYLYYLSRTQTTGGTANTQTLGFSQGGPNTMANQAKNWLPGPCYRQQRVSTTTGQNNNSNFAWTAGTKYHLNGRNSLANPGIAMATHKDDEERFFPSNGILIFGKQNAARDNADYSDVMLTSEEEIKTTNPVATEEYGIVADNLQQQNTAPQIGTVNSQGALPGMVWQNRDVYLQGPIWAKIPHTDGNFHPSPLMGGFGLKHPPPQILIKNTPVPADPPTTFNQSKLNSFITQYSTGQVSVEIEWELQKENSKRWNPEIQYTSNYYKSTSVDFAVNTEGVYSEPRPIGTRYLTRNL

SEQ ID NO: 11763 - protein, 738 aa, Artificial Sequence
  source: /note="Description of Artificial Sequence: Synthetic polypeptide"
MAADGYLPDWLEDNLSEGIREWWALKPGAPKPKANQQKQDDGRGLVLPGYKYLGPFNGLDKGEPVNAADAAALEHDKAYDQQLQAGDNPYQRYNHADAEFQERLQEDTSFGGNLGRAVFQAKKRVLEPLGLVEEGAKTAPGKKRPVEPSPQRSPDSSTGIGKKGQQPARKRLNFGQTGDSESVPDPQPLGEPPAAPSGVGPNTMAAGGGAPMADNNEGADGVGSSSGNWHCDSAWLGDRVITTSTRTWALPTYNNHLYKQISNGTSGGATNDNTYFGYSTPWGYFDFNRFHCHFSPRDWQRLINNNWGFRPKRLSFKLFNIQVKEVTQNEGTKTIANNLTSTIQVFTDSEYQLPYVLGSAHQGCLPPFPADVFTIPQYGYLTLNNGSQAVGRSSFYCLEYFPSQMLRTGNNFQFTYTFEDVPFHSSYAHSQSLDRLMNPLIDQYLYYLSRTQTTGGTANTQTLGFSQGGPNTMANQAKNWLPGPCYRQQRVSTTTGQNNNSNFAWTAGTKYHLNGRNSLANPGIAMATHKDDEERFFPSNGILIFGKQNAARDNADYSDVMLTSEEEIKTTNPVATEEYGIVADNLQQQNTAPQIGTVNSQGALPGMVWQNRDVYLQGPIWAKIPHTDGNFHPSPLMGGFGLKHPPPQILIKNTPVPADPPTTFNQSKLNSFITQYSTGQVSVEIEWELQKENSKRWNPEIQYTSNYYKSTSVDFAVNTEGVYSEPRPIGTRYLTRNL

SEQ ID NO: 11764 - protein, 738 aa, Artificial Sequence
  source: /note="Description of Artificial Sequence: Synthetic polypeptide"
MAADGYLPDWLEDNLSEGIREWWALKPGAPKPKANQQKQDDGRGLVLPGYKYLGPFNGLDKGEPVNAADTAALEHDKAYDQQLQAGDNPYLRYNHADAEFQERLQEDTSFGGNLGRAVFQAKKRVLEPLGLVEEGAKTAPGKKRPVEPSPQRSPDSSTGIGKKGQQPARKRLNFGQTGDSESVPDPQPLGEPPAAPSGVGPNTMAAGGGAPMADNNEGADGVGSSSGNWHCDSTWLGDRVITTSTRTWALPTYNNHLYKQISNGTSGGATNDNTYFGYSTPWGYFDFNRFHCHFSPRDWQRLINNNWGFRPKRLSFKLFNIQVKEVTQNEGTKTIANNLTSTIQVFTDSEYQLPYVLGSAHQGCLPPFPADVFMIPQYGYLTLNNGSQAVGRSSFYCLEYFPSQMLRTGNNFQFTYTFEDVPFHSSYAHSQSLDRLMNPLIDQYLYYLSRTQTTGGTANTQTLGFSQGGPNTMANQAKNWLPGPCYRQQRVSTTTGQNNNSNFAWTAGTKYHLNGRNSLANPGIAMATHKDDEERFFPSNGILIFGKQNAARDNADYSDVMLTSEEEIKTTNPVATEEYGIVADNLQQQNTAPQIGTVNSQGALPGMVWQNRDVYLQGPIWAKIPHTDGNFHPSPLMGGFGLKHPPPQILIKNTPVPADPPTTFNQSKLNSFITQYSTGQVSVEIEWELQKENSKRWNPEIQYTSNYYKSTSVDFAVNTEGVYSEPRPIGTRYLTRNL

SEQ ID NO: 11765 - protein, 738 aa, Artificial Sequence
  source: /note="Description of Artificial Sequence: Synthetic polypeptide"
MAADGYLPDWLEDNLSEGIREWWALKPGAPKPKANQQKQDDGRGLVLPGYKYLGPFNGLDKGEPVNAADAAALEHDKAYDQQLQAGDNPYLRYNHADAEFQERLQEDTSFGGNLGRAVFQAKKRVLEPLGLVEEGAKTAPGKKRPVEPSPQRSPDSSTGIGKKGQQPARKRLNFGQTGDSESVPDPQPLGEPPAAPSGVGPNTMAAGGGAPMADNNEGADGVGSSSGNWHCDSTWLGDRVITTSTRTWALPTYNNHLYKQISNGTSGGATNDNTYFGYSTPWGYFDFNRFHCHFSPRDWQRLINNNWGFRPKRLSFKLFNIQVKEVTQNEGTKTIANNLTSTIQVFTDSEYQLPYVLGSAHQGCLPPFPADVFMIPQYGYLTLNNGSQAVGRSSFYCLEYFPSQMLRTGNNFQFTYTFEDVPFHSSYAHSQSLDRLMNPLIDQYLYYLSRTQTTGGTANTQTLGFSQGGPNTMANQAKNWLPGPCYRQQRVSTTTGQNNNSNFAWTAGTKYHLNGRNSLANPGIAMATHKDDEERFFPSNGILIFGKQNAARDNADYSDVMLTSEEEIKTTNPVATEEYGIVADNLQQQNAAPQIGTVNSQGALPGMVWQNRDVYLQGPIWAKIPHTDGNFHPSPLMGGFGLKHPPPQILIKNTPVPADPPTTFNQSKLNSFITQYSTGQVSVEIEWELQKENSKRWNPEIQYTSNYYKSTSVDFAVNTEGVYSEPRPIGTRYLTRNL

SEQ ID NO: 11766 - protein, 738 aa, Artificial Sequence
  source: /note="Description of Artificial Sequence: Synthetic polypeptide"
MAADGYLPDWLEDNLSEGIREWWALKPGAPKPKANQQKQDDGRGLVLPGYKYLGPFNGLDKGEPVNAADAAALEHDKAYDQQLQAGDNPYLRYNHADAEFQERLQEDTSFGGNLGRAVFQAKKRVLEPLGLVEEGAKTAPGKKRPVEPSPQRSPDSSTGIGKKGQQPARKRLNFGQTGDSESVPDPQPLGEPPAAPSGVGPNTMAAGGGAPMADNNEGADGVGSSSGNWHCDSTWLGDRVITTSTRTWALPTYNNHLYKQISNGTSGGATNDNTYFGYSTPWGYFDFNRFHCHFSPRDWQRLINNNWGFRPKRLSFKLFNIQVKEVTQNEGTKTIANNLTSTIQVFTDSEYQLPYVLGSAHQGCLPPFPADVFTIPQYGYLTLNNGSQAVGRSSFYCLEYFPSQMLRTGNNFQFTYTFEDVPFHSSYAHSQSLDRLMNPLIDQYLYYLSRTQTTGGTANTQTLGFSQGGPNTMANQAKNWLPGPCYRQQRVSTTTGRNNNSNFAWTAGTKYHLNGRNSLANPGIAMATHKDDEERFFPSNGILIFGKQNAARDNADYSDVMLTSEEEIKTTNPVATEEYGIVADNLQQQNTAPQIGTVNSQGALPGMVWQNRDVYLQGPIWAKIPHTDGNFHPSPLMGGFGLKHPPPQILIKNTPVPADPPTTFNQSKLNSFITQYSTGQVSVEIEWELQKENSKRWNPEIQYTSNYYKSTSVDFAVNTEGVYSEPRPIGTRYLTRNL

SEQ ID NO: 11767 - protein, 738 aa, Artificial Sequence
  source: /note="Description of Artificial Sequence: Synthetic polypeptide"
MAADGYLPDWLEDNLSEGIREWWALKPGAPKPKANQQKQDDGRGLVLPGYKYLGPFNGLDKGEPVNAADAAALEHDKAYDQQLQAGDNPYLRYNHADAEFQERLQEDTSFGGNLGRAVFQAKKRVLEPLGLVEEGAKTAPGKKRPVEPSPQRSPDSSTGIGKKGQQPARKRLNFGQTGDSESVPDPQPLGEPPAAPSGVGPNTMAAGGGAPMADNNEGADGVGSSSGNWHCDSTWLGDRVITTSTRTWALPTYNNHLYKQISNGTSGGATNDNTYFGYSTPWGYFDFNRFHCHFSPRDWQRLINNNWGFRPKRLSFKLFNIQVKEVTQNEGTKTIANNLTSTIQVFTDSEYQLPYVLGSAHQGCLPPFPADVFTIPQYGYLTLNNGSQAVGRSSFYCLEYFPSQMLRTGNNFQFTYTFEDVPFHSSYAHSQSLDRLMNPLIDQYLYYLSRTQTTGGTANTQTLGFSQGGPNTMANQAKNWLPGPCYRQQRVSTTTGQNNNSNFAWTAGTKYHLNGRNSLANPGIAMATHKDDEERFFPSNGILIFGKQNAARDNADYSDVVLTSEEEIKTTNPVATEEYGIVADNLQQQNTAPQIGTVNSQGALPGMVWQNRDVYLQGPIWAKIPHTDGNFHPSPLMGGFGLKHPPPQILIKNTPVPADPPTTFNQSKLNSFITQYSTGQVSVEIEWELQKENSKRWNPEIQYTSNYYKSTSVDFAVNTEGVYSEPRPIGTRYLTRNL

SEQ ID NO: 11768 - protein, 738 aa, Artificial Sequence
  source: /note="Description of Artificial Sequence: Synthetic polypeptide"
MAADGYLPDWLEDNLSEGIREWWALKPGAPKPKANQQKQDDGRGLVLPGYKYLGPFNGLDKGEPVNAADAAALEHDKAYDQQLQAGDNPYLRYNHADAEFQERLQEDTSFGGNLGRAVFQAKKRVLEPLGLVEEGAKTAPGKKRPVEPSPQRSPDSSTGIGKKGQQPARKRLNFGQTGDSESVPDPQPLGEPPAAPSGVGPNTMAAGGGAPMADNNEGADGVGSSSGNWHCDSTWLGDRVITTSTRTWALPTYNNHLYKQISNGTSGGATNDNTYFGYSTPWGYFDFNRFHCHFSPRDWQRLINNNWGFRPKRLSFKLFNIQVKEVTQNEGTKTIANNLTSTIQVFTDSEYQLPYVLGSAHQGCLPPFPADVFMIPQYGYLTLNNGSQAVGRSSFYCLEYFPSQMLRAGNNFQFTYTFEDVPFHSSYAHSQSLDRLMNPLIDQYLYYLSRTQTTGGTANTQTLGFSQGGPNTMANQAKNWLPGPCYRQQRVSTTTGQNNNSNFAWTAGTKYHLNGRNSLANPGIAMATHKDDEERFFPSNGILIFGKQNAARDNADYSDVMLTSEEEIKTTNPVATEEYGIVADNLQQQNTAPQIGTVDSQGALPGMVWQNRDVYLQGPIWAKIPHTDGNFHPSPLMGGFGLKHPPPQILIKNTPVPADPPTTFNQSKLNSFITQYSTGQVSVEVEWELQKENSKRWNPEIQYTSNYYKSTSVDFAVNTEGVYSEPRPIGTRYLTRNL

SEQ ID NO: 11769 - protein, 738 aa, Artificial Sequence
  source: /note="Description of Artificial Sequence: Synthetic polypeptide"
MAADGYLPDWLEDNLSEGIREWWALKPGAPKPKANQQKQDDGRGLVLPGYKYLGPFNGLDKGEPVNAADAAALEHDKAYDQQLQAGDNPYLRYNHADAEFQERLQEDTSFGGSLGRAVFQAKKRVLEPLGLVEEGAKTAPGKKRPVEPSPQRSPDSSTGIGKKGQQPARKRLNFGQTGDSESVPDPQPLGEPPAAPSGVGPNTMAAGGGAPMADNNEGADGVGSSSGNWHCDSTWLGDRVITTSTRTWALPTYNNHLYKQISNGTSGGATNDNTYFGYSTPWGYFDFNRFHCHFSPRDWQRLINNNWGFRPKRLSFKLFNIQVKEVTQNEGTKTIANNLTSTIQVFTDSEYQLPYVLGSAHQGCLPPFPADVFMIPQYGYLTLNNGSQAVGRSSFYCLEYFPSQMLRTGNNFQFTYTFEDVPFHSSYAHSQSLDRLMNPLIDQYLYYLSRTQTTGGTANTQTLGFSQGGPNTMANQAKNWLPGPCYRQQRVSTTTGQNNNSNFAWTAGTKYHLNGRNSLANPGIAMATHKDDEERFFPSNGILIFGKQNAARDNADYSDVMLTSEEEIKTTNPVATEEYGIVADNLQQQNTAPQIGTVNSQGALPGMVWQNRDVYLQGPIWAKIPHTDGNFHPSPLMGGFGLKHPPPQILIKNTPVPADPPTTFNQSKLNSFITQYSTGQVSVEIEWELQKENSKRWNPEIQYTSNYYKSTSVDFAVNTEGVYSEPRPIGTRHLTRNL

SEQ ID NO: 11770 - protein, 738 aa, Artificial Sequence
  source: /note="Description of Artificial Sequence: Synthetic polypeptide"
MAADGYLPDWLEDNLSEGIREWWALKPGAPKPKANQQKQDDGRGLVLPGYKYLGPFNGLDKGEPVNAADAAALEHDKAYDQQLQAGDNPYLRYNHADAEFQERLQEDTSFGGNLGRAVFQAKKRVLEPLGLVEEGAKTAPGKKRPVEPSPQRSPDSSTGIGKKGQQPARKRLNFGQTGDSESVPDPQPLGEPPAAPSGVGPNTMAAGGGAPMADNNEGADGVGSSSGNWHCDSTWLGDRVITTSTRTWALPTYNNHLYKQISNGTSGGATNDNTYFGYSTPWGYFDFNRFHCHFSPRDWQRLINNNWGFRPKRLSFKLFNIQVKEVTQNEGTKTIANNLTSTIQVFTDSEYQLPYVLGSAHQGCLPPFPADVFTIPQYGYLTLNNGSQAVGRSSFYCLEYFPSQMLRTGNNFQFTYTFEDVPFHSSYAHSQSLDRLMNPLIDQYLYYLSRTQTTGGTANTQTLGFSQGGPNTMANQAKNWLPGPCYRQQRVSTTTGQNNNSNFAWTAGTKYHLNGRNSLANPGIAMVTHKDDEERFFPSNGILIFGKQNAARDNADYSDVMLTSEEEIKTTNPVATEEYGIVADNLQQQNTAPQIGTVNSQGALPGMVWQNRDVYLQGPIWAKIPHTDGNFHPSPLMGGFGLKHPPPQILIKNTPVPADPPTTFNQSKLNSFITQYSTGQVSVEIEWELQKENSKRWNPEIQYTSNYYKSTSVDFAVNTEGVYSEPRPIGTRYLTRNL

SEQ ID NO: 11771 - DNA, 2208 bp, Artificial Sequence
  source: /note="Description of Artificial Sequence: Synthetic polynucleotide"
atggctgccgatggttatcttccagattggctcgaggacactctctctgaaggaataagacagtggtggaagctcaaacctggcccaccaccgccaaagcccgcagagcggcataaggacgacagcaggggtcttgtgcttcctgggtacaagtacctcggacccttcaacggactcgacaaaggagagccggtcaacgaggcagacgccgcggccctcgagcacgacaaggcctacgaccggcagctcgacagcggagacaacccgtacctcaagtacaaccacgccgacgcggagtttcaggagcgccttaaagaagatacgtcttttgggggcaacctcgcaagagcagtattccaggcgaaaaagagggttcttgaacctctgggcctggttgaggagcctgttaagacggctccgggaaaaaagaggccggtagagcactctcctgcggagccagattcctcctccggaactggaaagtcgggccaacagcctgcaagaaagagattgaattttggtcagactggagacgcagactccgtacctgacccccagcctctcggacagccaccagcagccccctctggtctgggaactaatacgatggcttcaggcagtggcgcaccaatggcagacaataacgagggcgccgacggagtgggtaattcctcgggaaattggcattgcgattccacatggatgggcgacagagtcatcaccaccagcacccgcacctgggctctgcccacctacaacaaccatctgtacaagcaaatttccagccagtctggagccagcaacgacaaccactactttggctacagcaccccttgggggtattttgacttcaacagattccactgccacttctccccacgtgactggcaaagactcatcaacaacaattggggattccggcccaaaagactcaacttcaagctctttaacattcaagtcaaggaggtcacgcagaatgacggtacgacgacgattgccaataaccttaccagcacggttcaggtgtttactgactcggagtaccagctcccgtacgtcctcggctcggcgcatcaaggatgcctcccgccgttcccagcagacgtcttcatggtgccacagtatggatacctcaccctgaacaacgggagtcaggcggtaggacgctcttcattttactgcctggagtactttccttctcagatgctgcgtaccggaaacaactttaccttcagctacacctttgaggacgttccttttcacagcagctacgctcacagccagagtttggaccgtcttatgaatcctctcatcgaccagtacctgtattacttgagcagaacaaacactccaagcggaaccactacgcagtccaggcttcagttttctcaagccggagcgagtgacattcgggaccagtctaggaactggcttcctagaccctgttaccgccagcagcgagtatcaaagacagctgcggacaacaacaacagtgattactcgtggactggagctaccaagtatcacctcaatggaagagactctctggtgaatccgggcacagccatggccagccacaaggacgatgaagaaaagtattttcctcagagcggggttctcatcttcggaaaacaagactcgggaaaaactaatgtggacattgaaaaggtcatgattacagacgaagaggaaatcaggaccaccaatcccgtggctacggagcagtatggttctgtatctaccaatctccagagcggcaacacacaagcagctacctcagatgtcaacacacaaggcgttcttccaggcatggtccggcaggacagagacgtgtacctgcagggacccatctgggcaaagattccacacacggacggacattttcacccttctcctcttatgggaggatttggactgaagcaccctcccccgcagattctcatcaagaataccccggtacctgcgaatccttctaccaccttcagcgcggcaaagtttgcttccttcatcacacagtactccacggggcaggtcagcgtggagatcgagtgggagccgcagaaagagaacagcaaacgctggaaccccgagatccagtatacctccaactacaacaagtctgttaatgtggactttactgtggacactaatggcgtgtattcagagcctcgccccattggcacaagatacctgactcgtaatctgtaa

SEQ ID NO: 11772 - DNA, 2208 bp, Artificial Sequence
  source: /note="Description of Artificial Sequence: Synthetic polynucleotide"
atggctgccgatggttatcttccagattggctcgaggacactctctctgaaggaataagacagtggtggaagctcaaacctggcccaccaccgccaaagcccgcagagcggcataaggacgacagcaggggtcttgtgcttcctgggtacaagtacctcggacccttcaacggactcgacaaaggagagccggtcaacgaggcagacgccgcggccctcgagcacgacaaggcctacgaccggcagctcgacagcggagacaacccgtacctcaagtacaaccacgccgacgcggagtttcaggagcgccttaaagaagatacgtcttttgggggcaacctcgcaagagcagtattccaggcgaaaaagagggttcttgaacctctgggcctggttgaggagcctgttaagacggctccgggaaaaaagaggccggtagagcactctcctgcggagccagattcctcctccggaactggaaagtcgggccaacagcctgcaagaaagagattgaattttggtcagactggagacgcagactccgtacctgacccccagcctctcggacagccaccagcagccccctctggtctgggaactaatacgatggcttcaggcagtggcgcaccaatggcagacaataacgagggcgccgacggagtgggtaattcctcgggaaattggcattgcgattccacatggatgggcgacagagtcatcaccaccagcacccgcacctgggctctgcccacctacaacaaccatctgtacaagcaaatttccagccagtctggagccagcaacgacaaccactactttggctacagcaccccttgggggtattttgacttcaacggattccactgccacttctccccacgtgactggcaaagactcatcaacaacaattggggattccggcccaaaagactcaacttcaagctctttaacattcaagtcaaggaggtcacgcagaatgacggtacgacgacgattgccaataaccttaccagcacggttcaggtgtttactgactcggagtaccagctcccgtacgtcctcggctcggcgcatcaaggatgcctcccgccgttcccagcagacgtcttcatggtgccacagtatggatacctcaccctgaacaacgggagtcaggcggtaggacgctcttcattttactgcctggagtactttccttctcagatgctgcgtaccggaaacaactttaccttcagctacacctttgaggacgttccttttcacagcagctacgctcacagccagagtttggaccgtcttatgaatcctctcatcgaccagtacctgtattacttgagcagaacaaacactccaagcggaaccactacgcagtccaggcttcagttttctcaagccggagcgagtgacattcgggaccagtctaggaactggcttcctggaccctgttaccgccagcagcgagtatcaaagacagctgcggacaacaacaacagtgattactcgtggactggagctaccaagtatcacctcaatggaagagactctctggtgaatccgggcacagccatggccagccacaaggacgatgaagaaaagtattttcctcagagcggggttctcatcttcggaaaacaagactcgggaaaaactaatgtggacattgaaaaggtcatgattacagacgaagaggaaatcaggaccaccaatcccgtggctacggagcagtatggttctgtatctaccaatctccagagcggcgacacacaagcagctacctcagatgtcaacacacaaggcgttcttccaggcatggcccggcaggacagagacgtgtacctgcagggacccatctgggcaaagattccacacacggacggacattttcacccttctcctcttatgggaggatttggactgaagcaccctcccccgcagattctcatcaagaataccccggtacctgcgaatccttctaccaccttcagcgcggcaaagtttgcttccttcatcacacagtactccacggggcaggtcagcgtggagatcgagtgggagccgcagaaagagaacagcaaacgctggaaccccgagatccagtatacctccaactacaacaagtctgttaatgtggactttactgtggacactaatggcgtgtattcagagcctcgccccattggcacaagatacctgactcgtaatctgtaa

SEQ ID NO: 11773 - DNA, 2208 bp, Artificial Sequence
  source: /note="Description of Artificial Sequence: Synthetic polynucleotide"
atggctgccgatggttatcttccagattggctcgaggacactctctctgaaggaataagacagtggtggaagctcaaacctggcccaccaccgccaaagcccgcagagcggcataaggacgacagcaggggtcttgtgcttcctgggtacaagtacctcggacccttcaacggactcgacaaaggagagccggtcaacgaggcagacgccgcggccctcgagcacgacaaggcctacgaccggcagctcgacagcggagacaacccgtacctcaagtacaaccgcgccgacgcggagtttcaggagcgccttaaagaagatacgtcttttgggggcaacctcgcaagagcagtattccaggcgaaaaagagggttcttgaacctctgggcctggttgaggagcctgttaagacggctccgggaaaaaagaggccggtagagcactctcctgcggagccagattcctcctccggaactggaaagtcgggccaacagcctgcaagaaagagattgaattttggtcagactggagacgcagactccgtacctgacccccagcctctcggacagccaccagcagccccctctggtctgggaactaatacgatggcttcaggcagtggcgcaccaatggcagacaataacgagggcgccgacggagtgggtaattcctcgggaaattggcattgcgattccacatggatgggcgacagagtcatcaccaccagcacccgcacctgggctctgcccacctacaacaaccatctgtacaagcaaatttccagccagtctggagccagcaacgacaaccactactttggctacagcaccccttgggggtattttgacttcaacagattccactgccacttctccccacgtgactggcaaagactcatcaacaacaattggggattccggcccaaaagactcaacttcaagctctttaacattcaagtcaaggaggtcacgcagaatgacggtacgacgacgattgccaataaccttaccagcacggttcaggtgtttactgactcggagtaccagctcccgtacgtcctcggctcggcgcatcaaggatgcctcccgccgttcccagcagacgtcttcatggtgccacagtatggatacctcaccctgaacaacgggagtcaggcggtaggacgctcttcattttactgcctggagtactttccttctcagatgctgcgtaccggaaacaactttaccttcagctacacctttgaggacgttccttttcacagcagctacgctcacagccagagtttggaccgtcttatgaatcctctcatcgaccagtacctgtattacttgagcagaacaaacactccaagcggaaccactacgcagtccaggcttcagttttctcaagccggagcgagtgacattcgggaccagtctaggaactggcttcctggaccctgttaccgccagcagcgagtatcaaagacagctgcggacaacaacaacagtgattactcgtggactggagctaccaagtatcacctcaatggaagagactctctggtgaatccgggcacagccatggccagccacaaggacgatgaagaaaagtattttcctcagagcggggttctcatcttcggaaaacaagactcgggaaaaactaatgtggacattgaaaaggtcatgattacagacgaagaggaaatcaggaccaccaatcccgtggctacggagcagtatggttctgtatctaccaatctccagagcggcaacacacaagcagctacctcagatgtcaacacacaaggcgttcttccaggcatggtccggcaggacagagacgtgtacctgcagggacccatctgggcaaagattccacacacggacggacattttcacccttctcctcttatgggaggatttggactgaagcaccctcccccgcagattctcatcaagaataccccggtacctgcgaatccttctaccaccttcagcgcggcaaagtttgcttccttcatcacacagtactccacggggcaggtcagcgtggagatcgagtgggagccgcagaaagagaacagcaaacgctggaaccccgagatccagtatacctccaactacaacaagtctgttaatgtggactttactgtggacactaatggcgtgtattcagagcctcgccccattggcacaagatacctgactcgtaatctgtaa

SEQ ID NO: 11774 - DNA, 2208 bp, Artificial Sequence
  source: /note="Description of Artificial Sequence: Synthetic polynucleotide"
atggctgccgatggttatcttccagattggctcgaggacactctctctgaaggaataagacagtggtggaagctcaaacctggcccaccaccgccaaagcccgcagagcggcataaggacgacagcaggggtcttgtgcttcctgggtacaagtacctcggacccttcaacggactcgacaaaggagagccggtcaacgaggcagacgccgcggccctcgagcacgacaaggcctacgaccggcagctcgacagcggagacaacccgtacctcaagtacaaccacgccgacgcggagtttcaggagcgccttaaagaagatacgtcttttgggggcaacctcgcaagagcagtattccaggcgaaaaagagggttcttgaacctctgggcctggttgaggagcctgttaagacggctccgggaaaaaagaggccggtagagcactctcctgcggagccagattcctcctccggaactggaaagtcgggccaacagcctgcaagaaagagattgaattttggtcagactggagacgcagactccgtacctgacccccagcctctcggacagccaccagcagccccctctggtctgggaactaatacgatggcttcaggcagtggcgcaccaatggcagacaataacgagggcgccgacggagtgggtaattcctcgggaaattggcattgcgattccacatggatgggcgacagagtcatcaccaccagcacccgcacctgggctctgcccacctacaacaaccatctgtacaagcaaatttccagccagtctggagccagcaacgacaaccactacttcggctacagcaccccttgggggtattttgacttcaacagattccactgccacttctccccacgtgactggcaaagactcatcaacaacaattggggattccggcccaaaagactcaacttcaagctctttaacattcaagtcaaggaggtcacgcagaatgacggtacgacgacgattgccaataaccttaccagcacggttcaggtgtttactgactcggagtaccagctcccgtacgtcctcggctcggcgcatcaaggatgcctcccgccgttcccagcagacgtcttcatggtgccacagtatggatacctcaccctgaacaacgggagtcaggcggtaggacgctcttcattttactgcctggagtactttccttctcagatgctgcgtaccggaaacaactttaccttcagctacacctttgaggacgttccttttcacagcagctacgctcacagccagagtttggaccgtcttatgaatcctctcatcgaccagtacctgtattacttgagcagaacaaacactccaagcggaaccactacgcagtccaggcttcagttttctcaagccggagcgagtgacattcgggaccagtctaggaactggcttcctggaccctgttaccgccagcagcgagtatcaaagacagctgcggacaacaacaacagtgattactcgtggactggagctaccaagtatcacctcaatggaagagactctctggtgaatccgggcacagccatggccagccacaaggacgatgaagaaaagtattttcctcagagcggggttctcatcttcggaaaacaagactcgggaaaaactaatgtggacattgaaaaggtcatgattacagacgaagaggaagtcaggaccaccaatcccgtggctacggagcagtatggttctgtatctaccaatctccagagcggcaacacacaagcagctacctcagatgtcaacacacaaggcgttcttccaggcatggtccggcaggacagagacgtgtacctgcagggacccatctgggcaaagattccacacacggacggacattttcacccttctcctcttatgggaggatttggactgaagcaccctcccccgcagattctcatcaagaataccccggtacctgcgaatccttctaccaccttcagcgcggcaaagtttgcttccttcatcacacagtactccacggggcaggtcagcgtggagatcgagtgggagccgcagaaagagaacagcaaacgctggaaccccgagatccagtatacctccaactacaacaagtctgttaatgtggactttactgtggacactaatggcgtgtattcagagcctcgccccattggcacaagatacctgactcgtaatctgtaa

SEQ ID NO: 11775 - DNA, 2208 bp, Artificial Sequence
  source: /note="Description of Artificial Sequence: Synthetic polynucleotide"
atggctgccgatggttatcttccagattggctcgaggacactctctctgaaggaataagacagtggtggaagctcaaacctggcccaccaccgccaaagcccgcagagcggcataaggacgacagcaggggtcttgtgcttcctgggtacaagtacctcggacccttcaacggactcgacaaaggagagccggtcaacgaggcagacgccgcggccctcgagcacgacaaggcctacgaccggcagctcgacagcggagacaacccgtacctcaagtacaaccacgccgacgcggagtttcaggagcgccttaaagaagatacgtcttttgggggcaacctcgcaagagcagtattccaggcgaaaaagagggttcttgaacctctgggcctggttgaggagcctgttaagacggctccgggaaaaaagaggccggtagagcactctcctgcggggccagattcctcctccggaactggaaagtcgggccaacagcctgcaagaaagagattgaattttggtcagactggagacgcagactccgtacctgacccccagcctctcggacagccaccagcagccccctctggtctgggaactaatacgatggcttcaggcagtggcgcaccaatggcagacaataacgagggcgccgacggagtgggtaattcctcgggaaattggcattgcgattccacatggatgggcgacagagtcatcaccaccagcacccgcacctgggctctgcccacctacaacaaccatctgtacaagcaaatttccagccagtctggagccagcaacgacaaccactactttggctacagcaccccttgggggtattttgacttcaacagattccactgccacttctccccacgtgactggcaaagactcatcaacaacaattggggattccggcccaaaagactcaacttcgagctctttaacattcaagtcaaggaggtcacgcagaatgacggtacgacgacgattgccaataaccttaccagcacggttcaggtgtttactgactcggagtaccagctcccgtacgtcctcggctcggcgcatcaaggatgcctcccgccgttcccagcagacgtcttcatggtgccacagtatggatacctcaccctgaacaacgggagtcaggcggtaggacgctcttcattttactgcctggagtactttccttctcagatgctgcgtaccggaaacaactttaccttcagctacacctttgaggacgttccttttcacagcagctacgctcacagccagagtttggaccgtctcatgaatcctctcatcgaccagtacctgtattacttgagcagaacaaacactccaagcggaaccactacgcagtccaggcttcagttttctcaagccggagcgagtgacattcgggaccagtctaggaactggcttcctggaccctgttaccgccagcagcgagtatcaaagacagctgcggacaacaacaacagtgattactcgtggactggagctaccaagtatcacctcaatggaagagactctctggtgaatccgggcacagccatggccagccacaaggacgatgaagaaaagtattttcctcagagcggggttctcatcttcggaaaacaagactcgggaaaaactaatgtggacattgaaaaggtcatgattacagacgaagaggaaatcaggaccaccaatcccgtggctacggagcagtatggttctgtatctaccaatctccagagcggcaacacacaagcagctacctcagatgtcaacacacaaggcgttcttccaggcatggtctggcaggacagagacgtgtacctgcagggacccatctgggcaaagattccacacacggacggacactttcacccttctcctcttatgggaggatttggactgaagcaccctcccccgcagattctcatcaagagtaccccggtacctgcgaatccttctaccaccttcagcgcggcaaagtttgcttccttcatcacacagtactccacggggcaggtcagcgtggagatcgagtgggagctgcagaaagagaacagcaaacgctggaaccccgagatccagtatacctccaactacaacaagtctgttaatgtggactttactgtggacactaatggcgtgtattcagagcctcgccccattggcacaagatacctgactcgtaatctgtaa

SEQ ID NO: 11776 - DNA, 2208 bp, Artificial Sequence
  source: /note="Description of Artificial Sequence: Synthetic polynucleotide"
atggctgccgatggttatcttccagattggctcgaggacactctctctgaaggaataagacagtggtggaagctcaaacctggcccaccaccgccaaagcccgcagagcggcataaggacgacagcaggggtcttgtgcttcctgggtacaagtacctcggacccttcaacggactcgacaaaggagagccggtcaacgaggcagacgccgcggccctcgagcacgacaaggcctacgaccggcagctcgacagcggagacaacccgtacctcaagtacaaccacgccgacgcggagtttcaggagcgccttaaagaagatacgtcttttgggggcaacctcgcaagagcagtattccaggcgaaaaagagggttcttgaacctctgggcctggttgaggagcctgttaagacggctccgggaaaaaagaggccggtagagcactctcctgcggggccagattcctcctccggaactggaaagtcgggccaacagcctgcaagaaagagattgaattttggtcagactggagacgcagactccgtacctgacccccagcctctcggacagccaccagcagccccctctggtctgggaactaatacgatggcttcaggcagtggcgcaccaatggcagacaataacgagggcgccgacggagtgggtaattcctcgggaaattggcattgcgattccacgtggatgggcgacagagtcatcaccaccagcacccgcacctgggctctgcccacctacaacaaccatctgtacaagcaaatttccagccagtctggagccagcaacgacaaccactactttggctacagcaccccttgggggtattttgacttcaacagattccactgctacttctccccacgtgactggcaaagactcatcaacaacaattggggattccggcccaaaagactcaacttcgagctctttaacattcaagtcaaggaggtcacgcagaatgacggtacgacgacgattgccaataaccttaccagcacggttcaggtgtttactgactcggagtaccagctcccgtacgtcctcggctcggcgcatcaaggatgcctcccgccgttcccagcagacgtcttcatggtgccacagtatggatacctcaccctgaacaacgggagtcaggcggtaggacgctcttcattttactgcctggagtactttccttctcagatgctgcgtaccggaaacaactttaccttcagctacacctttgaggacgttccttttcacagcagctacgctcacagccagagtttggaccgtctcatgaatcctctcatcgaccagtacctgtattacttgagcagaacaaacactccaagcggaaccactacgcagtccaggcttcagttttctcaagccggagcgagtgacattcgggaccagtctaggaactggcttcctggaccctgttaccgccagcagcgagtatcaaagacagctgcggacaacaacaacagtgattactcgtggactggagctaccaagtatcacctcaatggaagagactctctggtgaatccgggcacagccatggccagccacaaggacgatgaagaaaagtattttcctcagagcggggttctcatcttcggaaaacaagactcgggaaaaactaatgtggacattgaaaaggtcatgattacagacgaagaggaaatcaggaccaccaatcccgtggctacggagcagtatggttctgtatctaccaatctccagagcggcaacacacaagcagctacctcagatgtcaacacacaaggcgttcttccaggcatggtctggcaggacagagacgtgtacctgcagggacccatctgggcaaagattccacacacggacggacactttcacccttctccacttatgggaggatttggactgaagcaccctcccccgcagattctcatcaagagtaccccggtacctgcgaatccttctaccaccttcagcgcggcaaagtttgcttccttcatcacacagtactccacggggcaggtcagcgtggagatcgagtgggagctgcagaaagagaacagcaaacgctggaaccccgagatccagtatacctccaactacaacaagtccgttaatgtggactttactgtggacactaatggcgtgtattcagagcctcgccccattggcacaagatacctgactcgtaatctgtaa

SEQ ID NO: 11777 - DNA, 2205 bp, Artificial Sequence
  source: /note="Description of Artificial Sequence: Synthetic polynucleotide"
atggctgccgatggttatcttccagattggctcgaggacactctctctgaaggaataagacagtggtggaagctcaaacctggcccaccaccgccaaagcccgcagagcggcataaggacgacagcaggggtcttgtgcttcctgggtacaagtacctcggacccttcaacggactcgacaaaggagagccggtcaacgaggcagacgccgcggccctcgagcacgacaaggcctacgaccggcagctcgacagcggagacaacccgtacctcaagtacaaccacgccgacgcggagtttcaggagcgccttaaagaagatacgtcttttgggggcaacctcgcaagagcagtattccaggcgaaaaagagggttcttgaacctctgggcctggttgaggagcctgttaagacggctccgggaaaaaagaggccggtagagcactctcctgcggagccagattcctcctccggaactggaaagtcgggccaacagcctgcaagaaagagattgaattttggtcagactggagacgcagactccgtacctgacccccagcctctcggacagccaccagcagccccctctggtctgggaactaatacgatggcttcaggcagtggcgcaccaatggcagacaataacgagggcgccgacggagtgggtaattcctcgggaaattggcattgcgattccacatggatgggcgacagagtcatcaccaccagcacccgcacctgggctctgcccacctacaacaaccatctgtacaagcaaatttccagccagtctggagccagcaacgacaaccactactttggctacagcaccccttgggggtattttgacttcaacagattccactgccacttctccccacgtgactggcaaagactcatcaacaacaattggggattccggcccaaaagactcaacttcaagctctttaacattcaagtcaaggaggtcacgcagaatgacggtacgacgacgattgccaataaccttaccagcacggttcaggtgtttactgactcggagtaccagctcccgtacgtcctcggctcggcgcatcaaggatgcctcccgccgttcccagcagacgtcttcatggtgccacagtatggatacctcaccctgaacaacgggagtcaggcggtaggacgctcttcattttactgcctggagtactttccttctcagatgctgcgtaccggaaacaactttaccttcagctacacctttgaggacgttccttttcacagcagctacgctcacagccagagtttggaccgtcttatgaatcctctcatcgaccagtacctgtattacttgagcagaacaaacactccaagcggaaccactacgcagtccaggcttcagttttctcaagccggagcgagtgacattcgggaccagtctaggaactggcttcctggaccctgttaccgccagcagcgagtatcaaagacagctgcggacaacaacagtgattactcgtggactggagctaccaagtatcacctcaatggaagagactctctggtgaatccgggcacagccatggccagccacaaggacgatgaagaaaagtattttcctcagagcggggttctcatcttcggaaaacaagactcgggaaaaactaatgtggacattgaaaaggtcatgattacagacgaagaggaaatcaggaccaccaatcccgtggctacggagcagtatggttctgtatctaccaatctccagagcggcaacacacaagcagctacctcagatgtcaacacacaaggcgttcttccaggcatggtccggcaggacagagacgtgtacctgcagggacccatctgggcaaagattccacacacggacggacattttcacccttctcctcttatgggaggatttggactgaagcaccctcccccgcagattctcatcaagaataccccggtacctgcgaatccttctaccaccttcagcgcggcaaagtttgcttccttcatcacacagtactccacggggcaggtcagcgtggagatcgagtgggagccgcagaaagagaacagcaaacgctggaaccccgagatccagtatacctccaactacaacaagtctgttaatgtggactttactgtggacactaatggcgtgtattcagagcctcgccccattggcacaagatacctgactcgtaatctgtaa

SEQ ID NO: 11778 - DNA, 2208 bp, Artificial Sequence
  source: /note="Description of Artificial Sequence: Synthetic polynucleotide"
atggctgccgatggttatcttccagattggctcgaggacactctctctgaaggaataagacagtggtggaagctcaaacctggcccaccaccgccaaagcccgcagagcggcataaggacgacagcaggggtcttgtgcttcctgggtacaagtgcctcggacccttcaacggactcgacaaaggagagccggtcaacgaggcagacgccgcggccctcgagcacgacaaggcctacgaccggcagctcgacagcggagacaacccgtacctcaagtacaaccacgccgacgcggagtttcaggagcgccttaaagaagatacgtcttttgggggcaacctcgcaagagcagtattccaggcgaaaaagagggttcttgaacctctgggcctggttgaggagcctgttaagacggctccgggaaaaaagaggccggtagagcactctcctgcggagtcagattcctcctccggaactggaaagtcgggccaacagcctgcaagaaagagattgaattttggtcagactggagacgcagactccgtacctgacccccagcctctcggacagccaccagcagccccctctggtctgggaactaatacgatggcttcaggcagtggcgcaccaatggcagacaataacgagggcgccgacggagtgggtaattcctcgggaaattggcattgcgattccacatggatgggcgacagagtcatcaccaccagcacccgcacctgggctctgcccacctacaacaaccatctgtacaagcaaatttccagccagtctggagccagcaacgacaaccactactttggctacagcaccccttgggggtattttgacttcaacagattccactgccacttctccccacgtgactggcaaagactcatcaacaacaattggggattccggcccaaaagactcaacttcaagctctttaacattcaagtcaaggaggtcacgcagaatgacggtacgacgacgattgccaataaccttaccagcacggttcaggtgtttactgactcggagtaccagctcccgtacgtcctcggctcggcgcatcaaggatgcctcccgccgttcccagcagacgtcttcatggtgccacagtatggatacctcaccctgaacaacgggagtcaggcggtaggacgctcttcattttactgcctggagtactttccttctcagatgctgcgtaccggaaacaactttaccttcagctacacctttgaggacgttccttttcacagcagctacgctcacagccagagtttggaccgtctcatgaatcctctcatcgaccagtacctgtattacttgagcagaacaaacactccaagcggaaccactacgcagtccaggcttcagttttctcaagccggagcgagtgacattcgggaccagtctaggaactggcttcctggaccctgttaccgccagcagcgagtatcaaagacagctgcggacaacaacaacagtgattactcgtggactggagctaccaagtatcacctcaatggaagagactctctggtgaatccgggcacagccatggccagccacaaggacgatgaagaaaagtattttcctcagagcggggttctcatcttcggaaaacaagactcgggaaaaactaatgtggacattgaaaaggtcatgattacagacgaagaggaaatcaggaccaccaatcccgtggctacggagcagtatggttctgtatctaccaatctccagagcggcaacacacaagcagctacctcagatgtcaacacacaaggcgttcttccaggcatggtctggcaggacagagacgtgtacctgcagggacccatctgggcaaagattccacacacggacggacattttcacccttctcctcttatgggaggatttggactgaagcaccctcccccgcagattctcatcaagaataccccggtacctgcgaatccttctaccaccttcagcgcggcaaagtttgcttccttcatcacacagtactccacggggcaggtcagcgtggagatcgagtgggagctgcagaaagagaacagcaaacgctggaaccccgagatccagtatacctccaactacaacaagtctgttaatgtggactttactgtggacactaatggcgtgtattcagagcctcgccccattggcacaagatacctgactcgtaatctgtaa

SEQ ID NO: 11779 - DNA, 2208 bp, Artificial Sequence
  source: /note="Description of Artificial Sequence: Synthetic polynucleotide"
atggctgccgatggttatcttccagattggctcgaggacattctctctgaaggaataagacagtggtggaagctcaaacctggcccaccaccaccaaagcccgcagagcggcataaggacgacagcaggggtcttgtgcttcctgggtacaagtacctcggacccttcaacggactcgacaaaggagagccggtcaacgaggcagacgccgcggccctcgagcacgacaaggcctacgaccggcagctcgacagcggagacaacccgtacctcaagtacaaccacgccgacgcggagtttcaggagcgtcttaaagaagatacgtcttttgggggcaacctcggacgagcagtcttccaggcaaaaaagagggttcttgaacctctgggcctggttgaggaacctgttaagacggctccgggaaaaaagaggccggtagagcaatctcctgcggagccagactcctcctcgggaaccggaaaggcgggcaaccagcctgcaagaaagagattgaattttggtcagactggagacgcagactccgtacctgacccccagcctctcggacagccaccagcagccccctctggtctgggaactaatacgatggcttcaggcagtggcgcaccaatggcagacaataacgagggcgccgacggagtgggtaattcctcgggaaattggcattgcgattccacatggatgggcgacagagtcatcaccaccagcacccgcacctgggctctgcccacctacaacaaccatctgtacaagcaaatttccagccagtctggagccagcaacgacaaccactactttggctacagcaccccttgggggtattttgacttcaacagattccactgccacttctccccacgtgactggcaaagactcatcaacaacaattggggattccggcccaaaagactcaacttcaagctctttaacattcaagtcaaggaggtcacgcagaatgacggtacgacgacgattgccaataaccttaccagcacggttcaggtgtttactgactcggagtaccagctcccgtacgtcctcggctcggcgcatcaaggatgcctcccgccgttcccagcagacgtcttcatggtgccacagtatggatacctcaccctgaacaacgggagtcaggcggtaggacgctcttcattttactgcctggagtactttccttctcagatgctgcgtaccggaaacaactttaccttcagctacacctttgaggacgttccttttcacagcagctacgctcacagccagagtttggaccgtcttatgaatcctctcatcgaccagtacctgtattacttgagcagaacaaacactccaagcggaaccactacgcagtccaggcttcagttttctcaagccggagcgagtgacattcgggaccagtctaggaactggcttcctggaccctgttaccgccagcagcgagtatcaaagacagctgcggacaacaacaacagtgattactcgtggactggagctaccaagtatcacctcaatggaagagactctctggtgaatccgggcacagccatggccagccacaaggacgatgaagaaaagtattttcctcagagcggggttctcatcttcggaaaacaagactcgggaaaaactaatgtggacattgaaaaggtcatgattacagacgaagaggaaatcaggaccaccaatcccgtggctacggagcagtatggttctgtatctaccaatctccagagcggcaacacacaagcagctacctcagatgtcaacacacaaggcgttcttccaggcatggtccggcaggacagagacgtgtacctgcagggacccatctgggcaaagattccacacacggacggacattttcacccttctcctcttatgggaggatttggactgaagcaccctcccccgcagattctcatcaagaataccccggtacctgcgaatccttctaccaccttcagcgcggcaaagtttgcttccttcatcacacagtactccacggggcaggtcagcgtggagatcgagtgggagccgcagaaagagaacagcaaacgctggaaccccgagatccagtatacctccaactacaacaagtctgttaatgtggactttactgtggacactaatggcgtgtattcagagcctcgccccattggcacaagatacctgactcgtaatctgtaa

SEQ ID NO: 11780 - DNA, 2208 bp, Artificial Sequence
  source: /note="Description of Artificial Sequence: Synthetic polynucleotide"
atggctgccgatggttatcttccagattggctcgaggacactctctctgaaggaataagacagtggtggaagctcaaacctggcccaccaccgccaaagcccgcagagcggcataaggacgacagcaggggtcttgtgcttcctgggtacaagtacctcggacccttcaacggactcgacaaaggagagccggtcaacgaggcagacgccgcggccctcgagcacgacaaggcctacgaccggcagctcgacagcggagacaacccgtacctcaagtacaaccacgccgacgcggagtttcaggagcgccttaaagaagatacgtcttttgggggcaacctcgcaagagcagtattccaggcgaaaaagagggttcttgaacctctgggcctggttgaggagcctgttaagacggctccgggaaaaaagaggccggtagagcactctcctgcggagccagattcctcctccggaactggaaagtcgggccaacagcctgcaagaaagagattgaattttggtcagactggagacgcagactccgtacctgacccccagcctctcggacagccaccagcagccccctctggtctgggaactaatacgatggcttcaggcagtggcgcaccaatggcagacaataacgagggcgccgacggagtgggtaattcctcgggaaattggcattgcgattccacatggatgggcgacagagtcatcaccaccagcacccgcacctgggctctgcccacctacaacaaccatctgtacaagcaaatttccagccagtctggagccagcaacgacaaccactacttcggctacagcaccccttgggggtattttgacttcaacagattccactgccacttctccccacgtgactggcaaagactcatcaacaacaattggggattccggcccaaaagactcaacttcaagctctttaacattcaagtcaaggaggtcacgcagaatgacggtacgacgacgattgccaataaccttaccagcacggttcaggtgtttactgactcggagtaccagctcccgtacgtcctcggctcggcgcatcaaggatgcctcccgccgttcccagcagacgtcttcatggtgccacagtatggatacctcaccctgaacaacgggagtcaggcggtaggacgctcttcattttactgcctggagtactttccttctcagatgctgcgtaccggaaacaactttaccttcagctacacctttgaggacgttccttttcacagcagctacgctcacagccagagtttggaccgtcttatgaatcctctcatcgaccagtacctgtattacttgagcagaacaaacactccaagcggaaccactacgcagtccaggcttcagttttctcaagccggagcgagtgacattcgggaccagtctaggaactggcttcctggaccctgttaccgccagcagcgagtatcaaagacagctgcggacaacaacaacagtgattactcgtggactggagctaccaagtatcacctcaatggaagagactctctggtgaatccgggcacagccatggccagccacaaggacgatgaagaaaagtattttcctcagagcggggttctcatcttcggaaaacaagactcgggaaaaactaatgtggacattgaaaaggtcatgattacagacgaagaggaaatcaggaccaccaatcccgtggctacggagcagtatggttctgtatctaccaatctccagagcggcaacacacaagcagctacctcagatgtcaacacacaaggcgttcttccaggcatggtccggcaggacagagacgtgtacctgcagggacccatctgggcaaagattccacacacggacggacattttcacccttctcctcttatgggaggatttggactgaagcaccctcccccgcagattctcatcaagaataccccggtacctgcgaatccttctaccaccttcagcgcggcaaagtttgcttccttcatcacacagtactccacggggcaggtcagcgtggagatcgagtgggagccgcagaaagagaacagcaaacgctggaaccccgagatccagtatacctccaactacaacaagtctgttaatgtggactttactgtggacactaatggcgtgtattcagagcctcgccccattggcacaagatgcctgactcgtaatctgtaa

SEQ ID NO: 11781 - DNA, 2208 bp, Artificial Sequence
  source: /note="Description of Artificial Sequence: Synthetic polynucleotide"
atggctgccgatggttatcttccagattggctcgaggacactctctctgaaggaataagacagtggtggaagctcaaacctggcccaccaccgccaaagcccgcagagcggcataaggacgacagcaggggtcttgtgcttcctgggtacaagtacctcggacccttcaacggactcgacaaaggagagccggtcaacgaggcagacgccgcggccctcgagcacgacaaggcctacgaccggcagctcgacagcggagacaacccgtacctcaagtacaaccacgccgacgcggagtttcaggagcgccttaaagaagatacgtcttttgggggcaacctcgcaagagcagtattccaggcgaaaaagagggttcttgaacctctgggcctggttgaggagcctgttaagacggctccgggaaaaaagaggccggtagagcactctcctgcggagccagattcctcctccggaactggaaagtcgggccaacagcctgcaagaaagagattgaattttggtcagactggagacgcagactccgtacctgacccccagcctctcggacagccaccagcagccccctctggtctgggaactaatacgatggcttcaggcagtggcgcaccaatggcagacaataacgagggcgccgacggagtgggtaattcctcgggaaattggcattgcgattccacatggatgggcgacagagtcatcaccaccagcacccgcacctgggctctgcccacctacaacaaccatctgtacaagcaaatttccagccagtctggagccagcaacgacaaccactacttcggctacagcaccccttgggggtattttgacttcaacagattccactgccacttctccccacgtgactggcaaagactcatcaacaacaattggggattccggcccaaaagactcaacttcaagctctttaacattcaagtcaaggaggtcacgcagaatgacggtacgacgacgattgccaataaccttaccagcacggttcaggtgtttactgactcggagtaccagctcccgtacgtcctcggctcggcgcatcaaggatgcctcccgccgttcccagcagacgtcttcatggtgccacagtatggatacctcaccctgaacaacgggagtcaggcggtaggacgctcttcattttactgcctggagtactttccttctcagatgctgcgtaccggaaacaactttaccttcagctacacctttgaggacgttccttttcacagcagctacgctcacagccagagtttggaccgtcttatgaatcctctcatcgaccagtacctgtattacttgagcagaacaaacactccaagcggaaccactacgcagtccaggcttcagttttctcaagccggagcgagtgacattcgggaccagtctaggaactggcttcctggaccctgttaccgccagcagcgagtatcaaagacagctgcggacaacaacaacagtgattactcgtggactggagctaccaagtatcacctcaatggaagagactctctggtgaatccgggcacagccatggccagccacaaggacgatgaagaaaagtattttcctcagagcggggttctcatcttcggaaaacaagactcgggaaaaactaatgtggacattgaaaaggtcatgattacagacgaagaggaaatcaggaccaccaatcccgtggctacggagcagtatggttctgtatctaccaatctccagagcggcaacacacaagcagctacctcagatgtcaacacacaaggcgttcttccaggcatggtccggcagggcagagacgtgtacctgcagggacccatctgggcaaagattccacacacggacggacattttcacccttctcctcttatgggaggatttggactgaagcaccctcccccgcagattctcatcaagaataccccggtacctgcgaatccttctaccaccttcagcgcggcaaagtttgcttccttcatcacacagtactccacggggcaggtcagcgtggagatcgagtgggagccgcagaaagagaacagcaaacgctggaaccccgagatccagtatacctccaactacaacaagtctgttaatgtggactttactgtggacactaatggcgtgtattcagagcctcgccccattggcacaagatacctgactcgtaatctgtaa

SEQ ID NO: 11782 - DNA, 2208 bp, Artificial Sequence
  source: /note="Description of Artificial Sequence: Synthetic polynucleotide"
atggctgccgatggttatcttccagattggctcgaggacactctctctgaaggaataagacagtggtggaagctcaaacctggcccaccaccgccaaagcccgcagagcggcataaggacgacagcaggggtcttgtgcttcctgggtacaagtacctcggacccttcaacggactcgacaaaggagagccggtcaacgaggcagacgccgcggccctcgagcacgacaaggcctacgaccggcagctcgacagcggagacaacccgtacctcaagtacaaccacgccgacgcggagtttcaggagcgccttaaagaagatacgtcttttgggggcaacctcgcaagagcagtattccaggcgaaaaagagggttcttgaacctctgggcctggttgaggagcctgttaagacggctccgggaaaaaagaggccggtagagcactctcctgcggagccagattcctcctccggaactggaaagtcgggccaacagcctgcaagaaagagattgaattttggtcagactggagacgcagactccgtacctgacccccagcctctcggacagccaccagcagccccctctggtctgggaactaatacgatggcttcaggcagtggcgcaccaatggcagacaataacgagggcgccgacggagtgggtaattcctcgggaaattggcattgcgattccacatggatgggcgacagagtcatcaccaccagcacccgcacctgggctctgcccacctacaacaaccatctgtacaagcaaatttccagccagtctggagccagcaacgacaaccactacttcggctacagcaccccttgggggtattttgacttcaacagattccactgccacttctccccacgtgactggcaaagactcatcaacaacaattggggattccggcccaaaagactcaacttcaagctctttaacattcaagtcaaggaggtcacgcagaatgacggtacgacgacgattgccaataaccttaccagcacggttcaggtgtttactgactcggagtaccagctcccgtacgtcctcggctcggcgcatcaaggatgcctcccgccgttcccagcagacgtcttcatggtgccacagtatggatacctcaccctgaacaacgggagtcaggcggtaggacgctcttcattttactgcctggagtactttccttctcagatgctgcgtaccggaaacaactttaccttcagctacacctttgaggacgttccttttcacagcagctacgctcacagccagagtttggaccgtcttatgaatcctctcatcgaccagtacctgtattacttgagcagaacaaacactccaagcggaaccactacgcagtccaggcttcagttttctcaagccggagcgagtgacattcgggaccagtctaggaactggcttcctggaccctgttaccgccagcagcgagtatcaaagacagctgcggacaacaacaacagtgattactcgtggactggagctaccaagtatcacctcaatggaagagactctctggtgaatccgggcacagccatggccagccacaaggacgatgaagaaaagtattttcctcagagcggggttctcatcttcggaaaacaagactcgggaaaaactaatgtggacattgaaaaggtcatgattacagacgaaggggaaatcaggaccaccaatcccgtggctacggagcagtatggttctgtatctaccaatctccagagcggcaacacacaagcagctacctcagatgtcaacacacaaggcgttcttccaggcatggtccggcaggacagagacgtgtacctgcagggacccatctgggcaaagattccacacacggacggacattttcacccttctcctcttatgggaggatttggactgaagcaccctcccccgcagattctcatcaagaataccccggtacctgcgaatccttctaccaccttcagcgcggcaaagtttgcctccttcatcacacagtactccacggggcaggtcagcgtggagatcgagtgggagccgcagaaagagaacagcaaacgctggaaccccgagatccagtatacctccaactacaacaagtctgttaatgtggactttactgtggacactaatggcgtgtattcagagcctcgccccattggcacaagatacctgactcgtaatctgtaa

SEQ ID NO: 11783 - DNA, 2208 bp, Artificial Sequence
  source: /note="Description of Artificial Sequence: Synthetic polynucleotide"
atggctgccgatggttatcttccagattggctcgaggacactctctctgaaggaataagacagtggtggaagctcaaacctggcccaccaccgccaaagcccgcagagcggcataaggacgacagcaggggtcttgtgcttcctgggtacaagtacctcggacccttcaacggactcgacaaaggagagccggtcaacgaggcagacgccgcggccctcgagcacgacaaggcctacgaccggcagctcgacagcggagacaacccgtacctcaagtacaaccacgccgacgcggagtttcaggagcgccttaaagaagatacgtcttttgggggcaacctcgcaagagcagtattccaggcgaaaaagagggttcttgaacctctgggcctggttgaggagcctgttaagacggctccgggaaaaaagaggccggtagagcactctcctgcggagccagattcctcctccggaactggaaagtcgggccaacagcctgcaagaaagagattgaattttggtcagactggagacgcagactccgtacctgacccccagcctctcggacagccaccagcagccccctctggtctgggaactaatacgatggcttcaggcagtggcgcaccaatggcagacaataacgagggcgccgacggagtgggtaattcctcgggaaattggcattgcgattccacgtggatgggcgacagagtcatcaccaccagcacccgcacctgggctctgcccacctacaacaaccatctgtacaagcaaatttccagccagtctggagccagcaacgacaaccactactttggctacagcaccccttgggggtattttgacttcaacagattccactgccacttctccccacgtgactggcaaagactcatcaacaacaattggggattccggcccaaaagactcaacttcgagctctttaacattcaagtcaaggaggtcacgcagaatgacggtacgacgacgattgccaataaccttaccagcacggttcaggtgtttactgactcggagtaccagctcccgtacgtcctcggctcggcgcatcaaggatgcctcccgccgttcccagcagacgtcttcatggtgccacagtatggatacctcaccctgaacaacgggagtcaggcggtaggacgctcttcattttactgcctggagtactttccttctcagatgctgcgtaccggaaacaactttaccttcagctacacctttgaggacgttccttttcacagcagctacgctcacagccagagtttggaccgtctcatgaatcctctcatcgaccagtacctgtattacttgagcagaacaaacactccaagcggaaccactacgcagtccaggcttcagttttctcaagccggagcgagtgacattcgggaccagtctaggaactggcttcctggaccctgttaccgccagcagcgagtatcaaagacagctgcggacaacaacaacagtgattactcgtggactggagctaccaagtatcacctcaatggaagagactctctggtgaatccgggcacagccatggccagccacaaggacgatgaagaaaagtattttcctcagagcggggttctcatcttcggaaaacaagactcgggaaaaactaatgtggacattgaaaaggtcatgattacagacgaagaggaaatcaggaccaccaatcccgtggctacggagcagtatggttctgtatctaccaatctccagagcggcaacacacaagcagctacctcagatgtcaacacacaaggcgttcttccaggcatggtctggcaggacagagacgtgtacctgcagggacccatctgggcaaagattccacacacggacggacactttcacccttctccacttatgggaggatttggactgaagcaccctcccccgcagattctcatcaagagtaccccggtacctgcgaatccttctaccaccttcagcgcggcaaagtttgcttccttcatcacacagtactccacggggcaggtcagcgtggagatcgagtgggagctgcagaaagagaacagcaaacgctggaaccccgagatccagtatacctccaactacaacaagtctgttaatgtggactttactgtggacactaatggcgtgtattcagagcctcgccccattggcacaagatacctgactcgtaatctgtaa

SEQ ID NO: 11784 - DNA, 2208 bp, Artificial Sequence
  source: /note="Description of Artificial Sequence: Synthetic polynucleotide"
atggctgccgatggttatcttccagattggctcgaggacattctctctgaaggaataagacagtggtggaagctcaaacctggcccaccaccaccaaagcccgcagagcggcataaggacgacagcaggggtcttgtgcttcctgggtacaagtacctcggacccttcaacggactcgacaaaggagagccggtcaacgaggcagacgccgcggccctcgagcacgacaaggcctacgaccggcagctcgacagcggagacaacccgtacctcaagtacaaccacgccgacgcggagtttcaggagcgtcttaaagaagatacgtcttttgggggcaacctcggacgagcagtcttccaggcaaaaaagagggttcttgaacctctgggcctggttgaggaacctgttaagacggctccgggaaaaaagaggccggtagagcaatctcctgcggagccagactcctcctcgggaaccggaaaggcgggcaaccagcctgcaagaaagagattgaattttggtcagactggagacgcagactccgtacctgacccccagcctctcggacagccaccagcagccccctctggtctgggatctactacaatggctacaggcagtggcgcaccaatggcagacaataacgagggtgccgatggagtgggtaattcctcaggaaattggcattgcgattccacatggatgggcgacagagtcatcaccaccagcacccgcacctgggctctgcccacctacaacaaccatctgtacaagcaaatttccagccagtctggagccagcaacgacaaccactactttggctacagcaccccttgggggtattttgacttcaacagattccactgccacttctccccacgtgactggcaaagactcatcaacaacaattggggattccggcccaaaagactcaacttcaagctctttaacattcaagtcaaggaggtcacgcagaatgacggtacgacgacgattgccaataaccttaccagcacggttcaggtgtttactgactcggagtaccagctcccgtacgtcctcggctcggcgcatcaaggatgcctcccgccgttcccagcagacgtcttcatggtgccacagtatggatacctcaccctgaacaacgggagtcaggcggtaggacgctcttcattttactgcctggagtactttccttctcagatgctgcgtaccggaaacaactttaccttcagctacacctttgaggacgttccttttcacagcagctacgctcacagccagagtttggaccgtcttatgaatcctctcatcgaccagtacctgtattacttgagcagaacaaacactccaagcggaaccactacgcagtccaggcttcagttttctcaagccggagcgagtgacattcgggaccagtctaggaactggcttcctggaccctgttaccgccagcagcgagtatcaaagacagctgcggacaacaacaacagtgattactcgtggactggagctaccaagtatcacctcaatggaagagactctctggtgaatccgggcacagccatggccagccacaaggacgatgaagaaaagtattttcctcagagcggggttctcatcttcggaaaacaagactcgggaaaaactaatgtggacattgaaaaggtcatgattacagacgaagaggaaatcaggaccaccaatcccgtggctacggagcagtatggttctgtatctaccaatctccagagcggcaacacacaagcagctacctcagatgtcaacacacaaggcgttcttccaggcatggtccggcaggacagagacgtgtacctgcagggacccatctgggcaaagattccacacacggacggacattttcacccttctcctcttatgggaggatttggactgaagcaccctcccccgcagattctcatcaagaataccccggtacctgcgaatccttctaccaccttcagcgcggcaaagtttgcttccttcatcacacagtactccacggggcaggtcagcgtggagatcgagtgggagccgcagaaagagaacagcaaacgctggaaccccgagatccagtatacctccaactacaacaagtctgttaatgtggactttactgtggacactaatggcgtgtattcagagcctcgccccattggcacaagatacctgactcgtaatctgtaa

SEQ ID NO: 11785 - DNA, 2208 bp, Artificial Sequence
  source: /note="Description of Artificial Sequence: Synthetic polynucleotide"
atggctgccgatggttatcttccagattggctcgaggacactctctctgaaggaataagacagtggtggaagctcaaacctggcccaccaccgccaaagcccgcagagcggcataaggacgacagcaggggtcttgtgcttcctgggtacaagtacctcggacccttcaacggactcgacaaaggagagccggtcaacgaggcagacgccgcggccctcgagcacgacaaggcctacgaccggcagctcgacagcggagacaacccgtacctcaagtacaaccacgccgacgcggagtttcaggagcgccttaaagaagatacgtcttttgggggcaacctcgcaagagcagtattccaggcgaaaaagagggttcttgaacctctgggcctggttgaggagcctgttaagacggctccgggaaaaaagaggccggtagagcactctcctgcggagccagattcctcctccggaactggaaagtcgggccaacagcctgcaagaaagagattgaattttggtcagactggagacgcagactccgtacctgacccccagcctctcggacagccaccagcagccccctctggtctgggaactaatacgatggcttcaggcagtggcgcaccaatggcagacaataacgagggcgccgacggagtgggtaattcctcgggaaattggcattgcgattccacatggatgggcgacagagtcatcaccaccagcacccgcacctgggctctgcccacctacaacaaccatctgtacaagcaaatttccagccagtctggagccagcaacgacaaccactactttggctacagcaccccttgggggtattttgacttcaacagattccactgccacttctccccacgtgactggcaaagactcatcaacaacaattggggattccggcccaaaagactcaacttcaagctctttaacattcaagtcaaggaggtcacgcagaatgacggtacgacgacgattgccaataaccttaccagcacggttcaggtgtttactgactcggagtaccagctcccgtacgtcctcggctcggcgcatcaaggatgcctcccgccgttcccagcagacgtcttcatggtgccacagtatggatacctcaccctgaacaacgggagtcaggcggtaggacgctcttcattttactgcctggagtactttccttctcagatgctgcgtaccggaaacaactttaccttcagctacacctttgaggacgttccttttcacagcagctacgctcacagccagagtttggaccgtcttatgaatcctctcatcgaccagtacctgtattacttgagcagaacaaacactccaagcggaaccactacgcagtccaggcttcagttttctcaagccggagcgagtgacattcgggaccagtctaggaactggcttcctggaccctgttaccgccagcagcgagtatcaaagacagctgcggacaacaacaacagtgattactcgtggactggagctaccaagtatcacctcaatggaagagactctctggtgaatccgggcacagccatggccagccacaaggacgatgaagaaaagtattttcctcagagcggggttctcatcttcggaaaacaagactcgggaaaaactaatgtggacattgaaaaggtcatgattacagacgaagaggaaatcaggaccaccaatcccgtggctacggagcagtatggttctgtatctaccaatctccagagcggcaacacacaagcagctacctcagatgtcaacacacaaggcgttcttccaggcatggtccggcaggacagagacgtgtacctgcagggacccatctgggcaaagattccacacacggacggacattttcacccttctcctcttatgggaggatttggactgaagcaccctcccccgcagattctcatcaagaataccccggtacctgcgaatccttctaccaccttcagcgcggcaaagtttgcttccttcatcacacagtactccacggggcaggtcagcgtggagatcgagtgggagccgcagaaagagaacagcaaacgctggaaccccgagatccagtatacctccaactacaacaagtctgttaatgtggactttactgtggacactaatggcgtgtattcagagcctcgccccattggcacaagatacctgactcgtaatctgtaa

SEQ ID NO: 11786 - DNA, 2208 bp, Artificial Sequence
  source: /note="Description of Artificial Sequence: Synthetic polynucleotide"
atggctgccgatggttatcttccagattggctcgaggacactctctctgaaggaataagacagtggtggaagctcaaacctggcccaccaccgccaaagcccgcagagcggcataaggacgacagcaggggtcttgtgcttcctgggtacaagtacctcggacccttcaacggactcgacaaaggagagccggtcaacgaggcagacgccgcggccctcgagcacgacaaggcctacgaccggcagctcgacagcggagacaacccgtacctcaagtacaaccacgccgacgcggagtttcaggagcgccttaaagaagatacgtcttttgggggcaacctcgcaagagcagtattccaggcgaaaaagagggttcttgaacctctgggcctggttgaggagcctgttaagacggctccgggaaaaaagaggccggtagagcactctcctgcggagccagattcctcctccggaactggaaagtcgggccaacagcctgcaagaaagagattgaattttggtcagactggagacgcagactccgtacctgacccccagcctctcggacagccaccagcagccccctctggtctgggaactaatacgatggcttcaggcagtggcgcaccaatggcagacaataacgagggcgccgacggagtgggtaattcctcgggaaattggcattgcgattccacatggatgggcgacagagtcatcaccaccagcacccgcacctgggctctgcccacctacaacaaccatctgtacaagcaaatttccagccagtctggagccagcaacgacaaccactacttcggctacagcaccccttgggggtattttgacttcaacagattccactgccacttctccccacgtgactggcaaagactcatcaacaacaattggggattccggcccaaaagactcaacttcaagctctttaacattcaagtcaaggaggtcacgcagaatgacggtacgacgacgattgccaataaccttaccagcacggttcaggtgtttactgactcggagtaccagctcccgtacgtcctcggctcggcgcatcaaggatgcctcccgccgttcccagcagacgtcttcatggtgccacagtatggatacctcacccagaacaacgggagtcaggcggtaggacgctcttcattttactgcctggagtactttccttctcagatgctgcgtaccggaaacaactttaccttcagctacacctttgaggacgttccttttcacagcagctacgctcacagccagagtttggaccgtcttatgaatcctctcatcgaccagtacctgtattacttgagcagaacaaacactccaagcggaaccactacgcagtccaggcttcagttttctcaagccggagcgagtgacattcgggaccagtctaggaactggcttcctggaccctgttaccgccagcagcgagtatcaaagacagctgcggacaacaacaacagtgattactcgtggactggagctaccaagtatcacctcaatggaagagactctctggtgaatccgggcacagccatggccagccacaaggacgatgaagaaaagtattttcctcagagcggggttctcatcttcggaaaacaagactcgggaaaaactaatgtggacattgaaaaggtcatgattacagacgaagaggaaatcaggaccaccaatcccgtggctacggagcagtatggttctgtatctaccaatctccagagcggcaacacacaagcagctacctcagatgtcaacacacaaggcgttcttccaggcatggtccggcaggacagagacgtgtacctgcagggacccatctgggcaaagattccacacacggacggacattttcacccttctcctcttatgggaggatttggactgaagcaccctcccccgcagattctcatcaagaataccccggtacctgcgaatccttctaccaccttcagcgcggcaaagtttgcttccttcatcacacagtactccacggggcaggtcagcgtggagatcgagtgggagccgcagaaagagaacagcaaacgctggaaccccgagatccagtatacctccaactacaacaagtctgttaatgtggactttactgtggacactaatggcgtgtattcagagcctcgccccattggcacaagatacctgactcgtaatctgtaa

SEQ ID NO: 11787 - DNA, 2208 bp, Artificial Sequence
  source: /note="Description of Artificial Sequence: Synthetic polynucleotide"
atggctgccgatggttatcttccagattggctcgaggacactctctctgaaggaataagacagtggtggaagctcaaacctggcccaccaccgccaaagcccgcagagcggcataaggacgacagcaggggtcttgtgcttcctgggtacaagtacctcggacccttcaacggactcgacaaaggagagccggtcaacgaggcagacgccgcggccctcgagcacgacaaggcctacgaccggcagctcgacagcggagacaacccgtacctcaagtacaaccgcgccgacgcggagtttcaggagcgccttaaagaagatacgtcttttgggggcaacctcgcaagagcagtattccaggcgaaaaagagggttcttgaacctctgggcctggttgaggagcctgttaagacggctccgggaaaaaagaggccggtagagcactctcctgcggggccagattcctcctccggaactggaaagtcgggccaacagcctgcaagaaagagattgaattttggtcagactggagacgcagactccgtacctgacccccagcctctcggacagccaccagcagccccctctggtctgggaactaatacgatggcttcaggcagtggcgcaccaatggcagacaataacgagggcgccgacggagtgggtaattcctcgggaaattggcattgcgattccacatggatgggcgacagagtcatcaccaccagcacccgcacctgggctctgcccacctacaacaaccatctgtacaagcaaatttccagccagtctggagccagcaacgacaaccactactttggctacagcaccccttgggggtattttgacttcaacagattccactgccacttctccccacgtgactggcaaagactcatcaacaacaattggggattccggcccaaaagactcaacttcgagctctttaacattcaagtcaaggaggtcacgcagaatgacggtacgacgacgattgccaataaccttaccagcacggttcaggtgtttactgactcggagtaccagctcccgtacgtcctcggctcggcgcatcaaggatgcctcccgccgttcccagcagacgtcttcatggtgccacagtatggataccccaccctgaacaacgggagtcaggcggtaggacgctcttcattttactgcctggagtactttccttctcagatgctgcgtaccggaaacaactttaccttcagctacacctttgaggacgttccttttcacagcagctacgctcacagccagagtttggaccgtctcatgaatcctctcatcgaccagtacctgtattacttgagcagaacaaacactccaagcggaaccactacgcagtccaggcttcagttttctcaagccggagcgagtgacattcgggaccagtctaggaactggcttcctggaccctgttaccgccagcagcgagtatcaaagacagctgcggacaacaacaacagtgattactcgtggactggagctaccaagtatcacctcaatggaagagactctctggtgaatccgggcacagccatggccagccacaaggacgatgaagaaaagtattttcctcagagcggggttctcatcttcggaaaacaagactcgggaaaaactaatgtggacattgaaaaggtcatgattacagacgaagaggaaatcaggaccaccaatcccgtggctacggagcagtatggttctgtatctaccaatctccagagcggcaacacacaagcagctacctcagatgtcaacacacaaggcgttcttccaggcatggtctggcaggacagagacgtgtacctgcagggacccatctgggcaaagattccacacacggacggacactttcacccttctcctcttatgggaggatttggactgaagcaccctcccccgcagattctcatcaagagtaccccggtacctgcgaatccttctaccaccttcagcgcggcaaagtttgcttccttcatcacacagtactccacggggcaggtcagcgtggagatcgagtgggagctgcagaaagagaacagcaaacgctggaaccccgagatccagtatacctccaactacaacaagtctgttaatgtggactttactgtggacactaatggcgtgtattcagagcctcgccccattggcacaagatacctgactcgtaatctgtaa

SEQ ID NO: 11788 - DNA, 2208 bp, Artificial Sequence
  source: /note="Description of Artificial Sequence: Synthetic polynucleotide"
atggctgccgatggttatcttccagattggctcgaggacactctctctgaaggaataagacagtggtggaagctcaaacctggcccaccaccgccaaagcccgcagagcggcataaggacgacagcaggggtcttgtgcttcctgggtacaagtacctcggacccttcaacggactcgacaaaggagagccggtcaacgaggcagacgccgcggccctcgagcacgacaaggcctacgaccggcagctcgacagcggagacaacccgtacctcaagtacaaccacgccgacgcggagtttcaggagcgccttaaagaagatacgtcttttgggggcaacctcgcaagagcagtattccaggcgaaaaagagggttcttgaacctctgggcctggttgaggagcctgttaagacggctccgggaaaaaagaggccggtagagcactctcctgcggagccagattcctcctccggaactggaaagtcgggccaacagcctgcaagaaagagattgaattttggtcagactggagacgcagactccgtacctgacccccagcctctcggacagccaccagcagccccctctggtctgggaactaatacgatggcttcaggcagtggcgcaccaatggcagacaataacgagggcgccgacggagtgggtaattcctcgggaaattggcattgcgattccacatggatgggcgacagagtcatcaccaccagcacccgcacctgggctctgcccacctacaacaaccatctgtacaagcaaatttccagccagtctggagccagcaacgacaaccactactttggctacagcaccccttgggggtattttgacttcaacggattccactgccacttctccccacgtgactggcaaagactcatcaacaacaattggggattccggcccaaaagactcaacttcaagctctttaacattcaagtcaaggaggtcacgcagaatgacggtacgacgacgattgccaataaccttaccagcacggttcaggtgtttactgactcggagtaccagctcccgtacgtcctcggctcggcgcatcaaggatgcctcccgccgttcccagcagacgtcttcatggtgccacagtatggatacctcaccctgaacaacgggagtcaggcggtaggacgctcttcattttactgcctggagtactttccttctcagatgctgcgtaccggaaacaactttaccttcagctacacctttgaggacgttccttttcacagcagctacgctcacagccagagtttggaccgtcttatgaatcctctcatcgaccagtacctgtattacttgagcagaacaaacactccaagcggaaccactacgcagtccaggcttcagttttctcaagccggagcgagtgacattcgggaccagtctaggaactggcttcctggaccctgttaccgccagcagcgagtatcaaagacagctgcggacaacaacaacagtgattactcgtggactggagctaccaagtatcacctcaatggaagagactctctggtgaatccgggcacagccatggccagccacaaggacgatgaagaaaagtattttcctcagagcggggttctcatcttcggaaaacaagactcgggaaaaactaatgtggacattgaaaaggtcatgattacagacgaagaggaaatcaggaccaccaatcccgtggctacggagcagtatggttctgtatctaccaatctccagagcggcaacacacaagcagctacctcagatgtcaacacacaaggcgttcttccaggcatggtccggcaggacagagacgtgtacctgcagggacccatctgggcaaagattccacacacggacggacattttcacccttctcctcttatgggaggatttggactgaagcaccctcccccgcagattctcatcaagaataccccggtacctgcgaatccttctaccaccttcagcgcggcaaagtttgcttccttcatcacacagtactccacggggcaggtcagcgtggagatcgagtgggagccgcagaaagagaacagcaaacgctggaaccccgagatccagtatacctccaactacaacaagtctgttaatgtggactttactgtggacactaatggcgtgtattcagagcctcgccccattggcacaagatacctgactcgtaatctgtaa

SEQ ID NO: 11789 - DNA, 2208 bp, Artificial Sequence
  source: /note="Description of Artificial Sequence: Synthetic polynucleotide"
atggctgccgatggttatcttccagattggctcgaggacactctctctgaaggaataagacagtggtggaagctcaaacctggcccaccaccgccaaagcccgcagagcggcataaggacgacagcaggggtcttgtgcttcctgggtacaagtacctcggacccttcaacggactcgacaaaggagagccggtcaacgaggcagacgccgcggccctcgagcacgacaaggcctacgaccggcagctcgacagcggagacaacccgtacctcaagtacaaccacgccgacgcggagtttcaggagcgccttaaagaagatacgtcttttgggggcaacctcgcaagagcagtattccaggcgaaaaagagggttcttgaacctccgggcctggttgaggagcctgttaagacggctccgggaaaaaagaggccggtagagcactctcctgcggagccagattcctcctccggaactggaaagtcgggccaacagcctgcaagaaagagattgaattttggtcagaccggagacgcagactccgtacctgacccccagcctctcggacagccaccagcagccccctctggtctgggaactaatacgatggcttcaggcagtggcgcaccaatggcagacaataacgagggcgccgacggagtgggtaattcctcgggaaattggcattgcgattccacatggatgggcgacagagtcatcaccaccagcacccgcacctgggctctgcccacctacaacaaccatctgtacaagcaaatttccagccagtctggagccagcaacgacaaccactacttcggctacagcaccccttgggggtattttgacttcaacagattccactgccacttctccccacgtgactggcaaagactcatcaacaacaattggggattccggcccaaaagactcaacttcaagctctttaacattcaagtcaaggaggtcacgcagaatgacggtacgacgacgattgccaataaccttaccagcacggttcaggtgtttactgactcggagtaccagctcccgtacgtcctcggctcggcgcatcaaggatgcctcccgccgttcccagcagacgtcttcatggtgccacagtatggatacctcaccctgaacaacgggagtcaggcggtaggacgctcttcattttactgcctggagtactttccttctcagatgctgcgtaccggaaacaactttaccttcagctacacctttgaggacgttccttttcacagcagctacgctcacagccagagtttggaccgtcttatgaatcctctcatcgaccagtacctgtattacttgagcagaacaaacactccaagcggaaccactacgcagtccaggcttcagttttctcaagccggagcgagtgacattcgggaccagtctaggaactggcttcctggaccctgttaccgccagcagcgagtatcaaagacagctgcggacaacaacaacagtgattactcgtggactggagctaccaagtatcacctcaatggaagagactctctggtgaatccgggcacagccatggccagccacaaggacgatgaagaaaagtattttcctcagagcggggttctcatcttcggaaaacaagactcgggaaaaactaatgtggacattgaaaaggtcatgattacagacgaaggggaaatcaggaccaccaatcccgtggctacggagcagtatggctctgtatctaccaatctccagagcggcaacacacaagcagctacctcagatgtcaacacacaaggcgttcttccaggcatggtccggcaggacagagacgtgtacctgcagggacccatctgggcaaagattccacacacggacggacattttcacccttctcctcttatgggaggatttggactgaagcaccctcccccgcagattctcatcaagaataccccggtacctgcgaatccttctaccaccttcagcgcggcaaagtttgcttccttcatcacacagtactccacggggcaggtcagcgtggagatcgagtgggagccgcagaaagagaacagcaaacgctggaaccccgagatccagtatacctccaactacagcaagtctgttaatgtggactttactgtggacactaatggcgtgtattcagagcctcgccccattggcacaagatacctgactcgtaatctgtaa

SEQ ID NO: 11790 - DNA, 2208 bp, Artificial Sequence
  source: /note="Description of Artificial Sequence: Synthetic polynucleotide"
atggctgccgatggttatcttccagattggctcgaggacattctctctgaaggaataagacagtggtggaagctcaaacctggcccaccaccaccaaagcccgcagagcggcataaggacgacagcaggggtcttgtgcttcctgggtacaagtacctcggacccttcaacggactcgacaaaggagagccggtcaacgaggcagacgccgcggccctcgagcacgacaaggcctacgaccggcagctcgacagcggagacaacccgtacctcaagtacaaccacgccgacgcggagtttcaggagcgtcttaaagaagatacgtcttttgggggcaacctcggacgagcagtcttccaggcaaaaaagagggttcttgaacctctgggcctggttgaggaacctgttaagacggctccgggaaaaaagaggccggtagagcaatctcctgcggagccagactcctcctcgggaaccggaaaggcgggcaaccagcctgcaagaaagagattgaattttggtcagactggagacgcagactccgtacctgacccccagcctctcggacagccaccagcagccccctctggtctgggatctactacaatggctacaggcagtggcgcaccaatggcagacaataacgagggtgccgatggagtgggtaattcctcaggaaattggcattgcgattcccaatggttgggcgacagagtcatcaccaccagcacccgaacctgggccctgcccacctacaacaatcacctctacaagcaaatctccagccaatcaggagccagcaacgacaaccactactttggctacagcaccccctgggggtattttgacttcaacagattccactgccacttctccccacgtgactggcaaagactcatcaacaacaattggggattccggcccaaaagactcaacttcaagctctttaacattcaagtcaaggaggtcacgcagaatgacggtacgacgacgattgccaataaccttaccagcacggttcaggtgtttactgactcggagtaccagctcccgtacgtcctcggctcggcgcatcaaggatgcctcccgccgttcccagcagacgtcttcatggtgccacagtatggatacctcaccctgaacaacgggagtcaggcggtaggacgctcttcattttactgcctggagtactttccttctcagatgctgcgtaccggaaacaactttaccttcagctacacctttgaggacgttccttttcacagcagctacgctcacagccagagtttggaccgtcttatgaatcctctcatcgaccagtacctgtattacttgagcagaacaaacactccaagcggaaccactacgcagtccaggcttcagttttctcaagccggagcgagtgacattcgggaccagtctaggaactggcttcctggaccctgttaccgccagcagcgagtatcaaagacagctgcggacaacaacaacagtgattactcgtggactggagctaccaagtatcacctcaatggaagagactctctggtgaatccgggcacagccatggccagccacaaggacgatgaagaaaagtattttcctcagagcggggttctcatcttcggaaaacaagactcgggaaaaactaatgtggacattgaaaaggtcatgattacagacgaagaggaaatcaggaccaccaatcccgtggctacggagcagtatggttctgtatctaccaatctccagagcggcaacacacaagcagctacctcagatgtcaacacacaaggcgttcttccaggcatggtccggcaggacagagacgtgtacctgcagggacccatctgggcaaagattccacacacggacggacattttcacccttctcctcttatgggaggatttggactgaagcaccctcccccgcagattctcatcaagaataccccggtacctgcgaatccttctaccaccttcagcgcggcaaagtttgcttccttcatcacacagtactccacggggcaggtcagcgtggagatcgagtgggagccgcagaaagagaacagcaaacgctggaaccccgagatccagtatacctccaactacaacaagtctgttaatgtggactttactgtggacactaatggcgtgtattcagagcctcgccccattggcacaagatacctgactcgtaatctgtaa

SEQ ID NO: 11791 - DNA, 2208 bp, Artificial Sequence
  source: /note="Description of Artificial Sequence: Synthetic polynucleotide"
atggctgccgatggttatcttccagattggctcgaggacactctctctgaaggaataagacagtggtggaagctcaaacctggcccaccaccgccaaagcccgcagagcggcataaggacgacagcaggggtcttgtgcttcctgggtacaagtacctcggacccttcaacggactcgacaaaggagagccggtcaacgaggcagacgccgcggccctcgagcacgacaaggcctacgaccggcagctcgacagcggagacaacccgtacctcaagtacaaccacgccgacgcggagtttcaggagcgccttaaagaagatacgtcttttgggggcaacctcgcaagagcagtattccaggcgaaaaagagggttcttgaacctctgggcctggttgaggagcctgttaagacggctccgggaaaaaagaggccggtagagcactctcctgcggagccagattcctcctccggaactggaaagtcgggccaacagcctgcaagaaagagattgaattttggtcagactggagacgcagactccgtacctgacccccagcctctcggacagccaccagcagccccctctggtctgggaactaatacgatggcttcaggcagtggcgcaccaatggcagacaataacgagggcgccgacggagtgggtaattcctcgggaaattggcattgcgattccacatggatgggcgacagagtcatcaccaccagcacccgcacctgggctctgcccacctacaacaaccatctgtacaagcaaatttccagccagtctggagccagcaacgacaaccactacttcggctacagcaccccttgggggtattttgacttcaacagattccactgccacttctccccacgtgactggcaaagactcatcaacaacaattggggattccggcccaaaagactcaacttcaagctctttaacattcaagtcaaggaggtcacgcagaatgacggtacgacgacgattgccaataaccttaccagcacggttcaggtgtttactgactcggagtaccagctcccgtacgtcctcggctcggcgcatcaaggatgcctcccgccgttcccagcagacgtcttcatggtgccacagtatggatacctcaccctgaacaacgggagtcaggcggtaggacgctcttcattttactgcctggagtactttccttctcagatgctgcgtaccggaaacaactttaccttcagctacacctttgaggacgttccttttcacagcagctacgctcacagccagagtttggaccgtcttatgaatcctctcatcgaccagtacctgtattacttgagcagaacaaacactccaagcggaaccactacgcagtccaggcttcagttttctcaagccggagcgagtgacattcgggaccagtctaggaactggcttcctggaccctgttaccgccagcagcgagtatcaaagacagctgcggacaacaacaacagtgattactcgtggactggagctaccaagtatcacctcaatggaagagactctctggtgaatccgggcacagccatggccagccacaaggacgatgaagaaaagtattttcctcagagcggggttctcatcttcggaaaacaagactcgggaaaaactaatgtggacattgaaaaggtcatgattacagacgaagaggaaatcaggaccaccaatcccgtggctacggagcagtatggttctgtatctaccaatctccagagcggcaacacacaagcagctacctcagatgtcaacacacaaggcgttcttccaggcacggtccggcaggacagagacgtgtacctgcagggacccatctgggcaaagattccacacacggacggacattttcacccttctcctcttatgggaggatttggactgaagcaccctcccccgcagattctcatcaagaataccccggtacctgcgaatccttctaccaccttcagcgcggcaaagtttgcttccttcatcacacagtactccacggggcaggtcagcgtggagatcgagtgggagccgcagaaagagaacagcaaacgctggaaccccgagatccagtatacctccaactacaacaagtctgttaatgtggactttactgtggacactaatggcgtgtattcagagcctcgccccattggcacaagatacctgactcgtaatctgtaa

SEQ ID NO: 11792 - DNA, 2208 bp, Artificial Sequence
  source: /note="Description of Artificial Sequence: Synthetic polynucleotide"
atggctgccgatggttatcttccagattggctcgaggacattctctctgaaggaataagacagtggtggaagctcaaacctggcccaccaccaccaaagcccgcagagcggcataaggacgacagcaggggtcttgtgcttcctgggtacaagtacctcggacccttcaacggactcgacaaaggagagccggtcaacgaggcagacgccgcggccctcgagcacgacaaggcctacgaccggcagctcgacagcggagacaacccgtacctcaagtacaaccacgccgacgcggagtttcaggagcgtcttaaagaagatacgtcttttgggggcaacctcggacgagcagtcttccaggcaaaaaagagggttcttgaacctctgggcctggttgaggarcctgttaagacggctccgggaaaaaagaggccggtagagcactctcctgcggagccagattcctcctccggaactggaaagtcgggccaacagcctgcaagaaagagattgaattttggtcagactggagacgcagactccgtacctgacccccagcctctcggacagccaccagcagccccctctggtctgggaactaatacgatggcttcaggcagtggcgcaccaatggcagacaataacgagggcgccgacggagtgggtaattcctcgggaaattggcattgcgattccacatggatgggcgacagagtcatcaccaccagcacccgcacctgggctctgcccacctacaacaaccatctgtacaagcaaatttccagccagtctggagccagcaacgacaaccactacttcggctacagcaccccttgggggtattttgacttcaacagattccactgccacttctccccacgtgactggcaaagactcatcaacaacaattggggattccggcccaaaagactcaacttcaagctctttaacattcaagtcaaggaggtcacgcagaatgacggtacgacgacgattgccaataaccttaccagcacggttcaggtgtttactgactcggagtaccagctcccgtacgtcctcggctcggcgcatcaaggatgcctcccgccgttcccagcagacgtcttcatggtgccacagtatggatacctcaccctgaacaacgggagtcaggcggtaggacgctcttcattttactgcctggagtactttccttctcagatgctgcgtaccggaaacaactttaccttcagctacacctttgaggacgttccttttcacagcagctacgctcacagccagagtttggaccgtcttatgaatcctctcatcgaccagtacctgtattacttgagcagaacaaacactccaagcggaaccactacgcagtccaggcttcagttttctcaagccggagcgagtgacattcgggaccagtctaggaactggcttcctggaccctgttaccgccagcagcgagtatcaaagacagctgcggacaacaacaacagtgattactcgtggactggagctaccaagtatcacctcaatggaagagactctctggtgaatccgggcacagccatggccagccacaaggacgatgaagaaaagtattttcctcagagcggggttctcatcttcggaaaacaagactcgggaaaaactaatgtggacattgaaaaggtcatgattacagacgaagaggaaatcaggaccaccaatcccgtggctacggagcagtatggttctgtatctaccaatctccagagcggcaacacacaagcagctacctcagatgtcaacacacaaggcgttcttccaggcatggtccggcaggacagagacgtgtacctgcagggacccatctgggcaaagattccacacacggacggacattttcacccttctcctcttatgggaggatttggactgaagcaccctcccccgcagattctcatcaagaataccccggtacctgcgaatccttctaccaccttcagcgcggcaaagtttgcttccttcatcacacagtactccacggggcaggtcagcgtggagatcgagtgggagccgcagaaagagaacagcaaacgctggaaccccgagatccagtatacctccaactacaacaagtctgttaatgtggactttactgtggacactaatggcgtgtattcagagcctcgccccattggcacaagatacctgactcgtaatctgtaa

SEQ ID NO: 11793 - DNA, 2208 bp, Artificial Sequence
  source: /note="Description of Artificial Sequence: Synthetic polynucleotide"
atggctgccgatggttatcttccagattggctcgaggacactctctctgaaggaataagacagtggtggaagctcaaacctggcccaccaccgccaaagcccgcagagcggcataaggacgacagcaggggtcttgtgcttcctgggtacaagtacctcggacccttcaacggactcgacaaaggagagccggtcaacgaggcagacgccgcggccctcgagcacgacaaggcctacgaccggcagctcgacagcggagacaacccgtacctcaagtacaaccacgccgacgcggagtttcaggagcgccttaaagaagatacgtcttttgggggcaacctcgcaagagcagtattccaggcgaaaaagagggttcttgaacctctgggcctggttgaggagcctgttaagacggctccgggaaaaaagaggccggtagagcactctcctgcggagtcagattcctcctccggaactggaaagtcgggccaacagcctgcaagaaagagattgaattttggtcagactggagacgcagactccgtacctgacccccagcctctcggacagccaccagcagccccctctggtctgggaactaatacgatggcttcaggcagtggcgcaccaatggcagacaataacgagggcgccgacggagtgggtaattcctcgggaaattggcattgcgattccacatggatgggcgacagagtcatcaccaccagcacccgcacctgggctctgcccacctacaacaaccatctgtacaagcaaatttccagccagtctggagccagcaacgacaaccactactttggctacagcaccccttgggggtattttgacttcaacagattccactgccacttctccccacgtgactggcaaagactcatcaacaacaattggggattccggcccaaaagactcaacttcaagctctttaacattcaagtcaaggaggtcacgcagaatgacggtacgacgacgattgccaataaccttaccagcacggttcaggtgtttactgactcggagtaccagctcccgtacgtcctcggctcggcgcatcaaggatgcctcccgccgttcccagcagacgtcttcatggtgccacagtatggatacctcaccctgaacaacgggagtcaggcggtaggacgctcttcattttactgcctggagtactttccttctcagatgctgcgtaccggaaacaactttaccttcagctacacctttgaggacgttccttttcacagcagctacgctcacagccagagtttggaccgtctcatgaatcctctcatcgaccagtacctgtattacttgagcagaacaaacactccaagcggaaccactacgcagtccaggcttcagttttctcaagccggagcgagtgacattcgggaccagtctaggaactggcttcctggaccctgttaccgccagcagcgagtatcaaagacagctgcggacaacaacaacagtgattactcgtggactggagctaccaagtatcacctcaatggaagagactctctggtgaatccgggcacagccatggccagccacaaggacgatgaagaaaagtattttcctcagagcggggttctcatcttcggaaaacaagactcgggaaaaactaatgtggacattgaaaaggtcatgattacagacgaagaggaaatcaggaccaccaatcccgtggctacggagcagtatggttctgtatctaccaatctccagagcggcaacacacaagcagctacctcagatgtcaacacacaaggcgttcttccaggcatggtctggcaggacagagacgtgtacctgcagggacccatctgggcaaagattccacacacggacggacattttcacccttctcctcttatgggaggatttggactgaagcaccctcccccgcagattctcatcaagaataccccggtacctgcgaatccttctaccaccttcagcgcggcaaagtttgcttccttcatcacacagtactccacggggcaggtcagcgtggagatcgagtgggagctgcagaaagagaacagcaaacgctggaaccccgagatccagtatacctccaactacaacaagtctgttaatgtggactttactgtggacactaatggcgtgtattcagagcctcgccccattggcacaagatacctgactcgtaatctgtaa

SEQ ID NO: 11794 - DNA, 2208 bp, Artificial Sequence
  source: /note="Description of Artificial Sequence: Synthetic polynucleotide"
atggctgccgatggttatcttccagattggctcgaggacactctctctgaaggaataagacagtggtggaagctcaaacctggcccaccaccgccaaagcccgcagagcggcataaggacgacagcaggggtcttgtgcttcctgggtacaagtacctcggacccttcaacggactcgacaaaggagagccggtcaacgaggcagacgccgcggccctcgagcacgacaaggcctacgaccggcagctcgacagcggagacaacccgtacctcaagtacaaccacgccgacgcggagtttcaggagcgccttaaagaagatacgtcttttgggggcaacctcgcaagagcagtattccaggcgaaaaagagggttcttgaacctctgggcctggttgaggagcctgttaagacggctccgggaaaaaagaggccggtagagcactctcctgcggagccagattcctcctccggaactggaaagtcgggccaacagcctgcaagaaagagattgaattttggtcagactggagacgcagactccgtacctgacccccagcctctcggacagccaccagcagccccctctggtctgggaactaatacgatggcttcaggcagtggcgcaccaatggcagacaataacgagggcgccgacggagtgggtaattcctcgggaaattggcattgcgattccacatggatgggcgacagagtcatcaccaccagcacccgcacctgggctctgcccacctacaacaaccatctgtacaagcaaatttccagccagtctggagccagcaacgacaaccactactttggctacagcaccccttgggggtattttgacttcaacagattccactgccacttctccccacgtgactggcaaagactcatcaacaacaattggggattccggcccaaaagactcaacttcaagctctttaacattcaagtcaaggaggtcacgcagaatgacggtacgacgacgattgccaataaccttaccagcacggttcaggtgtttactgactcggagtaccagctcccgtacgtcctcggctcggcgcatcaaggatgcctcccgccgttcccagcagacgtcttcatggtgccacagtatggatacctcaccctgaacaacgggagtcaggcggtaggacgctcttcattttactgcctggagtactttccttctcagatgctgcgtaccggaaacaactttaccttcagctacacctttgaggacgttccttttcacagcagctacgctcacagccagagtttggaccgtcttatgaatcctctcatcgaccagtacctgtattacttgagcagaacaaacactccaagcggaaccactacgcagtccaggcttcagttttctcaagccggagcgagtgacattcgggaccagtctaggaactggcttcctggaccctgttaccgccagcagcgagtatcaaagacagctgcggacaacaacaacagtgattactcgtggactggagctaccaagtatcacctcaatggaagagactctctggtgaatccgggcacagccatggccagccacaaggacgatgaagaaaagtattttcctcagagcggggttctcatcttccggaaacaagactcgggaaaaactaatgtggacattgaaaaggtcatgattacagacgaagaggaaatcaggaccaccaatcccgtggctacggagcagtatggttctgtatctaccaatctccagagcggcaacacacaagcagctacctcagatgtcaacacacaaggcgttcttccaggcatggtccggcaggacagagacgtgtacctgcagggacccatctgggcaaagattccacacacggacggacattttcacccttctcctcttatgggaggatttggactgaagcaccctcccccgcagattctcatcaagaataccccggtacctgcgaatccttctaccaccttcagcgcggcaaagtttgcttccttcatcacacagtactccacggggcaggtcagcgtggagatcgagtgggagccgcagaaagagaacagcaaacgctggaaccccgagatccagtatacctccaactacaacaagtctgttaatgtggactttactgtggacactaatggcgtgtattcagagcctcgccccattggcacaagatacctgactcgtaatctgtaa

SEQ ID NO: 11795 - DNA, 2208 bp, Artificial Sequence
  source: /note="Description of Artificial Sequence: Synthetic polynucleotide"
atggctgccgatggttatcttccagattggctcgaggacactctctctgaaggaataagacagtggtggaagctcaaacctggcccaccaccaccaaagcccgcagagcggcatcaggacgacagcaggggtcttgtgcttcctgggtacaagtacctcggacccttcaacggactcgacaagggagagccggtcaacgaggcagacgccgcggccctcgagcacgacaaggcctacgaccggcagctcgacagcggagacaacccgtacctcaagtacaaccacgccgacgcggagtttcaggagcgtcttaaagaagatacgtcttttgggggcaacctcggacgagcagtcttccaggcgaaaaagagggttcttgaacctctgggcctggttgaggaacctgttaagacggctccgggaaaaaagaggccggtagagcattctcctgcggagccagactcctcctcgggaaccggaaaggcgggccagcagcctgcgagaaagagattgaatttcggtcagactggagacgcagactccgtacctgacccccagcctctcggacagccaccagcagccccctccggtctgggaactaatacgacggctacaggcagtggcgcaccaatggcagacaataacgagggcgccgacggagtgggtaattcctcgggaaattggcattgcgattccacatggatgggcgacagagtcatcaccaccagcacccgaacctgggccctgcccacctacaacaaccacctctacaagcaaatctccagccaatctggagcctcaaacgacaaccactactttggctacagcaccccttgggggtattttgacttcaacagattccactgtcacttctccccacgtgactggcaaagactcatcaacaacaactggggattccgacccaagagactcaacttcaagctctttaacattcaagtcaaagaggtcacgcagaatgacggtacgacgacgattgccaataaccttaccagcacggttcaagtctttgctgactcggagtaccagctcccgtacgtcctcggctcggcgcatcaaggatgcctcccgccgtttccagcagacgtcttcatggtgccacagtatggatacctcaccctgaacaacgggagtcaggcggtaggacgctcttccttttactgcctggagtactttccttctcagatgctgcgtaccggaaacaactttaccttcagctacacctttgaggacgttcctttccacagcagctacgctcacagccagagtttggaccggctgatgaatcctctgatcgaccagtatctgtattacttgagcaaaacaaacgctccaagcggaaccaccacgatgtccaggcttcagttttctcaggccggagcgagtgacattcgggaccagtctaggaactggcttcctggaccctgttaccgccagcagcgagtatcaaaaacagctgcggataacaacaacagtgattattcgtggactggagctaccaagtaccacctcaatggaagagactctctggtgaatccgggcccagctatggccagccacaaggacgatgaagaaaaatattttcctcagagcggggttctcatctttggaaaacaagactcgggaaaaactaatgtggacattgaaaaggtcatgattacagacgaagaggaaatcaggaccaccaatcccgtggctacggagcagtatggttctgtatctaccaacctccagagcggcaacacacaggcagccaccacagatgtcaacacacaaggcgttcttccaggcatggtctggcaggacagagacgtgtacctgcaaggacccatctgggcaaagattcctcacacggacggacactttcacccttctcccctcatgggaggatttggactcaaacaccctcctccgcaaatcctcatcaagaatacccccgtacctgcgaatccttcgaccacattcagcgcggcaaagtttgcttctttcatcacacagtactctacggggcaggtcagcgtggagattgagtgggagctgcagaaggagaacagcaaacgctggaaccccgaaatccagtacacttccaactacaacaagtctgttaatgtggactttactgtggacactaatggtgtgtattcagagcctcgccccattggcacaagatacctgactcgtaatctgtaa

SEQ ID NO: 11796 - DNA, 2208 bp, Artificial Sequence
  source: /note="Description of Artificial Sequence: Synthetic polynucleotide"
atggctgccgatggttatcttccagattggctcgaggacactctctctgaaggaataagacagtggtggaagctcaaacctggcccaccaccaccaaagcccgcagagcggcatcaggacgacagcaggggtcttgtgcttcctgggtacaagtacctcggacccttcaacggactcgacaagggagagccggtcaacgaggcagacgccgcggccctcgagcacgacaaggcctacgaccggcagctcgacagcggagacaacccgtacctcaagtacaaccacgccgacgcggagtttcaggagcgtcttaaagaagatacgtcttttgggggcaacctcggacgagcagtcttccaggcgaaaaagagggttcttgaacctctgggcctggttgaggaacctgttaagacggctccgggaaaaaagaggccggtagagcattctcctgcggagccagactcctcctcgggaaccggaaaggcgggccagcagcctgcgagaaagagattgaatttcggtcagactggagacgcagactccgtacctgacccccagcctctcggacagccaccagcagccccctctggtctgggaactaatacgatggctacaggcagtggcgcaccaatggcagacaataacgagggcgccgacggagtgggtaattcctcgggaaattggcattgcgattccacatggatgggcgacagagtcatcaccaccagcacccgaacctgggccctgcccacctacaacaaccacctctacaagcaaatctccagccaatctggagcctcaaacgacaaccactactttggctacagcaccccttgggggtattttgacttcaacagattccactgtcacttctccccacgtgactggcaaagactcatcaacaacaactggggattccgacccaagagactcaacttcaagctctttaacattcaagtcaaagaggtcacgcagaatgacggtacgacgacgattgccaataaccttaccagcacggttcaagtctttactgactcggagtaccagctcccgtacgtcctcggctcggcgcatcaaggatgcctcccgccgtttccagcagacgtcttcatggtgccacagtatggatacctcaccctgaacaacgggagtcaggcggtaggacgctcttccttttactgcctggagtactttccttctcagatgctgcgtaccggaaacaactttaccttcagctacacctttgaggacgttcctttccacagcagctacgctcacagccagagtttggaccggctgatgaatcctctgatcgaccagtatctgtattacttgagcaaaacaaacgctccaagcggaaccaccacgatgtccaggcttcagttttctcaggccggagcgagtgacattcgggaccagtctaggaactggcttcctggaccctgttaccgccagcagcgagtatcaaaaacagctgcggataacaacaacagtgattattcgtggactggagctaccaagtaccaccccaatggaagagactctctggtgaatccgggcccagctatggccagccacaaggacgatgaagaaaaatattttcctcagagcggggttctcatctttggaaaacaagactcgggaaaaactaatgtggacattgaaaaggtcatgattacagacgaagaggaaatcaggaccaccaatcccgtggctacggagcagtatggttctgtatctaccaacctccagagcggcaacacacaggcagccaccacagatgtcaacacacaaggcgttcttccaggcatggtctggcaggacagagacgtgtacctgcacggacccatctgggcaaagattcctcacacggacggacactttcacccttctcccctcatgggaggatttggactcaaacaccctcctccgcaaatcctcatcaagaatacccccgtacctgcgaatccttcgaccacattcagcgcggcaaagtttgcttctttcatcacacagtactctacggggcaggtcagcgtggagattgagtgggagctgcagaaggagaacagcaaacgctggaaccccgaaatccagtacacttccaactacaacaagtctgttaatgtggactttactgtggacactaatggtgtgtattcagagcctcgccccattggcacaagatacctgactcgtaatctgtaa

SEQ ID NO: 11797 - DNA, 2208 bp, Artificial Sequence
  source: /note="Description of Artificial Sequence: Synthetic polynucleotide"
atggctgccgatggttatcttccagattggctcgaggacactctctctgaaggaataagacagtggtggaagctcaaacctggcccaccaccaccaaagcccgcagagcggcatcaggacgacagcaggggtcttgtgcttcctgggtacaagtacctcggacccttcaacggactcgacaagggagagccggtcaacgaggcagacgccgcggccctcgagcacgacaaggcctacgaccggcagctcgacagcggagacaacccgtacctcaagtacaaccacgccgacgcggagtttcaggagcgtcttaaagaagatacgtcttttgggggcaacctcggacgagcagtcttccaggcgaaaaagagggttcttgaacctctgggcctggttgaggaacctgttaagacggctccgggaaaaaagaggccggtagagcattctcctgcggagccagactcctcctcgggaaccggaaaggcgggccagcagcctgcgagaaagagattgaatttcggtcagactggagacgcagactccgtacctgacccccagcctctcggacagccaccagcagccccctctggtctgggaactaatacgatggctacaggcagtggcgcaccaatggcagacaataacgagggcgccgacggagtgggtaattcctcgggaaattggcattgcgattccacatggatgggcgacagagccatcaccaccagcacccgaacctgggccctgcccacctacaacaaccacctctacaagcaaatctccagccaatctggagcctcaaacgacaaccactactttggctacagcaccccttgggggtattttgacttcaacagattccactgtcacttctccccacgtgactggcaaagactcatcaacaacaactggggattccgacccaagagactcaacttcaagctctttaacattcaagtcaaagaggtcacgcagaatgacggtacgacgacgattgccaataaccttaccagcacggttcaagtctttactgactcggagtaccagctcccgtacgtcctcggctcggcgcatcaaggatgcctcccgccgtttccagcagacgtcttcatggtgccacagtatggatacctcaccctgaacaacgggagtcaggcggtaggacgctcttccttttactgcctggagtactttccttctcagatgctgcgtaccggaaacaactttaccttcagctacacctttgaggacgttcctttccacagcagctacgctcacagccagagtttggaccggctgatgaatcctctgatcgaccagtatctgtattacttgagcaaaacaaacgctccaagcggaaccaccacgatgtccaggcttcagttttctcaggccggagcgagtgacattcgggaccagtctaggaactggcttcctggaccctgttaccgccagcagcgagtatcaaaaacagctgcggataacaacaacagtgattattcgtggactggagctaccaagtaccacctcaatggaagagactctctggtgaatccgggcccagctatggccagccacaaggacgatgaagaaaaatattttcctcagagcggggttctcatctttggaaaacaagactcgggaaaaactaatgtggacattgaaaaggtcatgattacggacgaagaggaaatcaggaccaccaatcccgtggctacggagcagtatggttctgtatctaccaacctccagagcggcaacacacaggcagccaccacagatgtcaacacacaaggcgttcttccaggcatggtctggcaggacagagacgtgtacctgcaaggacccatctgggcaaagattcctcacacggacggacactttcacccttctcccctcatgggaggatttggactcaaacaccctcctccgcaaatcctcatcaagaatacccccgtacctgcgaatccttcgaccacattcagcgcggcaaagcttgcttctttcatcacacagtactctacggggcaggtcagcgtggagattgagtgggagctgcagaaggagaacagcaaacgctggaaccccgaaatccagtacacttccaactacaacaagtctgttaatgtggactttactgtggacactaatggtgtgtattcagagcctcgccccattggcacaagatacctgactcgtaatctgtaa

SEQ ID NO: 11798 - DNA, 2208 bp, Artificial Sequence
  source: /note="Description of Artificial Sequence: Synthetic polynucleotide"
atggctgccgatggttatcttccagattggctcgaggacactctctctgaaggaataagacagtggtggaagctcaaacctggcccaccaccaccaaagcccgcagagcggcatcaggacgacagcaggggtcttgtgcttcctgggtacaagtacctcggacccttcaacggactcgacaagggagagccggtcaacgaggcagacgccgcggccctcgagcacgacaaggcctacgaccggcagctcgacagcggagacaacccgtacctcaagtacaaccacgccgacgcggagtttcaggagcgtcttaaagaagatacgtcttttgggggcaacctcggacgagcagtcttccaggcgaaaaagagggttcttgaacctctaggcctggttgaggaacctgttaagacggctccgggaaaaaagaggccggtagagcattctcctgcggagccagactcctcctcgggaaccggaaaggcgggccagcagcctgcgagaaagagattgaatttcggtcagactggagacgcagactccgtacctgacccccagcctcccggacagccaccagcagccccctctggtctgggaactaatacgatggctacaggcagtggcgcaccaatggcagacaataacgagggcgccgacggagtgggtaattcctcgggaaattggcattgcgattccacatggatgggcgacagagtcatcaccaccagcacccgaacctgggccctgcccacctacaacaaccacctctacaagcaaatctccagccaatctggagcctcaaacgacaaccactactttggctacagcaccccttgggggtattttgacttcaacagattccactgtcacttctccccacgtgactggcaaagactcatcaacaacaactggggattccgacccaagagactcaacttcaagctctttaacattcaagtcaaagaggtcacgcagaatgacggtacgacgacgattgccaataaccttaccagcacggttcaagtctttactgactcggagtaccagctcccgtacgtcctcggctcggcgcatcaaggatgcctcccgccgtttccagcagacgtcttcatggtgccacagtatggatacctcaccctgaacaacgggagtcaggcggtaggacgctcttccttttactgcctggagtactttccttctcagatgctgcgtaccggaaacaactttaccttcagctacacctttgaggacgttcctttccacagcagctacgctcacagccagagtttggaccggctgatgaatcctctgatcgaccagtatctgtattacttgagcaaaacaaacgctccaagcggaaccaccacgatgtccaggcttcagttttctcaggccggagcgagtgacattcgggaccagtctaggaactggcttcctggaccctgttaccgccagcagcgagtatcaaaaacagctgcggataacaacaacagtgattattcgtggactggagctaccaagtaccacctcaatggaagagactctctggtgaatccgggcccagctatggccagccacaaggacgatgaagaaaaatattttcctcagagcggggttctcatctttggaaaacaagactcgggaaaaactaatgtggacattgaaaaggtcatgattacagacgaagaggaagtcaggaccaccaatcccgtggctacggagcagtatggttctgtatctaccaacctccagagcggcaacacacaggcagccaccacagatgtcaacacacaaggcgttcttccaggcatggtctggcaggacagagacgtgtacctgcaaggacccatctgggcaaagattcctcacacggacggacactttcacccttctcccctcatgggaggatttggactcaaacaccctcctccgcaaatcctcatcaagaatacccccgtacctgcgaatccttcgaccacattcagcgcggcaaagtttgcttctttcatcacacagtactctacggggcaggtcagcgtggagattgagtgggagctgcagaaggagaacagcaaacgctggaaccccgaaatccagtacacttccaactacaacaagtctgttaatgtggactttactgtggacactaatggtgtgtattcagagcctcgccccattggcacaggatacctgactcgtaatctgtaa

SEQ ID NO: 11799 - DNA, 2208 bp, Artificial Sequence
  source: /note="Description of Artificial Sequence: Synthetic polynucleotide"
atggctgccgatggttatcttccagattggctcgaggacactctctctgaaggaataagacagtggtggaagctcaaacctggcccaccaccaccaaagcccgcagagcggcatcaggacgacagcaggggtcttgtgcttcctgggtacaagtacctcggacccttcaacggactcgacaagggagagccggtcaacgaggcagacgccgcggccctcgagcacgacaaggcctacgaccggcagctcgacagcggagacaacccgtacctcaagtacaaccacgccgacgcggagtttcaggagcgtcttaaagaagatacgtcttttgggggcaacctcggacgagcagtcttccaggcgaaaaagagggttcttgaacctctgggcctggttgaggaacctgttaagacggctccgggaaaaaagaggccggtagagcattctcctgcggagccagactcctcctcgggaaccggaaaggcgggccagcagcctgcgagaaagagattgaatttcggtcagactggagacgcagactccgtacctgacccccagcctctcggacagccaccagcagccccctctggtctgggaactaatacggtggctacaggcagtggcgcaccaatggcagacaataacgagggcgccgacggagtgggtaattcctcgggaaattggcattgcgattccacatggatgggcgacagagtcatcaccaccagcacccgaacctgggccctgcccacctacaacaaccacctctacaagcaaatctccagccaatctggagcctcaaacgacaaccactactttggctacagcaccccttgggggtattttgacttcaacagattccactgtcacttctccccacgtgactggcaaagactcatcaacaacaactggagattccgacccaagagactcaacttcaagctctttaacattcaagtcaaagaggtcacgcagaatgacggtacgacgacgattgccgataaccttaccagcacggttcaagtctttactgactcggagtaccagctcccgtacgtcctcggctcggcgcatcaaggatgcctcccgccgtttccagcagacgtcttcatggtgccacagtatggatacctcaccctgaacaacgggagtcaggcggtaggacgctcttccttttactgcctggagtactttccttctcagatgctgcgtaccggaaacaactttaccttcagctacacctttgaggacgttcctctccacagcagctacgctcacagccagagtttggaccggctgatgaatcctctgatcgaccagtatctgtattacttgagcaaaacaaacgctccaagcggaaccaccacgatgtccaggcttcagttttctcaggccggagcgagtgacattcgggaccagtctaggaactggcttcctggaccctgttaccgccagcagcgagtatcaaaaacagctgcggataacaacaacagtgattattcgtggactggagctaccaagtaccacctcaatggaagagactctctggtgaatccgggcccagctatggccagccacaaggacgatgaagaaaaatattttcctcagagcggggttctcatctttggaaaacaagactcgggaaaaactaatgtggacattgaaaaggtcatgattacagacgaagaggaaatcaggaccaccaatcccgtggctacggagcagtatggttctgtatctaccaacctccagagcggcaacacacaggcagccaccacagatgtcaacacacaaggcgttcttccaggcatggtctggcaggacagagacgtgtacctgcaaggacccatctgggcaaagattcctcacacggacggacactttcacccttctcccctcatgggaggatttggactcaaacaccctcctccgcaaatcctcatcaagaatacccccgtacctgcgaatccttcgaccacattcagcgcggcaaagcttgcttctttcatcacacagtactctacggggcaggtcagcgtggagattgagtgggagctgcagaaggagaacagcaaacgctggaaccccgaaatccagtacacttccaactacaacaagtctgttaatgtggactttactgcggacactaatggtgtgtattcagagcctcgccccattggcacaagatacctgactcgtaatctgtaa

SEQ ID NO: 11800 - DNA, 2208 bp, Artificial Sequence
  source: /note="Description of Artificial Sequence: Synthetic polynucleotide"
atggctgccgatggttatcttccagattggctcgaggacactctctctgaaggaataagacagtggtggaagctcaaacctggcccaccaccaccaaagcccgcagagcggcatcaggacgacagcaggggtcttgtgcttcctgggtacaagtacctcggacccttcaacggactcgacaagggagagccggtcaacgaggcagacgccgcggccctcgagcacgacaaggcctacgaccggcagctcgacagcggagacaacccgtacctcaagtacaaccacgccgacgcggagtttcaggagcgtcttaaagaggatacgtcttttgggggcaacctcggacgagcagtcttccaggcgaaaaagagggttcttgaacctctgggcctggttgaggaacctgttaagacggctccgggaaaaaagaggccggtagagcattctcctgcggagccagactcctcctcgggaaccggaaaggcgggccagcagcctgcgagaaagagatcgaatttcggtcagactggagacgcagactccgtacctgacccccagcctctcggacagccaccagcagccccctctggtctgggaactaatacgatggctacaggcagtggcgcaccaatggcagacaataacgagggcgccgacggagtgggtaattcctcgggaaattggcattgcgattccacatggatgggcgacagagtcatcaccaccagcacccgaacctgggccctgcccacctacaacaaccacctctacaagcaaatctccagccaatctggagcctcaaacgacaaccactactttggctacagcaccccttgggggtattttgacttcaacagattccactgtcacttctccccacgtgactggcaaagactcatcaacaacaactggggattccgacccaagagactcaacttcaagctctttaacattcaagtcaaagaggtcgcgcagaatgacggtacgacgacgattgccaataaccttaccagcacggttcaagtctttactgactcggagtaccagctcccgtacgtcctcggctcggcgcatcaaggatgcctcccgccgtttccagcagacgtcttcatggtgccacagtatggatacctcaccctgaacaacgggagtcaggcggtaggacgctcttccttttactgcctggagtactttccttctcagatgctgcgtaccggaaacaactttaccttcagctacacctttgaggacgttcctttccacagcagctacgctcacagccagagtttggaccggctgatgaatcctctgatcgaccagtatctgtattacttgagcaaaacaaacgctccaagcggaaccaccacgatgtccaggcttcagttttctcaggccggagcgagtgacattcgggaccagtctaggaactggcttcctggaccctgttaccgccagcagcgagtatcaaaaacagctgcggataacaacaacagtgattattcgtggactggagctaccaagtaccacctcaatggaagagactctctggtgaatccgggcccagctatggccagccacaaggacgatgaagaaaaatattttcctcagagcggggttctcatctttggaaaacaagactcgggaaaaactaatgtggacattaaaaaggtcatgattacagacgaagaggaaatcaggaccaccaatcccgtggctacggagcagtatggttctgtatctaccaacctccagagcggcaacacacaggcagccaccacagatgtcaacacacaaggcgttcttccaggcatggtctggcaggacagagacgtgtacctgcaaggacccatctgggcaaagatccctcacacggacggacactttcacccttctcccctcatgggaggatttggactcaaacaccctcctccgcaaatcctcatcaagaatacccccgtacctgcgaatccttcgaccacattcagcgcggcaaagtttgcttctttcatcacacagtactctacggggcaggtcagcgtggagattgagtgggagctgcagaaggagaacagcaaacgctggaaccccgaaatccagtacacttccaactacaacaagtctgttaatgtggactttactgtggacactaatggtgtgtattcagagcctcgccccattggcacaagatacctgactcgtaatctgtaa

SEQ ID NO: 11801 - DNA, 2205 bp, Artificial Sequence
  source: /note="Description of Artificial Sequence: Synthetic polynucleotide"
atggctgccgatggttatcttccagattggctcgaggacactctctctgaaggaataagacagtggtggaagctcaaacctggcccaccaccaccaaagcccgcagagcggcatcaggacgacagcaggggtcttgtgcttcctgggtacaagtacctcggacccttcaacggactcgacaagggagagccggtcaacgaggcagacgccgcggccctcgagcacgacaaggcctacgaccggcagctcgacagcggagacaacccgtacctcaagtacaaccacgccgacgcggagtttcaggagcgtcttaaagaagatacgtcttttgggggcaacctcggacgagcagtcttccaggcgaaaaagagggttcttgaacctctgggcctggttgaggaacctgttaagacggctccgggaaaaaagaggccggtagagcattctcctgcggagccagactcctcctcgggaaccggaaaggcgggccagcagcctgcgagaaagagattgaatttcggtcagactggagacgcagactccgtacctgacccccagcctctcggacagccaccagcagccccctctggtctgggaactaatacgatggctacaggcagtggcgcaccaatggcagacaataacgagggcgccgacggagtgggtaattcctcgggaaattggcattgcgattccacatggatgggcgacagagtcatcaccaccagcacccgaacctgggccctgcccacctacaacaaccacctctacaagcaaatctccagccaatctggagcctcaaacgacaaccactactttggctacagcaccccttgggggtattttgacttcaacagattccactgtcacttctccccacgtgactggcaaagactcatcaacaactggggattccgacccaagagactcaacttcaagctctttaacattcaagtcaaagaggtcacgcagaatgacggtacgacgacgattgccaataaccttaccagcacggttcaagtctttactgactcggagtaccagctcccgtacgtcctcggctcggcgcatcaaggatgcctcccgccgtttccagcagacgtcttcatggtgccacagtatggatacctcaccctgaacaacgggagtcaggcggtaggacgctcttccttttactgcctggagtactttccttctcagatgctgcgtaccggaaacaactttaccttcagctacacctttgaggacgttcctttccacagcagctacgctcacagccagagtttggaccggctgatgaatcctctgatcgaccagtatctgtattacttgagcaaaacaaacgctccaagcggaaccaccacgatgtccaggcttcagttttctcaggccggagcgagtgacattcgggaccagtctaggaactggcttcctggaccctgttaccgccagcagcgagtatcaaaaacagctgcggataacaacaacagtgattattcgtggactggagctaccaagtaccacctcaatggaagagactctctggtgaatccgggcccagctatggccagccacaaggacgatgaagaaaaatattttcctcagagcggggttctcatctttggaaaacaagactcgggaaaaactaatgtggacattgaaaaggtcatgattacagacgaagaggaaatcaggaccaccaatcccgtggctacggagcagtatggttctgtatctaccaacctccagagcggcaacacacaggcagccaccacagatgtcaacacacaaggcgttcttccaggcatggtctggcaggacagagacgtgtacctgcaaggacccatctgggcaaagattcctcacacggacggacactttcacccttctcccctcatgggaggatttggactcaaacaccctcctccgcaaatcctcatcaagaatacccccgtacctgcgaatccttcgaccacattcagcgcggcaaagtttgcttctttcatcacacagtactctacggggcaggtcagcgtggagattgagtgggagctgcagaaggagaacagcaaacgctggaaccccgaaatccagtacacttccaactacaacaagtctgttaatgtggactttactgtggacactaatggtgtgtattcagagcctcgccccattggcacaagatacctgactcgtaatctgtaa

SEQ ID NO: 11802 - DNA, 2208 bp, Artificial Sequence
  source: /note="Description of Artificial Sequence: Synthetic polynucleotide"
atggctgccgatggttatcttccagattggctcgaggacactctctctgaaggaataagacagtggtggaagctcaaacctggcccaccaccaccaaagcccgcagagcggcatcaggacgacagcaggggtcttgtgcttcctgggtacaagtacctcggacccttcaacggactcgacaagggagagccggtcaacgaggcagacgccgcggccctcgagcacgacaaggcctacgaccggcagctcgacagcggagacaacccgtacctcaagtacaaccacgccgacgcggagtttcaggagcgtcttaaagaagatacgtcttttgggggcaacctcggacgagcagtcttccaggcgaaaaagagggttcttgaacctctgggcctggttgaggaacctgttaagacggctccgggaaaaaagaggccggtagagcattctcctgcggagccagactcctcctcgggaaccggaaaggcgggccagcagcctgcgagaaagagattgaatttcggtcagactggagacgcagactccgtacctgacccccagcctctcggacagccaccagcagccccctctggtctgggaactaatacgatggctacaggcagtggcgcaccaatggcagacaataacgagggcgccgacggagtgggtaattcctcgggaaattggcattgcgattccacatggatgggcgacagagtcatcaccaccagcacccgaacctgggccctgcccacctacaacaaccacctctacaagcaaatctccagccaatctggagcctcaaacgacaaccactactttggctacagcaccccttgggggtattttgacttcaacagattccactgtcacttctccccacgtgactggcaaagactcatcaacaacaactggggattccgacccaagagactcaacttcaagctctttaacattcaagtcaaagaggtcacgcagaatgacggtacgacgacgattgccaataaccttaccagcacggttcaagtctttactgactcggagtaccagctcccgtacgtcctcggctcggcgcatcaaggatgcctcccgccgtttccagcagacgtcttcatggtgccacagtatggatacctcaccctgaacaacgggagtcaggcggtaggacgctcttccttttactgcctggagtactttccttctcagatgctgcgtaccggaaacaactttaccttcagctacacctttgaggacgttcctttccacagcagctacgctcacagccagagtttggaccggctgatgaatcctctgatcgaccagtatctgtattacttgagcaaaacaaacgctccaagcggaaccaccacgatgtccaggcttcagttttctcaggccggagcgagtgacattcgggaccagtctaggaactggcttcctggaccctgttaccgccagcagcgagtatcaaaaacagctgcggataacaacaacagtgattattcgtggactggagctaccaagtaccacctcaatggaagagactctctggtgaatccgggcccagctatggccagccacaaggacgatgaagaaaaatattttcctcagagcggggttctcatctttggaaaacaagactcgggaaaaactaatgtggacattgaaaaggtcatgattacagacgaagaggaaatcaggaccaccaatcccgtggctacggagcagtatggttctgtatctaccaacctccagagcggcaacacacaggcagccaccacagatgtcaacacacaaggcgttcttccaggcatggtctggcaggacagagacgtgtacctgcaaggacccatctgggcaaagattcctcacacggacggacactttcacccttctcccctcatgggaggatttggactcaaacaccctcctccgcaaatcctcatcaagaatacccccgtacctgcgaatccttcgaccacattcagcgcggcaaagtttgcttctttcatcacacagtactctacggggcaggtcagcgtggagattgagtgggagctgcagaaggagaacagcaaacgctggaaccccgaaatccagtacacttccaactacaacaagtctgttaatgtggactttactgtggacactaatggtgtgtattcagagcctcgccccattgacacaagatacctgactcgtaatctgtaa

SEQ ID NO: 11803 - DNA, 2208 bp, Artificial Sequence
  source: /note="Description of Artificial Sequence: Synthetic polynucleotide"
atggctgccgatggttatcttccagattggctcgaggacactctctctgaaggaataagacagtggtggaagctcaaacctggcccaccaccaccaaagcccgcagagcggcatcaggacgacagcaggggtcttgtgcttcctgggtacaagtacctcggacccttcaacggactcgacaagggagagccggtcaacgaggcagacgccgcggccctcgagcacgacaaggcctacgaccggcagctcgacagcggagacaacccgtacctcaagtacaaccacgccgacgcggagtttcaggagcgtcttaaagaagatacgtcttttgggggcaacctcggacgagcagtcttccaggcgaaaaagagggttcttgaacctctgggcctggttgaggaacctgttaagacggctccgggaaaaaagaggccggtagagcattctcctgcggagccagactcctcctcgggaaccggaaaggcgggccagcagcctgcgagaaagagattgaatttcggtcagactggagacgcagactccgtacctgacccccagcctctcggacagccaccagcagccccctctggtctgggaactaatacgatggctacaggcagtggcgcaccaatggcagacaataacgagggcgccgacggagtgggtaattcctcgggaaattggcattgcgattccacatggatgggcgacagagtcatcaccaccagcacccgaacctgggccctgcccacctacaacaaccacctctacaagcaaatctccagccaatctggagcctcaaacgacaaccactactttggctacagcaccccttgggggtattttgacttcaacagattccactgtcacttctccccacgtgactggcaaagactcatcaacaacaactggggattccgacccaagagactcaacttcaagctctttaacattcaagtcaaagaggtcacgcagaatgacggtacgacgacgattgccaataaccttaccagcacggttcaagtctttactgactcggagtaccagctcccgtacgtcctcggctcggcgcatcaaggatgcctcccgccgtttccagcagacgtcttcatggtgccacagtatggatacctcaccctgaacaacgggagtcaggcggtaggacgctcttccttttactgcctggagtactttccttctcagatgctgcgtaccggaaacaactttaccttcagctacacctttgaggacgttcctttccacagcagctacgctcacagccagagtttggaccggctgatgaatcctctgatcaaccagtatctgtattacttgagcaaaacaaacgctccaagcggaaccaccacgatgtccaggcttcagttttctcaggccggagcgagtgacattcgggaccagtctaggaactggcttcctggaccctgttaccgccagcagcgagtatcaaaaacagctgcggataacaacaacagtgattattcgtggactggagctaccaagtaccacctcaatggaagagactctctggtgaatccgggcccagctatggccagccacaaggacgatgaagaaaaatattttcctcagagcggggttctcatctttggaaaacaagactcgggaaaaactaatgtggacattgaaaaggtcatgattacagacgaagaggaaatcaggaccaccaatcccgtggctacggagcagtatggttctgtatctaccaacctccagagcggcaacacacaggcagccaccacagatgtcaacacacaaggcgttcttccaggcatggtctggcaggacagagacgtgtacctgcaaggacccatctgggcaaagattcctcacacggacggacactttcacccttctcccctcatgggaggatttggactcaaacaccctcctccgcaaatcctcatcaagaatacccccgtacctgcgaatccttcgaccacattcagcgcggcaaagtttgcttctttcatcacacagtactctacggggcaggtcagcgtggagattgagtgggagctgcagaaggagaacagcaaacgctggaaccccgaaatccagtacacttccaactacaacaagtctgttaatgtggactttactgtggacactaatggtgtgtattcagagcctcgccccattggcacaagatacctgactcgtaatctgtaa

SEQ ID NO: 11804 - DNA, 2208 bp, Artificial Sequence
  source: /note="Description of Artificial Sequence: Synthetic polynucleotide"
atggctgccgatggttatcttccagattggctcgaggacactctctctgaaggaataagacagtggtggaagctcaaacctggcccaccaccaccaaagcccgcagagcggcatcaggacgacagcaggggtcttgtgcttcctgggtacaagtacctcggacccttcaacggactcgacaagggagagccggtcaacgaggcagacgccgcggccctcgagcacgacaaggcctacgaccggcagctcgacagcggagacaacccgtacctcaagtacaaccacgccgacgcggagtttcaggagcgtcttaaagaagatacgtcttttgggggcaacctcggacgagcagtcttccaggcgaaaaagagggttcttgaacctctgggcctggttgaggaacctgttaagatggctccgggaaaaaagaggccggtagagcattctcctgcggagccagactcctcctcgggaaccggaaaggcgggccagcagcctgcgagaaagagattgaatttcggtcagactggagacgcagactccgtacctgacccccagcctctcggacagccaccagcagccccctctggtctgggaactaatacgacggctacaggcagtggcgcaccaatggcagacaataacgagggcgccgacggagtgggtaattcctcgggaaattggcattgcgattccacatggatgggcgacagagtcatcaccaccagcacccgaacctgggccctgcccacctacaacaaccacctctacaagcaaatctccagccaatctggagcctcaaacgacaaccactactttggctacagcaccccttgggggtattttgacttcaacagattccactgtcacttctccccacgtgactggcaaagactcatcaacaacaactggggattccgacccaagagactcaacttcaagctctttaacattcaagtcaaagaggtcacgcagaatgacggtacgacgacgattgccaataaccttaccagcacggttcaagtctttactgactcggagtaccagctcccgtacgtcctcggctcggcgcatcaaggatgcctcccgccgtttccagcagacgtcttcatggtgccacagtatggatacctcaccctgaacaacgggagtcaggcggtaggacgctcttccttttactgcctggagtactttccttctcagatgctgcgtaccggaaacaactttaccttcagctacacctttgaggacgttcctttccacagcagctacgctcacagccagagtttggaccggctgatgaatcctctgatcgaccagtatctgtattacttgagcaaaacaaacgctccaagcggaaccaccacgatgtccaggcttcagttttctcaggccggagcgagtgacattcgggaccagtctaggaactggcttcctggaccctgttaccgccagcagcgagtatcaaaaacagctgcggataacaacaacagtgattattcgtggactggagctaccaagtaccacctcaatggaagagactctctggtgaatccgggcccagctatggccagccacaaggacgatgaagaaaaatattttcctcagagcggggttctcatctttggaaaacaagactcgggaaaaactaatgtggacattgaaaaggtcatgattacagacgaagaggaaatcaggaccaccaatcccgtggctacggagcagtatggttctgtatctaccaacctccagagcggcaacacacaggcagccaccacagatgtcaacacacaaggcgttcttccaggcatggtctggcaggacagagacgtgtacctgcaaggacccatctgggcaaagattcctcacacggacggacactttcacccttctcccctcatgggaggatttggactcaaacaccctcctccgcaaatcctcatcaagaatacccccgtacctgcgaatccttcgaccacattcagcgcggcaaagtttgcttctttcatcacacagtactctacggggcaggtcagcgtggagattgagtgggagctgcagaaggagaacagcaaacgctggaaccccgaaatccagtacacttccaactacaacaagtctgttaatgtggactttactgtggacactaatggtgtgtattcagagcctcgccccattggcacaagatacctgactcgtaatctgtaa

SEQ ID NO: 11805 - DNA, 2208 bp, Artificial Sequence
  source: /note="Description of Artificial Sequence: Synthetic polynucleotide"
atggctgccgatggttatcttccagattggctcgaggacactctctctgaaggaataagacagtggtggaagctcaaacctggcccaccaccaccaaagcccgcagagcggcatcaggacgacagcaggggtcttgtgcttcctgggtacaagtacctcggacccttcaacggactcgacaagggagagccggtcaacgaggcagacgccgcggccctcgagcacgacaaggcctacgaccggcagctcgacagcggagacaacccgtacctcaagtacaaccacgccgacgcggagtttcaggagcgtcttaaagaagatacgtcttttgggggcaacctcggacgagcagtcttccaggcgaaaaagagggttcttgaacctctgggcctggttgaggaacctgttaagacggctccgggaaaaaagaggccggtagagcattctcctgcggagccagactcctcctcgggaaccggaaaggcgggccagcagcctgcgagaaagagattgaatttcggtcagactggagacgcagactccgtacctgacccccagcctctcggacagccaccagcagccccctctggtctgggaactaatacgatggctacaggcagtggcgcaccaatggcagacaataacgagggcgccgacggagtgggtaattcctcgggaaattggcattgcgattccacatggatgggcgacagagtcatcaccaccagcacccgaacctgggccctgcccacctacaacaaccacctctacaagcaaatctccagccaatctggagcctcaaacgacaaccactactttggctacagcaccccttgggggtattttgacttcaacagattccactgtcacttctccccacgtgactggcaaagactcatcaacaacaactggggattccgacccaagagactcaacttcaagctctttaacattcaagtcaaagaggtcacgcagaatgacggtacgacgacgattgccaataaccttaccagcacggttcaagtctttactgactcggagtaccagctcccgtacgtcctcggctcggcgcatcaaggatgcctcccgccgtttccagcagacgtcttcatggtgccacagtatggatacctcaccctgaacaacgggagtcaggcggtaggacgctcttccttttactgcctggagtactttccttctcagatgctgcgtaccggaaacaactttaccttcagctacacctttgaggacgttcctttccacagcagctacgctcacagccagagtttggaccggctgatgaatcctctgatcgaccagtatctgtattacttgagcaaaacaaacgctccaagcggaaccaccacgatgtccaggcttcagttttctcaggccggagcgagtgacattcgggaccagtctaggaactggcttcctggaccctgttaccgccagcagcgagtatcaaaaacagctgcggataacaacaacagtgattattcgtggactggagctaccaagtaccacctcaatggaagagactctctggtgaatccgggcccagctatggccagccacaaggacgatgaagaaaaatattttcctcagagcggggttctcatctttggaaaacaagactcgggaaaaactaatgtggacattgaaaaggtcatgattacagacgaagaggaaatcaggaccaccaatcccatggctacggagcagtatggttctgtatctaccaacctccagagcggcaacacacaggcagccaccacagatgtcaacacacaaggcgttcttccaggcatggtctggcaggacagagacgtgtacctgcaaggacccatctgggcaaagattcctcacacggacggacactttcacccttctcccctcatgggaggatttggactcaaacaccctcctccgcaaatcctcatcaagaatacccccgtacctgcgaatccttcgaccacattcagcgcggcaaagtttgcttctttcatcacacagtactctacggggcaggtcagcgtggagattgagtgggagctgcagaaggagaacagcaaacgctggaaccccgaaatccagtacacttccaactacaacaagtctgttaatgtggactttactgtggacactaatggtgtgtattcagagcctcgccccattggcacaagatacctgactcgtaatctgtaa

SEQ ID NO: 11806 - DNA, 2208 bp, Artificial Sequence
  source: /note="Description of Artificial Sequence: Synthetic polynucleotide"
atggctgccgatggttatcttccagattggctcgaggacactctctctgaaggaataagacagtggtggaagctcaaacctggcccaccaccaccaaagcccgcagagcggcatcaggacgacagcaggggtcttgtgcttcctgggtacaagtacctcggacccttcaacggactcgacaagggagagccggtcaacgaggcagacgccgcggccctcgagcacgacaaggcctacgaccggcagctcgacagcggagacaacccgtacctcaagtacaaccacgccgacgcggagtttcaggagcgtcttaaagaagatacgtcttttgggggcaacctcggacgagcagtcttccaggcgaaaaagagggttcttgaacctctgggcctggttgaggaacctgttaagacggctccgggaaaaaagaggccggtagagcattctcctgcggagccagactcctcctcgggaaccggaaaggcgggccagcagcctgcgagaaagagattgaatttcggtcagactggagacgcagactccgtacctgacccccagcctctcggacagccaccagcagccccctctggtctgggaactaatacgatggctacaggcagtggcgcaccaatggcagacaataacgagggcgccgacggagtgggtaattcctcgggaaattggcattgcgattccacatggatgggcgacagagtcatcaccaccagcacccgaacctgggccctgcccacctacaacaaccacctctacaagcaaatctccagccaatctggagcctcaaacgacaaccactactttggctacagcaccccttgggggtattttgacttcaacagattccactgtcacttctccccacgtgactggcaaagactcatcaacaacaactggggattccgacccaagagactcaacttcaagctctttaacattcaagtcaaagaggtcacgcagaatgacggtacgacgacgattgccaataaccttaccagcacggttcaagtctttactgactcggagtaccagctcccgtacgtcctcggctcggcgcatcaaggatgcctcccgccgtttccagcagacgtctccatggtgccacagtatggatacctcaccctgaacaacgggagtcaggcggtaggacgctcttccttttactgcctggagtactttccttctcagatgctgcgtaccggaaacaactttaccttcagctacacctttgaggacgttcctttccacagcagctacgctcacagccagagtttggaccggctgatgaatcctctgatcgaccagtatctgtattacttgagcaaaacaaacgctccaagcggaaccaccacgatgtccaggcttcagttttctcaggccggagcgagtgacattcgggaccagtctaggaactggcttcctggaccctgttaccgccagcagcgagtatcaaaaacagctgcggataacaacaacagtgattattcgtggactggagctaccaagtaccacctcaatggaagagactctctggtgaatccgggcccagctatggccagccacaaggacgatgaagaaaaatattttcctcagagcggggttctcatctttggaaaacaagactcgggaaaaactaatgtggacattgaaaaggtcatgattacagacgaagaggaaatcaggaccaccaatcccgtggctacggagcagtatggttctgtatctaccaacctccagagcggcaacacacaggcagccaccacagatgtcaacacacaaggcgttcttccaggcatggtctggcaggacagagacgtgtacctgcaaggacccatctgggcaaagattcctcacacggacggacactttcacccttctcccctcatgggaggatttggactcaaacaccctcctccgcaaatcctcatcaagaatacccccgtacctgcgaatccttcgaccacattcagcgcggcaaagcttgcttctttcatcacacagtactctacggggcaggtcagcgtggagattgagtgggagctgcagaaggagaacagcaaacgctggaaccccgaaatccagtacacttccaactacaacaagtctgttaatgtggactttactgtggacactaatggtgtgtattcagagcctcgccccattggcacaagatacctgactcgtaatctgtaa

SEQ ID NO: 11807 - DNA, 2208 bp, Artificial Sequence
  source: /note="Description of Artificial Sequence: Synthetic polynucleotide"
atggctgccgatggttatcttccagattggcccgaggacactctctctgaaggaataagacagtggtggaagctcaaacctggcccaccaccaccaaagcccgcagagcggcatcaggacgacagcaggggtcttgtgcttcctgggtacaagtacctcggacccttcaacggactcgacaagggagagccggtcaacgaggcagacgccgcggccctcgagcacgacaaggcctacgaccggcagctcgacagcggagacaacccgtacctcaagtacaaccacgccgacgcggagtttcaggagcgtcttaaagaagatacgtcttttgggggcaacctcggacgagcagtcttccaggcgaaaaagagggttcttgaacctctgggcctggttgaggaacctgttaagacggctccgggaaaaaagaggccggtagagcattctcctgcggagccagactcctcctcgggaaccggaaaggcgggccagcagcctgcgagaaagagattgaatttcggtcagactggagacgcagactccgtacctgacccccagcctctcggacagccaccagcagccccctctggtctgggaactaatacgatggctacaggcagtggcgcaccaatggcagacaataacgagggcgccgacggagtgggtaattcctcgggaaattggcattgcgattccacatggatgggcgacagagtcatcaccaccagcacccgaacctgggccctgcccacctacaacaaccacctctacaagcaaatctccagccaatctggagcctcaaacgacaaccactactttggctacagcaccccttgggggtattttgacttcaacagattccactgtcacttctccccacgtgactggcaaagactcatcaacaacaactggggattccgacccaagagactcaacttcaagctctttaacattcaagtcaaagaggtcacgcagaatgacggtacgacgacgattgccaataaccttaccagcacggttcaagtctttactgactcggagtaccagctcccgtacgtcctcggctcggcgcatcaaggatgcctcccgccgtttccagcagacgtcttcatggtgccacagtatggatacctcaccctgaacaacgggagtcaggcggtaggacgctcttccttttactgcctggagtactttccttctcagatgctgcgtaccggaaacaactttaccttcagctacacctttgaggacgttcctttccacagcagctacgctcacagccagagtttggaccggctgatgaatcctctgatcgaccagtatctgtattacttgagcaaaacaaacgctccaagcggaaccaccacgatgtccaggcttcagttttctcaggccggagcgagtgacattcgggaccagtctaggaactggcttcctggaccctgttaccgccagcagcgagtatcaaaaacagctgcggataacaacaacagtgattattcgtggactggagctaccaagtaccacctcaatggaagagactctctggtgaatccgggcccagctatggccagccacaaggacgatgaagaaaaatattttcctcagagcggggttctcatctttggaaaacaagactcgggaaaaactaatgtggacattgaaaaggtcatgattacagacgaagaggaaatcaggaccaccaatcccgtggctacggagcagtatggttctgtatctaccaacctccagagcggcaacacacaggcagccaccacagatgtcaacacacaaggcgttcttccaggcatggtctggcaggacagagacgtgtacctgcaaggacccatctgggcaaagattcctcacacggacggacactttcacccttctcccctcatgggaggatttggactcaaacaccctcctccgcaaatcctcatcaagaatacccccgtacctgcgaatccttcgaccacattcagcgcggcaaagtttgcttctttcatcacacagtactctacggggcaggtcagcgtggagattgagtgggagctgcagaaggagaacagcaaacgctggaaccccgaaatccagtacacttccaactacaacaagtctgttaatgtggactttactgtggacactaatggtgtgtattcagagcctcgccccattggcacaagatacctgactcgtaatctgtaa

SEQ ID NO: 11808 - DNA, 2208 bp, Artificial Sequence
  source: /note="Description of Artificial Sequence: Synthetic polynucleotide"
atggctgccgatggttatcttccagattggctcgaggacactctctctgaaggaataagacagtggtggaagctcaaacctggcccaccaccaccaaagcccgcagagcggcatcaggacgacagcaggggtcttgtgcttcctgggtacaagtacctcggacccttcaacggactcgacaagggagagccggtcaacgaggcagacgccgcggccctcgagcacgacaaggcctacgaccggcagctcgacagcggagacaacccgtacctcaagtacaaccacgccgacgcggagtttcaggagcgtcttaaagaagatacgtcttttgggggcaacctcggacgagcagtcttccaggcgaaaaagagggttcttgaacctctgggcctggttgaggaacctgttaagacggctccgggaaaaaagaggccggtagagcattctcctgcggagccagactcctcctcgggaaccggaaaggcgggccagcagcctgcgagaaagagattgaatttcggtcagactggagacgcagactccgtacctgacccccagcctctcggacagccaccagcagccccctctggtctgggaactaatacgatggctacaggcagtggcgcaccaatggcagacaataacgagggcgccgacggagtgggtaattcctcgggaaattggcattgcgattccacatggatgggcgacagagtcatcaccaccagcacccgaacctgggccctgcccacctacaacaaccacctctacaagcaaatctccagccaatctggagcctcaaacgacaaccactactttggctacagcaccccttgggggtattttgacttcaacagattccactgtcacttctccccacgtgactggcaaagactcatcaacaacaactggggattccgacccaagagactcaacttcaagctctttaacattcaagtcaaagaggtcacgcagaatgacggtacgacgacgattgccaataaccttaccagcacggttcaagtctttactgactcggagtaccagctcccgtacgtcctcggctcggcgcatcaaggatgcctcccgccgtttccagcagacgtcttcatggtgccacagtatggatacctcaccctgaacaacgggagtcaggcggtaggacgctcttccttttactgcctggagtactttccttctcagatgctgcgtaccggaaacaactttaccttcagctacacctttgaggacgttcctttccacagcagctacgctcacagccagagtttggaccggctgatgaatcctctgatcgaccagtatctgtattacttgagcaaaacaaacgctccaagcggaaccaccacgatgtccaggcttcagttttctcaggccggagcgagtgacattcgggaccagtctaggaactggcttcctggaccctgttaccgccagcagcgagtatcaaaaacagctgcggataacaacaacagtgattattcgtggactggagctaccaagtaccacctcaatggaagagactctctggtgaatccgggcccagctatggccagccacaaggacgatgaagaaaaattttttcctcagagcggggttctcatctttggaaaacaagactcgggaaaaactaatgtggacattgaaaaggtcatgattacagacgaagaggaaatcaggaccaccaatcccgtggctacggagcagtatggttctgtatctaccaacctccagagcggcaacacacaggcagccaccacagatgtcaacacacaaggcgttcttccaggcatggtctggcaggacagagacgtgtacctgcaaggacccatctgggcaaagattcctcacacggacggacactttcacccttctcccctcatgggaggatttggactcaaacaccctcctccgcaaatcctcatcaagaatacccccgtacctgcgaatccttcgaccacattcagcgcggcaaagtttgcttctttcatcacacagtactctacggggcaggtcagcgtggagattgagtgggagctgcagaaggagaacagcaaacgctggaaccccgaaatccagtacacttccaactacaacaagtctgttaatgtggactttactgtggacactaatggtgtgtattcagagcctcgccccattggcacaagatacctgactcgtaatctgtaa

SEQ ID NO: 11809 - DNA, 2208 bp, Artificial Sequence
  source: /note="Description of Artificial Sequence: Synthetic polynucleotide"
atggctgccgatggttatcttccagattggctcgaggacactctctctgaaggaataagacagtggtggaagctcaaacctggcccaccaccaccaaagcccgcagagcggcatcaggacgacagcaggggtcttgtgcttcctgggtacaagtacctcggacccttcaacggactcgacaagggagagccggtcaacgaggcagacgccgcggccctcgagcacgacaaggcctacgaccggcagctcgacagcggagacaacccgtacctcaagtacaaccacgccgacgcggagtttcaggagcgtcttaaagaagatacgtcttttgggggcaacctcggacgagcagtcttccaggcgaaaaagagggttcttgaacctctgggcctggttgaggaacctgttaagacggctccgggaaaaaagaggccggtagagcattctcctgcggagccagactcctcctcgggaatcggaaaggcgggccagcagcctgcgagaaagagattgaatttcggtcagactggagacgcagactccgtacctgacccccagcctctcggacagccaccagcagccccctctggtctgggaactaatacgatggctacaggcagtggcgcaccaatggcagacaataacgagggcgccgacggagtgggtaattcctcgggaaattggcattgcgattccacatggatgggcgacagagtcatcaccaccagcacccgaacctgggccctgcccacctacaacaaccacctctacaagcaaatctccagccaatctggagcctcaaacgacaaccactactttggctacagcaccccttgggggtattttgacttcaacagattccactgtcacttctccccacgtgactggcaaagactcatcaacaacaactggggattccgacccaagagactcaacttcaagctctttaacattcaagtcaaagaggtcacgcagaatgacggtacgacgacgattgccaataaccttaccagcacggttcaagtctttactgactcggagtaccagctcccgtacgtcctcggctcggcgcatcaaggatgcctcccgccgtttccagcagacgtcttcatggtgccacagtatggatacctcaccctgaacaacgggagtcaggcggtaggacgctcttccttttactgcctggagtactttccttctcagatgctgcgtaccggaaacaactttaccttcagctacacctttgaggacgttcctttccacagcagctacgctcacagccagagtttggaccggctgatgaatcctctgatcgaccagtatctgtattacttgagcaaaacaaacgctccaagcggaaccaccacgatgtccaggcttcagttttctcaggccggagcgagtgacattcgggaccagtctaggaactggcttcctggaccctgttaccgccagcagcgagtatcaaaaacagctgcggataacaacaacagtgattattcgtggactggagctaccaagtaccacctcaatggaagagactctctggtgaatccgggcccagctatggccagccacaaggacgatgaagaaaaatattttcctcagagcggggttctcatctttggaaaacaagactcgggaaaaactaatgtggacattgaaaaggtcatgattacagacgaagaggaaatcaggaccaccaatcccgtggctacggagcagtatggttctgtatctaccaacctccagagcggcaacacacaggcagccaccacagatgtcaacacacaaggcgttcttccaggcatggtctggcaggacagagacgtgtacctgcaaggacccatctgggcaaagattcctcacacggacggacactttcacccttctcccctcatgggaggatttggactcaaacaccctcctccgcaaatcctcatcaagaatacccccgtacctgcgaatccttcgaccacattcagcgcggcaaagtttgcttctttcatcacacagtactctacggggcaggtcagcgtggagattgagtgggagctgcagaaggagaacagcaaacgctggaaccccgaaatccagtacacttccaactacaacaagtctgttaatgtggactttactgtggacactaatggtgtgtattcagagcctcgccccattggcacaagatacctgactcgtaatctgtaa

SEQ ID NO: 11810 - DNA, 2208 bp, Artificial Sequence
  source: /note="Description of Artificial Sequence: Synthetic polynucleotide"
atggctgccgatggttatcttccagattggctcgaggacactctctctgaaggaataagacagtggtggaagctcaaacctggcccaccaccaccaaagcccgcagagcggcatcaggacgacagcaggggtcttgtgcttcctgggtacaagtacctcggacccttcaacggactcgacaagggagagccggtcaacgaggcagacgccgcggccctcgagcacgacaaggcctacgaccggcagctcgacagcggagacaacccgtacctcaagtacaaccacgccgacgcggagtttcaggagcgtcttaaagaagatacgtcttttgggggcaacctcggacgagcagtcttccaggcgaaaaagagggttcttgaacctctgggcctggttgaggaacctgttaagacggctccgggaaaaaagaggccggtagagcattctcctgcggagccagactcctcctcgggaaccggaaaggcgggccagcagcctgcgagaaagagattgaatttcggtcagactggagacgcagactccgtacctgacccccagcctctcggacagccaccagcagccccctctggtctgggaactaatacgatggctacaggcagtggcgcaccaatggcagacaataacgagggcgccgacggagtgggtaattcctcgggaaattggcattgcgattccacatggatgggcgacagagtcatcaccaccagcacccgaacctgggccctgcccacctacaacaaccacctctacaagcaaatctccagccaatctggagcctcaaacgacaaccactactttggctacagcaccccttgggggtattttgacttcaacagattccactgtcacttctccccacgtgactggcaaagactcatcaacaacaactggagattccgacccaagagactcaacttcaagctctttaacattcaagtcaaagaggtcacgcagaatgacggtacgacgacgattgccaataaccttaccagcacggttcaagtctttactgactcggagtaccagctcccgtacgtcctcggctcggcgcatcaaggatgcctcccgccgtttccagcagacgtcttcatggtgccacagtatggatacctcaccctgaacaacgggagtcaggcggtaggacgctcttccttttactgcctggagtactttccttctcagatgctgcgtaccggaaacaactttaccttcagctacacctttgaggacgttcctttccacagcagctacgctcacagccagagtttggaccggctgatgaatcctctgatcgaccagtatctgtattacttgagcaaaacaaacgctccaagcggaaccaccacgatgtccaggcttcagttttctcaggccggagcgagtgacattcgggaccagtctaggaactggcttcctggaccctgttaccgccagcagcgagtatcaaaaacagctgcggataacaacaacagtgattattcgtggactggagctaccaagtaccacctcaatggaagagactctctggtgaatccgggcccagctatggccagccacaaggacgatgaagaaaaatattttcctcagagcggggttctcatctttggaaaacaagactcgggaaaaactaatgtggacattgaaaaggtcatgattacagacgaagaggaaatcaggaccaccaatcccgtggctacggagcagtatggttctgtatctaccaacctccagagcggcaacacacaggcagccaccacagatgtcaacacacaaggcgttcttccaggcatggtctggcaggacagagacgtgtacctgcaaggacccatctgggcaaagattcctcacacggacggacactttcacccttctcccctcatgggaggatttggactcaaacaccctcctccgcaaatcctcatcaagaatacccccgtacctgcgaatccttcgaccacattcagcgcggcaaagcttgcttctttcatcacacagtactctacggggcaggtcagcgtggagattgagtgggagctgcagaaggagaacagcaaacgctggaaccccgaaatccagtacacttccaactacaacaagtctgttaatgtggactttactgtggacactaatggtgtgtattcagagcctcgccccattggcacaagatacctgactcgtaatctgtaa

SEQ ID NO: 11811 - DNA, 2208 bp, Artificial Sequence
  source: /note="Description of Artificial Sequence: Synthetic polynucleotide"
atggctgccgatggttatcttccagattggctcgaggacactctctctgaaggaataagacagtggtggaagctcaaacctggcccaccaccaccaaagcccgcagagcggcatcaggacgacagcaggggtcttgtgcttcctgggtacaagtacctcggacccttcaacggactcgacaagggagagccggtcaacgaggcagacgccgcggccctcgagcacgacaaggcctacgaccggcagctcgacagcggagacaacccgtacctcaagtacaaccacgccgacgcggagtttcaggagcgtcttaaagaagatacgtcttttgggggcaacctcggacgagcagtcttccaggcgaaaaagagggttcttgaacctctgggcctggttgaggaacctgttaagacggctccgggaaaaaagaggccggtagagcattctcctgcggagccagactcctcctcgggaaccggaaaggcgggccagcagcctgcgagaaagagattgaatttcggtcagactggagacgcagactccgtacctgacccccagcctctcggacagccaccagcagccccctctggtctgggaactaatacgatggctacaggcagtggcgcaccaatggcagacaataacgagggcgccgacggagtgggtaattcctcgggaaattggcattgcgattccacatggatgggcgacagagtcatcaccaccagcacccgaacctgggccctgcccacctacaacaaccacctctacaagcaaatctccagccaatctggagcctcaaacgacaaccactactttggctacagcactccttgggggtattttgacttcaacagattccactgtcacttctccccacgtgactggcaaagactcatcaacaacaactggggattccgacccaagagactcaacttcaagctctttaacattcaagtcaaagaggtcacgcagaatgacggtacgacgacgattgccaataaccttaccagcacggttcaagtctttactgactcggagtaccagctcccgtacgtcctcggctcggcgcatcaaggatgcctcccgccgtttccagcagacgtcttcatggtgccacagtatggatacctcaccctgaacaacgggagtcaggcggtaggacgctcttccttttactgcctggagtactttccttctcagatgctgcgtaccggaaacaactttaccttcagctacacctttgaggacgttcctttccacagcagctacgctcacagccagagtttggaccggctgatgaatcctctgatcgaccagtatctgtattacttgagcaaaacaaacgctccaagcggaaccaccacgatgtccaggcttcagttttctcaggccggagcgagtgacattcgggaccagtctaggaactggcttcctggaccctgttaccgccagcagcgagtatcaaaaacagctgcggataacaacaacagtgattattcgtggactggagctaccaagtaccacctcaatggaagagactctctggtgaatccgggcccagctatggccagccacaaggacgatgaagaaaaatattttcctcagagcggggttctcatctttggaaaacaagactcgggaaaaactaatgtggacattgaaaaggtcatgattacagacgaagaggaaatcaggaccaccaatcccgtggctacggagcagtatggttctgtatctaccaacctccagagcggcaacacacaggcagccaccacagatgtcaacacacaaggcgttcttccaggcatggtctggcaggacagagacgtgtacctgcaaggacccatctgggcaaagattcctcacacggacggacactttcacccttctcccctcatgggaggatttggactcaaacaccctcctccgcaaatcctcatcaagaatacccccgtacctgcgaatccttcgaccacattcagcgcggcaaagtttgcttctttcatcacacagtactctacggggcaggtcagcgtggagattgagtgggagctgcagaaggagaacagcaaacgctggaaccccgaaatccagtacacttccaactacaacaagtctgttaatgtggactttactgtggacactaatggtgtgtattcagagcctcgccccattggcacaagatacctggctcgtaatctgtaa

SEQ ID NO: 11812 - DNA, 2208 bp, Artificial Sequence
  source: /note="Description of Artificial Sequence: Synthetic polynucleotide"
atggctgccgatggttatcttccagattggctcgaggacactctctctgaaggaataagacagtggtggaagctcaaacctggcccaccaccaccaaagcccgcagagcggcatcaggacgacagcaggggtcttgtgcttcctgggtacaagtacctcggacccttcaacggactcgacaagggagagccggtcaacgaggcagacgccgcggccctcgagcacgacaaggcctacgaccggcagctcgacagcggagacaacccgtacctcaagtacaaccacgccgacgcggagtttcaggagcgtcttaaagaagatacgtcttttgggggcaacctcggacgagcagtcttccaggcgaaaaagagggttcttgaacctctgggcctggttgaggaacctgttaagacggctccgggaaaaaagaggccggtagagcattctcctgcggagccagactcctcctcgggaaccggaaaggcgggccagcagcctgcgaggaagagattgaatttcggtcagactggagacgcagactccgtacctgacccccagcctctcggacagccaccagcagccccctctggtctgggaactaatacgatggctacaggcagtggcgcaccaatggcagacaataacgagggcgccgacggagtgggtaattcctcgggaaattggcattgcgattccacatggatgggcgacagagtcatcaccaccagcacccgaacctgggccctgcccacctacaacaaccacctctacaagcaaatctccagccaatctggagcctcaaacgacgaccactactttggctacagcaccccttgggggtattttgacttcaacagattccactgtcacttctccccacgtgactggcaaagactcatcaacaacaactggggattccgacccaagagactcaacttcaagctctttaacattcaagtcaaagaggtcacgcagaatgacggtacgacgacgattgccaataaccttaccagcacggttcaagtctttactgactcggagtaccagctcccgtacgtcctcggctcggcgcatcaaggatgcctcccgccgtttccagcagacgtcttcatggtgccacagtatggatacctcaccctgaacaacgggagtcaggcggtaggacgctcttccttttactgcctggagtactttccttctcagatgctgcgtaccggaaacaactttaccttcagctacacctttgaggacgttcctttccacagcagctacgctcacagccagagtttggaccggctgatgaatcctctgatcgaccagtatctgtattacttgagcaaaacaaacgctccaagcggaaccaccacgatgtccaggcttcagttttctcaggccggagcgagtgacattcgggaccagtctaggaactggcttcctggaccctgttaccgccagcagcgagtatcaaaaacagctgcggataacaacaacagtgattattcgtggactggagctaccaagtaccacctcaatggaagagactctctggtgaatccgggcccagctatggccagccacaaggacgatgaagaaaaatattttcctcagagcggggttctcatctttggaaaacaagactcgggaaaaactaatgtggacattgaaaaggtcatgattacagacgaagaggaaatcaggaccaccaatcccgtggctacggagcagtatggttctgtatctaccaacctccagagcggcaacacacaggcagccaccacagatgtcaacacacaaggcgttcttccaggcatggtctggcaggacagagacgtgtacctgcaaggacccatctgggcaaagattcctcacacggacggacactttcacccttctcccctcatgggaggatttggactcaaacaccctcctccgcaaatcctcatcaagaatacccccgtacctgcgaatccttcgaccacattcagcgcggcaaagtttgcttctttcatcacacagtactctacggggcaggtcagcgtggagattgagtgggagctgcagaaggagaacagcaaacgctggaaccccgaaatccagtacacttccaactacaacaagtctgttaatgtggactttactgtggacactaatggtgtgtattcagagcctcgccccattggcacaagatacctgactcgtaatctgtaa

SEQ ID NO: 11813 - DNA, 2208 bp, Artificial Sequence
  source: /note="Description of Artificial Sequence: Synthetic polynucleotide"
atggctgccgatggttatcttccagattggctcgaggacactctctctgaaggaataagacagtggtggaagctcaaacctggcccaccaccaccaaagcccgcagagcggcatcaggacgacagcaggggtcttgtgcttcctgggtacaagtacctcggacccttcaacggactcgacaagggagagccggtcaacgaggcagacgccgcggccctcgagcacgacaaggcctacgaccggcagctcgacagcggagacaacccgtacctcaagtacaaccacgccgacgcggagtttcaggagcgtcttaaagaagatacgtcttttgggggcaacctcggacgagcagtcttccaggcgaaaaagggggttcttgaacctctgggcctggttgaggaacctgttaagacggctccgggaaaaaagaggccggtagagcattctcctgcggagccagactcctcctcgggaaccggaaaggcgggccagcagcctgcgagaaagagattgaatttcggtcagactggagacgcagactccgtacctgacccccagcctctcggacagccaccagcagccccctctggtctgggaactaatacgatggctacaggcagtggcgcaccaatggcagacaataacgagggcgccgacggagtgggtaattcctcgggaaattggcattgcgattccacatggatgggcgacagagtcatcaccaccagcacccgaacctgggccctgcccacctacaacaaccacctctacaagcaaatctccagccaatctggagcctcaaacgacaaccactactttggctacagcaccccttgggggtattttgacttcaacagattccactgtcacttctccccacgtgactggcaaagactcatcaacaacaactggggattccgacccaagagactcaacttcaagctctttaacattcaagtcaaagaggtcacgcagaatgacggtacgacgacgattgccaataaccttaccagcacggttcaagtctttactgactcggagtaccagctcccgtacgtcctcggctcggcgcatcaaggatgcctcccgccgtttccagcagacgtcttcatggtgccacagtatggatacctcaccctgaacaacgggagtcaggcggtaggacgctcttccttttactgcctggagtactttccttctcagatgctgcgtaccggaaacaactttaccttcagctacacctttgaggacgttcctttccacagcagctacgctcacagccagagtttggaccggctgatgaatcctctgatcgaccagtatctgtattacttgagcaaaacaaacgctccaagcggaaccaccacgatgtccaggcttcagttttctcaggccggagcgagtgacattcgggaccagtctaggaactggcttcctggaccctgttaccgccagcagcgagtatcaaaaacagctgcggataacaacaacagtgattattcgtggactggagctaccaagtaccacctcaatggaagagactctctggtgaatccgggcccagctatggccagccacaaggacgatgaagaaaaatattttcctcagagcggggttctcatctttggaaaacaagactcgggaaaaactaatgtggacattgaaaaggtcatgattacagacgaagaggaaatcaggaccaccaatcccgtggctacggagcagtatggttctgtatctaccaacctccagagcggcaacacacaggcagccaccacagatgtcaacacacaaggcgttcttccaggcatggtctggcaggacagagacgtgtacctgcaaggacccatctgggcaaagattcctcacacggacggacactttcacccttctcccctcatgggaggatttggactcaaacaccctcctccgcaaatcctcatcaagaatacccccgtacctgcgaatccttcgaccacattcagcgcggcaaagcttgcttctttcatcacacagtactctacggggcaggtcagcgtggagattgagtgggagctgcagaaggagaacagcaaacgctggaaccccgaaatccagtacacttccaactacaacaagtctgttaatgtggactttactgtggacactaatggtgtgtattcagagcctcgccccattggcacaagatacctgactcgtaatctgtaa

SEQ ID NO: 11814 - DNA, 2208 bp, Artificial Sequence
  source: /note="Description of Artificial Sequence: Synthetic polynucleotide"
atggctgccgatggttatcttccagattggctcgaggacactctctctgaaggaataagacagtggtggaagctcaaacctggcccaccaccaccaaagcccgcagagcggcatcaggacgacagcaggggtcttgtgcttcctgggtacaagtacctcggacccttcaacggactcgacaagggagagccggtcaacgaggcagacgccgcggccctcgagcacgacaaggcctacgaccggcagctcgacagcggagacaacccgtacctcaagtacaaccacgccgacgcggagtttcaggagcgtcttaaagaagatacgtcttttgggggcaacctcggacgagcagtcttccaggcgaaaaagagggttcttgaacctctgggcctggttgaggaacctgttaagacggctccgggaaaaaagaggccggtagagcattctcctgcggagccagactccccctcgggaaccggaaaggcgggccagcagcctgcgagaaagagattgaatttcggtcagactggagacgcagactccgtacctgacccccagcctctcggacagccaccagcagccccctctggtctgggaactaatacgatggctacaggcagtggcgcaccaatggcagacaataacgagggcgccgacggagtgggtaattcctcgggaaattggcattgcgattccacatggatgggcgacagagtcatcaccaccagcacccgaacctgggccctgcccacctacaacaaccacctctacaagcaaatctccagccaatctggagcctcaaacgacaaccactactttggctacagcaccccttgggggtattttgacttcaacagattccactgtcacttctccccacgtgactggcaaagactcatcaacaacaactggggattccgacccaagagactcaacttcaagctctttaacattcaagtcaaagaggtcacgcagaatgacggtacgacgacgattgccaataaccttaccagcacggttcaagtctttactgactcggagtaccagctcccgtacgtcctcggctcggcgcatcaaggatgcctcccgccgtttccagcagacgtcttcatggtgccacagtatggatacctcaccctgaacaacgggagtcaggcggtaggacgctcttccttttactgcctggagtactttccttctcagatgctgcgtaccggaaacaactttaccttcagctacacctttgaggacgttcctttccacagcagctacgctcacagccagagtttggaccggctgatgaatcctctgatcgaccagtatctgtattacttgagcaaaacaaacgctccaagcggaaccaccacgatgtccaggcttcagttttctcaggccggagcgagtgacattcgggaccagtctaggaactggcttcctggaccctgttaccgccagcagcgagtatcaaaaacagctgcggataacaacaacagtgattattcgtggactggagctaccaagtaccacctcaatggaagagactctctggtgaatccgggcccagctatggccagccacaaggacgatgaagaaaaatattttcctcagagcggggttctcatctttggaaaacaagactcgggaaaaactaatgtggacattgaaaaggtcatgattacagacgaagaggaaatcaggaccaccaatcccgtggctacggagcagtatggttctgtatctaccaacctccagagcggcaacacacaggcagccaccacagatgtcaacacacaaggcgttcttccaggcatggtctggcaggacagagacgtgtacctgcaaggacccatctgggcaaagattcctcacacggacggacactttcacccttctcccctcatgggaggatttggactcaaacaccctcctccgcaaatcctcatcaagaatacccccgtacctgcgaatccttcgaccacattcagcgcggcaaagtttgcttctttcatcacacagtactctacggggcaggtcagcgtggagattgagtgggagctgcagaaggagaacagcaaacgctggaaccccgaaatccagtacacttccaactacaacaagtctgttaatgtggactttactgtggacactaatggtgtgtattcagagcctcgccccattggcacaagatacctgactcgtaatctgtaa

SEQ ID NO: 11815 - DNA, 2208 bp, Artificial Sequence
  source: /note="Description of Artificial Sequence: Synthetic polynucleotide"
atggctgccgatggttatcttccagattggctcgaggacactctctctgaaggaataagacagtggtggaagctcaaacctggcccaccaccaccaaagcccgcagagcggcatcaggacgacagcaggggtcttgtgcttcctgggtacaagtacctcggacccttcaacggactcgacaagggagagccggtcaacgaggcagacgccgcggccctcgagcacgacaaggcctacgaccggcagctcgacagcggagacaacccgtacctcaagtacaaccacgccgacgcggagtttcaggagcgtcttaaagaagatacgtcttttgggggcaacctcggacgagcagtcttccaggcgaaaaagagggttcttgaacctctgggcctggttgaggaacctgttaagacggctccgggaaaaaagaggccggtagagcattctcctgcggagccagactcctcctcgggaaccggaaaggcgggccagcagcctgcgagaaagagattgaatttcggtcagactggagacgcagactccgtacctgacccccagcctctcggacagccaccagcagccccctctggtctgggaactaatacgatggctacaggcagtggcgcaccaatggcagacaataacgagggcgccgacggagtgggtaattcctcgggaaattggcattgcgattccacatggatgggcgacagagtcatcaccaccagcacccgaacctgggccctgcccacctacaacaaccacccctacaagcaaatctccagccaatctggagcctcaaacgacaaccactactttggctacagcaccccttgggggtattttgacttcaacagattccactgtcacttctccccacgtgactggcaaagactcatcaacaacaactggggattccgacccaagagactcaacttcaagctctttaacattcaagtcaaagaggtcacgcagaatgacggtacgacgacgattgccaataaccttaccagcacggttcaagtctttactgactcggagtaccagctcccgtacgtcctcggctcggcgcatcaaggatgcctcccgccgtttccagcagacgtcttcatggtgccacagtatggatacctcaccctgaacaacgggagtcaggcggtaggacgctcttccttttactgcctggagtactttccttctcagatgctgcgtaccggaaacaactttaccttcagctacacctttgaggacgttcctttccacagcagctacgctcacagccagagtttggaccggctgatgaatcctctgatcgaccagtatctgtattacttgagcaaaacaaacgctccaagcggaaccaccacgatgtccaggcttcagttttctcaggccggagcgagtgacattcgggaccagtctaggaactggcttcctggaccctgttaccgccagcagcgagtatcaaaaacagctgcggataacaacaacagtgattattcgtggactggagctaccaagtaccacctcaatggaagagactctctggtgaatccgggcccagctatggccagccacaaggacgatgaagaaaaatattttcctcagagcggggttctcatctttggaaaacaagactcgggaaaaactaatgtggacattgaaaaggtcatgattacagacgaagaggaaatcaggaccaccaatcccgtggctacggagcagtatggttctgtatctaccaacctccagagcggcaacacacaggcagccaccacagatgtcaacacacaaggcgttcttccaggcatggtctggcaggacagagacgtgtacctgcaaggacccatctgggcaaagattcctcacacggacggacactttcacccttctcccctcatgggaggatttggactcaaacaccctcctccgcaaatcctcatcaagaatacccccgtacctgcgaatccttcgaccacattcagcgcggcaaagtttgcttctttcatcacacagtactctacggggcaggtcagcgtggagattgagtgggagctgcagaaggagaacagcaaacgctggaaccccgaaatccagtacacttccaactacaacaagtctgttaatgtggactttactgtggacactaatggtgtgtattcagagcctcgccccattggcacaagatacctgactcgtaatctgtaa

SEQ ID NO: 11816 - DNA, 2208 bp, Artificial Sequence
  source: /note="Description of Artificial Sequence: Synthetic polynucleotide"
atggctgccgatggttatcttccagattggctcgaggacactctctctgaaggaataagacagtggtggaagctcaaacctggcccaccaccaccaaagcccgcagagcggcatcaggacgacagcaggggtcttgtgcttcctgggtacaagtacctcggacccttcaacggactcgacaagggagagccggtcagcgaggcagacgtcgcggccctcgagcacgacaaggcctacgaccggcagctcgacagcggagacaacccgtacctcaagtacaaccacgccgacgcggagtttcaggagcgtcttaaagaagatacgtcttttgggggcaacctcggacgagcagtcttccaggcgaaaaagagggttcttgaacctctgggcctggttgaggaacctgttaagacggctccgggaaaaaagaggccggtagagcattctcctgcggagccagactcctcctcgggaaccggaaaggcgggccagcagcctgcgagaaagagattgaatttcggtcagactggagacgcagactccgtacctgacccccagcctctcggacagccaccagcagccccctctggtctgggaactaatacgatggctacaggcagtggcgcaccaatggcagacaataacgagggcgccgacggagtgggtaattcctcgggaaattggcattgcgattccacatggatgggcgacagagtcatcaccaccagcacccgaacctgggccctgcccacctacaacaaccacctctacaagcaaatctccagccaatctggagcctcaaacgacaaccactactttggctacagcaccccttgggggtattttgacttcaacagattccactgtcacttctccccacgtgactggcaaagactcatcaacaacaactggggattccgacccaagagactcaacttcaagctctttaacattcaagtcaaagaggtcacgcagaatgacggtacgacgacgattgccaataaccttaccagcacggttcaagtctttactgactcggagtaccagctcccgtacgtcctcggctcggcgcatcaaggatgcctcccgccgtttccagcagacgtcttcatggtgccacagtatggatacctcaccctgaacaacgggagtcaggcggtaggacgctcttccttttactgcctggagtactttccttctcagatgctgcgtaccggaaacaactttaccttcagctacacctttgaggacgttcctttccacagcagctacgctcacagccagagtttggaccggctgatgaatcctctgatcgaccagtatctgtattacttgagcaaaacaaacgctccaagcggaaccaccacgatgtccaggcttcagttttctcaggccggagcgagtgacattcgggaccagtctaggaactggcttcctggaccctgttaccgccagcagcgagtatcaaaaacagctgcggataacaacaacagtgattattcgtggactggagctaccaagtaccacctcaatggaagagactctctggtgaatccgggcccagctatggccagccacaaggacgatgaagaaaaatattttcctcagagcggggttctcatctttggaaaacaagactcgggaaaaactaatgtggacattgaaaaggtcatgattacagacgaagaggaaatcaggaccaccaatcccgtggctacggagcagtatggttctgtatctaccaacctccagagcggcaacacacaggcagccaccacagatgtcaacacacaaggcgttcttccaggcatggtctggcaggacagagacgtgtacctgcaaggacccatctgggcaaagattcctcacacggacggacactttcacccttctcccctcatgggaggatttggactcaaacaccctcctccgcaaatcctcatcaagaatacccccgtacctgcgaatccttcgaccacattcagcgcggcaaagtttgcttctttcatcacacagtactctacggggcaggtcagcgtggagattgagtgggagctgcagaaggagaacagcaaacgctggaaccccgaaatccagtacacttccaactacaacaagtctgttaatgtggactttactgtggacactaatggtgtgtattcagagcctcgccccattggcacaagatacctgactcgtaatctgtaa

SEQ ID NO: 11817 - DNA, 2208 bp, Artificial Sequence
  source: /note="Description of Artificial Sequence: Synthetic polynucleotide"
atggctgccgatggttatcttccagattggctcgaggacactctctctgaaggaataagacagtggtggaagctcaaacctggcccaccaccaccaaagcccgcagagcggcatcaggacgacagcaggggtcttgtgcttcctgggtacaagtacctcggacccttcaacggactcgacaagggagagccggtcaacgaggcagacgccgcggccctcgagcacgacaaggcctacgaccggcagctcgacagcggagacaacccgtacctcaagtacaaccacgccgacgcggagtttcaggagcgtcttaaagaagatacgtcttttgggggcaacctcggacgagcagtcttccaggcgaaaaagagggttcttgaacctctgggcctggttgaggaacctgttaagacggctccgggaaaaaagaggccggtagagcattctcctgcggagccagactcctcctcgggaaccggaaaggcgggccagcagcctgcgagaaagagattgaatttcggtcagactggagacgcagactccgtacctgacccccagcctctcggacagccaccagcagccccctctggtctgggaactaatacgatggctacaggcagtggcgcaccaatggcagacaataacgagggcgccgacggagtgggtaattcctcgggaaattggcattgcgattccacatggatgggcgacagagtcatcaccaccagcacccgaacctgggccctgcccacctacaacaaccacctctacaagcaaatctccagccaatctggagcctcaaacgacaaccactactttggctacagcaccccttgggggtattttgacttcaacagattccactgtcacttctccccacgtgactggcaaagactcatcaacaacaactggggattccgacccaagagactcaacttcaagctctttaacattcaagtcaaagaggtcacgcagaatgacggtacgacgacgattgccaataaccttaccagcacggttcaagtctttactgactcggagtaccagctcccgtacgtcctcggctcggcgcatcaaggatgcctcccgccgtttccagcagacgtcttcatggtgccacagtatggatacctcaccctgaacaacgggagtcaggcggtaggacgctcttccttttactgcctggagtactttccttctcagatgctgcgtaccggaaacaactttaccttcagctacacctttgaggacgttcctttccacagcagctacgctcacagccagagtttggaccggctgatgaatcctctgatcgaccagtatctgtattacttgagcaaaacaaacgctccaagcggaaccaccacgatgtccaggcttcagttttctcaggccggagcgagtgacattcgggaccagtctaggaactggcttcctggaccctgttaccgccagcagcgagtatcaaaaacagctgcggataacaacaacagtgattattcgtggactggagctaccaagtaccacctcaatggaagagactctctggtgaatccgggcccagctatggccagccacaaggacgatgaagaaaaatattttcctcagagcggggttctcatctttggaaaacaagactcgggaaaaattaatgtggacattgaaaaggtcatgattacagacgaagaggaaatcaggaccaccaatcccgtggctacggagcagtatggttctgtatctaccaacctccagagcggcaacacacaggcagccaccacagatgtcaacacacaaggcgttcttccaggcatggtctggcaggacagagacgtgtacctgcaaggacccatctgggcaaagattcctcacacggacggacactttcacccttctcccctcatgggaggatttggactcaaacaccctcctccgcaaatcctcatcaagaatacccccgtacctgcgaatccttcgaccacattcagcgcggcaaagtttgcttctttcatcacacagtactctacggggcaggtcagcgtggagattgagtgggagctgcagaaggagaacagcaaacgctggaaccccgaaatccagtacacttccaactacaacaagtctgttaatgtggactttactgtggacactaatggtgtgtattcagagcctcgccccattggcacaagatacctgactcgtaatctgtaa

SEQ ID NO: 11818 - DNA, 2208 bp, Artificial Sequence
  source: /note="Description of Artificial Sequence: Synthetic polynucleotide"
atggctgccgatggttatcttccagattggctcgaggacactctctctgaaggaataagacagtggtggaagctcaaacctggcccaccaccactaaagcccgcagagcggcatcaggacgacagcaggggtcttgtgcttcctgggtacaagtacctcggacccttcaacggactcgacaagggagagccggtcaacgaggcagacgccgcggccctcgagcacgacaaggcctacgaccggcagctcgacagcggagacaacccgtacctcaagtacaaccacgccgacgcggagtttcaggagcgtcttaaagaagatacgtcttttgggggcaacctcggacgagcagtcttccaggcgaaaaagagggttcttgaacctctgggcctggttgaggaacctgttaagacggctccgggaaaaaagaggccggtagagcattctcctgcggagccagactcctcctcgggaaccggaaaggcgggccagcagcctgcgagaaagagattgaatttcggtcagactggagacgcagactccgtacctgacccccagcctctcggacagccaccagcagccccctctggtctgggaactaatacgatggctacaggcagtggcgcaccaatggcagacaataacgagggcgccgacggagtgggtaattcctcgggaaattggcattgcgattccacatggatgggcgacagagtcatcaccaccagcacccgaacctgggccctgcccacctacaacaaccacctctacaagcaaatctccagccaatctggagcctcaaacgacaaccactactttggctacagcaccccttgggggtattttgacttcaacagattccactgtcacttctccccacgtgactggcaaagactcatcaacaacaactggggattccgacccaagagactcaacttcaagctctttaacattcaagtcaaagaggtcacgcagaatgacggtacgacgacgattgccaataaccttaccagcacggttcaagtctttactgactcggagtaccagctcccgtacgtcctcggctcggcgcatcaaggatgcctcccgccgtttccagcagacgtcttcatggtgccacagtatggatacctcaccctgaacaacgggagtcaggcggtaggacgctcttccttttactgcctggagtactttccttctcagatgctgcgtaccggaaacaactttaccttcagctacacctttgaggacgttcctttccacagcagctacgctcacagccagagtttggaccggctgatgaatcctctgatcgaccagtatctgtattacttgagcaaaacaaacgctccaagcggaaccaccacgatgtccaggcttcagttttctcaggccggagcgagtgacattcgggaccagtctaggagctggcttcctggaccctgttaccgccagcagcgagtatcaaaaacagctgcggataacaacaacagtgattattcgtggactggagctaccaagtaccacctcaatggaagagactctctggtgaatccgggcccagctatggccagccacaaggacgatgaagaaaaatattttcctcagagcggggttctcatctttggaaaacaagactcgggaaaaactaatgtggacattgaaaaggtcatgattacagacgaagaggaaatcaggaccaccaatcccgtggctacggagcagtatggttctgtatctaccaacctccagagcggcaacacacaggcagccaccacagatgtcaacacacaaggcgttcttccaggcatggtctggcaggacagagacgtgtacctgcaaggacccatctgggcaaagattcctcacacggacggacactttcacccttctcccctcatgggaggatttggactcaaacaccctcctccgcaaatcctcatcaagaatacccccgtacctgcgaatccttcgaccacattcagcgcggcaaagtttgcttctttcatcacacagtactctacggggcaggtcagcgtggagattgagtgggagctgcagaaggagaacagcaaacgctggaaccccgaaatccagtacacttccaactacaacaagtctgttaatgtggactttactgtggacactaatggtgtgtattcagagcctcgccccattggcacaagatacctgactcgtaatctgtaa

SEQ ID NO: 11819 - DNA, 2208 bp, Artificial Sequence
  source: /note="Description of Artificial Sequence: Synthetic polynucleotide"
atggctgccgatggttatcttccagattggctcgaggacactctctctgaaggaataagacagtggtggaagctcaaacctggcccaccaccaccaaagcccgcagagcggcatcaggacgacagcaggggtcttgtgcttcctgggtacaagtacctcggacccttcaacggactcgacaagggagagccggtcaacgaggcagacgccgcggccctcgagcacgacaaggcctacgaccggcagctcgacagcggagacaacccgtacctcaagtacaaccacgccgacgcggagtttcaggagcgtcttaaagaagatacgtcttttgggggcaacctcggacgagcagtcttccaggcgaaaaagagggttcttgaacctctaggcctggttgaggaacctgttaagacggctccgggaaaaaagaggccggtagagcattctcctgcggagccagactcctcctcgggaaccggaaaggcgggccagcagcctgcgagaaagagattgaatttcggtcagactggagacgcagactccgtacctgacccccagcctctcggacagccaccagcagccccctctggtctgggaactaatacgatggctacaggcagtggcgcaccaatggcagacaataacgagggcgccgacggagtgggtaattcctcgggaaattggcattgcgattccacatggatgggcgacagagtcatcaccaccagcacccgaacctgggccctgcccacctacaacaaccacctctacaagcaaatctccagccaatctggagcctcaaacgacaaccactactttggctacagcaccccttgggggtattttgacttcaacagattccactgtcacttctccccacgtgactggcaaagactcatcaacaacaactggggattccgacccaagagactcaacttcaagctctttaacattcaagtcaaagaggtcacgcagaatgacggtacgacgacgattgccaataaccttaccagcacggttcaagtctttactgactcggagtaccagctcccgtacgtcctcggctcggcgcatcaaggatgcctcccgccgtttccagcagacgtcttcatggtgccacagtatggatacctcaccctgaacaacgggagtcaggcggtaggacgctcttccttttactgcctggagtactttccttctcagatgctgcgtaccggaaacaactttaccttcagctacacctttgaggacgttcctttccacagcagctacgctcacagccagagtttggaccggctgatgaatcctctgatcgaccagtatctgtattacttgagcaaaacaaacgctccaagcggaaccaccacgatgtccaggcttcagttttctcaggccggagcgagtgacattcgggaccagtctaggaactggcttcctggaccctgttaccgccagcagcgagtatcaaaaacagctgcggataacaacaacagtgattattcgtggactggagctaccaagtaccacctcaatggaagagactctctggtgaatccgggcccagctatggccagccacaaggacgatgaagaaaaatattttcctcagagcggggttctcatctttggaaaacaagactcgggaaaaactaatgtggacattgaaaaggtcatgattacagacgaagaggaaatcgggaccaccaatcccgtggctacggagcagtatggttctgtatctaccaacctccagagcggcaacacacaggcagccaccacagatgtcaacacacaaggcgttcttccaggcatggtctggcaggacagagacgtgtacctgcaaggacccatctgggcaaagattcctcacacggacggacactttcacccttctcccctcatgggaggatttggactcaaacaccctcctccgcaaatcctcatcaagaatacccccgtacctgcgaatccttcgaccacattcagcgcggcaaagtttgcttctttcatcacacagtactctacggggcaggtcagcgtggagattgagtgggagctgcagaaggagaacagcaaacgctggaaccccgaaatccagtacacttccaactacaacaagtctgttaatgtggactttactgtggacactaatggtgtgtattcagagcctcgccccattggcacaagatacctgactcgtaatctgtaa

SEQ ID NO: 11820 - DNA, 2208 bp, Artificial Sequence
  source: /note="Description of Artificial Sequence: Synthetic polynucleotide"
atggctgccgatggttatcttccagattggctcgaggacactctctctgaaggaataagacagtggtggaagctcaaacctggcccaccaccaccaaagcccgcagagcggcatcaggacgacagcaggggtcttgtgcttcctgggtacaagtacctcggacccttcaacggactcgacaagggagagccggtcaacgaggcagacgccgcggccctcgagcacgacaaggcctacgaccggcagctcgacagcggagacaacccgtacctcaagtacaaccacgccgacgcggagtttcaggagcgtcttaaagaagatacgtcttttgggggcaacctcggacgagcagtcttccaggcgaaaaagagggttcttgaacctctgggcctggttgaggaacctgttaagacggctccgggaaaaaagaggccggtagagcattctcctgcggagccagactcctcctcgggaaccggaaaggcgggccagcagcctgcgagaaagagattgaatttcggtcagactggagacgcagactccgtacctgacccccagcctctcggacagccaccagcagccccctctggtctgggaactaatacgatggctacaggcagtggcgcaccaatggcagacaataacgagggcgccgacggagtgggtaattcctcgggaaattggcattgcgattccacatggatgggcgacagagtcatcaccaccagcacccgaacctgggccctgcccacctacaacaaccacctctacaagcaaatctccagccaatctggagcctcaaacgacaaccactactttggctacagcaccccttgggggtattttgacttcaacagattccactgtcacttctccccacgtgactggcaaagactcatcaacaacaactggggattccgacccaagagactcaacttcaagctctttaacattcaagtcaaagaggtcacgcagaatgacggtacgacgacgattgccaataaccttaccagcacggttcaagtctttactgactcggagtaccggctcccgtacgtcctcggctcggcgcatcaaggatgcctcccgccgtttccagcagacgtcttcatggtgccacagtatggatacctcaccctgaacaacgggagtcaggcggtaggacgctcttccttttactgcctggagtactttccttctcagatgctgcgtaccggaaacaactttaccttcagctacacctttgaggacgttcctttccacagcagctacgctcacagccagagtttggaccggctgatgaatcctctgatcgaccagtatctgtattacttgagcaaaacaaacgctccaagcggaaccaccacgatgtccaggcttcagttttctcaggccggagcgagtgacattcgggaccagtctaggaactggcttcctggaccctgttaccgccagcagcgagtatcaaaaacagctgcggataacaacaacagtgattattcgtggactggagctaccaagtaccacctcaatggaagagactctctggtgaatccgggcccagctatggccagccacaaggacgatgaagaaaaatattttcctcagagcggggttctcatctttggaaaacaagactcgggaaaaactaatgtggacattgaaaaggtcatgattacagacgaagaggaaatcaggaccaccaatcccgtggctacggagcagtatggttctgtatctaccaacctccagagcggcaacacacaggcagccaccacagatgtcaacacacaaggcgttcttccaggcatggtctggcaggacagagacgtgtacctgcaaggacccatctgggcaaagattcctcacacggacggacactttcacccttctcccctcatgggaggatttggactcaaacaccctcctccgcaaatcctcatcaagaatacccccgtacctgcgaatccttcgaccacattcagcgcggcaaagtttgcttctttcatcacacagtactctacggggcaggtcagcgtggagattgagtgggagctgcagaaggagaacagcaaacgctggaaccccgaaatccagtacacttccaactacaacaagtctgttaatgtggactttactgtggacactaatggtgtgtattcagagcctcgccccattggcacaagatacctgactcgtaatctgtaa

SEQ ID NO: 11821 - DNA, 2208 bp, Artificial Sequence
  source: /note="Description of Artificial Sequence: Synthetic polynucleotide"
atggctgccgatggttatcttccagattggctcgaggacactctctctgaaggaataagacagtggtggaagctcaaacctggcccaccaccaccaaagcccgcagagcggcatcaggacgacagcaggggtcttgtgcttcctgggtacaagtacctcggacccttcaacggactcgacaagggagagccggtcaacgaggcagacgccgcggccctcgagcacgacaaggcctacgaccggcagctcgacagcggagacaacccgtacctcaagtacaaccacgccgacgcggagtttcaggagcgtcttaaagaagatacgtcttttgggggcaacctcggacgagcagtcttccaggcgaaaaagagggttcttgaacctctgggcctggttgaggaacctgttaagacggctccgggaaaaaagaggccggtagagcattctcctgcggagccagactcctcctcgggaaccggaaaggcgggccagcagcctgcgagaaagagattgaatttcggtcagactggagacgcagactccgtacctgacccccagcctctcggacagccaccagcagccccctctggtctgggaactaatacgatggctacaggcagtggcgcaccaatggcagacaataacgagggcgccgacggagtgggtaattcctcgggaaattggcattgcgattccacatggatgggcgacagagtcatcaccaccagcacccgaacctgggccctgcccacctacaacaaccacctctacaagcaaatctccagccaatctggagcctcaaacgacaaccactactttggctacagcaccccttgggggtattttgacttcaacagattccactgtcacttctccccacgtgactggcaaagactcatcaacaacaactggggattccgacccaagagactcaacttcaagctctttaacattcaagtcaaagaggtcacgcagaatgacggtacgacgacgattgccaataaccttaccagcacggttcaagtctttactgactcggagtaccagctcccgtacgtcctcggctcggcgcatcaaggatgcctcccgccgtttccagcagacgtcttcatggtgccacagtatggatacctcaccctgaacaacgggagtcaggcggtaggacgctcttccttttactgcctggagtactttccttctcagatgctgcgtaccgggaacaactttaccttcagctacacctttgaggacgttcctttccacagcagctacgctcacagccagagtttggaccggctgatgaatcctctgatcgaccagtatctgtattacttgagcaaaacaaacgctccaagcggaaccaccacgatgtccaggcttcagttttctcaggccggagcgagtgacattcgggaccagtctaggaactggcttcctggaccctgttaccgccagcagcgagtatcaaaaacagctgcggataacaacaacagtgattattcgtggactggagctaccaagtaccacctcaatggaagagactctctggtgaatccgggcccagctatggccagccacaaggacgatgaagaaaaatattttcctcagagcggggttctcatctttggaaaacaggactcgggaaaaaccaatgtggacattgaaaaggtcatgattacagacgaagaggaaatcaggaccaccaatcccgtggctacggagcagtatggttctgtatctaccaacctccagagcggcaacacacaggcagccaccacagatgtcaacacacaaggcgttcttccaggcatggtctggcaggacagagacgtgtacctgcaaggacccatctgggcaaagattcctcacacggacggacactttcacccttctcccctcatgggaggatttggactcaaacaccctcctccgcaaatcctcatcaagaatacccccgtacctgcgaatccttcgaccacattcagcgcggcaaagtttgcttctttcatcacacagtactctacggggcaggtcagcgtggagattgagtgggagctgcagaaggagaacagcaaacgctggaaccccaaaatccagtacacttccaactacaacaagtctgttaatgtggactttactgtggacactaatggtgtgtattcagagcctcgccccattggcacaagatacctgactcgtaatctgtaa

SEQ ID NO: 11822 - DNA, 2208 bp, Artificial Sequence
  source: /note="Description of Artificial Sequence: Synthetic polynucleotide"
atggctgccgatggttatcttccagattggctcgaggacactctctctgaaggaataagacagtggtggaagctcaaacctggcccaccaccaccaaagcccgcagagcggcatcaggacgacagcaggggtcttgtgcttcctgggtacaagtacctcggacccttcaacggactcgacaagggagagccggtcaacgaggcagacgccgcggccctcgagcacgacaaggcctacgaccggcagctcgacagcggagacaacccgtacctcaagtacaaccacgccgacgcggagtctcaggagcgtcttaaagaagatacgtcttttgggggcaacctcggacgagcagtcttccaggcgaaaaagagggttcttgaacctctgggcctggttgaggaacctgttaagacggctccgggaaaaaagaggccggtagagcattctcctgcggagccagactcctcctcgggaaccggaaaggcgggccagcagcctgcgagaaagagattgaatttcggtcagactggagacgcagactccgtacctgacccccagcctctcggacagccaccagcagccccctctggtctgggaactaatacgatggctacaggcagtggcgcaccaatggcagacaataacgagggcgccgacggagtgggtaattcctcgggaaattggcattgcgattccacatggatgggcgacagagtcatcaccaccagcacccgaacctgggccctgcccacctacaacaaccacctctacaagcaaatctccagccaatctggagcctcaaacgacaaccactactttggctacagcaccccttgggggtattttgacttcaacagattccactgtcacttctccccacgtgactggcaaagactcatcaacaacaactggggattccgacccaagagactcaacttcaagctctttaacattcaagtcaaagaggtcacgcagaatgacggtacgacgacgattgccaataaccttaccagcacggttcaagtctttactgactcggagtaccagctcccgtacgtcctcggctcggcgcatcaaggatgcctcccgccgtttccagcagacgtcttcatggtgccacagtatggatacctcaccctgaacaacgggagtcaggcggtaggacgctcttccttttactgcctggagtactttccttctcagatgctgcgtaccggaaacaactttaccttcagctacacctttgaggacgttcctttccacagcagctacgctcacagccagagtttggaccggctgatgaatcctctgatcgaccagtatctgtattacttgagcaaaacaaacgctccaagcggaaccaccacgatgtccaggcttcagttttctcaggccggagcgagtgacattcgggaccagtctaggaactggcttcctggaccctgttaccgccagcagcgagtatcaaaaacagctgcggataacaacaacagtgattattcgtggactggagctaccaagtaccacctcaatggaagagactctctggtgaatccgggcccagctatggccagccacaaggacgatgaagaaaaatattttcctcagagcggggttctcatctttggaaaacaagactcgggaaaaactaatgtggacattgaaaaggtcatgattacagacgaagaggaaatcaggaccaccaatcccgtggctacggagcagtatggttctgtatctaccaacctccagagcggcaacacacaggcagccaccacagatgtcaacacacaaggcgttcttccaggcatggtctggcaggacagagacgtgtacctgcaaggacccatctgggcaaagattcctcacacggacggacactttcacccttctcccctcatgggaggatttggactcaaacaccctcctccgcaaatcctcatcaagaatacccccgtacctgcgaatccttcgaccacattcagcgcggcaaagtttgcttctttcatcacacagtactctacggggcaggtcagcgtggagattgagtgggagctgcagaaggagaacagcaaacgctggaaccccgaaatccagtacacttccaactacaacaagtctgttaatgtggactttactgtggacactaatggtgtgtattcagagcctcgccccattggcacaagatacctgactcgtaatctgtaa

SEQ ID NO: 11823 - DNA, 2208 bp, Artificial Sequence
  source: /note="Description of Artificial Sequence: Synthetic polynucleotide"
atggctgccgatggttatcttccagattggctcgaggacactctctctgaaggaataagacagtggtggaagctcaaacctggcccaccaccaccaaagcccgcagagcggcatcaggacgacagcaggggtcttgtgcttcctgggtacaagtacctcggacccttcaacggactcgacaagggagagccggtcaacgaggcagacgccgcggccctcgagcacgacaaggcctacgaccggcagctcgacagcggagacaacccgtacctcaagtacaaccacgccgacgcggagtttcaggagcgtcttaaagaagatacgtcttttgggggcaacctcggacgagcagtcttccaggcgaaaaagagggttcttgaacctctgggcctggttgaggaacctgttaagacggctccgggaaaaaagaggccggtagagcattctcctgcggagccagactcctcctcgggaaccggaaaggcgggccagcagcctgcgagaaagagattgaatttcggtcagactggagacgcagactccgtacctgacccccagcctctcggacagccaccagcagccccctctggtctgggaactaatacgatggctacaggcagtggcgcaccaacggcagacaataacgagggcgccgacggagtgggtaattcctcgggaaattggcattgcgattccacatggatgggcgacagagtcatcaccaccagcacccgaacctgggccctgcccacctacaacaaccacctctacaagcaaatctccagccaatctggagcctcaaacgacaaccactactttggctacagcaccccttgggggtattttgacttcaacagattccactgtcacttctccccacgtgactggcaaagactcatcaacaacaactggggattccgacccaagagactcaacttcaagctctttaacattcaagtcaaagaggtcacgcagaatgacggtacgacgacgattgccaataaccttaccagcacggttcaagtctttactgactcggagtaccagctcccgtacgtcctcggctcggcgcatcaaggatgcctcccgccgtttccagcagacgtcttcatggtgccacagtatggatacctcaccctgaacaacgggagtcaggcggtaggacgctcttccttttactgcctggagtactttccttctcagatgctgcgtaccggaaacaactttaccttcagctacacctttgaggacgttcctttccacagcagctacgctcacagccagagtttggaccggctgatgaatcctctgatcgaccagtatctgtattacttgagcaaaacaaacgctccaagcggaaccaccacgatgtccaggcttcagttttctcaggccggagcgagtgacattcgggaccagtctaggaactggcttcctggaccctgttaccgccagcagcgagtatcaaaaacagctgcggataacaacaacagtgattattcgtggactggagctaccaagtaccacctcaatggaagagactctctggtgaatccgggcccagctatggccagccacaaggacgatgaagaaaaatattttcctcagagcggggttctcatctttggaaaacaagactcgggaaaaactaatgtggacattgaaaaggtcatgattacagacgaagaggaaatcaggaccaccaatcccgtggctacggagcagtatggttctgtatctaccaacctccagagcggcaacacacaggcagccaccacagatgtcaacacacaaggcgttcttccaggcatggtctggcaggacagagacgtgtacctgcaaggacccatctgggcaaagattcctcacacggacggacactttcacccttctcccctcatgggaggatttggactcaaacaccctcctccgcaaatcctcatcaagaatacccccgtacctgcgaatccttcgaccacattcagcgcggcaaagtttgcttctttcatcacacagtactctacggggcaggtcagcgtggagattgagtgggagctgcagaaggagaacagcaaacgctggaaccccgaaatccagtacacttccaactacaacaagtctgttaatgtggactttactgtggacactaatggtgtgtattcagagcctcgccccattggcacaagatacctgactcgtaatctgtaa

SEQ ID NO: 11824 - DNA, 2208 bp, Artificial Sequence
  source: /note="Description of Artificial Sequence: Synthetic polynucleotide"
atggctgccgatggttatcttccagattggctcgaggacactctctctgaaggaataagacagtggtggaagctcaaacctggcccaccaccaccaaagcccgcagagcggcatcaggacgacagcaggggtcttgtgcttcctgggtacaagtacctcggacccttcaacggactcgacaagggagagccggtcaacgaggcagacgccgcggccctcgagcacgacaaggcctacgaccggcagctcgacagcggagacaacccgtacctcaagtacaaccacgccgacgcggagtttcaggagcgtcttaaagaagatacgtcttttgggggcaacctcggacgagcagtcttccaggcgaaaaagagggttcttgaacctctgggcctggttgaggaacctgttaagacggctccgggaaaaaagaggccggtagagcattctcctgcggagccagacgcctcctcgggaaccggaaaggcgggccagcagcctgcgagaaagagattgaatttcggtcagactggagacgcagactccgtacctgacccccagcctctcggacagccaccagcagccccctctggtctgggaactaatacgatggctacaggcagtggcgcaccaatggcagacaataacgagggcgccgacggagtgggtaattcctcgggaaattggcattgcgattccacatggatgggcgacagagtcatcaccaccagcacccgaacctgggccctgcccacctacaacaaccacctctacaagcaaatctccagccaatctggagcctcaaacgacaaccactactttggctacagcaccccttgggggtattttgacttcaacagattccactgtcacttctccccacgtgactggcaaagactcatcaacaacaactggggattccgacccaagagactcaacttcaagctctttaacattcaagtcaaagaggtcacgcagaatgacggtacgacgacgattgccaataaccttaccagcacggttcaagtctttactgactcggagtaccagctcccgtacgtcctcggctcggcgcatcaaggatgcctcccgccgtttccagcagacgtcttcatggtgccacagtatggatacctcaccctgaacaacgggagtcaggcggtaggacgctcttccttttactgcccggagtactttccttctcagatgctgcgtaccggaaacaactttaccttcagctacacctttgaggacgttcctttccacagcagctacgctcacagccagagtttggaccggctgatgaatcctctgatcgaccagtatctgtattacttgagcaaaacaaacgctccaagcggaaccaccacgatgtccaggcttcagttttctcaggccggagcgagtgacattcgggaccagtctaggaactggcttcctggaccctgttaccgccagcagcgagtatcaaaaacagctgcggataacaacaacagtgattattcgtggactggagctaccaagtaccacctcaatggaagagactctctggtgaatccgggcccagctatggccagccacaaggacgatgaagaaaaatattttcctcagagcggggttctcatctttggaaaacaagactcgggaaaaactaatgtggacattgaaaaggtcatgattacagacgaagaggaaatcaggaccaccaatcccgtggctacggagcagtatggttctgtatctaccaacctccagagcggcaacacacaggcagccaccacagatgtcaacacacaaggcgttcttccaggcatggtctggcaggacagagacgtgtacctgcaaggacccatctgggcaaagattcctcacacggacggacactttcacccttctcccctcatgggaggatttggactcaaacaccctcctccgcaaatcctcatcaagaatacccccgtacctgcgaatccttcgaccacattcagcgcggcaaagtttgcttctttcatcacacagtactctacggggcaggtcagcgtggagattgagtgggagctgcagaaggagaacagcaaacgctggaaccccgaaatccagtacacttccaactacaacaagtctgttaatgtggactttactgtggacactaatggtgtgtattcagagcctcgccccattggcacaagatacctgactcgtaatctgtaa

SEQ ID NO: 11825 - DNA, 2208 bp, Artificial Sequence
  source: /note="Description of Artificial Sequence: Synthetic polynucleotide"
atggctgccgatggttatcttccagattggctcgaggacactctctctgaaggaataagacagtggtggaagctcaaacctggcccaccaccaccaaagcccgcagagcggcatcaggacgacagcaggggtcttgtgcttcctgggtacaagtacctcggacccttcaacggactcgacaagggagagccggtcaacgaggcagacgccgcggccctcgagcacgacaaggcctacgaccggcagctcgacagcggagacaacccgtacctcaagtacaaccacgccgacgcggagtttcaggagcgtcttaaagaagatacgtcttttgggggcaacctcggacgagcagtcttccaggcgaaaaagagggttcttgaacctctgggcctggttgaggaacctgttaagacggctccgggaaaaaagaggccggtagagcattctcctgcggagccagactcctcctcgggaaccggaaaggcgggccagcagcctgcgagaaagagattgaatttcggtcagactggagacgcagactccgtacctgacccccagcctctcggacagccaccagcagccccctctggtctgggaactaatacgatggctacaggcagtggcgcaccaatggcagacaataacgagggcgccgacggagtgggtaattcctcgggaaattggcattgcgattccacatggatgggcgacagagtcatcaccaccagcacccgaacctgggccctgcccacctacaacaaccacctctacaagcaaatctccagccaatctggagcctcaaacgacaaccactactttggctacagcaccccttgggggtattttgacttcaacagattccactgtcacttctccccacgtgactggcaaagactcatcaacaacaactggggactccgacccaagagactcaacttcaagctctttaacattcaagtcaaagaggtcacgcagaatgacggtacgacgacgattgccaataaccttaccagcacggttcaagtctttactgactcggagtaccagctcccgtacgtcctcggctcggcgcatcaaggatgcctcccgccgtttccagcagacgtcttcatggtgccacagtatggatacctcaccctgaacaacgggagtcaggcggtaggacgctcttccttttactgcctggagtactttccttctcagatgctgcgtaccggaaacaactttaccttcagctacacctttgaggacgttcctttccacagcagctacgctcacagccagagtttggaccggctgatgaatcctctgatcgaccagtatctgtattacttgagcaaaacaaacgctccaagcggaaccaccacgatgtccaggcttcagttttctcaggccggagcgagtgacattcgggaccagtctaggaactggcttcctggaccctgttaccgccagcagcgagtatcaaaaacagctgcggataacaacaacagtgattattcgtggactggagctaccaagtaccacctcaatggaagagactctctggtgaatccgggcccagctatggccagccacaaggacgatgaagaaaaatattttcctcagagcggggttctcatctttggaaaacaagactcgggaaaaactaatgtggacattgaaaaggtcatgattacagacgaagaggaaatcaggaccaccaatcccgtggctacggagcagtatggttctgtatctaccaacctccagagcggcaacacacaggcagccaccacagatgtcaacacacaaggcgttcttccaggcatggtctggcaggacagagacgtgtacctgcaaggacccatctgggcaaagattcctcacacggacggacactttcacccttctcccctcatgggaggatttggactcaaacaccctcctccgcaaatcctcatcaagaatacccccgtacctgcgaatccttcgaccacattcagcgcggcaaagtttgcttctttcatcacacagtactctacggggcaggtcagcgtggagattgagtgggagctgcagaaggagaacagcaaacgctggaaccccgaaatccagtacacttccaactacaacaagtctgttaatgtggactttactgtggacactaatggtgtgtattcagagcctcgccccattggcacaagatacctgactcgtaatctgtaa

SEQ ID NO: 11826 - DNA, 2208 bp, Artificial Sequence
  source: /note="Description of Artificial Sequence: Synthetic polynucleotide"
atggctgccgatggttatcttccagattggctcgaggacactctctctgaaggaataagacagtggtggaagctcaaacctggcccaccaccaccaaagcccgcagagcggcatcaggacgacagcaggggtcttgtgcttcctgggtacaagtacctcggacccttcaacggactcgacaagggagagccggtcaacgaggcagacgccgcggccctcgagcacgacaaggcctacgaccggcagctcgacagcggagacaacccgtacctcaagtacaaccacgccgacgcggagtttcaggagcgtcttaaagaagatacgtcttttgggggcaacctcggacgagcagtcttccaggcgaaaaagagggttcttgaacctctgggcctggttgaggaacctgttaagacggctccgggaaaaaagaggccggtagagcattttcctgcggagccagactcctcctcgggaaccggaaaggcgggccagcagcctgcgagaaagagattgaatttcggtcagactggagacgcagactccgtacctgacccccagcctctcggacagccaccagcagccccctctggtctgggaactaatacgatggctacaggcagtggcgcaccaatggcagacaataacgagggcgccgacggagtgggtaattcctcgggaaattggcattgcgattccacatggatgggcgacagagtcatcaccaccagcacccgaacctgggccctgcccacctacaacaaccacctctacaagcaaatctccagccaatctggagcctcaaacgacaaccactactttggctacagcaccccttgggggtattttgacttcaacagattccactgtcacttctccccacgtgactggcaaagactcatcaacaacaactggggattccgacccaagagactcaacttcaagctctttaacattcaagtcaaagaggtcacgcagaatgacggtacgacgacgattgccaataaccttaccagcacggttcaagtctttactgactcggagtaccagctcccgtacgtcctcggctcggcgcatcaaggatgcctcccgccgtttccagcagacgtcttcatggtgccacagtatggatacctcaccctgaacaacgggagtcaggcggtaggacgctcttccttttactgcctggagtactttccttctcagatgctgcgtaccggaaacaactttaccttcagctacacctttgaggacgttcctttccacagcagctacgctcacagccagagtttggaccggctgatgaatcctctgatcgaccagtatctgtattacttgagcaaaacaaacgctccaagcggaaccaccacgatgtccaggcttcagttttctcaggccggagcgagtgacattcgggaccagtctaggaactggcttcctggaccctgttaccgccagcagcgagtatcaaaaacagctgcggataacaacaacagtgattattcgtggactggagctaccaagtaccacctcaatggaagagactctctggtgaatccgggcccagctatggccagccacaaggacgatgaagaaaaatattttcctcagagcggggttctcatcttcggaaaacaagactcgggaaaaactaatgtggacattgaaaaggtcatgattacagacgaagaggaaatcaggaccaccaatcccgtggctacggagcagtatggttctgtatctaccaacctccagagcggcaacacacaggcagccaccacagatgtcaacacacaaggcgttcttccaggcatggtctggcaggacagagacgtgtacctgcaaggacccatctgggcaaagattcctcacacggacggacactttcacccttctcccctcatgggaggatttggactcaaacaccctcctccgcaaatcctcatcaagaatacccccgtacctgcgaatccttcgaccacattcagcgcggcaaagtttgcttctttcatcacacagtactctacggggcaggtcagcgtggagattgagtgggagctgcagaaggagaacagcaaacgctggaaccccgaaatccagtacacttccaactacaacaagtctgttaatgtggactttactgtggacactaatggtgtgtattcagagcctcgccccattggcacaagatacctgactcgtaatctgtaa

SEQ ID NO: 11827 - DNA, 2208 bp, Artificial Sequence
  source: /note="Description of Artificial Sequence: Synthetic polynucleotide"
atggctgccgatggttatcttccagattggctcaaggacactctctctgaaggaataagacagtggtggaagctcaaacctggcccaccaccaccaaagcccgcagagcggcatcaggacgacagcaggggtcttgtgcttcctgggtacaagtacctcggacccttcaacggactcgacaagggagagccggtcaacgaggcagacgccgcggccctcgagcacgacaaggcctacgaccggcagctcgacagcggagacaacccgtacctcaagtacaaccacgccgacgcggagtttcaggagcgtcttaaagaagatacgtcttttgggggcaacctcggacgagcagtcttccaggcgaaaaagagggttcttgaacctctgggcctggttgaggaacctgttaagacggctccgggaaaaaagaggccggtagagcattctcctgcggagccagactcctcctcgggaaccggaaaggcgggccagcagcctgcgagaaagagattgaatttcggtcagactggagacgcagactccgtacctgacccccagcctctcggacagccaccagcagccccctctggtctgggaactaatacgatggctacaggcagtggcgcaccaatggcagacaataacgagggcgccgacggagtgggtaattcctcgggaaattggcattgcgattccacatggatgggcgacagagtcatcaccaccagcacccgaacctgggccctgcccacctacaacaaccacctctacaagcaaatctccagccaatctggagcctcaaacgacaaccactactttggctacagcaccccttgggggtattttgacttcaacagattccactgtcacttctccccacgtgactggcaaagactcatcaacaacaactggggattccgacccaagagactcaacttcaagctctttaacattcaagtcaaagaggtcacgcagaatgacggtacgacgacgattgccaataaccttaccagcacggttcaagtctttactgactcggagtaccagctcccgtacgtcctcggctcggcgcatcaaggatgcctcccgccgtttccagcagacgtcttcatggtgccacagtatggatacctcaccctgaacaacgggagtcaggcggtaggacgctcttccttttactgcctggagtactttccttctcagatgctgcgtaccggaaacaactttaccttcagctacacctttgaggacgttcctttccacagcagctacgctcacagccagagtttggaccggctgatgaatcctctgatcgaccagtatctgtattacttgagcaaaacaaacgctccaagcggaaccaccacgatgtccaggcttcagttttctcaggccggagcgagtgacattcgggaccagtctaggaactggcttcctggaccctgttaccgccagcagcgagtatcaaaaacagctgcggataacaacaacagtgattattcgtggactggagctaccaagtaccacctcaatggaagagactctctggtgaatccgggcccagctatggccagccacaaggacgatgaagaaaaatattttcctcagagcggggttctcatctttggaaaacaagactcgggaaaaaccaatgtggacattgaaaaggtcatgattacagacgaagaggaaatcaggaccaccaatcccgtggctacggagcagtatggttctgtatctaccaacctccagagcggcaacacacaggcagccaccacagatgtcaacacacaaggcgttcttccaggcatggtctggcaggacagagacgtgtacctgcaaggacccatctgggcaaagattcctcacacggacggacactttcacccttctcccctcatgggaggatttggactcaaacaccctcctccgcaaatcctcatcaagaatacccccgtacctgcgaatccttcgaccacattcagcgcggcaaagtttgcttctttcatcacacagtactctacggggcaggtcagcgtggagattgagtgggagctgcagaaggagaacagcaaacgctggaaccccgaaatccagtacacttccaactacaacaagtctgttaatgtggactttactgtggacactaatggtgtgtattcagagcctcgccccattggcacaagatacctgactcgtaatctgtaa

SEQ ID NO: 11828 - DNA, 2208 bp, Artificial Sequence
  source: /note="Description of Artificial Sequence: Synthetic polynucleotide"
atggctgccgatggttatcttccagattggctcgaggacactctctctgaaggaataagacagtggtggaagctcaaacctggcccaccaccaccaaagcccgcagagcggcatcaggacgacagcaggggtcttgtgcttcctgggtacaagtacctcggacccttcaacggactcgacaagggagagccggtcaacgaggcagacgtcgcggccctcgagcacgacaaggcctacgaccggcagctcgacagcggagacaacccgtacctcaagtacaaccacgccgacgcggagtttcaggagcgtcttaaagaagatacgtcttttgggggcaacctcggacgagcagtcttccaggcgaaaaggagggttcttgaacctctgggcctggttgaggaacctgttaagacggctccgggaaaaaagaggccggtagagcattctcctgcggagccagactcctcctcgggaaccggaaaggcgggccagcagcctgcgagaaagagattgaatttcggtcagactggagacgcagactccgtacctgacccccagcctctcggacagccaccagcagccccctctggtctgggaactaatacgatggctacaggcagtggcgcaccaatggcagacaataacgagggcgccgacggagtgggtaattcctcgggaaattggcattgcgattccacatggatgggcgacagagtcatcaccaccagcacccgaacctgggccctgcccacctacaacaaccacctctacaagcaaatctccagccaatctggagcctcaaacgacaaccactactttggctacagcaccccttgggggtattttgacttcaacagattccactgtcacttctccccacgtgactggcaaagactcatcaacaacaactggggattccgacccaagagactcaacttcaagctctttaacattcaagtcaaagaggtcacgcagaatgacggtacgacgacgattgccaataaccttaccagcacggttcaagtctttactgactcggagtaccagctcccgtacgtcctcggctcggcgcatcaaggatgcctcccgccgtttccagcagacgtcttcatggtgccacagtatggatacctcaccctgaacaacgggagtcaggcggtaggacgctcttccttttactgcctggagtactttccttctcagatgctgcgtaccggaaacaactttaccttcagctacacctttgaggacgttcctttccacagcagctacgctcacagccagagtttggaccggctgatgaatcctctgatcgaccagtatctgtattacttgagcaaaacaaacgctccaagcggaaccaccacgatgtccaggcttcagttttctcaggccggagcgagtgacattcgggaccagtctaggaactggcttcctggaccctgttaccgccagcagcgagtatcaaaaacagctgcggataacaacaacagtgattattcgtggactggagctaccaagtaccacctcaatggaagagactctctggtgaatccgggcccagctatggccagccacaaggacgatgaagaaaaatattttcctcagagcggggttctcatctttggaaaacaagactcgggaaaaactaatgtggacattgaaaaggtcatgattacagacgaagaggaaatcaggaccaccaatcccgtggctacggagcagtatggttctgtatctaccaacctccagagcggcaacacacaggcagccaccacagatgtcaacacacaaggcgttcttccaggcatggtctggcaggacagagacgtgtacctgcaaggacccatctgggcaaagattcctcacacggacggacactttcacccttctcccctcatgggaggatttggactcaaacaccctcctccgcaaatcctcatcaagaatacccccgtacctgcgaatccttcgaccacattcagcgcggcaaagtttgcttctttcatcacacagtactctacggggcaggtcagcgtggagattgagtgggagctgcagaaggagaacagcaaacgctggaaccccgaaatccagtacacttccaactacaacaagtctgttaatgtggactttactgtggacactaatggtgtgtattcagagcctcgccccattggcacaagatacctgactcgtaatctgtaa

SEQ ID NO: 11829 - DNA, 2208 bp, Artificial Sequence
  source: /note="Description of Artificial Sequence: Synthetic polynucleotide"
atggctgccgatggttatcttccagattggctcgaggacactctctctgaaggaataagacagtggtggaagctcaaacctggcccaccaccaccaaagcccgcagagcggcatcaggacgacagcaggggtcttgtgcttcctgggtacaagtacctcggacccttcaacggactcgacaagggagagccggtcaacgaggcagacgccgcggccctcgagcacgacaaggcctacgaccggcagctcgacagcggagacaacccgtacctcaagtacaaccacgccgacgcggagtttcaggagcgtcttaaagaagatacgtcttttgggggcaacctcggacgagcagtcttccaggcgaaaaagagggttcttgaacctctgggcctggttgaggaacctgttaagacggctccgggaaaaaagaggccggtagagcattctcctgcggagccagactcctcctcgggaaccggaaaggcgggccagcagcctgcgagaaagagattgaatttcggtcagactggagacgcagactccgtacctgacccccagcctctcggacagccaccagcagccccctctggtctgggaactaatacgatggctacaggcagtggcgcaccaatggcagacaataacgagggcgccgacggagtgggtaattcctcgggaaattggcattgcgattccacatggatgggcgacagagtcatcaccaccagcacccgaacctgggccctgcccacctacaacaaccacctctacaagcaaatctccagccaatctggagcctcaaacgacaaccactactttggctacagcaccccttgggggtattttgacttcaacagattccactgtcacttctccccacgtgactggcaaagactcatcaacaacaactggggattccgacccaagagactcaacttcaagctctttaacattcaagtcaaagaggtcacgcagaatgacggtacgacgacgattgccaataaccttaccagcacggttcaagtctttactgactcggagtaccagctcccgtacgtcctcggctcggcgcatcaaggatgcctcccgccgtttccagcagacgtcttcatggtgccacagtatggatacctcaccctgaacaacgggagtcaggcggtaggacgctcttccttttactgcctggagtactttccttctcagatgctgcgtaccggaaacaactttaccttcagctacacctttgaggacgttcctttccacagcagctacgctcacagccagagtttggaccggctgatgaatcctctgatcgaccagtatctgtattacttgagcaaaacaaacgctctaagcggaaccaccacgatgtccaggcttcagttttctcaggccggagcgagtgacattcgggaccagtctaggaactggcttcctggaccctgttaccgccagcagcgagtatcaaaaacagctgcggataacaacaacagtgattattcgtggactggagctaccaagtaccacctcaatggaagagactctctggtgaatccgggcccagctatggccagccacaaggacgatgaagaaaaatattttcctcagagcgaggttctcatctttggaaaacaagactcgggaaaaactaatgtggacattgaaaaggtcatgattacagacgaagaggaaatcaggaccaccaatcccgtggctacggagcagtatggttctgtatctaccaacctccagagcggcaacacacaggcagccaccacagatgtcaacacacaaggcgttcttccaggcatggtctggcaggacagagacgtgtacctgcaaggacccatctgggcaaagattcctcacacggacggacactttcacccttctcccctcatgggaggatttggactcaaacaccctcctccgcaaatcctcatcaagaatacccccgtacctgcgaatccttcgaccacattcagcgcggcaaagcttgcttctttcatcacacagtactctacggggcaggtcagcgtggagattgagtgggagctgcagaaggagaacagcaaacgctggaaccccgaaatccagtacacttccaactacaacaagtctgttaatgtggactttactgtggacactaatggtgtgtattcagagcctcgccccattggcacaagatacctgactcgtaatctgtaa

SEQ ID NO: 11830 - DNA, 2208 bp, Artificial Sequence
  source: /note="Description of Artificial Sequence: Synthetic polynucleotide"
atggctgccgatggttatcttccagattggctcgaggacactctctctgaaggaataagacagtggtggaagctcaaacctggcccaccaccaccaaagcccgcagagcggcatcaggacgacagcaggggtcttgtgcttcctgggtacaagtacctcggacccttcaacggactcgacaagggagagccggtcaacgaggcagacgccgcggccctcgagcacgacaaggcctacgaccggcagctcgacagcggagacaacccgtacctcaagtacaaccacgccgacgcggagtttcaggagcgtcttaaagaagatacgtcttttgggggcaacctcggacgagcagtcttccaggcgaaaaagagggttcttgaacctctgggcctggttgaggaacctgttaagacggctccgggaaaaaagaggccggtagagcattctcctgcggagccagactcctcctcgggaaccggaaaggcgggccagcagcctgcgagaaagagattgaatttcggtcagactggagacgcagactccgtacctgacccccagcctctcggacagccaccagcagccccctctggtctgggaactaatacgatggctacaggcagtggcgcaccaatggcagacaataacgagggcgccgacggagtgggtaattcctcgggaaattggcattgcgattccacatggatgggcgacagagtcatcaccaccagcacccgaacctgggccctgcccacctacaacaaccacctctacaagcaaatctccagccaatctggagcctcaaacgacaaccactactttggctacagcaccccttgggggtattttgacttcaacagattccactgtcacttctccccacgtgactggcaaagactcatcaacaacaactggggattccgacccaagagactcaacttcaagctctttaacattcaagtcaaagaggtcacgcagaatgacggtacgacgacgattgccaataaccttaccagcacggttcaagtctttactgactcggagtaccagctcccgtacgccctcggctcggcgcatcaaggatgcctcccgccgtttccagcagacgtcttcatggtgccacagtatggatacctcaccctgaacaacgggagtcaggcggtaggacgctcttccttttactgcctggagtactttccttctcagatgctgcgtaccggaaacaactttaccttcagctacacctttgaggacgttcctttccacagcagctacgctcacagccagagtttggaccggctgatgaatcctctgatcgaccagtatctgtattacttgagcaaaacaaacgctccaagcggaaccaccacgatgtccaggcttcagttttctcaggccggagcgagtgacattcgggaccagtctaggaactggcttcctggaccctgttaccgccagcagcgagtatcaaaaacagctgcggataacaacaacagtgattattcgtggactggagctaccaagtaccacctcaatggaagagactctctggtgaatccgggcccagctatggccagccacaaggacgatgaagaaaaatattttcctcagagcggggttctcatctttggaaaacaagactcgggaaaaaccaatgtggacattgaaaaggtcatgattacagacgaagaggaaatcaggaccaccaatcccgtggctacggagcagtatggttctgtatctaccaacctccagagcggcaacacacaggcagccaccacagatgtcaacacacaaggcgttcttccaggcatggtctggcaggacagagacgtgtacctgcaaggacccatctgggcaaagattcctcacacggacggacactttcacccttctcccctcatgggaggatttggactcaaacaccctcctccgcaaatcctcatcaagaatacccccgtacctgcgaatccttcgaccacattcagcgcggcaaagtttgcttctttcatcacacagtactctacggggcaggtcagcgtggagattgagtgggagctgcagaaggagaacagcaaacgctggaaccccgaaatccagtacacttccaactacaacaagtctgttaatgtggactttactgtggacactaatggtgtgtattcagagcctcgccccattggcacaagatacctgactcgtaatctgtaa

SEQ ID NO: 11831 - DNA, 2208 bp, Artificial Sequence
  source: /note="Description of Artificial Sequence: Synthetic polynucleotide"
atggctgccgatggttatcttccagattggctcgaggacactctctctgaaggaataagacagtggtggaagctcaaacctggcccaccaccaccaaagcccgcagagcggcatcaggacgacagcaggggtcttgtgcttcctgggtacaagtacctcggacccttcaacggactcgacaagggagagccggtcaacgaggcagacgccgcggccctcgagcacgacaaggcctacgaccggcagctcgacagcggagacaacccgtacctcaagtacaaccacgccgacgcggagtttcaggagcgtcttaaagaagatacgtcttttgggggcaacctcggacgagcagtcttccaggcgaaaaagagggttcttgaacctctgggcctggttgaggaacctgttaagacggctccgggaaaaaagaggccggtagagcattctcctgcggagccagactcctcctcgggaaccggaaaggcgggccagcagcctgcgagaaagagattgaatttcggtcagactggagacgcagactccgtacctgacccccagcctctcggacagccaccagcagccccctctggtctgggaactaatacgatggctacaggcagtggcgcaccaatggcagacaataacgagggcgccgacggagtgggtaattcctcgggaaattggcattgcgattccacatggatgggcgacagagtcatcaccaccagcacccgaacctgggccctgcccacctacaacaaccacctctacaagcaaatctccagccaatctggagcctcaaacgacaaccactactttggctacagcaccccttgggggtattttgacttcagcagattccactgtcacttctccccacgtgactggcaaagactcatcaacaacaactggggattccgacccaagagactcaacttcaagctctttaacattcaagtcaaagaggtcacgcagaatgacggtacgacgacgattgccaataaccttaccagcacggttcaagtctttactgactcggagtaccagctcccgtacgtcctcggctcggcgcatcaaggatgcctcccgccgtttccagcagacgtcttcatggtgccacagtatggatacctcaccctgaacaacgggagtcaggcggtaggacgctcttccttttactgcctggagtactttccttctcagatgctgcgtaccggaaacaactttaccttcagctacacctttgaggacgttcctttccacagcagctacgctcacagccagagtttggaccggctgatgaatcctctgatcgaccagtatctgtattacttgagcaaaacaaacgctccaagcggaaccaccacgatgtccaggcttcagttttctcaggccggagcgagtgacattcgggaccagtctaggaactggcttcctggaccctgttaccgccagcagcgagtatcaaaaacagctgcggataacaacaacagtgattattcgtggactggagctaccaagtaccacctcaatggaagagactctctggtgaatccgggcccagctatggccagccacaaggacgatgaagaaaaatattttcctcagagcggggttctcatctttggaaaacaagactcgggaaaaaccaatgtggacattgaaaaggtcatgattacagacgaagaggaaatcaggaccaccaatcccgtggctacggagcagtatggttctgtatctaccaacctccagagcggcaacacacaggcagccaccacagatgtcaacacacaaggcgttcttccaggcatggtctggcaggacagagacgtgtacctgcaaggacccatctgggcaaagattcctcacacggacggacactttcacccttctcccctcatgggaggatttggactcaaacaccctcctccgcaaatcctcatcaagaatacccccgtacctgcgaatccttcgaccacattcagcgcggcaaagtttgcttctttcatcacacagtactctacggggcaggtcagcgtggagattgagtgggagctgcagaaggagaacagcaaacgctggaaccccgaaatccagtacacttccaactacaacaagtctgttaatgtggactttactgtggacactaatggtgtgtattcagagcctcgccccattggcacaagatacctgactcgtaatctgtaa

SEQ ID NO: 11832 - DNA, 2208 bp, Artificial Sequence
  source: /note="Description of Artificial Sequence: Synthetic polynucleotide"
atggctgccgatggttatcttccagattggctcgaggacactctctctgaaggaataagacagtggtggaagctcaaacctggcccaccaccaccaaagcccgcagagcggcatcaggacgacagcaggggtcttgtgcttcctgggtacaagtacctcggacccttcaacggactcgacaagggagagccggtcaacgaggcagacgccgcggccctcgagcacgacaaggcctacgaccggcagctcgacagcggagacaacccgtacctcaagtacaaccacgccgacgcggagtttcaggagcgtcttaaagaagatacgtcttttgggggcaacctcggacgagcagtcttccaggcgaaaaagagggttcttgaacccctgggcctggttgaggaacctgttaagacggctccgggaaaaaagaggccggtagagcattctcctgcggagccagactcctcctcgggaaccggaaaggcgggccagcagcctgcgagaaagagattgaatttcggtcagactggagacgcagactccgtacctgacccccagcctctcggacagccaccagcagccccctctggtctgggaactaatacgatggctacaggcagtggcgcaccaatggcagacaataacgagggcgccgacggagtgggtaattcctcgggaaattggcattgcgattccacatggatgggcgacagagtcatcaccaccagcacccgaacctgggccctgcccacctacaacaaccacctctacaagcaaatctccagccaatctggagcctcaaacgacaaccactacgttggctacagcaccccttgggggtattttgacttcaacagattccactgtcacttctccccacgtgactggcaaagactcatcaacaacaactggggattccgacccaagagactcaacttcaagctctttaacattcaagtcaaagaggtcacgcagaatgacggtacgacgacgattgccaataaccttaccagcacggttcaagtctttactgactcggagtaccagctcccgtacgtcctcggctcggcgcatcaaggatgcctcccgccgtttccagcagacgtcttcatggtgccacagtatggatacctcaccctgaacaacgggagtcaggcggtaggacgctcttccttttactgcctggagtactttccttctcagatgctgcgtaccggaaacaactttaccttcagctacacctttgaggacgttcctttccacagcagctacgctcacagccagagtttggaccggctgatgaatcctctgatcgaccagtatctgtattacttgagcaaaacaaacgctccaagcggaaccaccacgatgtccaggcttcagttttctcaggccggagcgagtgacattcgggaccagtctaggaactggcttcctggaccctgttaccgccagcagcgagtatcaaaaacagctgcggataacaacaacagtgattattcgtggactggagctaccaagtaccacctcaatggaagagactctctggtgaatccgggcccagctatggccagccacaaggacgatgaagaaaaatattttcctcagagcggggttctcatctttggaaaacaagactcgggaaaaactaatgtggacattgaaaaggtcatgattacagacgaagaggaaatcaggaccaccaatcccgtggctacggagcagtatggttctgtatctaccaacctccagagcggcaacacacaggcagccaccacagatgtcaacacacaaggcgttcttccaggcatggtctggcaggacagagacgtgtacctgcaaggacccatctgggcaaagattcctcacacggacggacactttcacccttctcccctcatgggaggatttggactcaaacaccctcctccgcaaatcctcatcaagaatacccccgtacctgcgaatccttcgaccacattcagcgcggcaaagtttgcttctttcatcacacagtactctacggggcaggtcagcgtggagattgagtgggagctgcagaaggagaacagcaaacgctggaaccccgaaatccagtacacttccaactacaacaagtctgttaatgtggactttactgtggacactaatggtgtgtattcagagcctcgccccattggcacaagatacctgactcgtaatctgtaa

SEQ ID NO: 11833 - DNA, 2208 bp, Artificial Sequence
  source: /note="Description of Artificial Sequence: Synthetic polynucleotide"
atggctgccgatggttatcttccagattggctcgaggacactctctctgaaggaataagacagtggtggaagctcaaacctggcccaccaccaccaaagcccgcagagcggcatcaggacgacagcaggggtcttgtgcttcctgggtacaagtacctcggacccttcaacggactcgacaagggagagccggtcaacgaggcagacgccgcggccctcgagcacgacaaggcctacgaccggcagctcgacagcggagacaacccgtacctcaagtacaaccacgccgacgcggagtttcaggagcgtcttaaagaagatacgtcttttgggggcaacctcggacgagcagtcttccaggcgaaaaagagggttcttgaacctctgggcctggttgaggaacctgttaagacggctccgggaaaaaagaggccggtagagcattctcctgcggagccagactcctcctcgggaaccggaaaggcgggccagcagcctgcgagaaagagattgaatttcggtcagactggagacgcagactccgtacctgacccccagcctctcggacagccaccagcagccccctctggtctgggaactaatacgatggctacaggcagtggcgcaccaatggcagacaataacgagggcgccgacggagtgggtaattcctcgggaaattggcattgcgattccacatggatgggcgacagagtcatcaccaccagcacccgaacctgggccctgcccacctacaacaaccacctctacaagcaaatctccagccaatctggagcctcaaacgacaaccactactttggctacagcaccccttgggggcattttgacttcaacagattccactgtcacttctccccacgtgactggcaaagactcatcaacaacaactggggattccgacccaagagactcaacttcaagctctttaacattcaagtcaaagaggtcacgcagaatgacggtacgacgacgattgccaataaccttaccagcacggttcaagtctttactgactcggagtaccagctcccgtacgtcctcggctcggcgcatcaaggatgcctcccgccgtttccagcagacgtcttcatggtgccacagtatggatacctcaccctgaacaacgggagtcaggcggtaggacgctcttccttttactgcctggagtactttccttctcagatgctgcgtaccggaaacaactttaccttcagctacacctttgaggacgttcctttccacagcagctacgctcacagccagagtttggaccggctgatgaatcctctgatcgaccagtatctgtattacttgagcaaaacaaacgctccaagcggaaccaccacgatgtccaggcttcagttttctcaggccggagcgagtgacattcgggaccagtctaggaactggcttcctggaccctgttaccgccagcagcgagtatcaaaaacagctgcggataacaacaacagtgattattcgtggactggagctaccaagtaccacctcaatggaagagactctctggtgaatccgggcccagctatggccagccacaaggacgatgaagaaaaatattttcctcagagcggggttctcatctttggaaaacaagactcgggaaaaaccaatgtggacattgaaaaggtcatgattacagacgaagaggaaatcaggaccaccaatcccgtggctacggagcagtatggttctgtatctaccaacctccagagcggcaacacacaggcagccaccacagatgtcaacacacaaggcgttcttccaggcatggtctggcaggacagagacgtgtacctgcaaggacccatctgggcaaagattcctcacacggacggacactttcacccttctcccctcatgggaggatttggactcaaacaccctcctccgcaaatcctcatcaagaatacccccgtacctgcgaatccttcgaccacattcagcgcggcaaagtttgcttctttcatcacacagtactctacggggcaggtcagcgtggagattgagtgggagctgcagaaggagaacagcaaacgctggaaccccgaaatccagtacacttccaactacaacaagtctgttaatgtggactttactgtggacactaatggtgtgtattcagagcctcgccccattggcacaagatacctgactcgtaatctgtaa

SEQ ID NO: 11834 - DNA, 2208 bp, Artificial Sequence
  source: /note="Description of Artificial Sequence: Synthetic polynucleotide"
atggctgccgatggttatcttccagattggctcgaggacactctctctgaaggaataagacagtggtggaagctcaaacctggcccaccaccaccaaagcccgcagagcggcatcaggacgacagcaggggtcttgtgcttcctgggtacaagtacctcggacccttcaacggactcgacaagggagagccggtcaacgaggcagacgtcgcggccctcgagcacgacaaggcctacgaccggcagctcgacagcggagacaacccgtacctcaagtacaaccacgccgacgcggagtttcaggagcgtcttaaagaagatacgtcttttgggggcaacctcggacgagcagtcttccaggcgaaaaagagggttcttgaacctctgggcctggttgaggaacctgttaagacggctccgggaaaaaagaggccggtagagcattctcctgcggagccagactcctcctcgggaaccggaaaggcgggccagcagcctgcgagaaagagattgaatttcggtcagactggagacgcagactccgtacctgacccccagcctctcggacagccaccagcagccccctctggtctgggaactaatacgatggctacaggcagtggcgcaccaatggcagacaataacgagggcgccgacggagtgggtaattcctcgggaaattggcattgcgattccacatggatgggcgacagagtcatcaccaccagcacccgaacctgggccctgcccacctacaacaaccacctctacaagcaaatctccagccaatctggagcctcaaacgacaaccactactttggctacagcaccccttgggggtattttgacttcaacagattccactgtcacttctccccacgtgactggcaaagactcatcaacaacgactggggattccgacccaagagactcaacttcaagctctttaacattcaagtcaaagaggtcacgcagaatgacggtacgacgacgattgccaataaccttaccagcacggttcaagtctttactgactcggagtaccagctcccgtacgtcctcggctcggcgcatcaaggatgcctcccgccgtttccagcagacgtcttcatggtgccacagtatggatacctcaccctgaacaacgggagtcaggcggtaggacgctcttccttttactgcctggagtactttccttctcagatgctgcgtaccggaaacaactttaccttcagctacacctttgaggacgttcctttccacagcagctacgctcacagccagagtttggaccggctgatgaatcctctgatcgaccagtatctgtattacttgagcaaaacaaacgctccaagcggaaccaccacgatgtccaggcttcagttttctcaggccggagcgagtgacattcgggaccagtctaggaactggcttcctggaccctgttaccgccagcagcgagtatcaaaaacagctgcggataacaacaacagtgattattcgtggactggagctaccaagtaccacctcaatggaagagactctctggtgaatccgggcccagctatggccagccacaaggacgatgaagaaaaatattttcctcagagcggggttctcatctttggaaaacaggactcgggaaaaactaatgtggacattgaaaaggtcatgattacagacgaagaggaaatcaggaccaccaatcccgtggctacggagcagtatggttctgtatctaccaacctccagagcggcaacacacaggcagccaccacagatgtcaacacacaaggcgttcttccaggcatggtctggcaggacagagacgtgtacctgcaaggacccatctgggcaaagattcctcacacggacggacactttcacccttctcccctcatgggaggatttggactcaaacaccctcctccgcaaatcctcatcaagaatacccccgtacctgcgaatccttcgaccacattcagcgcggcaaagtttgcttctttcatcacacagtactctacggggcaggtcagcgtggagattgagtgggagctgcagaaggagaacagcaaacgctggaaccccgaaatccagtacacttccaactacaacaagtctgttaatgtggactttactgtggacactaatggtgtgtattcagagcctcgccccattggcacaagatacctgactcgtaatctgtaa

SEQ ID NO: 11835 - DNA, 2208 bp, Artificial Sequence
  source: /note="Description of Artificial Sequence: Synthetic polynucleotide"
atggctgccgatggttatcttccagattggctcgaggacactctctctgaaggaataagacagtggtggaagctcaaacctggcccaccaccaccaaagcccgcagagcggcatcaggacgacagcaggggtcttgtgcttcctgggtacaagtacctcggacccttcaacggactcgacaagggagagccggtcaacgaggcagacgccgcggccctcgagcacgacaaggcctacgaccggcagctcgacagcggagacaacccgtacctcaagtacaaccacgccgacgcggagtttcaggagcgtcttaaagaagatacgtcttttgggggcaacctcggacgagcagtcttccaggcgaaaaagagggttcttgaacctctgggcctggttgaggaacctgttaagacggctccgggaaaaaagaggccggtagagcattctcctgcggagccagactcctcctcgggaaccggaaaggcgggccagcagcctgcgagaaagagattgaatttcggtcagactggagacgcagactccgtacctgacccccagcctctcggacagccaccagcagccccctctggtctgggaactaatacgatggctacaggcagtggcgcaccaatggcagacaataacgagggcgccgacggagtgggtaattcctcgggaaattggcattgcgattccacatggatgggcgacagagtcatcaccaccagcacccgaacctgggccctgcccacctacaacaaccacctctacaagcaaatctccagccaatctggagcctcaaacgacaaccactactttggctacagcaccccttgggggtattttgacttcaacagattccactgtcacttctccccacgtgactggcaaagactcatcaacaacaactggggattccgacccaagagactcaacttcaagctctttaacattcaagtcaaagaggtcacgcagaatgacggtacgacgacgattgccaataaccttaccagcacggttcaagtctttactgactcggagtaccagctcccgtacgtcctcggctcggcgcatcaaggatgcctcccgccgtttccagcagacgtcttcatggtgccacagtatggatacctcaccctgaacaacgggagtcaggcggtaggacgctcttccttttactgcctggagtactttccttctcagatgctgcgtaccggaaacaactttaccttcagctacacctttgaggacgttcctttccacagcagctacgctcacagccagagtttggaccggctgatgaatcctctgatcgaccagtatctgtattacttgagcaaaacaaacgctccaagcggaaccaccacgatgtccaggcttcagttttctcaggccggagcgagtgacattcgggaccagtctaggaactggcttcctggaccctgttaccgccagcagcgagtatcaaaaacagctgcggataacaacaacagtgattattcgtggactggagctaccaagtaccacctcaatggaagagactctctggtgaatccgggcccagctatggccagccacaaggacgatgaagaaaaatattttcctcagagcggggttctcatctttggaaaacaagactcggaaaaaaccaatgtggacattgaaaaggtcatgattacagacgaagaggaaatcaggaccaccaatcccgtggctacggagcagtatggttctgtatctaccaacctccagagcggcaacacacaggcagccaccacagatgtcaacacacaaggcgttcttccaggcatggtctggcaggacagagacgtgtacctgcaaggacccatctgggcaaagattcctcacacggacggacactttcacccttctcccctcatgggaggatttggactcaaacaccctcctccgcaaatcctcatcaagaatacccccgtacctgcgaatccttcgaccacattcagcgcggcaaagtttgcttctttcatcacacagtactctacggggcaggtcagcgtggagattgagtgggagctgcagaaggagaacagcaaacgctggaaccccgaaatccagtacacttccaactacaacaagtctgttaatgtggactttactgtggacactaatggtgtgtattcagagcctcgccccattggcacaagatacctgactcgtaatctgtaa

SEQ ID NO: 11836 - DNA, 2208 bp, Artificial Sequence
  source: /note="Description of Artificial Sequence: Synthetic polynucleotide"
atggctgccgatggttatcttccagattggctcgaggacactctctctgaaggaataagacagtggtggaagctcaaacctggcccaccaccaccaaagcccgcagagcggcatcaggacgacagcaggggtcttgtgcttcctgggtacaagtacctcggacccttcaacggactcgacaagggagagccggtcaacgaggcagacgccgcggccctcgagcacgacaaggcctacgaccggcagctcgacagcggagacaacccgtacctcaagtacaaccacgccgacgcggagtttcaggagcgtcttaaagaagatacgtcttttgggggcaacctcggacgagcagtcttccaggcgaaaaagagggttcttgaacctctgggcctggttgaggaacctgttaagacggctccgggaaaaaagaggccggtagagcattctcctgcggagccagactcctcctcgggaaccggaaaggcgggccagcagcctgcgagaaagagattgaatttcggtcagactggagacgcagactccgtacctgacccccagcctctcggacagccaccagcagccccctctggtctgggaactaatacgatggctacaggcagtggcgcaccaatggcagacaataacgagggcgccgacggagtgggtaattcctcgggaaattggcattgcgattccacatggatgggcgacagagtcatcaccaccagcacccgaacctgggccctgcccacctacaacaaccacctctacaagcaaatctccagccaatctggagcctcaaacgacaaccactactttggctacagcaccccttgggggtattttgacttcaacagattccactgtcacttctccccacgtgactggcaaagactcatcaacaacaactggggattccgacccaagagactcaacttcaagctctttaacattcaagtcaaagaggtcacgcagaatgacggtacgacgacgattgccaataaccttaccagcacggttcaagtctttactgactcggagtaccagctcccgtacgtcctcggctcggcgcatcaaggatgcctcccgccgtttccagcagacgtcttcatggtgccacagtatggatacctcaccctgaacaacgggagtcaggcggtaggacgctcttccttttactgcctggagtactttccttctcagatgctgcgtaccggaaacaactttaccttcagctacacctttgaggacgttcctttccacagcagctacgctcacagccagagtttggaccggctgatgaatcctctgatcgaccagtatctgtattacttgagcaaaacaaacgctccaagcggaaccaccacgatgtccaggcttcagttttctcaggccggagcgagtgacattcgggaccagtctaggaactggcttcctggaccctgttaccgccagcagcgagtatcaaaaacagctgcggataacaacaacagtgattattcgtggactggagctaccaagtaccacctcaatggaagagactctctggtgaatccgggcccagctatggccagccacaaggacgatgaagaaaaatattttcctcagagcggggttctcatctttggaaaacaagactcgggaaaaactaatgtggacattgaaaaggtcatgattacagacgaagaggaaatcaggaccaccaatcccgtggctacggagcagtatggttctgtatctaccaacctccagagcggcaacacacaggcagccaccacagatgtcaacacacaaggcgttcttccaggcatggtctggcaggacagagacgtgtacctgcaaggacccatctgggcaaagattcctcacacggacggacactttcacccttctcccctcatgggaggatttggactcaaacaccctcctccgcaaatcctcatcaagaatacccccgtacctgcgaatccttcgaccacattcagcgcggcaaagtttgcttctttcatcacacagtactctacggggcaggtcagcgtggagattgagtgggagctgcagaaggagaacagcaaacgctggaaccccgaaatccagtacacttccaactacaacaagtctgttaatgtggactttactgtggacactaatggtgtgtattcagagcctcgccccattggcacaagatacctgactcgtaatctgtaa

SEQ ID NO: 11837 - DNA, 2208 bp, Artificial Sequence
  source: /note="Description of Artificial Sequence: Synthetic polynucleotide"
atggctgccgatggttatcttccagattggctcgaggacactctctctgaaggaataagacagtggtggaagctcaaacctggcccaccaccaccaaagcccgcagagcggcatcaggacgacagcaggggtcttgtgcttcctgggtacaagtacctcggacccttcaacggactcgacaagggagagccggtcaacgaggcagacgtcgcggccctcgagcacgacaaggcctacgaccggcagctcgacagcggagacaacccgtacctcaagtacaaccacgccgacgcggagtttcaggagcgtcttaaagaagatacgtcttttgggggcaacctcggacgagcagtcttccaggcgaaaaagagggttcttgaacctctgggcctggttgaggaacctgttaagacggctccgggaaaaaagaggccggtagagcattctcctgcggagccagactcctcctcgggaaccggaaaggcgggccagcagcctgcgagaaagagattgaatttcggtcagactggagacgcagactccgtacctgacccccagcctctcggacagccaccagcagccccctctggtctgggaactaatacgatggctacaggcagtggcgcaccaatggcagacaataacgagggcgccgacggagtgggtaattcctcgggaaattggcattgcgattccacatggatgggcgacagagtcatcaccaccagcacccgaacctgggccctgcccacctacaacaaccacctctacaagcaaatctccagccaatctggagcctcaaacgacaaccactactttggctacagcaccccttgggggtattttgacttcaacagattccactgtcacttctccccacgtgactggcaaagactcatcaacaacaactggggattccgacccaagagactcaacttcaagctctttaacattcaagtcaaagaggtcacgcagaatgacggtacgacgacgattgccaataaccttaccagcacggttcaagtctttactgactcggagtaccagctcccgtacgtcctcggctcggcgcatcaaggatgcctcccgccgtttccagcagacgtcttcatggtgccacagtatggatacctcaccctgaacaacgggagtcaggcggtaggacgctcttccttttactgcctggagtactttccttctcagatgctgcgtaccggaaacaactttaccttcagctacacctttgaggacgttcctttccacagcagctacgctcacagccagagtttggaccggctgatgaatcctctgatcgaccagtatctgtattacttgagcaaaacaaacgctccaagcggaaccaccacgatgtccaggcttcagttttctcaggccggagcgagtgacattcgggaccagtctaggaactggcttcctggaccctgttaccgccagcagcgagtatcaaaaacagctgcggataacaacaacagtgattattcgtggactggagctaccaagtaccacctcaatggaagagactctctggtgaatccgggcccagctatggccagccacaaggacgatgaagaaaaatattttcctcagagcggggttctcatctttggaaaacaagactcgggaaaaactaatgtggacattgaaaaggtcatgattacagacgaagaggaaatcaggaccaccaatcccgtggctacggagcagtatggttctgtatctaccaacctccagagcggcaacacacaggcagccaccacagatgtcaacacacaaggcgttcttccaggcatggtctggcaggacagagacgtgtacctgcaaggacccatctgggcaaagattcctcacacggacggacactttcacccttctcccctcatgggaggatttggactcaaacaccctcctccgcaaatcctcatcaagaatacccccgtacctgcgaatccttcgaccacattcagcgcggcaaagtttgcttctttcatcacacagtactctacggggcaggtcagcgtggagattgagtgggagctgcagaaggagaacagcaaacgctggaaccccgaaatccagtacacttccaactacaacaagtctgttaatgtggactttactgtggacactaatggtgtgtattcagagcctcgccccattggcacaagatacctgactcgtaatctgtaa

SEQ ID NO: 11838 - DNA, 2208 bp, Artificial Sequence
  source: /note="Description of Artificial Sequence: Synthetic polynucleotide"
atggctgccgatggttatcttccagattggctcgaggacactctctctgaaggaataagacagtggtggaagctcaaacctggcccaccaccaccaaagcccgcagagcggcatcaggacgacagcaggggtcttgtgcttcctgggtacaagtacctcggacccttcaacggactcgacaagggagagccggtcaacgaggcagacgccgcggccctcgagcacgacaaggcctacgaccggcagctcgacagcggagacaacccgtacctcaagtacaaccacgccgacgcggagtttcaggagcgtcttaaagaagatacgtcttttgggggcaacctcggacgagcagtcttccaggcgaaaaagagggttcttgaacctctgggcctggttgaggaacctgttaagacggctccgggaaaaaagaggccggtagagcattctcctgcggagccagactcctcctcgggaaccggaaaggcgggccagcagcctgcgagaaagagattgaatttcggtcagactggagacgcagactccgtacctgacccccagcctctcggacagccaccagcagccccctctggtctgggaactaatacgatggctacaggcagtggcgcaccaatggcagacaataacgagggcgccgacggagtgggtaattcctcgggaaattggcattgcgattccacatggatgggcgacagagtcatcaccaccagcacccgaacctgggccctgcccacctacaacaaccacctctacaagcaaatctccagccaatctggagcctcaaacgacaaccactactttggctacagcaccccttgggggtattttgacttcaacagattccactgtcacttctccccacgtgactggcaaagactcatcaacaacaactggggattccgacccaagagactcaacttcaagctctttaacattcaagtcaaagaggtcacgcagaatgacggtacgacgacgattgccaataaccttaccagcacggttcaagtctttactgactcggagtaccagctcccgtacgtcctcggctcggcgcatcaaggatgcctcccgccgtttccagcagacgtcttcatggtgccacagtatggatacctcaccctgaacaacgggagtcaggcggtaggacgctcttccttttactgcctggagtactttccttctcagatgctgcgtaccggaaacaactttaccttcagctacacctttgaggacgttcctttccacagcagctacgctcacagccagagtttggaccggctgatgaatcctctgatcgaccagtatctgtattacttgagcaaaacaaacgctccaagcggaaccaccacgatgtccaggcttcagttttctcaggccggagcgagtgacattcgggaccagtctaggaactggcttcctggaccctgttaccgccagcagcgagtatcaaaaacagctgcggataacaacaacagtgattatccgtggactggagctaccaagtaccacctcaatggaagagactctctggtgaatccgggcccagctatggccagccacaaggacgatgaagaaaaatattttcctcagagcggggttctcatctttggaaaacaagactcgggaaaaaccaatgtggacattgaaaaggtcatgattacagacgaagaggaaatcaggaccaccaatcccgtggctacggagcagtatggttctgtatctaccaacctccagagcggcaacacacaggcagccaccacagatgtcaacacacaaggcgttcttccaggcatggtctggcaggacagagacgtgtacctgcaaggacccatctgggcaaagattcctcacacggacggacactttcacccttctcccctcatgggaggatttggactcaaacaccctcctccgcaaatcctcatcaagaatacccccgtacctgcgaatccttcgaccacattcagcgcggcaaagtttgcttctttcatcacacagtactctacggggcaggtcagcgtggagattgagtgggagctgcagaaggagaacagcaaacgctggaaccccgaaatccagtacacttccaactacaacaagtctgttaatgtggactttactgtggacactaatggtgtgtattcagagcctcgccccattggcacaagatacctgactcgtaatctgtaa

SEQ ID NO: 11839 - DNA, 2208 bp, Artificial Sequence
  source: /note="Description of Artificial Sequence: Synthetic polynucleotide"
atggctgccgatggttatcttccagattggctcgaggacactctctctgaaggaataagacagtggtggaagctcaaacctggcccaccaccaccaaagcccgcagagcggcatcaggacgacagcaggggtcttgtgcttcctgggtacaagtacctcggacccttcaacggactcgacaagggagagccggtcaacgaggcagacgccgcggccctcgagcacgacaaggcctacgaccggcagctcgacagcggagacaacccgtacctcaagtacaaccacgccgacgcggagtttcaggagcgtcttaaagaagatacgtcttttgggggcaacctcggacgagcagtcttccaggcgaaaaagagggttcttgaacctctgggcctggttgaggaacctgttaagacggctccgggaaaaaagaggccggtagagcattctcctgcggagccagactcctcctcgggaaccggaaaggcgggccagcagcctgcgagaaagagattgaatttcggtcagactggagacgcagactccgtacctgacccccagcctctcggacagccaccagcagccccctctggtctgggaactaatacgatggctacaggcagtggcgcaccaatggcagacaataacgagggcgccgacggagtgggtaattcctcgggaaattggcattgcgattccacatggatgggcgacagagtcatcaccaccagcacccgaacctgggccctgcccacctacaacaaccacctctacaagcaaatctccagccaatctggagcctcaaacgacaaccactactttggctacagcaccccttgggggtattttgacttcaacagattccactgtcacttctccccacgtgactggcaaagactcatcaacaacaactggggattccgacccaagagactcaacttcaagctctttaacattcaagtcaaagaggtcacgcagaatgacggtacgacgacgattgccaataaccttaccagcacggttcaagtctttactgactcggagtaccagctcccgtacgtcctcggctcggcgcatcaaggatgcctcccgccgtttccagcagacgtcttcatggtgccacagtatggatacctcaccctgaacaacgggagtcaggcggtaggacgctcttccttttactgcctggagtactttccttctcagatgctgcgtaccggaaacaactttaccttcagctacacctttgaggacgttcctttccacagcagctacgctcacagccagagtttggaccggctgatgaatcctctgatcgaccagtatctgtattacttgagcaaaacaaacgctccaagcggaaccaccacgatgtccaggcttcagttttctcaggccggagcgagtgacattcgggaccagtctaggaactggcttcctggaccctgttaccgccagcagcgagtatcaaaaacagctgcggataacaacaacagtgattattcgtggactggagctaccaagtaccacctcaatggaagagactctctggtgaatccgggcccagctatggccagccacaaggacgatgaagaaaaatattttcctcagagcggggttctcatctttggaaaacaagactcgggaaaaactaatgtggacattgaaaaggtcatgattacagacgaagaggaaatcaggaccaccaatcccgtggctacggagcagtatggttctgtatctaccaacctccagagcggcaacacacaggcagccaccacagatgtcaacacacaaggcgctcttccaggcatggtctggcaggacagagacgtgtacctgcaaggacccatctgggcaaagattcctcacacggacggacactttcacccttctcccctcatgggaggatttggactcaaacaccctcctccgcaaatcctcatcaagaatacccccgtacctgcgaatccttcgaccacattcagcgcggcaaagtttgcttctttcatcacacagtactctacggggcaggtcagcgtggagattgagtgggagctgcagaaggagaacagcaaacgctggaaccccgaaatccagtacacttccaactacaacaagtctgttaatgtggactttactgtggacactaatggtgtgtattcagagcctcgccccattggcacaagatacctgactcgtaatctgtaa

SEQ ID NO: 11840 - DNA, 2208 bp, Artificial Sequence
  source: /note="Description of Artificial Sequence: Synthetic polynucleotide"
atggctgccgatggttatcttccagattggctcgaggacactctctctgaaggaataagacagtggtggaagctcaaacctggcccaccaccaccaaagcccgcagagcggcatcaggacgacagcaggggtcttgtgcttcctgggtacaagtacctcggacccttcaacggactcgacaagggagagccggtcaacgaggcagacgccgcggccctcgagcacgacaaggcctacgaccggcagctcgacagcggagacaacccgtacctcaagtacaaccacgccgacgcggagtttcaggagcgtcttaaagaagatacgtcttttgggggcaacctcggacgagcagtcttccaggcgaaaaagagggttcttgaacctctgggcctggttgaggaacctgttaagacggctccgggaaaaaagaggccggtagagcattctcctgcggagccagactcctcctcgggaaccggaaaggcgggccagcagcctgcgagaaagagattgaatttcggtcagactggagacgcagactccgtacctgacccccagcctctcggacagccaccagcagccccctctggtctgggaactaatacgatggctacaggcagtggcgcaccaatggcagacaataacgagggcgccgacggagtgggtaattcctcgggaaattggcattgcgattccacatggatgggcgacagagtcatcaccaccagcacccgaacctgggccctgcccacctacaacaaccacctctacaagcaaatctccagccaatctggagcctcaaacgacaaccactactttggctacagcaccccttgggggtattttgacttcaacagattccactgtcacttctccccacgtgactggcaaagactcatcaacaacaactggggattccgacccaagagactcaacttcaagctctttaacattcaagtcaaagaggtcacgcagaatgacggtacgacgacgattgccaataaccttaccagcacggttcaagtctttactgactcggagtaccagctcccgtacgtcctcggctcggcgcatcaaggatgcctcccgccgtttccagcagacgtcttcatggtgccacagtatggatacctcaccctgaacaacgggagtcaggcggtaggacgctcttccttttactgcctggagtactttccttctcagatgctgcgtaccggaaacaactttaccttcagctacacctttgaggacgttcctttccacagcagctacgctcacagccagagtttggaccggctgatgaatcctctgatcgaccagtatctgtattacttgagcaaaacaaacgctccaagcggaaccaccacgatgtccaggcttcagttttctcaggccggagcgagtgacattcgggaccagtctaggaactggcttcctggaccctgttaccgccagcagcgagtatcaaaaacagctgcggataacaacaacagtgattattcgtggactggagctaccaagtaccacctcaatggaagagactctctggtgaatccgggcccagctatggccagccacaaggacgatgaagagaaatattttcctcagagcggggttctcatctttggaaaacaagactcgggaaaaactaatgtggacattgaaaaggtcatgattacagacgaagaggaaatcaggaccaccaatcccgtggctacggagcagtatggttctgtatctaccaacctccagagcggcaacacacaggcagccaccacagatgtcaacacacaaggcgttcttccaggcatggtctggcaggacagagacgtgtacctgcaaggacccatctgggcaaagattcctcacacggacggacactttcacccttctcccctcatgggaggatttggactcaaacaccctcctccgcaaatcctcatcaagaatacccccgtacctgcgaatccttcgaccacattcagcgcggcaaagcttgcttctttcatcacacagtactctacggggcaggtcagcgtggaggttgagtgggagctgcagaaggagaacagcaaacgctggaaccccgaaatccagtacacttccaactacaacaagtctgttaatgtggactttactgtggacactaatggtgtgtattcagagcctcgccccattggcacaagatacctgactcgtaatctgtaa

SEQ ID NO: 11841 - DNA, 2208 bp, Artificial Sequence
  source: /note="Description of Artificial Sequence: Synthetic polynucleotide"
atggctgccgatggttatcttccagattggctcgaggacactctctctgaaggaataagacagtggtggaagctcaaacctggcccaccaccaccaaagcccgcagagcggcatcaggacgacagcaggggtcttgtgcttcctgggtacaagtacctcggacccttcaacggactcgacaagggagagccggtcaacgaggcagacgtcgcggccctcgagcacgacaaggcctacgaccggcagctcgacagcggagacaacccgtacctcaagtacaaccacgccgacgcggagtttcaggagcgtcttaaagaagatacgtcttttgggggcaacctcggacgagcagtcttccaggcgaaaaagagggttcttgaacctctgggcctggttgaggaacctgttaagacggctccgggaaaaaagaggccggtagagcattctcctgcggagccagactcctcctcgggaaccggaaaggcgggccagcagcctgcgagaaagagattgaatttcggtcagactggagacgcagactccgtacctgacccccagcctctcggacagccaccagcagccccctctggtctgggaactaatacgatggctacaggcagtggcgcaccaatggcagacaataacgagggcgccgacggagtgggtaattcctcgggaaattggcattgcgattccacatggatgggcgacagagtcatcaccaccagcacccgaacctgggccctgcccacctacaacaaccacctctacaagcaaatctccagccaatctggagcctcaaacgacaaccactactttggctacagcaccccttgggggtattttgacttcaacagattccactgtcacttctccccacgtgactggcaaagactcatcaacaacaactggggattccgacccaagagactcaacttcaagctctttaacattcaagtcaaagaggtcacgcagaatgacggtacgacgacgattgccaataaccttaccagcacggttcaagtctttactgactcggagtaccagctcccgtacgtcctcggctcggcgcatcaaggatgcctcccgccgtttccagcagacgtcttcatggtgccacagtatggatacctcaccctgaacagcgggagtcaggcggtaggacgctcttccttttactgcctggagtactttccttctcagatgctgcgtaccggaaacaactttaccttcagctacacctttgaggacgttcctttccacagcagctacgctcacagccagagtttggaccggctgatgaatcctctgatcgaccagtatctgtattacttgagcaaaacaaacgctccaagcggaaccaccacgatgtccaggcttcagttttctcaggccggagcgagtgacattcgggaccagtctaggaactggcttcctggaccctgttaccgccagcagcgagtatcaaaaacagctgcggataacaacaacagtgattattcgtggactggagctaccaagtaccacctcaatggaagagactctctggtgaatccgggcccagctatggccagccacaaggacgatgaagaaaaatattttcctcagagcggggttctcatctttggaaaacaagactcgggaaaaactaatgtggacattgaaaaggtcatgattacagacgaagaggaaatcaggaccaccaatcccgtggctacggagcagtatggttctgtatctaccaacctccagagcggcaacacacaggcagccaccacagatgtcaacacacaaggcgttcttccaggcatggtctggcaggacagagacgtgtacctgcaaggacccatctgggcaaagattcctcacacggacggacactttcacccttctcccctcatgggaggatttggactcaaacaccctcctccgcaaatcctcatcaagaatacccccgtacctgcgaatccttcgaccacattcagcgcggcaaagtttgcttctttcatcacacagtactctacggggcaggtcagcgtggagattgagtgggagctgcagaaggagaacagcaaacgctggaaccccgaaatccagtacacttccaactacaacaagtctgttaatgtggactttactgtggacactaatggtgtgtattcagagcctcgccccattggcacaagatacctgactcgtaatctgtaa

SEQ ID NO: 11842 - DNA, 2208 bp, Artificial Sequence
  source: /note="Description of Artificial Sequence: Synthetic polynucleotide"
atggctgccgatggttatcttccagattggctcgaggacactctctctgaaggaataagacagtggtggaagctcaaacctggcccaccaccaccaaagcccgcagagcggcatcaggacgacagcaggggtcttgtgcttcctgggtacaagtacctcggacccttcaacggactcgacaagggagagccggtcaacgaggcagacgtcgcggccctcgagcacgacaaggcctacgaccggcagctcgacagcggagacaacccgtacctcaagtacaaccacgccgacgcggagtttcaggagcgtcttaaagaagatacgtcttttgggggcaacctcggacgagcagtcttccaggcgaaaaagagggttcttgaacctctgggcctggttgaggaacctgttaagacggctccgggaaaaaagaggccggtagagcattctcctgcggagccagactcctcctcgggaaccggaaaggcgggccagcagcctgcgagaaagagattgaatttcggtcagactggaggcgcagactccgtacctgacccccagcctctcggacagccaccagcagccccctctggtctgggaactaatacgatggctacaggcagtggcgcaccaatggcagacaataacgagggcgccgacggagtgggtaattcctcgggaaattggcattgcgattccacatggatgggcgacagagtcatcaccaccagcacccgaacctgggccctgcccacctacaacaaccacctctacaagcaaatctccagccaatctggagcctcaaacgacaaccactactttggctacagcaccccttgggggtattttgacttcaacagattccactgtcacttctccccacgtgactggcaaagactcatcaacaacaactggggattccgacccaagagactcaacttcaagctctttaacattcaagtcaaagaggtcacgcagaatgacggtacgacgacgattgccaataaccttaccagcacggttcaagtctttactgactcggagtaccagctcccgtacgtcctcggctcggcgcatcaaggatgcctcccgccgtttccagcagacgtcttcatggtgccacagtatggatacctcaccctgaacaacgggagtcaggcggtaggacgctcttccttttactgcctggagtactttccttctcagatgctgcgtaccggaaacaactttaccttcagctacacctttgaggacgttcctttccacagcagctacgctcacagccagagtttggaccggctgatgaatcctctgatcgaccagtatctgtattacttgagcaaaacaaacgctccaagcggaaccaccacgatgtccaggcttcagttttctcaggccggagcgagtgacattcgggaccagtctaggaactggcttcctggaccctgttaccgccagcagcgagtatcaaaaacagctgcggataacaacaacagtgattattcgtggactggagctaccaagtaccacctcaatggaagagactctctggtgaatccgggcccagctatggccagccacaaggacgatgaagaaaaatattttcctcagagcggggttctcatctttggaaaacaagactcgggaaaaactaatgtggacattgaaaaggtcatgattacagacgaagaggaaatcaggaccaccaatcccgtggctacggagcagtatggttctgtatctaccaacctccagagcggcaacacacaggcagccaccacagatgtcaacacacaaggcgttcttccaggcatggtctggcaggacagagacgtgtacctgcaaggacccatctgggcaaagattcctcacacggacggacactttcacccttctcccctcatgggaggatttggactcaaacaccctcctccgcaaatcctcatcaagaatacccccgtacctgcgaatccttcgaccacattcagcgcggcaaagtttgcttctttcatcacacagtactctacggggcaggtcagcgtggagattgagtgggagctgcagaaggagaacagcaaacgctggaaccccgaaatccagtacacttccaactacaacaagtctgttaatgtggactttactgtggacactaatggtgtgtattcagagcctcgccccattggcacaagatacctgactcgtaatctgtaa

SEQ ID NO: 11843 - DNA, 2208 bp, Artificial Sequence
  source: /note="Description of Artificial Sequence: Synthetic polynucleotide"
atggctgccgatggttatcttccagattggctcgaggacactctctctgaaggaataagacagtggtggaagctcaaacctggcccaccaccaccaaagcccgcagagcggcatcaggacgacagcaggggtcttgtgcttcctgggtacaagtacctcggacccttcaacggactcgacaagggagagccggtcaacgaggcagacgccgcggccctcgagcacgacaaggcctacgaccggcagctcgacagcggagacaacccgtacctcaagtacaaccacgccgacgcggagtttcaggagcgtcttaaagaagatacgtcttttgggggcaacctcggacgagcagtcttccaggcgaaaaagagggttcttgaacctctgggcctggttgaggaacctgttaagacggctccgggaaaaaagaggccggtagagcattctcctgcggagccagactcctcctcgggaaccggaaaggcgggccagcagcctgcgagaaagagattgaatttcggtcagactggagacgcagactccgtacctgacccccagcctctcggacagccaccagcagccccctctggtctgggaactaatacgatggctacaggcagtggcgcaccaatggcagacaataacgagggcgccgacggagtgggtaattcctcgggaaattggcattgcgattccacatggatgggcgacagagtcatcaccaccagcacccgaacctgggccctgcccacctacaacaaccacctctacaagcaaatctccagccaatctggagcctcaaacgacaaccactactttggctacagcaccccttgggggtattttgacttcaacagattccactgtcacttctccccacgtgactggcaaagactcatcaacaacaactggggattccgacccaagagactcaacttcaagctctttaacattcaagtcaaagaggtcacgcagaatgacggtacgacgacgattgccaataaccttaccagcacggttcaagtctttactgactcggagtaccagctcccgtacgccctcggctcggcgcatcaaggatgcctcccgccgtttccagcagacgtcttcatggtgccacagtatggatacctcaccctgaacaacgggagtcaggcggtaggacgctcttccttttactgcctggagtactttccttctcagatgctgcgtaccggaaacaactttaccttcagctacacctttgaggacgttcctttccacagcagctacgctcacagccagagtttggaccggctgatgaatcctctgatcgaccagtatctgtattacttgagcaaaacaaacgctccaagcggaaccaccacgatgtccaggcttcagttttctcaggccggagcgagtgacattcgggaccagtctaggaactggcttcctggaccctgttaccgccagcagcgagtatcaaaaacagctgcggataacaacaacagtgattattcgtggactggagctaccaagtaccacctcaatggaagagactctctggtgaatccgggcccagctatggccagccacaaggacgatgaagaaaaatattttcctcagagcggggttctcatctttggaaaacaagactcgggaaaaaccaatgtggacattgaaaaggtcatgattacagacgaagaggaaatcaggaccaccaatcccgtggctacggagcagtatggttctgtatctaccaacctccagagcggcaacacacaggcagccaccacagatgtcaacacacaaggcgttcttccaggcatggtctggcaggacagagacgtgtacctgcaaggacccatctgggcaaagattcctcacacggacggacactttcacccttctcccctcatgggaggatttggactcaaacaccctcctccgcaaatcctcatcaagaatacccccgtacctgcgaatccttcgaccacattcagcgcggcaaagtttgcttctttcatcacacagtactctacggggcaggtcagcgtggagattgagtgggagctgcagaaggaggacagcaaacgctggaaccccgaaatccagtacacttccaactacaacaagtctgttaatgtggactttactgtggacactaatggtgtgtattcagagcctcgccccattggcacaagatacctgactcgtaatctgtaa

SEQ ID NO: 11844 - DNA, 2208 bp, Artificial Sequence
  source: /note="Description of Artificial Sequence: Synthetic polynucleotide"
atggctgccgatggttatcttccagattggctcgaggacactctctctgaaggaataagacagtggtggaagctcaaacctggcccaccaccaccaaagcccgcagagcggcatcaggacgacagcaggggtcttgtgcttcctgggtacaagtacctcggacccttcaacggactcgacaagggagagccggtcaacgaggcagacgccgcggccctcgagcacgacaaggcctacgaccggcagctcgacagcggagacaacccgtacctcaagtacaaccacgccgacgcggagtttcaggagcgtcttaaagaagatacgtcttttgggggcaacctcggacgagcagtcttccaggcgaaaaagagggttcttgaacctctgggcctggttgaggaacctgttaagacggctccgggaaaaaagaggccggtagagcattctcctgcggagccagactcctcctcgggaaccggaaaggcgggccagcagcctgcgagaaagagattgaatttcggtcagactggagacgcagactccgtacctgacccccagcctctcggacagccaccagcagccccctctggtctgggaactaatacgatggctacaggcagtggcgcaccaatggcagacaataacgagggcgccgacggagtgggtaattcctcgggaaattggcattgcgattccacatggatgggcgacagagtcatcaccaccagcacccgaacctgggccctgcccacctacaacaaccacctctacaagcaaatctccagccaatctggagcctcaaacgacaaccactactttggctacagcaccccttgggggtattttgacttcaacagattccactgtcacttctccccacgtgactggcaaagactcatcaacaacaactggggattccgacccaagagactcaacttcaagctctttaacattcaagtcaaagaggtcacgcagaatgacggtacgacgacgattgccaataaccttaccagcacggttcaagtctttactgactcggagtaccagctcccgtacgtcctcggctcggcgcatcaaggatgcctcccgccgtttccagcagacgtcttcatggtgccacagtatggatacctcaccctgaacaacgggagtcaggcggtaggacgctcttccttttactgcctggagtactttccttctcagatgctgcgtaccggaaacaactttaccttcagctacacctttgaggacgttcctttccacagcagctacgctcacagccagagtttggaccggctgatgaatcctctgatcgaccagtatctgtattacttgagcaaaacaaacgctccaagcggaaccaccacgatgtccaggcttcagttttctcaggccggagcgagtgacattcgggaccagtctaggaactggcttcctggaccctgttaccgccagcagcgagtatcaaaaacagctgcggataacaacaacagtgattattcgtggactggagctaccaagtaccacctcaatggaagagactctctggtgaatccgggcccagctatggccagccacaaggacgatgaagaaaaatattttcctcagagcggggttctcatctttggaaaacaagactcgggaaaaactaatgtggacattgaaaaggtcatgattacagacgaagaggaaatcaggaccaccaatcccgtggctacggagcagtatggttctgtatctaccaacctccagagcggcaacacacaggcagccaccacagatgtcaacacacaaggcgttcttccaggcatggtctggcaggacagagacgtgtacctgcaaggacccatctgggcaaagattcctcacacggacggacactttcacccttctcccctcatgggaggatttggactcaaacaccctcctccgcaaatcctcatcaagaatacccccgtacctgcgaatccttcgaccacatccagcgcggcaaagtttgcttctttcatcacacagtactctacggggcaggtcagcgtggagattgagtgggagctgcagaaggagaacagcaaacgctggaaccccgaaatccagtacacttccaactacaacaagtctgttaatgtggactttactgtggacactaatggtgtgtattcagagcctcgccccattggcacaagatacctgactcgtaatctgtaa

SEQ ID NO: 11845 - DNA, 2208 bp, Artificial Sequence
  source: /note="Description of Artificial Sequence: Synthetic polynucleotide"
atggctgccgatggttatcttccagattggctcgaggacactctctctgaaggaataagacagtggtggaagctcaaacctggcccaccaccactaaagcccgcagagcggcatcaggacgacagcaggggtcttgtgcttcctgggtacaagtacctcggacccttcaacggactcgacaagggagagccggtcaacgaggcagacgccgcggccctcgagcacgacaaggcctacgaccggcagctcgacagcggagacaacccgtacctcaagtacaaccacgccgacgcggagtttcaggagcgtcttaaagaagatacgtcttttgggggcaacctcggacgagcagtcttccaggcgaaaaagagggttcttgaacctctgggcctggttgaggaacctgttaagacggctccgggaaaaaagaggccggtagagcattctcctgcggagccagactcctcctcgggaaccggaaaggcgggccagcagcctgcgagaaagagattgaatttcggtcagactggagacgcagactccgtacctgacccccagcctctcggacagccaccagcagccccctctggtctgggaactaatacgatggctacaggcagtggcgcaccaatggcagacaataacgagggcgccgacggagtgggtaattcctcgggaaattggcattgcgattccacatggatgggcgacagagtcatcaccaccagcacccgaacctgggccctgcccacctacaacaaccacctctacaagcaaatctccagccaatctggagcctcaaacgacaaccactactttggctacagcaccccttgggggtattttgacttcaacagattccactgtcacttctccccacgtgactggcaaagactcatcaacaacaactggggattccgacccaagagactcaacttcaagctctttaacattcaagtcaaagaggtcacgcagaatgacggtacgacgacgattgccaataaccttaccagcacggttcaagtctttactgactcggagtaccagctcccgtacgtcctcggctcggcgcatcaaggatgcctcccgccgtttccagcagacgtcttcatggtgccacagtatggatacctcaccctgaacaacgggagtcaggcggtaggacgctcttccttttactgcctggagtactttccttctcagatgctgcgtaccggaaacaactttaccttcagctacacctttgaggacgttcctttccacagcagctacgctcacagccagagtttggaccggctgatgaatcctctgatcgaccagtatctgtattacttgagcaaaacaaacgctccaagcggaaccaccacgatgtccaggcttcagttttctcaggccggagcgagtgacattcgggaccagtctaggaactggcttcctggaccctgttaccgccagcagcgagtatcaaaaacagctgcggataacaacaacagtgattattcgtggactggagctaccaagtaccacctcaatggaagagactctctggtgaatccgggcccagctatggccagccacaaggacgatgaagaaaaatattttcctcagagcggggttctcatctttggaaaacaagactcgggaaaaactaatgtggacattgaaaaggtcatgattacagacgaagaggaaatcaggaccaccaatcccgtggctacggagcagtatggttctgtatctaccaacctccagagcggcaacacacaggcagccaccacagatgtcaacacacaaggcgttcttccaggcatggtctggcaggacagagacgtgtacctgcaaggacccatctgggcaaagattcctcacacggacggacactttcacccttctcccctcatgggaggatttggactcaaacaccctcctccgccaatcctcatcaagaatacccccgtacctgcgaatccttcgaccacattcagcgcggcaaagtttgcttctttcatcacacagtactctacggggcaggtcagcgtggagattgagtgggagctgcagaaggagaacagcaaacgctggaaccccgaaatccagtacacttccaactacaacaagtctgttaatgtggactttactgtggacactaatggtgtgtattcagagcctcgccccattggcacaagatacctgactcgtaatctgtaa

SEQ ID NO: 11846 - DNA, 2208 bp, Artificial Sequence
  source: /note="Description of Artificial Sequence: Synthetic polynucleotide"
atggctgccgatggttatcttccagattggctcgaggacactctctctgaaggaataagacagtggtggaagctcaaacctggcccaccaccaccaaagcccgcagagcggcatcaggacgacagcaggggtcttgtgcttcctgggtacaagtacctcggacccttcaacggactcgacaagggagagccggtcaacgaggcagacgccgcggccctcgagcacgacaaggcctacgaccggcagctcgacagcggagacaacccgtacctcaagtacaaccacgccgacgcggagtttcaggagcgtcttaaagaagatacgtcttttgggggcaacctcggacgagcagtcttccaggcgaaaaagagggttcttgaacctctgggcctggttgaggaacctgttaagacggctccgggaaaaaagaggccggtagagcattctcctgcggagccagactcctcctcgggaaccggaaaggcgggccagcagcctgcgagaaagagattgaatttcggtcagactggagacgcagactccgtacctgacccccagcctctcggacagccaccagcagccccctctggtctgggaactaatacgatggctacaggcagtggcgcaccaatggcagacaataacgagggcgccgacggagtgggtaattcctcgggaaattggcattgcgattccacatggatgggcgacagagtcatcaccaccagcacccgaacctgggccctgcccacctacaacaaccacctctacaagcaaatctccagccaatctggagcctcaaacgacaaccactactttggctacagcaccccttgggggtattttgacttcaacagattccactgtcacttctccccacgtgactggcaaagactcatcaacaacaactggggattccgacccaagagactcaacttcaagctctttaacattcaagtcaaagaggtcacgcagaatgacggtacgacgacgattgccaataaccttaccagcacggttcaagtctttactgactcggagtaccagctcccgtacgtcctcggctcggcgcatcaaggatgcctcccgccgtttccagcagacgtcttcatggtgccacagtatggatacctcaccctgaacaacgggagtcaggcggtaggacgctcttccttttactgcctggagtactttccttctcagatgctgcgtaccggaaacaactttaccttcagctacacctttgaggacgttcctttccacagcagctacgctcacagccagagtttggaccggctgatgaatcctctgatcgaccagtatctgtattacttgagcaaaacaaacgctccaagcggaaccaccacgatgtccaggcttcagttttctcaggccggagcgagtgacattcgggaccagtctaggaactggcttcctggaccctgttaccgccagcagcgagtatcaaaaacagctgcggataacaacaacagtgattattcgtggactggagctaccaagtaccacctcaatggaagagactctctggtgaatccgggcccagctatggccagccacaaggacgatgaagaaaaatattttcctcagagcggggttctcatctttggaaaacaagactcgggaaaaactaatgtggacattgaaaaggtcatgattacagacgaagaggaaatcagggccaccaatcccgtggctacggagcagtatggttctgtatctaccaacctccagagcggcaacacacaggcagccaccacagatgtcaacacacaaggcgttcttccaggcatggtctggcaggacagagacgtgtacctgcaaggacccatctgggcaaagattcctcacacggacggacactttcacccttctcccctcatgggaggatttggactcaaacaccctcctccgcaaatcctcatcaagaatacccccgtacctgcgaatccttcgaccacattcagcgcggcaaagtttgcttctttcatcacacagtactctacggggcaggtcagcgtggagattgagtgggagctgcagaaggagaacagcaaacgctggaaccccgaaatccagtacacttccaactacaacaagtctgttaatgtggactttactgtggacactaatggtgtgtattcagagcctcgccccattggcacaagatacctgactcgtaatctgtaa

SEQ ID NO: 11847 - DNA, 2208 bp, Artificial Sequence
  source: /note="Description of Artificial Sequence: Synthetic polynucleotide"
atggctgccgatggttatcttccagattggctcgaggacactctctctgaaggaataagacagtggtggaagctcaaacctggcccaccaccaccaaagcccgcagagcggcatcaggacgacagcaggggtcttgtgcttcctgggtacaagtacctcggacccttcaacggactcgacaagggagagccggtcaacgaggcagacgccgcggccctcgagcacgacaaggcctacgaccggcagctcgacagcggagacaacccgtacctcaagtacaaccacgccgacgcggagtttcaggagcgtcttaaagaagatacgtcttttgggggcaacctcggacgagcagtcttccaggcgaaaaagagggttcttgaacctctgggcctggttgaggaacctgttaagacggctccgggaaaaaagaggccggtagagcattctcctgcggagccagactcctcctcgggaaccggaaaggcgggccagcagcctgcgagaaagagattgaatttcggtcagactggagacgcagactccgtacctgacccccagcctctcggacagccaccagcagccccctctggtctgggaactaatacgatggctacaggcagtggcgcaccaatggcagacaataacgagggcgccgacggagtgggtaattcctcgggaaattggcattgcgattccacatggatgggcgacagagtcatcaccaccagcacccgaacctgggccctgcccacctacaacaaccacctctacaagcaaatctccagccaatctggagcctcaaacgacaaccactactttggctacagcaccccttgggggtattttgacttcaacagattccactgtcacttctccccacgtgactggcaaagactcatcagcaacaactggggattccgacccaagagactcaacttcaagctctttaacattcaagtcaaagaggtcacgcagaatgacggtacgacgacgattgccaataaccttaccagcacggttcaagtctttactgactcggagtaccagctcccgtacgtcctcggctcggcgcatcaaggatgcctcccgccgtttccagcagacgtcttcatggtgccacagtatggatacctcaccctgaacaacgggagtcaggcggtaggacgctcttccttttactgcctggagtactttccttctcagatgctgcgtaccggaaacaactttaccttcagctacacctttgaggacgttcctttccacagcagctacgctcacagccagagtttggaccggctgatgaatcctctgatcgaccagtatctgtattacttgagcaaaacaaacgctccaagcggaaccaccacgatgtccaggcttcagttttctcaggccggagcgagtgacattcgggaccagtctaggaactggcttcctggaccctgttaccgccagcagcgagtatcaaaaacagctgcggataacaacaacagtgattattcgtggactggagctaccaagtaccacctcaatggaagagactctctggtgaatccgggcccagctatggccagccacaaggacgatgaagaaaaatattttcctcagagcggggttctcatctttggaaaacaagactcgggaaaaactaatgtggacattgaaaaggtcatgattacagacgaagaggaaatcaggaccaccaatcccgtggctacggagcagtatggttctgtatctaccaacctccagagcggcaacacacaggcagccaccacagatgtcaacacacaaggcgttcttccaggcatggtctggcaggacagagacgtgtacctgcaaggacccatctgggcaaagattcctcacacggacggacactttcacccttctcccctcatgggaggatttggactcaaacaccctcctccgcaaatcctcatcaagaatacccccgtacctgcgaatccttcgaccacattcagcgcggcaaagtttgcttctttcatcacacagtactctacggggcaggtcagcgtggagattgagtgggagccgcagaaggagaacagcaaacgctggaaccccgaaatccagtacacttccaactacaacaagtctgttaatgtggactttactgtggacactaatggtgtgtattcagagcctcgccccattggcacaagatacctgactcgtaatctgtaa

SEQ ID NO: 11848 - DNA, 2208 bp, Artificial Sequence
  source: /note="Description of Artificial Sequence: Synthetic polynucleotide"
atggctgccgatggttatcttccagattggctcgaggacactctctctgaaggaataagacagtggtggaagctcaaacctggcccaccaccaccaaagcccgcagagcggcatcaggacgacagcaggggtcttgtgcttcctgggtacaagtacctcggacccttcaacggactcgacaagggagagccggtcaacgaggcagacgccgcggccctcgagcacgacaaggcctacgaccggcagctcgacagcggagacaacccgtacctcaagtacaaccacgccgacgcggagtttcaggagcgtcttaaagaagatacgtcttttgggggcaacctcggacgagcagtcttccaggcgaaaaagggggttcttgaacctctgggcctggttgaggaacctgttaagacggctccgggaaaaaagaggccggtagagcattctcctgcggagccagactcctcctcgggaaccggaaaggcgggccagcagcctgcgagaaagagattgaatttcggtcagactggagacgcagactccgtacctgacccccagcctctcggacagccaccagcagccccctctggtctgggaactaatacgatggctacaggcagtggcgcaccaatggcagacaataacgagggcgccgacggagtgggtaattcctcgggaaattggcattgcgattccacatggatgggcgacagagtcatcaccaccagcacccgaacctgggccctgcccacctacaacaaccacctctacaagcaaatctccagccaatctggagcctcaaacgacaaccactactttggctacagcaccccttgggggtattttgacttcaacagattccactgtcacttctccccacgtgactggcaaagactcatcaacaacaactggggattccgacccaagagactcaacttcaagctctttaacattcaagtcaaagaggtcacgcagaatgacggtacgacgacgattgccaataaccttaccagcacggttcaagtctttactgactcggagtaccagctcccgtacgtcctcggctcggcgcatcaaggatgcctcccgccgtttccagcagacgtcttcatggtgccacagtatggatacctcaccctgaacaacgggagtcaggcggtaggacgctcttccttttactgcctggagtactttccttctcagatgctgcgtaccggaaacaactttaccttcagctacacctttgaggacgttcctttccacagcagctacgctcacagccagagtttggaccggctgatgaatcctctgatcgaccagtatctgtattacttgagcaaaacaaacgctccaagcggaaccaccacgatgtccaggcttcagttttctcaggccggagcgagtgacattcgggaccagtctaggaactggcttcctggaccctgttaccgccagcagcgagtatcaaaaacagctgcggataacaacaacagtgattattcgtggactggagctaccaagtaccacctcaatggaagagactctctggtgaatccgggcccagctatggccagccacaaggacgatgaagaaaaatattttcctcagagcggggttctcatctttggaaaacaagactcgggaaaaactaatgtggacattgaaaaggtcatgattacagacgaagaggaaatcaggaccaccaatcccgtggctacggagcagtatggttctgtatctaccaacctccagagcggcaacacacaggcagccaccacagatgtcaacacacaaggcgttcttccaggcatggtctggcaggacagagacgtgtacctgcaaggacccatctgggcaaagattcctcacacggacggacactttcacccttctcccctcatgggaggatttggactcaaacaccctcctccgcaaatcctcatcaagaatacccccgtacctgcgaatccttcgaccacattcagcgcggcaaagtttgcttctttcatcacacagtactctacggggcaggtcagcgtggagattgagtgggagctgcagaaggagaacagcaaacgctggaaccccgaaatccagtacacttccaactacaacaagtctgttaatgtggactttactgtggacactaatggtgtgtattcagagcctcgccccattggcacaagatacctgactcgtaatctgtaa

SEQ ID NO: 11849 - DNA, 2208 bp, Artificial Sequence
  source: /note="Description of Artificial Sequence: Synthetic polynucleotide"
atggctgccgatggttatcttccagattggctcgaggacactctctctgaaggaataagacagtggtggaagctcaaacctggcccaccaccaccaaagcccgcagagcggcatcaggacgacagcaggggtcttgtgcttcctgggtacaagtacctcggacccttcaacggactcgacaagggagagccggtcaacgaggcagacgccgcggccctcgagcacgacaaggcctacgaccggcagctcgacagcggagacaacccgtacctcaagtacaaccacgccgacgcggagtttcaggagcgtcttaaagaagatacgtcttttgggggcaacctcggacgagcagtcttccaggcgaaaaagagggttcttgaacctctgggcctggttgaggaacctgttaagacggctccgggaaaaaagaggccggtagagcattctcctgcggagccagactcctcctcgggaaccggaaaggcgggccagcagcctgcgagaaagagattgaatttcggtcagactggagacgcggactccgtacctgacccccagcctctcggacagccaccagcagccccctctggtctgggaactaatacgatggctacaggcagtggcgcaccaatggcagacaataacgagggcgccgacggagtgggtaattcctcgggaaattggcattgcgattccacatggatgggcgacagagtcatcaccaccagcacccgaacctgggccctgcccacctacaacaaccacctctacaagcaaatctccagccaatctggagcctcaaacgacaaccactactttggctacagcaccccttgggggtattttgacttcaacagattccactgtcacttctccccacgtgactggcaaagactcatcaacaacaactggggattccgacccaagagactcaacttcaagctctttaacattcaagtcaaagaggtcacgcagaatgacggtacgacgacgattgccaataaccttaccagcacggttcaagtctttactgactcggagtaccagctcccgtacgtcctcggctcggcgcatcaaggatgcctcccgccgtttccagcagacgtcttcatggtgccacagtatggatacctcaccctgaacaacgggagtcaggcggtaggacgctcttccttttactgcctggagtactttccttctcagatgctgcgtaccggaaacaactttaccttcagctacacctttgaggacgttcctttccacagcagctacgctcacagccagagtttggaccggctgatgaatcctctgatcgaccagtatctgtattacttgagcagaacaaacgctccaagcggaaccaccacgatgtccaggcttcagttttctcaggccggagcgagtgacattcgggaccagtctaggaactggcttcctggaccctgttaccgccagcagcgagtatcaaaaacagctgcggataacaacaacagtgattattcgtggactggagctaccaagtaccacctcaatggaagagactctctggtgaatccgggcccagctatggccagccacaaggacgatgaagaaaaatattttcctcagagcggggttctcatctttggaaaacaagactcgggaaaaactaatgtggacattgaaaaggtcatgattacagacgaagaggaaatcaggaccaccaatcccgtggctacggagcagtatggttctgtatctaccaacctccagagcggcaacacacaggcagccaccacagatgtcaacacacaaggcgttcttccaggcatggtctggcaggacagagacgtgtacctgcaaggacccatctgggcaaagattcctcacacggacggacactttcacccttctcccctcatgggaggatttggactcaaacaccctcctccgcaaatcctcatcaagaatacccccgtacctgcgaatccttcgaccacattcagcgcggcaaagtttgcttctttcatcacacagtactctacggggcaggtcagcgtggagattgagtgggagctgcagaaggagaacagcaaacgctggaaccccgaaatccagtacacttccaactacaacaagtctgttaatgtggactttactgtggacactaatggtgtgtattcagagcctcgccccattggcacaagatacctgactcgtaatctgtaa

SEQ ID NO: 11850 - DNA, 2208 bp, Artificial Sequence
  source: /note="Description of Artificial Sequence: Synthetic polynucleotide"
atggctgccgatggttatcttccagattggctcgaggacactctctctgaaggaataagacagtggtggaagctcaaacctggcccaccaccaccaaagcccgcagagcggcatcaggacgacagcaggggtcttgtgcttcctgggtacaagtacctcggacccttcaacggactcgacaagggagagccggtcaacgaggcagacgccgcggccctcgagcacgacaaggcctacgaccggcagctcgacagcggagacaacccgtacctcaagtacaaccacgccgacgcggagtttcaggagcgtcttaaagaagatacgtcttttgggggcaacctcggacgagcagtcttccaggcgaaaaagagggttcttgaacctctgggcctggttgaggaacctgttaagacggctccgggaaaaaagaggccggtagagcattctcctgcggagccagactcctcctcgggaaccggaaaggcgggccagcagcctgcgagaaagagattgaatttcggtcagactggagacgcagactccgtacctgacccccagcctctcggacagccaccagcagccccctctggtctgggaactaatacgatggctacaggcagtggcgcaccaatggcagacaataacgagggcgccgacggagtgggtaattcctcgggaaattggcattgcgattccacatggatgggcgacagagtcatcaccaccagcacccgaacctgggccctgcccacctacaacaaccacctctacaagcaaatctccagccaatctggagcctcaaacgacaaccactactttggctacagcaccccttgggggtattttgacttcaacagattccactgtcacttctccccacgtgactggcaaagactcatcaacaacaactggggattccgacccaagagactcaacttcaagctctttaacattcaagtcaaagaggtcacgcagaatgacggtacgacgacgattgccaataaccttaccagcacggttcaagtctttactgactcggagtaccagctcccgtacgtcctcggctcggcgcatcaaggatgcctcccgccgtttccagcagacgtcttcatggtgccacagtatggatacctcaccctgaacaacgggagtcaggcggtaggacgctcttccttttactgcctggagtactttccttctcagatgctgcgtaccggaaacaactttaccttcagctacacctttgaggacgttcctttccacagcagctacgctcacagccagagtttggaccggctgatgaatcctctgatcgaccagtatctgtattacttgagcaaaacaaacgctccaagcggaaccaccacgatgtccaggcttcagttttctcaggccggagcgagtgacattcgggaccagtctaggaactggcttcctggaccctgttaccgccagcagcgagtatcaaaaacagctgcggataacaacaacagtgattattcgtggactggagctaccaagtaccacctcaatggaagagactctctggtgaatccgggcccagctatggccagccacaaggacgatgaagaaaaatattttcctcagagcggggttctcatctttggaaaacaagactcgggaaaaactaatgtggacattgaaaaggtcatgattacagacgaagaggaaatcaggaccaccaatcccgtggctacggagcagtatggttctgtatctaccaacctccagagcggcaacacacaggcagccaccacagatgtcaacacacaaggcgttcttccaggcatggtctggcaggacagagacgtgtacctgcaaggacccatctgggcaaagattcctcacacggacggacactttcacccttctcccctcatgggaggatttggactcaaacaccctcctccgcaaatcctcatcaagaatacccccgtacctgcgaatccttcgaccacattcagcgcggcaaagtttgcttctttcatcacacagtactctacggggcaggtcagcgtggagattgagtgggagctgcagaaggagaacagcaaacgctggaaccccgaaatccagtacacttccaactacaacaagtctgttaatgtggaccttactgtggacactaatggtgtgtattcagagcctcgccccattggcacaagatacctgactcgtaatctgtaa

SEQ ID NO: 11851 - DNA, 2208 bp, Artificial Sequence
  source: /note="Description of Artificial Sequence: Synthetic polynucleotide"
atggctgccgatggttatcttccagattggctcgaggacactctctctgaaggaataagacagtggtggaagctcaaacctggcccaccaccactaaagcccgcagagcggcatcaggacgacagcaggggtcttgtgcttcctgggtacaagtacctcggacccttcaacggactcgacaagggagagccggtcaacgaggcagacgccgcggccctcgagcacgacaaggcctacgaccggcagctcgacagcggagacaacccgtacctcaagtacaaccacgccgacgcggagtttcaggagcgtcttaaagaagatacgtcttttgggggcaacctcggacgagcagtcttccaggcgaaaaagagggttcttgaacctctgggcctggttgaggaacctgttaagacggctccgggaaaaaagaggccggtagagcattctcctgcggagccagactcctcctcgggaaccggaaaggcgggccagcagcctgcgagaaagagattgaatttcggtcagactggagacgcagactccgtacctgacccccagcctctcggacagccaccagcagccccctctggtctgggaactaatacgatggctgcaggcagtggcgcaccaatggcagacaataacgagggcgccgacggagtgggtaattcctcgggaaattggcattgcgattccacatggatgggcgacagagtcatcaccaccagcacccgaacctgggccctgcccacctacaacaaccacctctacaagcaaatctccagccaatctggagcctcaaacgacaaccactactttggctacagcaccccttgggggtattttgacttcaacagattccactgtcacttctccccacgtgactggcaaagactcatcaacaacaactggggattccgacccaagagactcaacttcaagctctttaacattcaagtcaaagaggtcacgcagaatgacggtacgacgacgattgccaataaccttaccagcacggttcaagtctttactgactcggagtaccagctcccgtacgtcctcggctcggcgcatcaaggatgcctcccgccgtttccagcagacgtcttcatggtgccacagtatggatacctcaccctgaacaacgggagtcaggcggtaggacgctcttccttttactgcctggagtactttccttctcagatgctgcgtaccggaaacaactttaccttcagctacacctttgaggacgttcctttccacagcagctacgctcacagccagagtttggaccggctgatgaatcctctgatcgaccagtatctgtattacttgagcaaaacaaacgctccaagcggaaccaccacgatgtccaggcttcagttttctcaggccggagcgagtgacattcgggaccagtctaggaactggcttcctggaccctgttaccgccagcagcgagtatcaaaaacagctgcggataacaacaacagtgattattcgtggactggagctaccaagtaccacctcaatggaagagactctctggtgaatccgggcccagctatggccagccacaaggacgatgaagaaaaatattttcctcagagcggggttctcatctttggaaaacaagactcgggaaaaactaatgtggacattgaaaaggtcatgattacagacgaagaggaaatcaggaccaccaatcccgtggctacggagcagtatggttctgtatctaccaacctccagagcggcaacacacaggcagccaccacagatgtcaacacacaaggcgttcttccaggcatggtctggcaggacagagacgtgtacctgcaaggacccatctgggcaaagattcctcacacggacggacactttcacccttctcccctcatgggaggatttggactcaaacaccctcctccgcaaatcctcatcaagaatacccccgtacctgcgaatccttcgaccacattcagcgcggcaaagtttgcttctttcatcacacagtactctacggggcaggtcagcgtggagattgagtgggagctgcagaaggagaacagcaaacgctggaaccccgaaatccagtacacttccaactacaacaagtctgttaatgtggactttactgtggacactaatggtgtgtattcagagcctcgccccattggcacaagatacctgactcgtaatctgtaa

SEQ ID NO: 11852 - DNA, 2208 bp, Artificial Sequence
  source: /note="Description of Artificial Sequence: Synthetic polynucleotide"
atggctgccgatggttatcttccagattggctcgaggacactctctctgaaggaataagacagtggtggaagctcaaacctggcccaccaccaccaaagcccgcagagcggcatcaggacgacagcaggggtcttgtgcttcctgggtacaagtacctcggacccttcaacggactcgacaagggagagccggtcaacgaggcagacgccgcggccctcgagcacgacaaggcctacgaccggcagctcgacagcggagacaacccgtacctcaagtacaaccacgccgacgcggagtttcaggagcgtcttaaagaagatacgtcttttgggggcaacctcggacgagcagtcttccaggcgaaaaagagggttcttgaacctctgggcctggttgaggaacctgttaagacggctccgggaaaaaagaggccggtagagcattctcctgcggagccagactcctcctcgggaaccggaaaggcgggccagcagcctgcgagaaagagattgaatttcggtcagactggagacgcagactccgtacctgacccccagcctctcggacagccaccagcagccccctctggtctgggaactaatacgatggctacaggcagtggcgcaccaatggcagacaataacgagggcgccgacggagtgggtaattcctcgggaaattggcattgcgattccacatggatgggcgacagagtcatcaccaccagcacccgaacctgggccctgcccacctacaacaaccacctctacaagcaaatctccagccaatctggagcctcaaacgacaaccactactttggctacagcaccccttgggggtattttgacttcaacagattccactgtcacttctccccacgtgactggcaaagactcatcaacaacaactggggattccgacccaagagactcaacttcaagctctttaacattcaagtcaaagaggtcacgcagaatgacggtacgacgacgattgccaataaccttaccagcacggttcaagtctttactgactcggagtaccagctcccgtacgtcctcggctcggcgcatcaaggatgcctcccgccgtttccagcagacgtcttcatggtgccacagtatggatacctcaccctgaacaacgggagtcaggcggtaggacgctcttccttttactgcctggagtactttccttctcagatgctgcgtaccggaaacaactttaccttcagctacacctttgaggacgttcctttccacagcagctacgctcacagccagagtttggaccggctgatgaatcctctgatcgaccagtatctgtattacttgagcaaaacaaacgctccaagcggaaccaccacgatgtccaggcttcagttttctcaggccggagcgagtgacattcgggaccagtctaggaactggcttcctggaccctgttaccgccagcagcgagtatcaaaaacagctgcggataacaacaacagtgattattcgtggactggagctaccaagtaccacctcaatggaagagactctctggtgaatccgggcccagctatggccagccacaaggacgatgaagaaaaatattttcctcagagcggggttctcatctttggaaaacaagactcgggaaaaactaatgtggacattgaaaaggtcatgattacagacgaagaggaaatcaggaccaccaatcccgtggctacggagcagtatggttctgtatctaccaacctccagagcggcgacacacaggcagccaccacagatgtcaacacacaaggcgttcttccaggcatggtctggcaggacagagacgtgtacctgcaaggacccatctgggcaaagattcctcacacggacggacactttcacccttctcccctcatgggaggatttggactcaaacaccctcctccgcaaatcctcatcaagaatacccccgtacctgcgaatccttcgaccacattcagcgcggcaaagtttgcttctttcatcacacagtactctacggggcaggtcagcgtggagattgagtgggagctgcagaaggagaacagcaaacgctggaaccccgaaatccagtacacttccaactacaacaagtctgttaatgtggactttactgtggacactaatggtgtgtattcagagcctcgccccattggcacaagatacctgactcgtaatctgtaa

SEQ ID NO: 11853 - DNA, 2208 bp, Artificial Sequence
  source: /note="Description of Artificial Sequence: Synthetic polynucleotide"
atggctgccgatggttatcttccagattggctcgaggacactctctctgaaggaataagacagtggtggaagctcaaacctggcccaccaccaccaaagcccgcagagcggcatcaggacgacagcaggggtcttgtgcttcctgggtacaagtacctcggacccttcaacggactcgacaagggagagccggtcaacgaggcagacgccgcggccctcgagcacgacaaggcctacgaccggcagctcgacagcggaggcaacccgtacctcaagtacaaccacgccgacgcggagtttcaggagcgtcttaaagaagatacgtcttttgggggcaacctcggacgagcagtcttccaggcgaaaaagagggttcttgaacctctgggcctggttgaggaacctgttaagacggctccgggaaaaaagaggccggtagagcattctcctgcggagccagactcctcctcgggaaccggaaaggcgggccagcagcctgcgagaaagagattgaatttcggtcagactggagacgcagactccgtacctgacccccagcctctcggacagccaccagcagccccctctggtctgggaactaatacgatggctacaggcagtggcgcaccaatggcagacaataacgagggcgccgacggagtgggtaattcctcgggaaattggcattgcgattccacatggatgggcgacagagtcatcaccaccagcacccgaacctgggccctgcccacctacaacaaccacctctacaagcaaatctccagccaatctggagcctcaaacgacaaccactactttggctacagcaccccttgggggtattttgacttcaacagattccactgtcacttctccccacgtgactggcaaagactcatcaacaacaactggggattccgacccaagagactcaacttcaagctctttaacattcaagtcaaagaggtcacgcagaatgacggtacgacgacgattgccaataaccttaccagcacggttcaagtctttactgactcggagtaccagctcccgtacgtcctcggctcggcgcatcaaggatgcctcccgccgtttccagcagacgtcttcatggtgccacagtatggatacctcaccctgaacaacgggagtcaggcggtaggacgctcttccttttactgcctggagtactttccttctcagatgctgcgtaccggaaacaactttaccttcagctacacctttgaggacgttcctttccacagcagctacgctcacagccagagtttggaccggctgatgaatcctctgatcgaccagtatctgtattacttgagcaaaacaaacgctccaagcggaaccaccacgatgtccaggcttcagttttctcaggccggagcgagtgacattcgggaccagtctaggaactggcttcctggaccctgttaccgccagcagcgagtatcaaaaacagctgcggataacaacaacagtgattattcgtggactggagctaccaagtaccacctcaatggaagagactctctggtgaatccgggcccagctatggccagccacaaggacgatgaagaaaaatattttcctcagagcggggttctcatctttggaaaacaagactcgggaaaaactaatgtggacattgaaaaggtcatgattacagacgaagaggaaatcaggaccaccaatcccgtggctacggagcagtatggttctgtatctaccaacctccagagcggcaacacacaggcagccaccacagatgtcaacacacaaggcgttcttccaggcatggtctggcaggacagagacgtgtacctgcaaggacccatctgggcaaagattcctcacacggacggacactttcacccttctcccctcatgggaggatttggactcaaacaccctcctccgcaaatcctcatcaagaatacccccgtacctgcgaatccttcgaccacattcagcgcggcaaagtttgcttctttcatcacacagtactctacggggcaggtcagcgtggagattgagtgggagctgcagaaggagaacagcaaacgctggaaccccgaaatccagtacacttccaactacaacaagtctgttaatgtggactttactgtggacactaatggtgtgtattcagagcctcgccccattggcacaagatacctgactcgtaatctgtaa

SEQ ID NO: 11854 - DNA, 2208 bp, Artificial Sequence
  source: /note="Description of Artificial Sequence: Synthetic polynucleotide"
atggctgccgatggttatcttccagattggctcgaggacactctctctgaaggaataagacagtggtggaagctcaaacctggcccaccaccaccaaagcccgcagagcggcatcaggacgacagcaggggtcttgtgcttcctgggtacaagtacctcggacccttcaacggactcgacaagggagagccggtcaacgaggcagacgccgcggccctcgagcacgacaaggcctacgaccggcagctcgacagcggagacaacccgtacctcaagtacaaccacgccgacgcggagtttcaggagcgtcttaaagaagatacgtcttttgggggcaacctcggacgagcagtcttccaggcgaaaaagagggttcttgaacctctgggcctggttgaggaacctgttaagacggctccgggaaaaaagaggccggtagagcattctcctgcggagccagactcctcctcgggaaccggaaaggcgggccagcagcctgcgagaaagagattgaatttcggtcagactggagacgcagactccgtacctgacccccagcctctcggacagccaccagcagccccctctggtctgggaactaatacgatggctacaggcagtggcgcaccaatggcagacaataacgagggcgccgacggagtgggtaattcctcgggaaattggcattgcgattccacatggatgggcgacagagtcatcaccaccagcacccgaacctgggccctgcccacctacaacaaccacctctacaagcaaatctccagccaatctggagcctcaaacgacaaccactactttggctacagcaccccttgggggtattttgacttcaacagattccactgtcacttctccccacgtgactggcaaagactcatcaacaacaactggggattccgacccaagagactcaacttcaagctctttaacattcaagtcaaagaggtcacgcagaatgacggtacgacgacgattgccaataaccttaccagcacggttcaagtctttactgactcggagtaccagctcccgtacgtcctcggctcggcgcatcaaggatgcctcccgccgtttccagcagacgtcttcatggtgccacagtatggatacctcaccctgaacaacgggagtcaggcggtaggacgctcttccttttactgcctggagtactttccttctcagatgctgcgtaccggaaacaactttaccttcagctacacctttgaggacgttcctttccacagcagctacgctcacagccagagtttggaccggctgatgaatcctctgatcgaccagtatctgtattacttgagcaaaacaaacgctccaagcggaaccaccacgatgtccaggcttcagttttctcaggccggagcgagtgacattcgggaccagtctaggaactggcttcctggaccctgttaccgccagcagcgagtatcaaaaacagctgcggataacaacaacagtgattattcgtggactggagctaccaagtaccacctcaatggaagagactctctggtgaatccgggcccagctatggccagccacaaggacgatgaagaaaaatattttcctcagagcggggttctcatctttggaaaacaagactcgggaaaaactaatgtggacattgaaaaggtcatgattacagacgaagaggaaatcaggaccaccaatcccgtggctacggagcagtatggttctgtatctaccaacctccagagcggcaacacacaggcagccaccacagatgtcaacacacaaggcgttcttccaggcatggtctggcaggacagagacgtgtacctgcaaggacccatctgggcaaagattcctcacacggacggacactttcacccttctcccctcatgggaggatttggactcaaacaccctcctccgcaaatcctcatcaagaatacccccgtacctgcgaatccttcgaccacattcagcgcggcaaagcttgcttctttcatcacacagtactctacggggcaggtcagcgtggagattgagtgggagctgcagaaggagaacagcaaacgctggaaccccgaaatccagtacacttccaactacaacaagtctgttaatgtggactttactgtggacactaatggtgtgtattcagagcctcgccccattggcacaagatacctgactcgtaatctgtaa

SEQ ID NO: 11855 - DNA, 2208 bp, Artificial Sequence
  source: /note="Description of Artificial Sequence: Synthetic polynucleotide"
atggctgccgatggttatcttccagattggctcgaggacactctctctgaaggaataagacagtggtggaagctcaaacctggcccaccaccaccaaagcccgcagagcggcatcaggacgacagcaggggtcttgtgcttcctgggtacaagtacctcggacccttcaacggactcgacaagggagagccggtcaacgaggcagacgccgcggccctcgagcacgacaaggcctacgaccggcagctcgacagcggagacaacccgtacctcaagtacaaccacgccgacgcggagtttcaggagcgtcttaaagaagatacgtcttttgggggcaacctcggacgagcagtcttccaggcgaaaaagagggttcttgaacctctaggcctggttgaggaacctgttaagacggctccgggaaaaaagaggccggtagagcattctcctgcggagccagactcctcctcgggaaccggaaaggcgggccagcagcctgcgagaaagagattgaatttcggtcagactggagacgcagactccgtacctgacccccagcctctcggacagccaccagcagccccctctggtctgggaactaatacgatggctacaggcagtggcgcaccaatggcagacaataacgagggcgccgacggagtgggtaattcctcgggaaattggcattgcgattccacatggatgggcgacagagtcatcaccaccagcacccgaacttgggccctgcccacctacaacaaccacctctacaagcaaatctccagccaatctggagcctcaaacgacaaccactactttggctacagcaccccttgggggtattttgacttcaacagattccactgtcacttctccccacgtgactggcaaagactcatcaacaacaactggggattccgacccaagagactcaacttcaagctctttaacattcaagtcaaagaggtcacgcagagtgacggtacgacgacgattgccaataaccttaccagcacggttcaagtctttactgactcggagtaccagctcccgtacgtcctcggctcggcgcatcaaggatgcctcccgccgtttccagcagacgtcttcatggtgccacagtatggatacctcaccctgaacaacgggagtcaggcggtaggacgctcttccttttactgcctggagtactttccttctcagatgctgcgtaccggaaacaactttaccttcagctacacctttgaggacgttcctttccacagcagctacgctcacagccagagtttggaccggctgatgaatcctctgatcgaccagtatctgtattacttgagcaaaacaaacgctccaagcggaaccaccacgatgtccaggcttcagttttctcaggccggagcgagtgacattcgggaccagtctaggaactggcttcctggaccctgttaccgccagcagcgagtatcaaaaacagctgcggataacaacaacagtgattattcgtggactggagctaccaagtaccacctcaatggaagagactctctggtgaatccgggcccagctatggccagccacaaggacgatgaagaaaaatattttcctcagagcgggattctcatctttggaaaacaagactcgggaaaaactaatgtggacattgaaaaggtcatgattacagacgaagaggaaatcaggaccaccaatcccgtggctacggagcagtatggttctgtatctaccaacctccagagcggcaacacacaggcagccaccacagatgtcaacacacaaggcgttcttccaggcatggtctggcaggacagagacgtgtacctgcaaggacccatctgggcaaagattcctcacacggacggacactttcacccttctcccctcatgggaggatttggactcaaacaccctcctccgcaaatcctcatcaagaatacccccgtacctgcgaatccttcgaccacattcagcgcggcaaagtttgcttctttcatcacacagtaccctacggggcaggtcagcgtggagattgagtgggagctgcagaaggagaacagcaaacgctggaaccccgaaatccagtacacttccaactacaacaagtctgttaatgtggactttactgtggacactaatggtgtgtattcagagcctcgccccattggcacaagatacctgactcgtaatctgtaa

SEQ ID NO: 11856 - DNA, 2208 bp, Artificial Sequence
  source: /note="Description of Artificial Sequence: Synthetic polynucleotide"
atggctgccgatggttatcttccagattggctcgaggacactctctctgaaggaataagacagtggtggaagctcaaacctggcccaccaccaccaaagcccgcagagcggcatcaggacgacagcaggggtcttgtgcttcctgggtacaagtacctcggacccttcaacggactcgacaagggagagccggtcaacgaggcagacgccgcggccctcgagcacgacaaggcctacgaccggcagctcgacagcggagacaacccgtacctcaagtacaaccacgccgacgcggagtttcaggagcgtcttaaagaagatacgtcttttgggggcaacctcggacgagcagtcttccaggcgaaaaagagggttcttgaacctctgggcctggttgaggaacctgttaagacggctccgggaaaaaagaggccggtagagcattctcctgcggagccagacgcctcctcgggaaccggaaaggcgggccagcagcctgcgagaaagagattgaatttcggtcagactggagacgcagactccgtacctgacccccagcctctcggacagccaccagcagccccctctggtctgggaactaatacgatggctacaggcagtggcgcaccaatggcagacaataacgagggcgccgacggagtgggtaattcctcgggaaattggcattgcgattccacatggatgggcgacagagtcatcaccaccagcacccgaacctgggccctgcccacctacaacaaccacctctacaagcaaatctccagccaatctggagcctcaaacgacaaccactactttggctacagcaccccttgggggtattttgacttcaacagattccactgtcacttctccccacgtgactggcaaagactcatcaacaacaactggggattccgacccaagagactcaacttcaagctctttaacattcaagtcaaagaggtcacgcagaatgacggtacgacgacgattgccaataaccttaccagcacggttcaagtctttactgactcggagtaccagctcccgtacgtcctcggctcggcgcatcaaggatgcctcccgccgtttccagcagacgtcttcatggtgccacagtatggatacctcaccctgaacaacgggagtcaggcggtaggacgctcttccttttactgcctggagtactttccttctcagatgctgcgtaccggaaacaactttaccttcagctacacctttgaggacgttcctttccacagcagctacgctcacagccagagtttggaccggctgatgaatcctctgatcgaccagtatctgtattacttgagcaaaacaaacgctccaagcggaaccaccacgatgtccaggcttcagttttctcaggccggagcgagtgacattcgggaccagtctaggaactggcttcctggaccctgttaccgccagcagcgagtatcaaaaacagctgcggataacaacaacagtgattattcgtggactggagctaccaagtaccacctcaatggaagagactctctggtgaatccgggcccagctatggccagccacaaggacgatgaagaaaaatattttcctcagagcggggttctcatctttggaaaacaagactcgggaaaaactaatgtggacattgaaaaggtcatgattacagacgaagaggaaatcaggaccaccaatcccgtggctacggagcagtatggttctgtatctaccaacctccagagcggcaacacacaggcagccaccacagatgtcaacacacaaggcgttcttccaggcatggtctggcaggacagagacgtgtacctgcaaggacccatctgggcaaagattcctcacacggacggacactttcacccttctcccctcatgggaggatttggactcaaacaccctcctccgcaaatcctcatcaagaatacccccgtacctgcgaatccttcgaccacattcagcgcggcaaagtttgcttctttcatcacacagtactctacggggcaggtcagcgtggagattgagtgggagctgcagaaggagaacagcaaacgctggaaccccgaaatccagtacacttccaactacaacaagtctgttaatgtggactttactgtggacactaatggtgtgtattcagagcctcgccccattggcacaagatacctgactcgtaatctgtaa

SEQ ID NO: 11857 - DNA, 2208 bp, Artificial Sequence
  source: /note="Description of Artificial Sequence: Synthetic polynucleotide"
atggctgccgatggttatcttccagattggctcgaggacactctctctgaaggaataagacagtggtggaagctcaaacctggcccaccaccaccaaagcccgcagagcggcatcaggacgacagcaggggtctcgtgcttcctgggtacaagtacctcggacccttcaacggactcgacaagggagggccggtcaacgaggcagacgccgcggccctcgagcacgacaaggcctacgaccggcagctcgacagcggagacaacccgtacctcaagtacaaccacgccgacgcggagtttcaggagcgtcttaaagaagatacgtcttttgggggcaacctcggacgagcagtcttccaggcgaaaaagagggttcttgaacctctgggcctggttgaggaacctgttaagacggctccgggaaaaaagaggccggtagagcattctcctgcggagccagactcctcctcgggaaccggaaaggcgggccagcagcctgcgagaaagagattgaatttcggtcagactggagacgcagactccgtacctgacccccagcctctcggacagccaccagcagccccctctggtctgggaactaatacgatggctacaggcagtggcgcaccaatggcagacaataacgagggcgccgacggagtgggtaattcctcgggaaattggcattgcgattccacatggatgggcgacagagtcatcaccaccagcacccgaacctgggccctgcccacctacaacaaccacctctacaagcaaatctccagccaatctggagcctcaaacgacaaccactactttggctacagcaccccttgggggtattttgacttcaacagattccactgtcacttctccccacgtgactggcaaagactcatcaacaacaactggggattccgacccaagagactcaacttcaagctctttaacattcaagtcaaagaggtcacgcagaatgacggtacgacgacgattgccaataaccttaccagcacggttcaagtctttactgactcggagtaccagctcccgtacgtcctcggctcggcgcatcaaggatgcctcccgccgtttccagcagacgtcttcatggtgccacagtatggatacctcaccctgaacaacgggagtcaggcggtaggacgctcttccttttactgcctggagtactttccttctcagatgctgcgtaccggaaacaactttaccttcagctacacctttgaggacgttcctttccacagcagctacgctcacagccagagtttggaccggctgatgaatcctctgatcgaccagtatctgtattacttgagcaaaacaaacgctccaagcggaaccaccacgatgtccaggcttcagttttctcaggccggagcgagtgacattcgggaccagtctaggaactggcttcctggaccctgttaccgccagcagcgagtatcaaaaacagctgcggataacaacaacagtgattattcgtggactggagctaccaagtaccacctcaatggaagagactctctggtgaatccgggcccagctatggccagccacaaggacgatgaagaaaaatattttcctcagagcggggttctcatctttggaaaacaagactcgggaaaaactaatgtggacattgaaaaggtcatgattacagacgaagaggaaatcaggaccaccaatcccgtggctacggagcagtatggttctgtatctaccaacctccagagcggcaacacacaggcagccaccacagatgtcaacacacaaggcgttcttccaggcatggtctggcaggacagagacgtgtacctgcaaggacccatctgggcaaagattcctcacacggacggacactttcacccttctcccctcatgggaggatttggactcaaacaccctcctccgcaaatcctcatcaagaatacccccgtacctgcgaatccttcgaccacattcagcgcggcaaagtttgcttctttcatcacacagtactctacggggcaggtcagcgtggagattgagtgggagctgcagaaggagaacagcaaacgctggaaccccgaaatccagtacacttccaactacaacaagtctgttaatgtggactttactgtggacactaatggtgtgtattcagagcctcgccccattggcacaagatacctgactcgtaatctgtaa

SEQ ID NO: 11858 - DNA, 2208 bp, Artificial Sequence
  source: /note="Description of Artificial Sequence: Synthetic polynucleotide"
atggctgccgatggttatcttccagattggctcgaggacactctctctgaaggaataagacagtggtggaagctcaaacctggcccaccaccaccaaagcccgcagagcggcatcaggacgacagcaggggtcttgtgcttcctgggtacaagtacctcggacccttcaacggactcgacaagggagagccggtcaacgaggcagacgccgcggccctcgagcacgacaaggcctacgaccggcagctcgacagcggagacaacccgtacctcaagcacaaccacgccgacgcggagtttcaggagcgtcttaaagaagatacgtcttttgggggcaacctcggacgagcagtcttccaggcgaaaaagagggttcttgaacctctgggcctggttgaggaacctgttaagacggctccgggaaaaaagaggccggtagagcattctcctgcggagccagactcctcctcgggaaccggaaaggcgggccagcagcctgcgagaaagagattgaatttcggtcagactggagacgcagactccgtacctgacccccagcctctcggacagccaccagcagccccctctggtctgggaactaatacgatggctacaggcagtggcgcaccaatggcagacaataacgagggcgccgacggagtgggtaattcctcgggaaattggcattgcgattccacatggatgggcgacagagtcatcaccaccagcacccgaacctgggccctgcccacctacaacaaccacctctacaagcaaatctccagccaatctggagcctcaaacgacaaccactactttggctacagcaccccttgggggtattttgacttcaacagattccactgtcacttctccccacgtgactggcaaagactcatcaacaacaactggggattccgacccaagagactcaacttcaagctctttaacattcaagtcaaagaggtcacgcagaatgacggtacgacgacgattgccaataaccttaccagcacggttcaagtctttactgactcggagtaccagctcccgtacgtcctcggctcggcgcatcaaggatgcctcccgccgtttccagcagacgtcttcatggtgccacagtatggatacctcaccctgaacaacgggagtcaggcggtaggacgctcttccttttactgcctggagtactttccttctcagatgctgcgtaccggaaacaactttaccttcagctacacctttgaggacgttcctttccacagcagctacgctcacagccagagtttggaccggctgatgaatcctctgatcgaccagtatctgtattacttgagcaaaacaaacgctccaagcggaaccaccacgatgtccaggcttcagttttctcaggccggagcgagtgacattcgggaccagtctaggaactggcttcctggaccctgttaccgccagcagcgagtatcaaaaacagctgcggataacaacaacagtgattattcgtggactggagctaccaagtaccacctcaatggaagagactctctggtgaatccgggcccagctatggccagccacaaggacgatgaagaaaaatattttcctcagagcggggttctcatctttggaaaacaagactcgggaaaaactaatgtggacattgaaaaggtcatgattacagacgaagaggaaatcaggaccaccaatcccgtggctacggagcagtatggttctgtatctaccaacctccagagcggcaacacacaggcagccaccacagatgtcaacacacaaggcgttcttccaggcatggtctggcaggacagagacgtgtacctgcaaggacccatctgggcaaagattcctcacacggacggacactttcacccttctcccctcatgggaggatttggactcaaacaccctcctccgcaaatcctcatcaagaatacccccgtacctgcgaatccttcgaccacattcagcgcggcaaagtttgcttctttcatcacacagtactctacggggcaggtcagcgtggagattgagtgggagctgcagaaggagaacagcaaacgctggaaccccgaaatccagtacacttccaactacaacaagtctgttaatgtggactttactgtggacactaatggtgtgtattcagagcctcgccccattggcacaagatacctgactcgtaatctgtaa

SEQ ID NO: 11859 - DNA, 2208 bp, Artificial Sequence
  source: /note="Description of Artificial Sequence: Synthetic polynucleotide"
atggctgccgatggttatcttccagattggctcgaggacactctctctgaaggaataagacagtggtggaagctcaaacctggcccaccaccaccaaagcccgcagagcggcatcaggacgacagcaggggtcttgtgcttcctgggtacaagtacctcggacccttcaacggactcgacaagggagagccggtcaacgaggcagacgccgcggccctcgagcacgacaaggcctacgaccggcagctcgacagcggagacaacccgtacctcaagtacaaccacgccgacgcggagtttcaggagcgtcttaaagaagatacgtcttttgggggcaacctcggacgagcagtcttccaggcgaaaaagagggttcttgaacctctgggcctggttgaggaacctgttaagacggctccgggaaaaaagaggccggtagagcattctcctgcggagccagactcctcctcgggaaccggaaaggcgggccagcagcctgcgagaaagagattgaatttcggtcagactggagacgcagactccgtacctgacccccagcctctcggacagccaccagcagccccctctggtctgggaactaatacgatggctacaggcagtggcgcaccaatggcagacaataacgagggcgccgacggagtgggtaattcctcgggaaattggcattgcgattccacatggatgggcgacagagtcatcaccaccagcacccgaacctgggccctgcccacctacaacaaccacctctacaagcaaatctccagccaatctggagcctcaaacgacaaccactactttggctacagcaccccttgggggtattttgacttcaacagattccactgtcacttctccccacgtgactggcaaagactcatcaacaacaactggggattccgacccaagagactcaacttcaagctctttaacattcaagtcaaagaggtcacgcagaatgacggtacgacgacgattgccaataaccttaccagcacggttcaagtctttactgactcggagtaccagctcccgtacgtcctcggctcggcgcatcaaggatgcctcccgccgtttccagcaggcgtcttcatggtgccacagtatggatacctcaccctgaacaacgggagtcaggcggtaggacgctcttccttttactgcctggagtactttccttctcagatgctgcgtaccggaaacaactttaccttcagctacacctttgaggacgttcctttccacagcagctacgctcacagccagagtttggaccggctgatgaatcctctgatcgaccagtatctgtattacttgagcaaaacaaacgctccaagcggaaccaccacgatgtccaggcttcagttttctcaggccggagcgagtgacattcgggaccagtctaggaactggcttcctggaccctgttaccgccagcagcgagtatcaaaaacagctgcggataacaacaacagtgattattcgtggactggagctaccaagtaccacctcaatggaagagactctctggtgaatccgggcccagctatggccagccacaaggacgatgaagaaaaatattttcctcagagcggggttctcatctttggaaaacaagactcgggaaaaactaatgtggacattgaaaaggtcatgattacagacgaagaggaaatcaggaccaccaatcccgtggctacggagcagtatggttctgtatctaccaacctccagagcggcaacacacaggcagccaccacagatgtcaacacacaaggcgttcttccaggcatggtctggcaggacagagacgtgtacctgcaaggacccatctgggcaaagattcctcacacggacggacactttcacccttctcccctcatgggaggatttggactcaaacaccctcctccgcaaatcctcatcaagaatacccccgtacctgcgaatccttcgaccacattcagcgcggcaaagtttgcttctttcatcacacagtactctacggggcaggtcagcgtggagattgagtgggagctgcagaaggagaacagcaaacgctggaaccccgaaatccagtacacttccaactacaacaagtctgttaatgtggactttactgtggacactaatggtgtgtattcagagcctcgccccattggcacaagatacctgactcgtaatctgtaa

SEQ ID NO: 11860 - DNA, 2208 bp, Artificial Sequence
  source: /note="Description of Artificial Sequence: Synthetic polynucleotide"
atggctgccgatggttatcttccagattggctcgaggacactctctctgaaggaataagacagtggtggaagctcaaacctggcccaccaccaccaaagcccgcagagcggcatcaggacgacagcaggggtcttgtgcttcctgggtacaagtacctcggacccttcaacggactcgacaagggagagccggtcaacgaggcagacgccgcggccctcgagcacgacaaggcctacgaccggcagctcgacagcggagacaacccgtacctcaagtacaaccacgccgacgcggagtttcaggagcgtcttaaagaagatacgtcttttgggggcaacctcggacgagcagtcttccaggcgaaaaagagggttcttgaacctctgggcctggttgaggaacctgttaagacggctccgggaaaaaagaggccggtagagcattctcctgcggagccagactcctcctcgggaaccggaaaggcgggccagcagcctgcgagaaagagattgaatttcggtcagactggagacgcagactccgtacctgacccccagcctctcggacagccaccagcagccccctctggtctgggaactaatacgacagctacaggcagtggcgcaccaatggcagacaataacgagggcgccgacggagtgggtaattcctcgggaaattggcattgcgattccacatggatgggcgacagagtcatcaccaccagcacccgaacctgggccctgcccacctacaacaaccacctctacaagcaaatctccagccaatctggagcctcaaacgacaaccactactttggctacagcaccccttgggggtattttgacttcaacagattccactgtcacttctccccacgtgactggcaaagactcatcaacaacaactggggattccgacccaagagactcaacttcaagctctttaacattcaagtcaaagaggtcacgcagaatgacggtacgacgacgattgccaataaccttaccagcacggttcaagtctttactgactcggagtaccagctcccgtacgtcctcggctcggcgcatcaaggatgcctcccgccgtttccagcagacgtcttcatggtgccacagtatggatacctcaccctgaacaacgggagtcaggcggtaggacgctcttccttttactgcctggagtactttccttctcagatgctgcgtaccggaaacaactttaccttcagctacacctttgaggacgttcctttccacagcagctacgctcacagccagagtttggaccggctgatgaatcctctgatcgaccagtatctgtattacttgagcaaaacaaacgctccaagcggaaccaccacgatgtccaggcttcagttttctcaggccggggcgagtgacattcgggaccagtctaggaactggcttcctggaccctgttaccgccagcagcgagtatcaaaaacagctgcggataacaacaacagtgattattcgtggactggagctaccaagtaccacctcaatggaagagactctctggtgaatccgggcccagctatggccagccacaaggacgatgaagaaaaatattttcctcagagcggggttctcatctttggaaaacaagactcgggaaaaactaatgtggacattgaaaaggtcatgattacagacgaagaggaaatcaggaccaccaatcccgtggctacggagcagtatggttctgtatctaccaacctccagagcggcaacacacaggcagccaccacagatgtcaacacacaaggcgttcttccaggcatggtctggcaggacagagacgtgtacctgcaaggacccatctgggcaaagattcctcacacggacggacactttcacccttctcccctcatgggaggatttggactcaaacaccctcctccgcaaatcctcatcaagaatacccccgtacctgcgaatccttcgaccacattcagcgcggcaaagtttgcttctttcatcacacagtactctacggggcaggtcagcgtggagattgagtgggagctgcagaaggagaacagcaaacgctggaaccccgaaatccagtacacttccaactacaacaagtctgttaatgtggactttactgtggacactaatggtgtgtattcagagcctcgccccattggcacaagatacctgactcgtaatctgtaa

SEQ ID NO: 11861 - DNA, 2208 bp, Artificial Sequence
  source: /note="Description of Artificial Sequence: Synthetic polynucleotide"
atggctgccgatggttatcttccagattggctcgaggacactctctctgaaggaataagacagtggtggaagctcaaacctggcccaccaccaccaaagcccgcagagcggcatcaggacgacagcaggggtcttgtgcttcctgggtacaagtacctcggacccttcaacggactcgacaagggagagccggtcaacgaggcagacgccgcggccctcgagcacgacaaggcctacgaccggcagctcgacagcggagacaacccgtacctcaagtacaaccacgccgacgcggagtttcaggagcgtcttaaagaagatacgtcttttgggggcaacctcggacgagcagtcttccaggcgaaaaagagggttcttgaacctctgggcctggttgaggaacctgttaagacggctccgggaaaaaagaggccggtagagcattctcctgcggagccagactcctcctcgggaaccggaaaggcgggccagcagcctgcgagaaagagattgaatttcggtcagaccggagacgcagactccgtacctgacccccagcctctcggacagccaccagcagccccctctggtctgggaactaatacgatggctacaggcagtggcgcaccaatggcagacaataacgagggcgccgacggagtgggtaattcctcgggaaattggcattgcgattccacatggatgggcgacagagtcatcaccaccagcacccgaacctgggccctgcccacctacaacaaccacctctacaagcaaatctccagccaatctggagcctcaaacgacaaccactactttggctacagcaccccttgggggtattttgacttcaacagattccactgtcacttctccccacgtgactggcaaagactcatcatcaacaactggggattccgacccaagagactcaacttcaagctctttaacattcaagtcaaagaggtcacgcagaatgacggtacgacgacgattgccaataaccttaccagcacggttcaagtctttactgactcggagtaccagctcccgtacgtcctcggctcggcgcatcaaggatgcctcccgccgtttccagcagacgtcttcatggtgccacagtatggatacctcaccctgaacaacgggagtcaggcggtaggacgctcttccttttactgcctggagtactttccttctcagatgctgcgtaccggaaacaactttaccttcagctacacctttgaggacgttcctttccacagcagctacgctcacagccagagtttggaccggctgatgaatcctctgatcgaccagtatctgtattacttgagcaaaacaaacgctccaagcggaaccaccacgatgtccaggcttcagttttctcaggccggagcgagtgacattcgggaccagtctaggaactggcttcctggaccctgttaccgccagcagcgagtatcaaaaacagctgcggataacaacaacagtgattattcgtggactggagctaccaagtaccacctcaatggaagagactctctggtgaatccgggcccagctatggccagccacaaggacgatgaagaaaaatattttcctcagagcggggttctcatctttggaaaacaagactcgggaaaaactaatgtggacattgaaaaggtcatgattacagacgaagaggaaatcaggaccaccaatcccgtggctacggagcagtatggttctgtatctaccaacctccagagcggcaacacacaggcagccaccacagatgtcaacacacaaggcgttcttccaggcatggtctggcaggacagagacgtgtacctgcaaggacccatctgggcaaagattcctcacacggacggacactttcacccttctcccctcatgggaggatttggactcaaacaccctcctccgcaaatcctcatcaagaatacccccgtacctgcgaatccttcgaccacattcagcgcggcaaagtttgcttctttcatcacacagtactctacggggcaggtcagcgtggagattgagtgggagctgcagaaggagaacagcaaacgctggaaccccgaaatccagtacacttccaactacaacaagtctgttaatgtggactttactgtggacactaatggtgtgtattcagagcctcgccccattggcacaagatacctgactcgtaatctgtaa

SEQ ID NO: 11862 - DNA, 2208 bp, Artificial Sequence
  source: /note="Description of Artificial Sequence: Synthetic polynucleotide"
atggctgccgatggttatcttccagattggctcgaggacactctctctgaaggaataagacagtggtggaagctcaaacctggcccaccaccaccaaagcccgcagagcggcatcaggacgacagcaggggtcttgtgcttcctgggtacaagtacctcggacccttcaacggactcgacaagggagagccggtcaacgaggcagacgccgcggccctcgagcacgacaaggcctacgaccggcagctcgacagcggagacaacccgtacctcaagtacaaccacgccgacgcggagtttcaggagcgtcttaaagaagatacgtcttttgggggcaacctcggacgagcagtcttccaggcgaaaaagagggttcttgaacctctgggcctggttgaggaacctgttaagacggctccgggaaaaaagaggccggtagagcattctcctgcggagccagactcctcctcgggaaccggaaaggcgggccagcagcctgcgagaaagagattgaatttcggtcagactggagacgcagactccgtacctgacccccagcctctcggacagccaccagcagccccctctggtctgggaactaatacgatggctacaggcagtggcgcaccaatggcagacaataacgagggcgccgacggagtgggtaattcctcgggaaattggcattgcgattccacatggatgggcgacagagtcatcaccaccagcacccgaacctgggccctgcccacctacaacaaccacctctacaagcaaatctccagccaatctggagcctcaaacgacaaccactactttggctacagcaccccttgggggtattttgacttcaacagattccactgtcacttctccccacgtgactggcaaagactcatcaacaacaactggggattccgacccaagagactcaacttcaagctctttaacattcaagtcaaagaggtcacgcagaatgacggtacgacgacgattgccaataaccttaccagcacggttcaagtctttactgactcggagtaccagctcccgtacgtcctcggctcggcgcatcaaggatgcctcccgccgtttccagcagacgtcttcatggtgccacagtatggatacctcaccctgaacaacgggagtcaggcggtaggacgctcttccttttactgcctggagtactttccttctcagatgctgcgtaccggaaacaactttaccttcagctacacctttgaggacgttcctttccacagcagctacgctcacagccagagtttggaccggctgatgaatcctctgatcgaccagtatctgtattacttgagcaaaacaaacgctccaagcggaaccaccacgatgtccaggcttcagttttctcaggccggagcgagtgacattcgggaccagtctaggaactggcttcctggaccctgttaccgccagcagcgagtatcaaaaacagctgcggataacaacaacagtgattattcgtggactggagctaccaagtaccacctcaatggaagagactctctggtgaatccgggcccagctatggccagccacaaggacgatgaagagaaatattttcctcagagcggggttctcatctttggaaaacaagactcgggaaaaactaatgtggacattgaaaaggtcatgattacagacgaagaggaaatcaggaccaccaatcccgtggctacggagcagtatggttctgtatctaccaacctccagagcggcaacacacaggcagccaccacagatgtcaacacacaaggcgttcttccaggcatggtctggcaggacagagacgtgtaccagcaaggacccatctgggcaaagattcctcacacggacggacactttcacccttctcccctcatgggaggatttggactcaaacaccctcctccgcaaatcctcatcaagaatacccccgtacctgcgaatccttcgaccacattcagcgcggcaaagcttgcttctttcatcacacagtactctacggggcaggtcagcgtggaggttgagtgggagctgcagaaggagaacagcaaacgctggaaccccgaaatccagtacacttccaactacaacaagtctgttaatgtggactttactgtggacactaatggtgtgtattcagagcctcgccccattggcacaagatacctgactcgtaatctgtaa

SEQ ID NO: 11863 - DNA, 2208 bp, Artificial Sequence
  source: /note="Description of Artificial Sequence: Synthetic polynucleotide"
atggctgccgatggttatcttccagattggctcgaggacactctctctgaaggaataagacagtggtggaagctcaaacctggcccaccaccaccaaagcccgcagagcggcatcaggacgacagcaggggtcttgtgcttcctgggtacaagtacctcggacccttcaacggactcgacaagggagagccggtcaacgaggcagacgccgcggccctcgagcacgacaaggcctacgaccggcagctcgacagcggagacaacccgtacctcaagtacaaccacgccgacgcggagtttcaggagcgtcttaaagaagatacgtcttttgggggcaacctcggacgagcagtcttccaggcgaaaaagagggttcttgaacctctgggcctggttgaggaacctgttaagacggctccgggaaaaaagaggccggtagagcattctcctgcggagccagactcctcctcgggaaccggaaaggcgggccagcagcctgcgagaaagagattgaatttcggtcagactggagacgcagactccgtacctgacccccagcctctcggacagccaccagcagccccctctggtctgggaactaatacgatggctacaggcagtggcgcaccaatggcagacagtaacgagggcgccgacggagtgggtaattcctcgggaaattggcattgcgattccacatggatgggcgacagagtcatcaccaccagcacccgaacctgggccctgcccacctacaacaaccacctctacaagcaaatctccagccaatctggagcctcaaacgacaaccactactttggctacagcaccccttgggggtattttgacttcaacagattccactgtcacttctccccacgtgactggcaaagactcatcaacaacaactggggattccgacccaagagactcaacttcaagctctttaacattcaagtcaaagaggtcacgcagaatgacggtacgacgacgattgccaataaccttaccagcacggttcaagtctttactgactcggagtaccagctcccgtacgtcctcggctcggcgcatcaaggatgcctcccgccgtttccagcagacgtcttcatggtgccacagtatggatacctcaccctgaacaacgggagtcaggcggtaggacgctcttccttttactgcctggagtactttccttctcagatgctgcgtaccggaaacaactttaccttcagctacacctttgaggacgttcctttccacagcagctacgctcacagccagagtttggaccggctgatgaatcctctgatcgaccagtatctgtattacttgagcaaaacaaacgctccaagcggaaccaccacgatgtccaggcttcagttttctcaggccggagcgagtgacattcgggaccagtctaggaactggcttcctggaccctgttaccgccagcagcgagtatcaaaaacagctgcggataacaacaacagtgattattcgtggactggagctaccaagtaccacctcaatggaagagactctctggtgaatccgggcccagctatggccagccacaaggacgatgaagaaaaatattttcctcagagcggggttctcatctttggaaaacaagactcgggaaaaactaatgtggacattgaaaaggtcatgattacagacgaagaggaaatcaggaccaccaatcccgtggctacggagcagtatggttctgtatctaccaacctccagagcggcaacacacaggcagccaccacagatgtcaacacacaaggcgttcttccaggcatggtctggcaggacagagacgtgtacctgcaaggacccatctgggcaaagattcctcacacggacggacactttcacccttctcccctcatgggaggatttggactcaaacaccctcctccgcaaatcctcatcaagaatacccccgtacctgcgaatccttcgaccacattcagcgcggcaaagtttgcttctttcatcacacagtactctacggggcaggtcagcgtggagattgagtgggagctgcagaaggagaacagcaaacgctggaaccccgaaatccagtacacttccaactacaacaagtctgttaatgtggactttactgtggacactaatggtgtgtattcagagcctcgccccattggcacaagatacctgactcgtaatctgtaa

SEQ ID NO: 11864 - DNA, 2208 bp, Artificial Sequence
  source: /note="Description of Artificial Sequence: Synthetic polynucleotide"
atggctgccgatggttatcttccagattggctcgaggacactctctctgaaggaataagacagtggtggaagctcaaacctggcccaccaccaccaaagcccgcagagcggcatcaggacgacagcaggggtcttgtgcttcctgggtacaagtacctcggacccttcaacggactcgacaagggagagccggtcaacgaggcagacgccgcggccctcgagcacgacaaggcctacgaccggcagctcgacagcggagacaacccgtacctcaagtacaaccacgccgacgcggagtttcaggagcgtcttaaagaagatacgtcttttgggggcaacctcggacgagcagtcttccaggcgaaaaagagggttcttgaacctctgggcctggttgaggaacctgttaagacggctccgggaaaaaagaggccggtagagcattctcctgcggagccagactcctcctcgggaaccggaaaggcgggccagcagcctgcgagaaagagattgaatttcggtcagactggagacgcagactccgtacctgacccccagcctctcggacagccaccagcagccccctctggtctgggaactaatacgatggctacaggcagtggcgcaccaatggcagacaataacgagggcgccgacggagtgggtaattcctcgggaaattggcattgcgattccacatggatgggcgacagagtcatcaccaccagcacccgaacctgggccctgcccacctacaacaaccacctctacaagcaaatctccagccaatctggagcctcaaacgacaaccactactttggctacagcaccccttgggggtattttgacttcaacagattccactgtcacttctccccacgtgactggcaaagactcatcaacaacaactggggattccgacccaagagactcaacttcaagctctttaacattcaagtcaaagaggtcacgcagaatgacggtacgacgacgattgccaataaccttaccagcacggttcaagtctttactgactcggagtaccagctcccgtacgtcctcggctcggcgcatcaaggatgcctcccgccgtttccagcagacgtctccatggtgccacagtatggatacctcaccctgaacaacgggagtcaggcggtaggacgctcttccttttactgcctggagtactttccttctcagatgctgcgtaccggaaacaactttaccttcagctacacctttgaggacgttcctttccacagcagctacgctcacagccagagtttggaccggctgatgaatcctctgatcgaccagtatctgtattacttgagcaaaacaaacgctccaagcggaaccaccacgatgtccaggcttcagttttctcaggccggagcgagtgacattcgggaccagtctaggaactggcttcctggaccctgttaccgccagcagcgagtatcaaaaacagctgcggataacaacaacagtgattattcgtggactggagctaccaagtaccacctcaatggaagagactctctggtgaatccgggcccagctatggccagccacaaggacgatgaagaaaaatattttcctcagagcggggttctcatctttggaaaacaagactcgggaaaaactaatgtggacattgaaaaggtcatgattacagacgaagaggaaatcaggaccaccaatcccgtggctacggagcagtatggttctgtatctaccaacctccagagcggcaacacacaggcagccaccacagatgtcaacacacaaggcgttcttccaggcatggtctggcaggacagagacgtgtacctgcaaggacccatctgggcaaagattcctcacacggacggacactttcacccttctcccctcatgggaggatttggactcaaacaccctcctccgcaaatcctcatcaagaatacccccgtacctgcgaatccttcgaccacattcagcgcggcaaagtttgcttctttcatcacacagtactctacggggcaggtcagcgtggagattgagtgggagctgcagaaggagaacagcaaacgctggaaccccgaaatccagtacacttccaactacaacaagtctgttaatgtggactttactgtggacactaatggtgtgtattcagagcctcgccccattggcacaagatacctgactcgtaatctgtaa

SEQ ID NO: 11865 - DNA, 2208 bp, Artificial Sequence
  source: /note="Description of Artificial Sequence: Synthetic polynucleotide"
atggctgccgatggttatcttccagattggctcgaggacactctctctgaaggaataagacagtggtggaagctcaaacctggcccaccaccaccaaagcccgcagagcggcatcaggacgacagcaggggtcttgtgcttcctgggtacaagtacctcggacccttcaacggactcgacaagggagagccggtcaacgaggcagacgtcgcggccctcgagcacgacaaggcctacgaccggcagctcgacagcggagacaacccgtacctcaagtacaaccacgccgacgcggagtttcaggagcgtcttaaagaagatacgtcttttgggggcaacctcggacgagcagtcttccaggcgaaaaagagggttcttgaacctctgggcctggttgaggaacctgttaagacggctccgggaaaaaagaggccggtagagcattctcctgcggagccagactcctcctcgggaaccggaaaggcgggccagcagcctgcgagaaagagattgaatttcggtcagactggagacgcagactccgtacctgacccccagcctctcggacagccaccagcagccccctctggtctgggaactaatacgatggctacaggcagtggcgcaccaatggcagacaataacgagggcgccgacggagtgggtaattcctcgggaaattggcattgcgattccacatggatgggcgacagagtcatcaccaccagcacccgaacctgggccctgcccacctacaacaaccacctctacaagcaaatctccagccaatctggagcctcaaacgacaaccactactttggctacagcaccccttgggggtattttgacttcaacagattccactgtcacttctccccacgtgactggcaaagactcatcaacaacaactggggattccgacccaagagactcaacttcaagctctttaacattcaagtcaaagaggtcacgcagaatgacggtacgacgacgattgccaataaccttaccagcacggttcaagtctttactgactcggagtaccagctcccgtacgtcctcggctcggcgcatcaaggatgcctcccgccgtttccagcagacgtcttcatggtgccacagtatggatacctcaccctgaacaacgggagtcaggcggtaggacgctcttccttttactgcctggagtactttccttctcagatgctgcgtaccggaaacaactttaccttcagctacacctttgaggacgttcctttccacagcagctacgctcacagccagagtttggaccggctgatgaatcctctgatcgaccagtatctgtattacttgagcaaaacaaacgctccaagcggaaccaccacgatgtccaggcttcagttttctcaggccggagcgagtgacattcgggaccagtctaggaactggcttcctggaccctgttaccgccagcagcgagtatcaaaaacagctgcggataacaacaacagtgattattcgtggactggagctaccaagtaccacctcaatggaagagactctctggtgaatccgggcccagctatggccagccacaaggacgatgaagaaaaatattttcctcagagcggggttctcatctttggaaaacaagactcgggaaaaactaatgtggacattgaaaaggtcatgattacagacgaagaggaaatcaggaccaccaatcccgtggctacggagcagtatggtcctgtatctaccaacctccagagcggcaacacacaggcagccaccacagatgtcaacacacaaggcgttcttccaggcatggtctggcagggcagagacgtgtacctgcaaggacccatctgggcaaagattcctcacacggacggacactttcacccttctcccctcatgggaggatttggactcaaacaccctcctccgcaaatcctcatcaagaatacccccgtacctgcgaatccttcgaccacattcagcgcggcaaagtttgcttctttcatcacacagtactctacggggcaggtcagcgtggagattgagtgggagctgcagaaggagaacagcaaacgctggaaccccgaaatccagtacacttccaactacaacaagtctgttaatgtggactttactgtggacactaatggtgtgtattcagagcctcgccccattggcacaagatacctgactcgtaatctgtaa

SEQ ID NO: 11866 - DNA, 2208 bp, Artificial Sequence
  source: /note="Description of Artificial Sequence: Synthetic polynucleotide"
atggctgccgatggttatcttccagattggctcgagggcactctctctgaaggaataagacagtggtggaagctcaaacctggcccaccaccaccaaagcccgcagagcggcatcaggacgacagcaggggtcttgtgcttcctgggtacaagtacctcggacccttcaacggactcgacaagggagagccggtcaacgaggcagacgccgcggccctcgagcacgacaaggcctacgaccggcagctcgacagcggagacaacccgtacctcaagtacaaccacgccgacgcggagtttcaggagcgtcttaaagaagatacgtcttttgggggcaacctcggacgagcagtcttccaggcgaaaaagagggttcttgaacctctgggcctggttgaggaacctgttaagacggctccgggaaaaaagaggccggtagagcattctcctgcggagccagactcctcctcgggaaccggaaaggcgggccagcagcctgcgagaaagagattgaatttcggtcagactggagacgcagactccgtacctgacccccagcctctcggacagccaccagcagccccctctggtctgggaactaatacgatggctacaggcagtggcgcaccaatggcagacaataacgagggcgccgacggagtgggtaattcctcgggaaattggcattgcgattccacatggatgggcgacagagtcatcaccaccagcacccgaacctgggccctgcccacctacaacaaccacctctacaagcaaatctccagccaatctggagcctcaagcgacaaccactactttggctacagcaccccttgggggtattttgacttcaacagattccactgtcacttctccccacgtgactggcaaagactcatcaacaacaactggggattccgacccaagagactcaacttcaagctctttaacattcaagtcaaagaggtcacgcagaatgacggtacgacgacgattgccaataaccttaccagcacggttcaagtctttactgactcggagtaccagctcccgtacgtcctcggctcggcgcatcaaggatgcctcccgccgtttccagcagacgtcttcatggtgccacagtatggatacctcaccctgaacaacgggagtcaggcggtaggacgctcttccttttactgcctggagtactttccttctcagatgctgcgtaccggaaacaactttaccttcagctacacctttgaggacgttcctttccacagcagctacgctcacagccagagtttggaccggctgatgaatcctctgatcgaccagtatctgtattacttgagcaaaacaaacgctccaagcggaaccaccacgatgtccaggcttcagttttctcaggccggagcgagtgacattcgggaccagtctaggaactggcttcctggaccctgttaccgccagcagcgagtatcaaaaacagctgcggataacaacaacagtgattattcgtggactggagctaccaagtaccacctcaatggaagagactctctggtgaatccgggcccagctatggccagccacaaggacgatgaagaaaaatattttcctcagagcggggttctcatctttggaaaacaagactcgggaaaaactaatgtggacattgaaaaggtcatgattacagacgaagaggaaatcaggaccaccaatcccgtggctacggagcagtatggttctgtatctaccaacctccagagcggcaacacacaggcagccaccacagatgtcaacacacaaggcgttcttccaggcatggtctggcaggacagagacgtgtacctgcaaggacccatctgggcaaagattcctcacacggacggacactttcacccttctcccctcatgggaggatttggactcaaacaccctcctccgcaaatcctcatcaagaatacccccgtacctgcgaatccttcgaccacattcagcgcggcaaagcttgcttctttcatcacacagtactctacggggcaggtcagcgtggagattgagtgggagctgcagaaggagaacagcaaacgctggaaccccgaaatccagtacacttccaactacaacaagtctgttaatgtggactttactgtggacactaatggtgtgtattcagagcctcgccccattggcacaagatacctgactcgtaatctgtaa

SEQ ID NO: 11867 - DNA, 2208 bp, Artificial Sequence
  source: /note="Description of Artificial Sequence: Synthetic polynucleotide"
atggctgccgatggttatcttccagattggctcgaggacactctctctgaaggaataagacagtggtggaagctcaaacctggcccaccaccaccaaagcccgcagagcggcatcaggacgacagcaggggtcttgtgcttcctgggtacaagtacctcggacccttcaacggactcgacaagggagagccggtcaacgaggcagacgtcgcggccctcgagcacgacaaggcctacgaccggcagctcgacagcggagacaacccgtacctcaagtacaaccacgccgacgcggagtttcaggagcgtcttaaagaagatacgtcttttgggggcaacctcggacgagcagtcttccaggcgaaaaagagggttcttgaacctctgggcctggttgaggaacctgttaagacggctccgggaaaaaagaggccggtagagcattctcctgcggagccagactcctcctcgggaaccggaaaggcgggccagcagcctgcgagaaagagattgaatttcggtcagactggagacgcagactccgtacctgacccccagcctctcggacagccaccagcagccccctctggtctgggaactaatacgatggctacaggcagtggcgcaccaatggcagacaataacgagggcgccgacggagtgggtaattcctcgggaaattggcattgcgattccacatggatgggcgacagagtcatcaccaccagcacccgaacctgggccctgcccacctacaacaaccacctctacaagcaaatctccagccaatctggagcctcaaacgacaaccactactttggctacagcaccccttgggggtattttgacttcaacagattccactgtcacttctccccacgtgactggcaaagactcatcaacaacaactggggattccgacccaagagacccaacttcaagctctttaacattcaagtcaaagaggtcacgcagaatgacggtacgacgacgattgccaataaccttaccagcacggttcaagtctttactgactcggagtaccagctcccgtacgtcctcggctcggcgcatcaaggatgcctcccgccgtttccagcagacgtcttcatggtgccacagtatggatacctcaccctgaacaacgggagtcaggcggtaggacgctcttccttttactgcctggagtactttccttctcagatgctgcgtaccggaaacaactttaccttcagctacacctttgaggacgttcctttccacagcagctacgctcacagccagagtttggaccggctgatgaatcctctgatcgaccagtatctgtattacttgagcaaaacaaacgctccaagcggaaccaccacgatgtccaggcttcagttttctcaggccggagcgagtgacattcgggaccagtctaggaactggcttcctggaccctgttaccgccagcagcgagtatcaaaaacagctgcggataacaacaacagtgattattcgtggactggagctaccaagtaccacctcaatggaagagactctctggtgaatccgggcccagctatggccagccacaaggacgatgaagaaaaatattttcctcagagcggggttctcatctttggaaaacaagactcgggaaaaactaatgtggacattgaaaaggtcatgattacagacgaagaggaaatcaggaccaccaatcccgtggctacggagcagtatggttctgtatctaccaacctccagagcggcaacacacaggcagccaccacagatgtcaacacacaaggcgttcttccaggcatggtctggcaggacagagacgtgtacctgcaaggacccatctgggcaaagattcctcacacggacggacactttcacccttctcccctcatgggaggatttggactcaaacaccctcctccgcaaatcctcatcaagaatacccccgtacctgcgaatccttcgaccacattcagcgcggcaaagtttgcttctttcatcacacagtactctacggggcaggtcagcgtggagattgagtgggagctgcagaaggagaacagcaaacgctggaaccccgaaatccagtacacttccaactacaacaagtctgttaatgtggactttactgtggacactaatggtgtgtattcagagcctcgccccattggcacaagatacctgactcgtaatctgtaa

SEQ ID NO: 11868 - DNA, 2208 bp, Artificial Sequence
  source: /note="Description of Artificial Sequence: Synthetic polynucleotide"
atggctgccgatggttatcttccagattggctcgaggacactctctctgaaggaataagacagtggtggaagctcaaacctggcccaccaccaccaaagcccgcagagcggcatcaggacgacagcaggggtcttgagcttcctgggtacaagtacctcggacccttcaacggactcgacaagggagagccggtcaacgaggcagacgccgcggccctcgagcacgacaaggcctacgaccggcagctcgacagcggagacaacccgtacctcaagtacaaccacgccgacgcggagtttcaggagcgtcttaaagaagatacgtcttttgggggcaacctcggacgagcagtcttccaggcgaaaaagagggttcttgaacctctgggcctggttgaggaacctgttaagacggctccgggaaaaaagaggccggtagagcattctcctgcggagccagactcctcctcgggaaccggaaaggcgggccagcagcctgcgagaaagagattgaatttcggtcagactggagacgcagactccgtacctgacccccagcctctcggacagccaccagcagccccctctggtctgggaactaatacgatggctacaggcagtggcgcaccaatggcagacaataacgagggcgccgacggagtgggtaattcctcgggaaattggcattgcgattccacatggatgggcgacagagtcatcaccaccagcacccgaacctgggccctgcccacctacaacaaccacctctacaagcaaatctccagccaatctggagcctcaaacgacaaccactactttggctacagcaccccttgggggtattttgacttcaacagattccactgtcacttctccccacgtgactggcaaagactcatcaacaacaactggggattccgacccaagagactcaacttcaagctctttaacattcaagtcaaagaggtcacgcagaatgacggtacgacgacgattgccaataaccttaccagcacggttcaagtctttactgactcggagtaccagctcccgtacgtcctcggctcggcgcatcaaggatgcctcccgccgtttccagcagacgtcttcatggtgccacagtatggatacctcaccctgaacaacgggagtcaggcggtaggacgctcttccttttactgcctggagtactttccttctcagatgctgcgtaccggaaacaactttaccttcagctacacctttgaggacgttcctttccacagcagctacgctcacagccagagtttggaccggctgatgaatcctctgatcgaccagtatctgtattacttgagcaaaacaaacgctccaagcggaaccaccacgatgtccaggcttcagttttctcaggccggagcgagtgacattcgggaccagtctaggaactggcttcctggaccctgttaccgccagcagcgagtatcaaaaacagctgcggataacaacaacagtgattattcgtggactggagctaccaagtaccacctcaatggaagagactctctggtgaatccgggcccagctatggccagccacaaggacgatgaagaaaaatattttcctcagagcggggttctcatctttggaaaacaagactcgggaaaaactaatgtggacattgaaaaggtcatgattacagacgaagaggaaatcaggaccaccaatcccgtggctacggagcagtatggttctgtatctaccaacctccagagcggcaacacacaggcagccaccacagatgtcaacacacaaggcgttcttccaggcatggtctggcaggacagagacgtgtacctgcaaggacccatctgggcaaagattcctcacacggacggacactttcacccttctcccctcatgggaggatttggactcaaacaccctcctccgcaaatcctcatcaagaatacccccgtacctgcgaatccttcgaccacattcagcgcggcaaagtttgcttctttcatcacacagtactctacggggcaggtcagcgtggagattgagtgggagctgcagaaggagaacagcaaacgctggaaccccgaaatccagtacacttccaactacaacaagtctgttaatgtggactttactgtggacactaatggtgtgtattcagagcctcgccccattggcacaagatacctgactcgtaatctgtaa

SEQ ID NO: 11869 - DNA, 2208 bp, Artificial Sequence
  source: /note="Description of Artificial Sequence: Synthetic polynucleotide"
atggctgccgatggttatcttccagattggctcgaggacaccctctctgagggaataagacagtggtggaagctcaaacctggcccaccaccaccaaagcccgcagagcggcatcaggacgacagcaggggtcttgtgcttcctgggtacaagtacctcggacccttcaacggactcgacaagggagagccggtcaacgaggcagacgccgcggccctcgagcacgacaaggcctacgaccggcagctcgacagcggagacaacccgtacctcaagtacaaccacgccgacgcggagtttcaggagcgtcttaaagaagatacgtcttttgggggcaacctcggacgagcagtcttccaggcgaaaaagagggttcttgaacctctgggcctggttgaggaacctgttaagacggctccgggaaaaaagaggccggtagagcattctcctgcggagccagactcctcctcgggaaccggaaaggcgggccagcagcctgcgagaaagagattgaatttcggtcagactggagacgcagactccgtacctgacccccagcctctcggacagccaccagcagccccctctggtctgggaactaatacgatggctacaggcagtggcgcaccaatggcagacaataacgagggcgccgacggagtgggtaattcctcgggaaattggcattgcgattccacatggatgggcgacagagtcatcaccaccagcacccgaacctgggccctgcccacctacaacaaccacctctacaagcaaatctccagccaatctggagcctcaaacgacaaccactactttggctacagcaccccttgggggtattttgacttcaacagattccactgtcacttctccccacgtgactggcaaagactcatcaacaacaactggggattccgacccaagagactcaacttcaagctctttaacattcaagtcaaagaggtcacgcagaatgacggtatgacgacgattgccaataaccttaccagcacggttcaagtctttactgactcggagtaccagctcccgtacgtcctcggctcggcgcatcaaggatgcctcccgccgtttccagcagacgtcttcatggtgccacagtatggatacctcaccctgaacaacgggagtcaggcggtaggacgctcttccttttactgcctggagtactttccttctcagatgctgcgtaccggaaacaactttaccttcagctacacctttgaggacgttcctttccacagcagctacgctcacagccagagtttggaccggctgatgaatcctctgatcgaccagtatctgtattacttgagcaaaacaaacgctccaagcggaaccaccacgatgtccaggcttcagttttctcaggccggagcgagtgacattcgggaccagtctaggaactggcttcctggaccctgttaccgccagcagcgagtatcaaaaacagctgcggataacaacaacagtgattattcgtggactggagctaccaagtaccacctcaatggaagagactctctggtgaatccgggcccagctatggccagccacaaggacgatgaagaaaaatattttcctcagagcggggttctcatctttggaaaacaagactcgggaaaaactaatgtggacattgaaaaggtcatgattacagacgaagaggaaatcaggaccaccaatcccgtggctacggagcagtatggttctgtatctaccaacctccagagcggcaacacacaggcagccaccacagatgtcaacacacaaggcgttcttccaggcatggtctggcaggacagagacgtgtacctgcaaggacccatctgggcaaagattcctcacacggacggacactttcacccttctcccctcatgggaggatttggactcaaacaccctcctccgcaaatcctcatcaagaatacccccgtacctgcgaatccttcgaccacattcagcgcggcaaagtttgcttctttcatcacacagtactctacggggcaggtcagcgtggagattgagtgggagctgcagaaggagaacagcaaacgctggaaccccgaaatccagtacacttccaactacaacaagtctgttaatgtggactttactgtggacactaatggtgtgtattcagagcctcgccccattggcacaagatacctgactcgtaatctgtaa

SEQ ID NO: 11870 - DNA, 2208 bp, Artificial Sequence
  source: /note="Description of Artificial Sequence: Synthetic polynucleotide"
atggctgccgatggttatcttccagattggctcgaggacactctctctgaaggaataagacagtggtggaagctcaaacctggcccaccaccactaaagcccgcagagcggcatcaggacgacagcaggggtcttgtgcttcctgggtacaagtacctcggacccttcaacggactcgacaagggagagccggtcaacgaggcagacgccgcggccctcgagcacgacaaggcctacgaccggcagctcgacagcggagacaacccgtacctcaagtacaaccacgccgacgcggagtttcaggagcgtcttaaagaagatacgtcttttgggggcaacctcggacgagcagtcttccaggcgaaaaagagggttcttgaacctctgggcctggttgaggaacctgttaagacggctccgggaaaaaagaggccggtagagcattctcctgcggagccagactcctcctcgggaaccggaaaggcgggccagcagcctgcgagaaagagattgaatttcggtcagactggagacgcagactccgtacctgacccccagcctctcggacagccaccagcagccccctctggtctgggaactaatacgatggctacaggcagtggcgcaccaatggcagacaataacgagggcgccgacggagtgggtaattcctcgggaaattggcattgcgattccacatggatgggcgacagagtcatcaccaccagcacccgaacctgggccctgcccacctacaacaaccacctctacaagcaaatctccagccaatctggagcctcaaacgacaaccactactttggctacagcaccccttgggggtattttgacttcaacagattccactgtcacttctccccacgtgactggcaaagactcatcaacaacaactggggattccgacccaagagactcaacttcaagctctttaacattcaagtcaaagaggtcacgcagaatgacggtacgacgacgattgccaataaccttaccagcacggttcaagtctttactgactcggagtaccagctcccgtacgtcctcggctcggcgcatcaaggatgcctcccgccgtttccagcagacgtcttcatggtgccacagtatggatacctcaccctgaacaacgggagtcaggcggtaggacgctcttccttttactgcctggagtactttccttctcagatgctgcgtaccggaaacaactttaccttcagctacacctttgaggacgttcctttccacagcagctacgctcacagccagagtttggaccggctgatgaatcctctgatcgaccagtatctgtattacttgagcaaaacaaacgctccaagcggaaccaccacgatgtccaggcttcagttttctcaggccggagcgagtgacattcgggaccagtctaggaactggcttcctggaccctgttaccgccagcagcgagtatcaaaaacagctgcggataacaacaacagtgattattcgtggactggagctaccaagtaccacctcaatggaagagactctctggtgaatccgggcccagctatggccagccacaaggacgatgaagaaaaatattttcctcagagcggggttctcatctttggaaaacaagactcgggaaaaactaatgtggacattgaaaaggtcatgattacagacgaagaggaaatcaggaccaccaatcccgtggctacggagcagtatggttctgtatctaccaacctccagagcggcaacacacaggcagccaccacagatgtcaacacacaaggcgttcctccaggcatggtctggcaggacagagacgtgtacctgcaaggacccatctgggcaaagattcctcacacggacggacactttcacccttctcccctcatgggaggatttggactcaaacaccctcctccgcaaatcctcatcaagaatacccccgtacctgcgaatccttcgaccacattcagcgcggcaaagtttgcttctttcatcacacagtactctacggggcaggtcagcgtggagattgagtgggagctgcagaaggagaacagcaaacgctggaaccccgaaatccagtacacttccaactacaacaagtctgttaatgtggactttactgtggacactaatggtgtgtattcagagcctcgccccattggcacaagatacctgactcgtaatctgtaa

SEQ ID NO: 11871 - DNA, 2208 bp, Artificial Sequence
  source: /note="Description of Artificial Sequence: Synthetic polynucleotide"
atggctgccgatggttatcttccagattggctcgaggacactctctctgaaggaataagacagtggtggaagctcaaacctggcccaccaccaccaaagcccgcagagcggcatcaggacgacagcaggggtcttgtgcttcctgggtacaagtacctcggacccttcaacggactcgacaagggagagccggtcaacgaggcagacgccgcggccctcgagcacgacaaggcctacgaccggcagctcgacagcggagacaacccgtacctcaagtacaaccacgccgacgcggagtttcaggagcgtcttaaagaagatacgtcttttgggggcaacctcggacgagcagtcttccaggcgaaaaagagggttcttgaacctctgggcctggttgaggaacctgttaagacggctccgggaaaaaagaggccggtagagcattctcctgcggagccagactcctcctcgggaaccggaaaggcgggccagcagcctgcgagaaagagattgaatttcggtcagactggagacgcagactccgtacctgacccccagcctctcggacagccaccagcagccccctctggtctgggaactaatacgatggctacaggcagtggcgcaccaatggcagacaataacgagggcgccgacggagtgggtaattcctcgggaaattggcattgcgattccacatggatgggcgacagagtcatcaccaccagcacccgaacctgggccctgcccacctacaacaaccacctctacaagcaaatctccagccaatctggagcctcaaacgacaaccactactttggctacagcaccccttgggggtattttgacttcaacagattccactgtcacttctccccacgtgactggcaaagactcatcaacaacaactggggattccgacccaagagactcaacttcaagctctttaacattcaagtcaaagaggtcacgcagaatgacggtacgacgacgattgccaataaccttaccagcacggttcaagtctttactgactcggagtaccagctcccgtacgtcctcggctcggcgcatcaaggatgcctcccgccgtttccagcagacgtcttcatggtgccacagtatggatacctcaccctgaacaacgggagtcaggcggtaggacgctcttccttttactgcctggagtactttccttctcagatgctgcgtaccggaaacaactttaccttcagctacacctttgaggacgttcctttccacagcagctacgctcacagccagagtttggaccggctgatgaatcctctgatcgaccagtatctgtattacttgagcaaaacaaacgctccaagcggaaccaccacgatgtccaggcttcagttttctcaggccggagcgagtgacattcgggaccagtctaggaactggcttcctggaccctgttaccgccagcagcgagtatcaaaaacagctgcggataacaacaacagtgattattcgtggactggagctaccaagtaccacctcaatggaagagactctctggtgaatccgggcccagctatggccagccacaaggacgatgaagaaaaatattttcctcagagcggggttctcatctttggaaaacaagactcgggaaaaaccaatgtggacattgaaaaggtcatgattacagacgaagaggaaatcaggaccaccaatcccgtggctacggagcagtatggttctgtatctaccaacctccagagcggcaacacacaggcagccaccacagatgtcaacacacaaggcgttcttccaggcatggcctggcaggacagagacgtgtacctgcaaggacccatctgggcaaagattcctcacacggacggacactttcacccttctcccctcatgggaggatttggactcaaacaccctcctccgcaaatcctcatcaagaatacccccgtacctgcgaatccttcgaccacactcagcgcggcaaagtttgcttctttcatcacacagtactctacggggcaggtcagcgtggagattgagtgggagctgcagaaggagaacagcaaacgctggaaccccgaaatccagtacacttccaactacaacaagtctgttaatgtggactttactgtggacactaatggtgtgtattcagagcctcgccccattggcacaagatacctgactcgtaatctgtaa

SEQ ID NO: 11872 - DNA, 2208 bp, Artificial Sequence
  source: /note="Description of Artificial Sequence: Synthetic polynucleotide"
atggctgccgatggttatcttccagattggctcgaggacactctctctgaaggaataagacagtggtggaagctcaaacctggcccaccaccaccaaagcccgcagagcggcatcaggacgacagcaggggtcttgtgcttcctgggtacaagtacctcggacccttcaacggactcgacaagggagagccggtcaacgaggcagacgccgcggccctcgagcacgacaaggcccacgaccggcagctcgacagcggagacaacccgtacctcaagtacaaccacgccgacgcggagtttcaggagcgtcttaaagaagatacgtcttttgggggcaacctcggacgagcagtcttccaggcgaaaaagagggttcttgaacctctgggcctggttgaggaacctgttaagacggctccgggaaaaaagaggccggtagagcattctcctgcggagccagactcctcctcgggaaccggaaaggcgggccagcagcctgcgagaaagagattgaatttcggtcagactggagacgcagactccgtacctgacccccagcctctcggacagccaccagcagccccctctggtctgggaactaatacgatggctacaggcagtggcgcaccaatggcagacaataacgagggcgccgacggagtgggtaattcctcgggaaattggcattgcgattccacatggatgggcgacagagtcatcaccaccagcacccgaacctgggccctgcccacctacaacaaccacctctacaagcaaatctccagccaatctggagcctcaaacgacaaccactactttggctacagcaccccttgggggtattttgacttcaacagattccactgtcacttctccccacgtgactggcaaagactcatcaacaacaactggggattccgacccaagagactcaacttcaagctctttaacattcaagtcaaagaggtcacgcagaatgacggtacgacgacgattgccaataaccttaccagcacggttcaagtctttactgactcggagtaccagctcccgtacgtcctcggctcggcgcatcaaggatgcctcccgccgtttccagcagacgtcttcatggtgccacagtatggatacctcaccctgaacaacgggagtcaggcggtaggacgctcttccttttactgcctggagtactttccttctcagatgctgcgtaccggaaacaactttaccttcagctacacctttgaggacgttcctttccacagcagctacgctcacagccagagtttggaccggctgatgaatcctctgatcgaccagtatctgtattacttgagcaaaacaaacgctccaagcggaaccaccacgatgtccaggcttcagttttctcaggccggagcgagtgacattcgggaccagtctaggaactggcttcctggaccctgttaccgccagcagcgagtatcaaaaacagctgcggataacaacaacagtgattattcgtggactggagctaccaagtaccacctcaatggaagagactctctggtgagtccgggcccagctatggccagccacaaggacgatgaagaaaaatattttcctcagagcggggttctcatctttggaaaacaagactcgggaaaaactaatgtggacattgaaaaggtcatgattacagacgaagaggaaatcaggaccaccaatcccgtggctacggagcagtatggttctgtatctaccaacctccagagcggcaacacacaggcagccaccacagatgtcaacacacaaggcgttcttccaggcatggtctggcaggacagagacgtgtacctgcaaggacccatctgggcaaagattcctcacacggacggacactttcacccttctcccctcatgggaggatttggactcaaacaccctcctccgcaaatcctcatcaagaatacccccgtacctgcgaatccttcgaccacattcagcgcggcaaagtttgcttctttcatcacacagtactctacggggcaggtcagcgtggagattgagtgggagctgcagaaggagaacagcaaacgctggaaccccgaaatccagtacacttccaactacaacaagtctgttaatgtggactttactgtggacactaatggtgtgtattcagagcctcgccccattggcacaagatacctgactcgtaatctgtaa

SEQ ID NO: 11873 - DNA, 2208 bp, Artificial Sequence
  source: /note="Description of Artificial Sequence: Synthetic polynucleotide"
atggctgccgatggttatcttccagattggctcgaggacactctctctgaaggaataagacagtggtggaagctcaaacctggcccaccaccactaaagcccgcagagcggcatcaggacgacagcaggggtcttgtgcttcctgggtacaagtacctcggacccttcaacggactcgacaagggagagccggtcaacgaggcagacgccgcggccctcgagcacgacaaggcctacgaccggcagctcgacagcggagacaacccgtacctcaagtacaaccacgccgacgcggagtttcaggagcgtcttaaagaagatacgtcttttgggggcaacctcggacgagcagtcttccaggcgaaaaagagggttcttgaacctctgggcctggttgaggaacctgttaagacggctccgggaaaaaagaggccggtagagcattctcctgcggagccagactcctcctcgggaaccggaaaggcgggccagcagcctgcgagaaagagattgaatttcggtcagactggagacgcagactccgtacctgacccccagcctctcggacagccaccagcagccccctctggtctgggaactaatacgatggctacaggcagtggcgcaccaatggcagacaataacgagggcgccgacggagtgggtaattcctcgggaaattggcattgcgattccacatggatgggcgacagagtcatcaccaccagcacccgaacctgggccctgcccacctacaacaaccacctctacaagcaaatctccagccaatctggagcctcaaacgacaaccactactttggctacagcaccccttgggggtattttgacttcaacagattccactgtcacttctccccacgtgactggcaaagactcatcaacaacaactggggattccgacccaagagactcaacttcaagctctttaacattcaagtcaaagaggtcacgcagaatgacggtacgacgacgattgccaataaccttaccagcacggttcaagtctttactgactcggagtaccagctcccgtacgtcctcggctcggcgcatcaaggatgcctcccgccgtttccagcagacgtcttcatggtgccacagtatggatacctcaccctgaacaacgggagtcaggcggtaggacgctcttccttttactgcctggagtactttccttctcagatgctgcgtaccggaaacaactttaccttcagctacacctttgaggacgttcctttccacagcagctacgctcacagccagagtttggaccggctgatgaatcctctgatcgaccagtatctgtattacttgagcaaaacaaacgctccaagcggaaccaccacgatgtccaggcttcagttttctcaggccggagcgagtgacattcgggaccagtctaggaactggcttcctggaccctgttaccgccagcagcgagtatcaaaaacagctgcggataacaacaacagtgattattcgtggactggagctaccaagtaccacctcaatggaagagactctctggtgaatccgggcccagctatggccagccacaaggacgatgaagaaaaatattttcctcagagcggggttctcatctttggaaaacaagactcgggaaaaactaatgtggacattgaaaaggtcatgattacagacgaagaggaaatcaggaccaccaatcccgtggctacggagcagtatggttctgtatctaccaacctccagagcggcaacacacaggcagccaccacagatgtcaacacacaaggcgttcttccaggcatggtctggcaggacagagacgtgtacctgcaaggacccatctgggcaaagattcctcacacggacggacactttcacccttctcccctcatgggaggatttggactcaaacaccctcctccgcaaatcctcatcaagaatacccccgtacctgcgaatccttcgaccacattcagcgcggcaaagtttgcttctttcatcacacagtactctacggggcaggtcagcgtggggattgagtgggagctgcagaaggagaacagcaaacgctggaaccccgaaatccagtacacttccaactacaacaagtctgttaatgtggactttactgtggacactaatggtgtgtattcagagcctcgccccattggcacaagatacctgactcgtaatctgtaa

SEQ ID NO: 11874 - DNA, 2208 bp, Artificial Sequence
  source: /note="Description of Artificial Sequence: Synthetic polynucleotide"
atggctgccgatggttatcttccagattggctcgaggacactctctctgaaggaataagacagtggtggaagctcaaacctggcccaccaccaccaaagcccgcagagcggcatcaggacgacagcaggggtcttgtgcttcctgggtacaagtacctcggacccttcaacggactcgacaagggagagccggtcaacgaggcagacgccgcggccctcgagcacgacaaggcctacgaccggcagctcgacagcggagacaacccgtacctcaagtacaaccacgccgacgcggagtttcaggagcgtcttaaagaagatacgtcttttgggggcaacctcggacgagcagtcttccaggcgaaaaagagggttcttgaacctctgggcctggttgaggaacctgttaagacggctccgggaaaaaagaggccggtagagcattctcctgcggagccagactcctcctcgggaaccggaaaggcgggccagcagcctgcgagaaagagattgaatttcggtcagactggagacgcagactccgtacctgacccccagcctctcggacagccaccagcagccccctctggtctgggaactaatacgatggctacaggcagtggcgcaccaatggcagacaataacgagggcgccgacggagtgggtaattcctcgggaaattggcattgcgactccacatggatgggcgacagagtcatcaccaccagcacccgaacctgggccctgcccacctacaacaaccacctctacaagcaaatctccagccaatctggagcctcaaacgacaaccactactttggctacagcaccccttgggggtattttgacttcaacagattccactgtcacttctccccacgtgactggcaaagactcatcaacaacaactggggattccgacccaagagactcaacttcaagctctttaacattcaagtcaaagaggtcacgcagaatgacggtacgacgacgattgccaataaccttaccagcacggttcaagtctttactgactcggagtaccagctcccgtacgtcctcggctcggcgcatcaaggatgcctcccgccgtttccagcagacgtcttcatggtgccacagtatggatacctcaccctgaacaacgggagtcaggcggtaggacgctcttccttttactgcctggagtactttccttctcagatgctgcgtaccggaaacaactttaccttcagctacacctttgaggacgttcctttccacagcagctacgctcacagccagagtttggaccggctgatgaatcctctgatcgaccagtatctgtattacttgagcaaaacaaacgctccaagcggaaccaccacgatgtccaggcttcagttttctcaggccggagcgagtgacattcgggaccagtctaggaactggcttcctggaccctgttaccgccagcagcgagtatcaaaaacagctgcggataacaacaacagtgattattcgtggactggagctaccaagtaccacctcaatggaagagactctctggtgaatccgggcccagctatggccagccacaaggacgatgaagaaaaatattttcctcagagcggggttctcatctttggaaaacaagactcgggaaaaactaatgtggacattgaaaaggtcatgattacagacgaagaggaaatcaggaccaccaatcccgtggctacggagcagtatggttctgtatctaccaacctccagagcggcaacacacaggcagccaccacagatgtcaacacacaaggcgttcttccaggcatggtctggcaggacagagacgtgtgcctgcaaggacccatttgggcaaagattcctcacacggacggacactttcacccttctcccctcatgggaggatttggactcaaacaccctcctccgcaaatcctcatcaagaatacccccgtacctgcgaatccttcgaccacattcagcgcggcaaagtttgcttctttcatcacacagtactctacggggcaggtcagcgtggagattgagtgggagctgcagaaggagaacagcaaacgttggaaccccgaaatccagtacacttccaactacaacaagtctgttaatgtggactttactgtggacactaatggtgtgtattcagagcctcgccccattggcacaagatacctgactcgtaatctgtaa

SEQ ID NO: 11875 - DNA, 2208 bp, Artificial Sequence
  source: /note="Description of Artificial Sequence: Synthetic polynucleotide"
atggctgccgatggttatcttccagattggctcgaggacactctctctgaaggaataagacagtggtggaagctcaaacctggcccaccaccaccaaagcccgcagagcggcatcaggacgacagcaggggtcttgtgcttcctgggtacaagtacctcggacccttcaacggactcgacaagggagagccggtcaacgaggcagacgccgcggccctcgagcacgacaaggcctacgaccggcagctcgacagcggagacaacccgtacctcaagtacaaccacgccgacgcggagtttcaggagcgtcttaaagaagatacgtcttttgggggcaacctcggacgagcagtcttccaggcgaaaaagagggttcttgaacctctgggcctggttgaggaacctgttaagacggctccgggaaaaaagaggccggtagagcattctcctgcggagccagactcctcctcgggaaccggaaaggcgggccagcagcctgcgagaaagagattgaatttcggtcagactggagacgcagactccgtacctgacccccagcctctcggacagccaccagcagccccctctggtctgggaactaatacgatggctacaggcagtggcgcaccaatggcagacaataacgagggcgccgacggagtgggtaattcctcgggaaattggcattgcgattccacatggatgggcgacagagtcatcaccaccagcacccgaacctgggccctgcccacctacaacaaccacctctacaagcaaatctccagccaatctggagcctcaaacgacaaccactactttggctacagcaccccttgggggtattttgacttcaacagattccactgtcacttctccccacgtgactggcaaagactcatcaacaacaactggggattccgacccaagagactcaacttcaagctctttaacattcaagtcaaagaggtcgcgcagaatgacggtacgacgacgattgccaataaccttaccagcacggttcaagtctttactgactcggagtaccagctcccgtacgtcctcggctcggcgcatcaaggatgcctcccgccgtttccagcagacgtcttcatggtgccacagtatggatacctcaccctgaacaacgggagtcaggcggtaggacgctcttccttttactgcctggagtactttccttctcagatgctgcgtaccggaaacaactttaccttcagctacacctttgaggacgttcctttccacagcagctacgctcacagccagagtttggaccggctgatgaatcctctgatcgaccagtatctgtattacttgagcaaaacaaacgctccaagcggaaccaccacgatgtccaggcttcagttttctcaggccggagcgagtgacattcgggaccagtctaggaactggcttcctggaccctgttaccgccagcagcgagtatcaaaaacagctgcggataacaacaacagtgattattcgtggactggagctaccaagtaccacctcaatggaagagactctctggtgaatccgggcccagctatggccagccacaaggacgatgaagaaaaatattttcctcagagcggggttctcatctttggaaaacaagactcgggaaaaactaatgtggacattgaaaaggtcatgattacagacgaagaggaaatcaggaccaccaatcccgtggctacggagcagtatggttctgtatctaccaacctccagagcggcaacacacaggcagccaccacagatgtcaacacacaaggcgttcttccaggcatggtctggcaggacagagacgtgtacctgcaaggacccatctgggcaaagattcctcacacggacggacactttcacccttctcccctcatgggaggatttggactcaaacaccctcctccgcaaatcctcatcaagaatacccccgtacctgcgaatccttcgaccacattcagcgcggcaaagtttgcttctttcatcacacagtactctacggggcaggtcagcgtggagattgagtgggagctgcagaaggagaacagcaaacgctggaaccccgaaatccagtacacttccaactacaacaagtctgttaatgtggactttactgtggacactaatggtgtgtattcagagcctcgccccattggcacaagatacctgactcgtaatctgtaa

SEQ ID NO: 11876 - DNA, 2208 bp, Artificial Sequence
  source: /note="Description of Artificial Sequence: Synthetic polynucleotide"
atggctgccgatggttatcttccagattggctcgaggacactctctctgaaggaataagacagtggtggaagctcaaacctggcccaccaccgccaaagcccgcagagcggcataaggacgacagcaggggtcttgtgcttcctgggtacaagtacctcggacccttcaacggactcgacaaaggagagccggtcaacgaggcagacgccgcggccctcgagcacgacaaggcctacgaccggcagctcgacagcggagacaacccgtacctcaagtacaaccacgccgacgcggagtttcaggagcgccttaaagaagatacgtcttttgggggcaacctcgcaagagcagtattccaggcgaaaaagagggttcttgaacctctgggcctggttgaggagcctgttaagacggctccgggaaaaaagaggccggtagagcactctcctgcggagccagattcctcctccggaactggaaagtcgggccaacagcctgcaagaaagagattgaattttggtcagactggagacgcagactccgtacctgacccccagcctctcggacagccaccagcagccccctctggtctgggaactaatacgatggcttcaggcagtggcgcaccaatggcagacaataacgagggcgccgacggagtgggtaattcctcgggaaattggcattgcgattccacatggatgggcgacagagtcatcaccaccagcacccgcacctgggctctgcccacctacaacaaccatctgtacaagcaaatttccagccagtctggagccagcaacgacaaccactactttggctacagcaccccttgggggtattttgacttcaacagattccactgccacttctccccacgtgactggcaaagactcatcaacaacaattggggattccggcccaaaagactcaacttcaagctctttaacattcaagtcaaggaggtcacgcagaatgacggtacgacgacgattgccaataaccttaccagcacggttcaggtgtttactgactcggagtaccagctcccgtacgtcctcggctcggcgcatcaaggatgcctcccgccgttcccagcagacgtcttcatggtgccacagtatggatacctcaccctgaacaacgggagtcaggcggtaggacgctcttcattttactgcccggagtaccttccttctcagatgctgcgtaccggaaacaactttaccttcagctacacctttgaggacgttccttttcacagcagctacgctcacagccagagtttggaccgtctcatgaatcctctcatcgaccagtacctgtattacttgagcagaacaaacactccaagcggaaccactacgcagtccaggcttcagttttctcaagccggagcgagtgacattcgggaccagtctaggaactggcttcctggaccctgttaccgccagcagcgagtatcaaagacagctgcggacaacaacaacagtgattactcgtggactggagctaccaagtatcacctcaatggaagagactctctggtgaatccgggcacagccatggccagccacaaggacgatgaagaaaagtattttcctcagagcggggttctcatcttcggaaaacaagactcgggaaaaactaatgtggacattgaaaaggtcatgattacagacgaagaggaaaccaggaccaccaatcccgtggctacggagcagtatggttctgtatctaccaatctccagagcggcaacacacaagcagctacctcagatgtcaacacacaaggcgttcttccaggcatggtctggcaggacagagacgtgtacctgcagggacccatctgggcaaagattccacacacggacggacattttcacccttctcctcttatgggaggatttggactgaagcaccctcccccgcagattctcatcaagaataccccggtacctgcgaatccttctaccgccttcagcgcggcaaagtttgcttccttcatcacacagtactccacggggcaggtcagcgtggagatcgagtgggagctgcagaaagagaacagcgaacgctggaaccccgagatccagtatacctccaactacaacaagtctgttaatgtggactttactgtggacactaatggcgtgtattcagagcctcgccccattggcacaaggtacctgactcgtaatctgtaa

SEQ ID NO: 11877 - DNA, 2208 bp, Artificial Sequence
  source: /note="Description of Artificial Sequence: Synthetic polynucleotide"
atggctgccgatggttatcttccagattggctcgaggacactctctctgaaggaataagacagtggtggaagctcaaacctggcccaccaccgccaaagcccgcagagcggcataaggacgacagcaggggtcttgtgcttcctgggtacaagtacctcggacccttcaacggactcgacaaaggagagccggtcaacgaggcagacgccgcggccctcgagcacgacaaggcctacgaccggcagctcgacagcggagacaacccgtacctcaagtacaaccacgccgacgcggagtttcaggagcgccttaaagaagatacgtcttttgggggcaacctcgcaagagcagtattccaggcgaaaaagagggttcttgaacctctgggcctggttgaggagcctgttaagacggctccgggaaaaaagaggccggtagagcactctcctgcggagccagattcctcctccggaactggaaagtcgggccaacagcctgcaagaaagagattgaattttggtcagactggagacgcagactccgtacctgacccccagcctctcggacagccaccagcagccccctctggtctgggaactaatacgatggcttcaggcagtggcgcaccaatggcagacaataacgagggcgccgacggagtgggtaattcctcgggaaattggcattgcgattccacatggatgggcgacagagtcatcaccaccagcacccgcacctgggctctgcccacctacaacaaccatctgtacaagcaaatttccagccagtctggagccagcaacgacaaccactactttggctacagcaccccttgggggtattttgacttcaacagattccactgccacttctccccacgtgactggcaaagactcatcaacaacaattggggattccggcccaaaagactcaacttcaagctctttaacattcaagtcaaggaggtcacgcagaatgacggtacgacgacgattgccaataaccttaccagcacggttcaggtgtttactgactcggagtaccagctcccgtacgtcctcggctcggcgcatcaaggatgcctcccgccgttcccagcagacgtcctcatggtgccacagtatggatacctcaccctgaacaacgggagtcaggcggtaggacgctcttcattttactgcccggagtaccttccttctcagatgctgcgtaccggaaacaactttaccttcagctacacctttgaggacgttccttttcacagcagctacgctcacagccagagtttggaccgtctcatgaatcctctcatcgaccagtacctgtattacttgagcagaacaaacactccaagcggaaccactacgcagtccaggcttcagttttctcaagccggagcgagtgacattcgggaccagtctaggaactggcttcctggaccctgttaccgccagcagcgagtatcaaagacagctgcggacaacaacaacagtgattactcgtggactggagctaccaagtatcacctcaatggaagagactctctggtgaatccgggcacagccatggccagccacaaggacgatgaagaaaagtattttcctcagagcggggttctcatcttcggaaaacaagactcgggaaaaactaatgtggacattgaaaaggtcatgattacagacgaagaggaaatcaggaccaccaatcccgtggctacggagcagtatggttctgtatctaccaatctccagagcggcaacacacaagcagctacctcagatgtcaacacacaaggcgttcttccaggcatggtctggcaggacagagacgtgtacctgcagggacccatctgggcaaagattccacacacggacggacattttcacccttctcctcttatgggaggatttggactgaagcaccctcccccgcagattctcatcaagaataccccggtacctgcgaatccttctaccgccttcagcgcggcaaagtttgcttccttcatcacacagtactccacggggcaggtcagcgtggagatcgagtgggagctgcagaaagagaacagcgaacgctggaaccccgagatccagtatacctccaactacaacaagtctgttaatgtggactttactgcggacactaatggcgtgtattcagagcctcgccccattggcacaaggtacctgactcgtaatctgtaa

SEQ ID NO: 11878 - DNA, 2208 bp, Artificial Sequence
  source: /note="Description of Artificial Sequence: Synthetic polynucleotide"
atggctgccgatggttatcttccagattggctcgaggacactctctctgaaggaataagacagtggtggaagctcaaacctggcccaccaccgccaaagcccgcagagcggcataaggacgacagcaggggtcttgtgcttcctgggtacaagtacctcggacccttcaacggactcgacaaaggagagccggtcaacgaggcagacgccgcggccctcgagcacgacaaggcctacgaccggcagctcgacagcggagacaacccgtacctcaagtacaaccacgccgacgcggagtttcaggagcgccttaaagaagatacgtcttttgggggcaacctcgcaagagcagtattccaggcgaaaaagagggttcttgaacctctgggcctggttgaggagcctgttaagacggctccgggaaaaaagaggccggtagagcactctcctgcggagccagattcctcctccggaactggaaagtcgggccaacagcctgcaagaaagagattgaattttggtcagactggagacgcagactccgtacctgacccccagcctctcggacagccaccagcagccccctctggtctgggaactaatacgatggcttcaggcagtggcgcaccaatggcagacaataacgagggcgccgacggagtgggtaattcctcgggaaattggcattgcgattccacatggatgggcgacagagtcatcaccaccagcacccgcgcctgggctctgcccacctacaacaaccatctgtacaagcaaatttccagccagtctggagccagcaacgacaaccactactttggctacagcaccccttgggggtattttgacttcaacagattccactgccacttctccccacgtgactggcaaagactcatcaacaacaattggggattccggcccaaaagactcaacttcaagctctttaacattcaagtcaaggaggtcacgcagaatgacggtacgacgacgattgccaataaccttaccagcacggttcaggtgtttactgactcggagtaccagctcccgtacgtcctcggctcggcgcatcaaggatgcctcccgccgttcccagcagacgtcctcatggtgccacagtatggatacctcaccctgaacaacgggagtcaggcggtaggacgctcttcattttactgcccggagtaccttccttctcagatgctgcgtaccggaaacaactttaccttcagctacacctttgaggacgttccttttcacagcagctacgctcacagccagagtttggaccgtctcatgaatcctctcatcgaccagtacctgtattacttgagcagaacaaacactccaagcggaaccactacgcagtccaggcttcagttttctcaagccggagcgagtgacattcgggaccagtctaggaactggcttcctggaccctgttaccgccagcagcgagtatcaaagacagctgcggacaacaacaacagtgattactcgtggactggagctaccaagtatcacctcaatggaagagactctctggtgaatccgggcacagccatggccagccacaaggacgatgaagaaaagtattttcctcagagcggggttctcatcttcggaaaacaagactcgggaaaaactaatgtggacattgaaaaggtcatgattacagacgaagaggaaatcaggaccaccaatcccgtggctacggagcagtatggttctgtatctaccaatctccagagcggcaacacacaagcagctacctcagatgtcaacacacaaggcgttcttccaggcatggtctggcaggacagagacgtgtacctgcagggacccatctgggcaaagattccacacacggacggacattttcacccttctcctcttatgggaggatttggactgaagcaccctcccccgcagattctcatcaagaataccccggtacctgcgaatccttctaccgccttcagcgcggcaaagtttgcttccttcatcacacagtactccacggggcaggtcagcgtggagatcgagtgggagctgcagaaagagaacagcgaacgctggaaccccgagatccagtatacctccaactacaacaagtctgttaatgtggactttactgtggacactaatggcgtgtattcagagcctcgccccattggcacaaggtacctgactcgtaatctgtaa

SEQ ID NO: 11879 - DNA, 2208 bp, Artificial Sequence
  source: /note="Description of Artificial Sequence: Synthetic polynucleotide"
atggctgccgatggttatcttccagattggctcgaggacactctctctgaaggaataagacagtggtggaagctcaaacctggcccaccaccgccaaagcccgcagagcggcataaggacgacagcaggggtcttgtgcttcctgggtacaagtacctcggacccttcaacggactcgacaaaggagagccggtcaacgaggcagacgccgcggccctcgagcacgacaaggcctacgaccggcagctcgacagcggagacaacccgtacctcaagtacaaccacgccgacgcggagtttcaggagcgccttaaagaagatacgtcttttgggggcaacctcgcaagagcagtattccaggcgaaaaagagggttcttgaacctctgggcctggttgaggagcctgttaagacggctccgggaaaaaagaggccggtagagcactctcctgcggagccagattcctcctccggaactggaaagtcgggccaacagcctgcaagaaagagattgaattttggtcagactggagacgcagactccgtacctgacccccagcctctcggacagccaccagcagccccctctggtctgggaactaatacgatggcttcaggcagtggcgcaccaatggcagacaataacgagggcgccgacggagtgggtaattcctcgggaaattggcattgcgattccacatggatgggcgacagagtcatcaccaccagcacccgcacctgggctctgcccacctacaacaaccatctgtacaagcaaatttccagccagtctggagccagcaacgacaaccactactttggctacagcaccccttgggggtattttgacttcaacagattccactgccacttctccccacgtgactggcaaagactcatcaacaacaattggggattccggcccaaaagactcaacttcaagctctttaacattcaagtcaaggaggtcacgcagaatgacggtacgacgacgattgccaataaccttaccagcacggttcaggtgtttactgactcggagtaccagctcccgtacgtcctcggctcggcgcatcaaggatgcctcccgccgttcccagcagacgtcttcatggtgccacagtatggatacctcaccctgaacaacgggagtcaggcggtaggacgctcttcattttactgcccggagtaccttccttctcagatgctgcgtaccggaaacaactttaccttcagctacacctttgaggacgttccttttcacagcagctacgctcacagccagagtttggaccgtctcatgaatcctctcatcgaccagtacctgtattacttgagcagaacaaacactccaagcggaaccactacgcagtccaggcttcagttttctcaagccggagcgagtgacattcgggaccagtctaggaactggcttcctggaccctgttaccgccagcagcgagtatcaaagacagctgcggacaacaacaacagtgattactcgtggactggagctaccaagtatcacctcaatggaagagactctctggtgaatccgggcacagccacggccagccacaaggacgatgaagaaaagtattttcctcagagcggggttctcatcttcggaaaacaagactcgggaaaaactaatgtggacattgaaaaggtcatgattacagacgaagaggaaatcaggaccaccaatcccgtggctacggagcagtatggttctgtatctaccaatctccagagcggcaacacacaagcagctacctcagatgtcaacacacaaggcgttcttccaggcatggtctggcaggacagagacgtgtacctgcagggacccatctgggcaaagattccacacacggacggacattttcacccttctcctcttatgggaggatttggactgaagcaccctcccccgcagattctcatcaagaataccccggtacctgcgaatccttctaccgccttcagcgcggcaaagtttgcttccttcatcacacagtactccacggggcaggtcagcgtggagatcgagtgggagctgcagaaagagaacagcgaacgctggaaccccgagatccagtatacctccaactacaacaagtctgttaatgtggactttactgtggacactaatggcgtgtattcagagcctcgccccattggcacaaggtacctgactcgtaatctgtaa

SEQ ID NO: 11880 - DNA, 2205 bp, Artificial Sequence
  source: /note="Description of Artificial Sequence: Synthetic polynucleotide"
atggctgccgatggttatcttccagattggctcgaggacactctctctgaaggaataagacagtggtggaagctcaaacctggcccaccaccgccaaagcccgcagagcggcataaggacgacagcaggggtcttgtgcttcctgggtacaagtacctcggacccttcaacggactcgacaaaggagagccggtcaacgaggcagacgccgcggccctcgagcacgacaaggcctacgaccggcagctcgacagcggagacaacccgtacctcaagtacaaccacgccgacgcggagtttcaggagcgccttaaagaagatacgtcttttgggggcaacctcgcaagagcagtattccaggcgaaaaagagggttcttgaacctctgggcctggttgaggagcctgttaagacggctccgggaaaaaagaggccggtagagcactctcctgcggagccagattcctcctccggaactggaaagtcgggccaacagcctgcaagaaagagattgaattttggtcagactggagacgcagactccgtacctgacccccagcctctcggacagccaccagcagccccctctggtctgggaactaatacgatggcttcaggcagtggcgcaccaatggcagacaataacgagggcgccgacggagtgggtaattcctcgggaaattggcattgcgattccacatggatgggcgacagagtcatcaccaccagcacccgcacctgggctctgcccacctacaacaaccatctgtacaagcaaatttccagccagtctggagccagcaacgacaaccactactttggctacagcaccccttgggggtattttgacttcaacagattccactgccacttctccccacgtgactggcaaagactcatcaacaacaattggggattccggcccaaaagactcaacttcaagctctttaacattcaagtcaaggaggtcacgcagaatgacggtacgacgacgattgccaataaccttaccagcacggttcaggtgtttactgactcggagtaccagctcccgtacgtcctcggctcggcgcatcaaggatgcctcccgccgttcccagcagacgtcttcatggtgccacagtatggatacctcaccctgaacaacgggagtcaggcggtaggacgctcttcattttactgcccggagtaccttccttctcagatgctgcgtaccggaaacaactttaccttcagctacacctttgaggacgttccttttcacagcagctacgctcacagccagagtttggaccgtctcatgaatcctctcatcgaccagtacctgtattacttgagcagaacaaacactccaagcggaaccactacgcagtccaggcttcagttttctcaagccggagcgagtgacattcgggaccagtctaggaactggcttcctggaccctgttaccgccagcagcgagtatcaaagacagctgcggacaacaacagtgattactcgtggactggagctaccaagtatcacctcaatggaagagactctctggtgaatccgggcacagccatggccagccacaaggacgatgaagaaaagtattttcctcagagcggggttctcatcttcggaaaacaagactcgggaaaaactaatgtggacattgaaaaggtcatgattacagacgaagaggaaatcaggaccaccaatcccgtggctacggagcagtatggttctgtatctaccaatctccagagcggcaacacacaagcagctacctcagatgtcaacacacaaggcgttcttccaggcatggtctggcaggacagagacgtgtacctgcagggacccatctgggcaaagattccacacacggacggacattttcacccttctcctcttatgggaggatttggactgaagcaccctcccccgcagattctcatcaagaataccccggtacctgcgaatccttctaccgccttcagcgcggcaaagtttgcttccttcatcacacagtactccacggggcaggtcagcgtggagatcgagtgggagctgcagaaagagaacagcgaacgctggaaccccgagatccagtatacctccaactacaacaagtctgttaatgtggactttactgtggacactaatggcgtgtattcagagcctcgccccattggcacaaggtacctgactcgtaatctgtaa

SEQ ID NO: 11881 - DNA, 2208 bp, Artificial Sequence
  source: /note="Description of Artificial Sequence: Synthetic polynucleotide"
atggctgccgatggttatcttccagattggctcgaggacactctctctgaaggaataagacagtggtggaagctcaaacctggcccaccaccgccaaagcccgcagagcggcataaggacgacagcaggggtcttgtgcttcctgggtacaagtacctcggacccttcaacggactcgacaaaggagagccggtcaacgaggcagacgccgcggccctcgagcacgacaaggcctacgaccggcagctcgacagcggagacaacccgtacctcaagtacaaccacgccgacgcggagtttcaggagcgccttaaagaagatacgtcttttgggggcaacctcgcaagagcagtattccaggcgaaaaagagggttcttgaccctctgggcctggttgaggagcctgttaagacggctccgggaaaaaagaggccggtagagcactctcctgcggagccagattcctcctccggaactggaaagtcgggccaacagcctgcaagaaagagattgaattttggtcagactggagacgcagactccgtacctgacccccagcctctcggacagccaccagcagccccctctggtctgggaactaatacgatggcttcaggcagtggcgcaccaatggcagacaataacgagggcgccgacggagtgggtaattcctcgggaaattggcattgcgattccacatggatgggcgacagagtcatcaccaccagcacccgcacctgggctctgcccacctacaacaaccatctgtacaagcaaatttccagccagtctggagccagcaacgacaaccactactttggctacagcaccccttgggggtattttgacttcaacagattccactgccacttctccccacgtgactggcaaagactcatcaacaacaattggggattccggcccaaaagactcaacttcaagctctttaacattcaagtcaaggaggtcacgcagaatgacggtacgacgacgattgccaataaccttaccagcacggttcaggtgtttactgactcggagtaccagctcccgtacgtcctcggctcggcgcatcaaggatgcctcccgccgttcccagcagacgtcttcatggtgccacagtatggatacctcaccctgaacaacgggagtcaggcggtaggacgctcttcattttactgcccggagtaccttccttctcagatgctgcgtaccggaaacaactttaccttcagctacacctttgaggacgttccttttcacagcagctacgctcacagccagagtttggaccgtctcatgaatcctctcatcgaccagtacctgtattacttgagcagaacaaacactccaagcggaaccactacgcagtccaggcttcagttttctcaagccggagcgagtgacattcgggaccagtctaggaactggcttcctggaccctgttaccgccagcagcgagtatcaaagacagctgcggacaacaacaacagtgattactcgtggactggagctaccaagtatcacctcaatggaagagactctctggtgaatccgggcacagccatggccagccacaaggacgatgaagaaaagtattttcctcagagcggggttctcatcttcggaaaacaagactcgggaaaaactaatgtggacattgaaaaggtcatgattacagacgaagaggaaatcaggaccaccaatcccgtggctacggagcagtatggttctgtatctaccaatctccagagcggcaacacacaagcagctacctcagatgtcaacacacaaggcgttcttccaggcatggtctggcaggacagagacgtgtacctgcagggacccatctgggcaaagattccacacacggacggacattttcacccttctcctcttatgggaggatttggactgaagcaccctcccccgcagattctcatcaagaataccccggtacctgcgaatccttctaccgccttcagcgcggcaaagtttgcttccttcatcacacagtactccacggggcaggtcagcgtggagatcgagtgggagctgcagaaagagaacagcgaacgctggaaccccgagatccagtatacctccaactacaacaagtctgttaatgtggactttactgtggacactaatggcgtgtattcagagcctcgccccattggcacaaggtacctgactcgtaatctgtaa

SEQ ID NO: 11882 - DNA, 2208 bp, Artificial Sequence
  source: /note="Description of Artificial Sequence: Synthetic polynucleotide"
atggctgccgatggttatcttccagattggctcgaggacactctctctgaaggaataagacagtggtggaagctcaaacctggcccaccaccgccaaagcccgcagagcggcataaggacgacagcaggggtcttgtgcttcctgggtacaagtacctcggacccttcaacggactcgacaaaggagagccggtcaacgaggcagacgccgcggccctcgagcacgacaaggcctacgaccggcagctcgacagcggagacaacccgtacctcaagtacaaccacgccgacgcggagtttcaggagcgccttaaagaagatacgtcttttgggggcaacctcgcaagagcagtattccaggcgaaaaagagggttcttgaacctctgggcctggttgaggagcctgttaagacggctccgggaaaaaagaggccggtagagcactctcctgcggagccagattcctcctccggaactggaaagtcgggccaacagcctgcaagaaagagattgaattttggtcagactggagacgcagactccgtacctgacccccagcctctcggacagccaccagcagccccctctggtctgggaactaatacgatggcttcaggcagtggcgcaccaatggcagacaataacgagggcgccgacggagtgggtaattcctcgggaaattggcattgcgattccacatggatgggcgacagagtcatcaccaccagcacccgcacctgggctctgcccacctacaacaaccatctgtacaagcaaatttccagccagtctggagccagcaacgacaaccactactttggctacagcaccccttgggggtattttgacttcaacagattccactgccacttctccccacgtgactggcaaagactcatcaacaacaattggggattccggcccaaaagactcaacttcaagctctttaacattcaagtcaaggaggtcacgcagaatgacggtacgacgacgattgccaataaccttaccagcacggttcaggtgtttactgactcggagtaccagctcccgtacgtcctcggctcggcgcatcaaggatgcctcccgccgttcccagcagacgtcttcatggtgccacagtatggatacctcaccctgaacaacgggagtcaggcggtaggacgctcttcattttactgcccggagtaccttccttctcagatgctgcgtaccggaaacaactttaccttcagctacacctttgaggacgttccttttcacagcagctacgctcacagccagagtttggaccgtctcatgaatcctctcatcgaccagtacctgtattacttgagcagaacaaacactccaagcggaaccactacgcagtccaggcttcagttttctcaagccggagcgagtgacattcgggaccagtctaggaactggcttcctggaccctgttaccgccagcagcgagtatcaaagacagctgcggacaacaacaacagtgattactcgtggactggagctaccaagtatcacctcaatggaagagactctctggtgaatccgggcacagccatggccagccacaaggacgatgaagaaaagtattttcctcagagcggggttctcatctttcggaaacaagactcgggaaaaactaatgtggacattgaaaaggtcatgattacagacgaagaggaaatcaggaccaccaatcccgtggctacggagcagtatggttctgtatctaccaatctccagagcggcaacacacaagcagctacctcagatgtcaacacacaaggcgttcttccaggcatggtctggcaggacagagacgtgtacctgcagggacccatctgggcaaagattccacacacggacggacattttcacccttctcctcttatgggaggatttggactgaagcaccctcccccgcagattctcatcaagaataccccggtacctgcgaatccttctaccgccttcagcgcggcaaagtttgcttccttcatcacacagtactccacggggcaggtcagcgtggagatcgagtgggagctgcagaaagagaacagcgaacgctggaaccccgagatccagtatacctccaactacaacaagtctgttaatgtggactttactgtggacactaatggcgtgtattcagagcctcgccccattggcacaaggtacctgactcgtaatctgtaa

SEQ ID NO: 11883 - DNA, 2208 bp, Artificial Sequence
  source: /note="Description of Artificial Sequence: Synthetic polynucleotide"
atggctgccgatggttatcttccagattggctcgaggacactctctctgaaggaataagacagtggtggaagctcaaacctggcccaccaccgccaaagcccgcagagcggcataaggacgacagcaggggtcttgtgcttcctgggtacaagtacctcggacccttcaacggactcgacaaaggagagccggtcaacgaggcagacgccgcggccctcgagcacgacaaggcctacgaccggcagctcgacagcggagacaacccgtacctcaagtacaaccacgccgacgcggagtttcaggagcgccttaaagaagatacgtcttttgggggcaacctcgcaagagcagtattccaggcgaaaaagagggttcttgaacctctgggcctggttgaggagcctgttaagacggctccgggaaaaaagaggccggtagagcactctcctgcggagccagattcctcctccggaactggaaagtcgggccaacagcctgcaagaaagagattgaattttggtcagactggagacgcagactccgtacctgacccccagcctctcggacagccaccagcagccccctctggtctgggaactaatacgatggcttcaggcagtggcgcaccaatggcagacaataacgagggcgccgacggagtgggtaattcctcgggaaattggcattgcgattccacatggatgggcgacagagtcatcaccaccagcacccgcacctgggctctgcccacctacaacaaccatctgtacaagcaaatttccagccagtctggagccagcaacgacaaccactactttggctacagcaccccttgggggtattttgacttcaacagattccactgccacttctccccacgtgactggcaaagactcatcaacaacaattggggattccggcccaaaagactcaacttcaagctctttaacattcaagtcaaggaggtcacgcagaatgacggtacgacgacgattgccaataaccttaccagcacggttcaggtgtttactgactcggagtaccagctcccgtacgtcctcggctcggcgcatcaaggatgcctcccgccgttcccagcagacgtcctcatggtgccacagtatggatacctcaccctgaacaacgggagtcaggcggtaggacgctcttcattttactgcccggagtaccttccttctcagatgctgcgtaccggaaacaactttaccttcagctacacctttgaggacgttccttttcacagcagctacgctcacagccagagtttggaccgtctcatgaatcctctcatcgaccagtacctgtattacttgagcagaacaaacactccaagcggaaccactacgcagtccaggcttcagttttctcaagccggagcgagtgacattcgggaccagtctaggaactggcttcctggaccctgttaccgccagcagcgagtatcaaagacagctgcggacaacaacaacagtgattactcgtggactggagctaccaagtatcacctcaatggaagagactctctggtgaatccgggcacagccatggccagccacaaggacgatgaagaaaagtattttcctcagagcggggttctcatcttccggaaacaagactcgggaaaaactaatgtggacattgaaaaggtcatgattacagacgaagaggaaatcaggaccaccaatcccgtggctacggagcagtatggttctgtatctaccaatctccagagcggcaacacacaagcagctacctcagatgtcaacacacaaggcgttcttccaggcatggtctggcaggacagagacgtgtacctgcagggacccatctgggcaaagattccacacacggacggacattttcacccttctcctcttatgggaggatttggactgaagcaccctcccccgcagattctcatcaagaataccccggtacctgcgaatccttctaccgccttcagcgcggcaaagtttgcttccttcatcacacagtactccacggggcaggtcagcgtggagatcgagtgggagctgcagaaagagaacagcgaacgctggaaccccgagatccagtatacctccaactacaacaagtctgttaatgtggactttactgtggacactaatggcgtgtattcagagcctcgccccattggcacaaggtacctgactcgtaatctgtaa

SEQ ID NO: 11884 - DNA, 2208 bp, Artificial Sequence
  source: /note="Description of Artificial Sequence: Synthetic polynucleotide"
atggctgccgatggttatcttccagattggctcgaggacactctctctgaaggaataagacagtggtggaagctcaaacctggcccaccaccgccaaagcccgcagagcggcataaggacgacagcaggggtcttgtgcttcctgggtacaagtacctcggacccttcaacggactcgacaaaggagagccggtcaacgaggcagacgccgcggccctcgagcacgacaaggcctacgaccggcagctcgacagcggagacaacccgtacctcaagtacaaccacgccgacgcggagtttcaggagcgccttaaagaagatacgtcttttgggggcaacctcgcaagagcagtattccaggcgaaaaagagggttcttgaacctctgggcctggttgaggagcctgttaagacggctccgggaaaaaagaggccggtagagcactctcctgcggagccagattcctcctccggaactggaaagtcgggccaacagcctgcaagaaagagattgaattttggtcagactggagacgcagactccgtacctgacccccagcctctcggacagccaccagcagccccctctggtctgggaactaatacgatggcttcaggcagtggcgcaccaatggcagacaataacgagggcgccgacggagtgggtaattcctcgggaaattggcattgcgattccacatggatgggcgacagagtcatcaccaccagcacccgcacctgggctctgcccacctacaacaaccatctgtacaagcaaatttccagccagtctggagccagcaacgacaaccactactttggctacagcaccccttgggggtattttgacttcaacagattccactgccacttctccccacgtgactggcaaagactcatcaacaacaattggggattccggcccaaaagactcaacttcaagctctttaacattcaagtcaaggaggtcacgcagaatgacggtacgacgacgattgccaataaccttaccagcacggttcaggtgtttactgactcggagtaccagctcccgtacgtcctcggctcggcgcatcaaggatgcctcccgccgttcccagcagacgtcctcatggtgccacagtatggatacctcaccctgaacaacgggagtcaggcggtaggacgctcttcattttactgcccggagtaccttccttctcagatgctgcgtaccggaaacaactttaccttcagctacacctttgaggacgttccttttcacagcagctacgctcacagccagagtttggaccgtctcatgaatcctctcatcgaccagtacctgtattacttgagcagaacaaacactccaagcggaaccactacgcagtccaggcttcagttttctcaagccggagcgagtgacattcgggaccagtctaggaactggcttcctggaccctgttaccgccagcagcgagtatcaaagacagctgcggacaacaacaacagtgattactcgtggactggagctaccaagtatcacctcaatggaagagactctctggtgaatccgggcacagccatggccagccacaaggacgatgaagaaaagtattttcctcagagcggggttctcatcttcggaaaacaagactcgggaaaaactaatgtggacattgaaaaggtcatgattacagacgaagaggaaatcaggaccaccaatcccgtggctacggagcagtatggttctgtatctaccaatctccagagcggcaacacacaagcagctacctcagatgtcaacacacaaggcgttcttccaggcatggtctggcaggacagagacgtgtacctgcagggacccatctgggcaaagattccacacacggacggacattttcacccttctcctcttatgggaggatttggactgaagcaccctcccccgcagattctcatcaagaataccccggtacctgcgaatccttctaccgccttcagcgcggcaaagtttgcttccttcatcacacagtactccacggggcaggtcagcgtggagatcgagtgggagctgcagaaagagaacagcgaacgctggaaccccgagatccagtatacctccaactacaacaagtctgttaatgtggactttactgtggacactaatggcgtgtattcagagcctcgccccattggcacaaggtacctgactcgtaatctgtaa

SEQ ID NO: 11885 - DNA, 2208 bp, Artificial Sequence
  source: /note="Description of Artificial Sequence: Synthetic polynucleotide"
atggctgccgatggttatcttccagattggctcgaggacactctctctgaaggaataagacagtggtggaagctcaaacctggcccaccaccgccaaagcccgcagagcggcataaggacgacagcaggggtcttgtgcttcctgggtacaagtacctcggacccttcaacggactcgacaaaggagagccggtcaacgaggcagacgccgcggccctcgagcacgacaaggcctacgaccggcagctcgacagcggagacaacccgtacctcaagtacaaccacgccgacgcggagtttcaggagcgccttaaagaagatacgtcttttgggggcaacctcgcaagagcagtattccaggcgaaaaagagggttcttgaacctctgggcctggttgaggagcctgttaagacggctccgggaaaaaagaggccggtagagcactctcctgcggagccagattcctcctccggaactggaaagtcgggccaacagcctgcaagaaagagattgaattttggtcagactggagacgcagactccgtacctgacccccagcctctcggacagccaccagcagccccctctggtctgggaactaatacgatggcttcaggcagtggcgcaccaatggcagacaataacgagggcgccgacggagtgggtaattcctcgggaaattggcattgcgattccacatggatgggcgacagagtcatcaccaccagcacccgcacctgggctctgcccacctacaacaaccatctgtacaagcaaatttccagccagtctggagccagcaacgacaaccactactttggctacagcaccccttgggggtattttgacttcaacagattccactgccacttctccccacgtgactggcaaagactcatcaacaacaattggggattccggcccaaaagactcaacttcaagctctttaacattcaagtcaaggaggtcacgcagaatgacggtacgacgacgattgccaataaccttaccagcacggttcaggtgtttactgactcggagtaccagctcccgtacgtcctcggctcggcgcatcaaggatgcctcccgccgttcccagcagacgtcttcatggtgccacagtatggatacctcaccctgaacaacgggagtcaggcggtaggacgctcttcattttactgcccggagtaccttccttctcagatgctgcgtaccggaaacaactttaccttcagctacacctttgaggacgttccttttcacagcagctacgctcacagccagagtttggaccgtctcatgaatcctctcatcgaccagtacctgtattacttgagcagaacaaacactccaagcggaaccactacgcagtccaggcttcagttttctcaagccggagcgagtgacattcgggaccagtctaggaactggcttcctggaccctgttaccgccagcagcgagtatcaaagacagctgcggacaacaacaacagtgattactcgtggactggagctaccaagtatcacctcaatggaagagactctctggtgaatccgggcacagccatggccagccacaaggacgatgaagaaaagtattttcctcagagcggggttctcatcttcggaaaacaagactcgggaaaaactaatgtggacattgaaaaggtcatgattacagacgaagaggaaatcaggaccaccaatcccgtggctacggagcagtatggttctgtatctaccaatctccagagcggcaacacacaagcagctacctcagatgtcaacacacaaggcgttcttccaggcatggtctggcaggacagagacgtgtacctgcagggacccatctgggcaaagattccacacacggacggacattttcacccttctcctcttatgggaggatttggactgaagcaccctcccccgcagattctcatcaagaataccccggtacctgcgaatccttctaccgccttcagcgcggcaaagtttgcttccttcatcacacagtactccacggggcaggtcagcgtggagatcgagtgggagctgcagaaagagaacagcgaacgctggaaccccgagatccagtatacctccaactacaacaagtctgttaatgtggactttactgtggacactaatggcgtgtattcagagcctcgccccattggcacaaggtacctgactcgtaatctgtaa

SEQ ID NO: 11886 - DNA, 2208 bp, Artificial Sequence
  source: /note="Description of Artificial Sequence: Synthetic polynucleotide"
atggctgccgatggttatcttccagattggctcgaggacactctctctgaaggaataagacagtggtggaagctcaaacctggcccaccaccgccaaagcccgcagagcggcataaggacgacagcaggggtcttgtgcttcctgggtacaagtacctcggacccttcaacggactcgacaaaggagagccggtcaacgaggcagacgccgcggccctcgagcacgacaaggcctacgaccggcagctcgacagcggagacaacccgtacctcaagtacaaccacgccgacgcggagtttcaggagcgccttaaagaagatacgtcttttgggggcaacctcgcaagagcagtattccaggcgaaaaagagggttcttgaacctctgggcctggttgaggagcctgttaagacggctccgggaaaaaagaggccggtagagcactctcctgcggagccagattcctcctccggaactggaaagtcgggccaacagcctgcaagaaagagattgaattttggtcagactggagacgcagactccgtacctgacccccagcctctcggacagccaccagcagccccctctggtctgggaactaatacgatggcttcaggcagtggcgcaccaatggcagacaataacgagggcgccgacggagtgggtaattcctcgggaaattggcattgcgattccacatggatgggcgacagagtcatcaccaccagcacccgcacctgggctctgcccacctacaacaaccatctgtacaagcaaatttccagccagtctggagccagcaacgacaaccactactttggctacagcaccccttgggggtattttgacttcaacagattccactgccacttctccccacgtgactggcaaagactcatcaacaacaattggggattccggcccaaaagactcaacttcaagctctttaacattcaagtcaaggaggtcacgcagaatgacggtacgacgacgattgccaataaccttaccagcacggttcaggtgtttactgactcggagtaccagctcccgtacgtcctcggctcggcgcatcaaggatgcctcccgccgttcccagcagacgtcctcatggtgccacagtatggatacctcaccctgaacaacgggagtcaggcggtaggacgctcttcattttactgcccggagtaccttccttctcagatgctgcgtaccggaaacaactttaccttcagctacacctttgaggacgttccttttcacagcagctacgctcacagccagagtttggaccgtctcatgaatcctctcatcgaccagtacctgtattacttgagcagaacaaacactccaagcggaaccactacgcagtccaggcttcagttttctcaagccggagcgagtgacattcgggaccagtctaggaactggcttcctggaccctgttaccgccagcagcgagtatcaaagacagctgcggacaacaacaacagtgattactcgtggactggagctaccaagtatcacctcaatggaagagactctctggtgaatccgggcacagccacggccagccacaaggacgatgaagaaaagtattttcctcagagcggggttctcatcttcggaaaacaagactcgggaaaaactaatgtggacattgaaaaggtcatgattacagacgaagaggaaatcaggaccaccaatcccgtggctacggagcagtatggttctgtatctaccaatctccagagcggcaacacacaagcagctacctcagatgtcaacacacaaggcgttcttccaggcatggtctggcaggacagagacgtgtacctgcagggacccatctgggcaaagattccacacacggacggacattttcacccttctcctcttatgggaggatttggactgaagcaccctcccccgcagattctcatcaagaataccccggtacctgcgaatccttctaccgccttcagcgcggcaaagtttgcttccttcatcacacagtactccacggggcaggtcagcgtggagatcgagtgggagctgcagaaagagaacagcgaacgctggaaccccgagatccagtatacctccaactacaacaagtctgttaatgtggactttactgtggacactaatggcgtgtattcagagcctcgccccattggcacaaggtacctgactcgtaatctgtaa

SEQ ID NO: 11887 - DNA, 2208 bp, Artificial Sequence
  source: /note="Description of Artificial Sequence: Synthetic polynucleotide"
atggctgccgatggttatcttccagattggctcgaggacactctctctgaaggaataagacagtggtggaagctcaaacctggcccaccaccgccaaagcccgcagagcggcataaggacgacagcaggggtcttgtgcttcctgggtacaagtacctcggacccttcaacggactcgacaaaggagagccggtcaacgaggcagacgccgcggccctcgagcacgacaaggcctacgaccggcagctcgacagcggagacaacccgtacctcaagtacaaccacgccgacgcggagtttcaggagcgccttaaagaagatacgtcttttgggggcaacctcgcaagagcagtattccaggcgaaaaagagggttcttgaacctctgggcctggttgaggagcctgttaagacggctccgggaaaaaagaggccggtagagcactctcctgcggagccagattcctcctccggaactggaaagtcgggccaacagcctgcaagaaagagattgaattttggtcagactggagacgcagactccgtacctgacccccagcctctcggacagccaccagcagccccctctggtctgggaactaatacgatggcttcaggcagtggcgcaccaatggcagacaataacgagggcgccgacggagtgggtaattcctcgggaaattggcattgcgattccacatggatgggcgacagagtcatcaccaccagcacccgcacctgggctctgcccacctacaacaaccatctgtacaagcaaatttccagccagtctggagccagcaacgacaaccactactttggctacagcaccccttgggggtattttgacttcaacagattccactgccacttctccccacgtgactggcaaagactcatcaacaacaattggggattccggcccaaaagactcaacttcaagctctttaacattcaagtcaaggaggtcacgcagaatgacggtacgacgacgattgccaataaccttaccagcacggttcaggtgtttactgactcggagtaccagctcccgtacgtcctcggctcggcgcatcaaggatgcctcccgccgttcccagcagacgtcttcatggtgccacagtatggatacctcaccctgaacaacgggagtcaggcggtaggacgctcttcattttactgcccggagtaccttccttctcagatgctgcgtaccggaaacaactttaccttcagctacacctttgaggacgttccttttcacagcagctacgctcacagccagagtttggaccgtctcatgaatcctctcatcgaccagtacctgtattacttgagcagaacaaacactccaagcggaaccactacgcagtccaggcttcagttttctcaagccggagcgagtgacattcgggaccagtctaggaactggcttcctggaccctgttaccgccagcagcgagtatcaaagacagctgcggacaacaacaacagtgattactcgtggactggagctaccaagtatcacctcaatggaagagactctctggtgaatccgggcacagccatggccagccacaaggacgatggagaaaagtattttcctcagagcggggttctcatcttcggaaaacaagactcgggaaaaactaatgtggacattgaaaaggtcatgattacagacgaagaggaaatcaggaccaccaatcccgtggctacggagcagtatggttctgtatctaccaatctccagagcggcaacacacaagcagctacctcagatgtcaacacacaaggcgttcttccaggcatggtctggcaggacagagacgtgtacctgcagggacccatctgggcaaagattccacacacggacggacattttcacccttctcctcttatgggaggatttggactgaagcaccctcccccgcagattctcatcaagaataccccggtacctgcgaatccttctaccgccttcagcgcggcaaagtttgcttccttcatcacacagtactccacggggcaggtcagcgtggagatcgagtgggagctgcagaaagagaacagcgaacgctggaaccccgagatccagtatacctccaactacaacaagtctgttaatgtggaccttactgtggacactaatggcgtgtattcagagcctcgccccattggcacaaggtacctgactcgtaatctgtaa

SEQ ID NO: 11888 - DNA, 2208 bp, Artificial Sequence
  source: /note="Description of Artificial Sequence: Synthetic polynucleotide"
atggctgccgatggttatcttccagattggctcgaggacactctctctgaaggaataagacagtggtggaagctcaaacctggcccaccaccgccaaagcccgcagagcggcataaggacgacagcaggggtcttgtgcttcctgggtacaagtacctcggacccttcaacggactcgacaaaggagagccggtcaacgaggcagacgccgcggccctcgagcacgacaaggcctacgaccggcagctcgacagcggagacaacccgtacctcaagtacaaccacgccgacgcggagtttcaggagcgccttaaagaagatacgtcttttgggggcaacctcgcaagagcagtattccaggcgaaaaagagggttcttgaacctctgggcctggttgaggagcctgttaagacggctccgggaaaaaaggggccggtagagcactctcctgcggagccagattcctcctccggaactggaaagtcgggccaacagcctgcaagaaagagattgaattttggtcagactggagacgcagactccgtacctgacccccagcctctcggacagccaccagcagccccctctggtctgggaactaatacgatggcttcaggcagtggcgcaccaatggcagacaataacgagggcgccgacggagtgggtaattcctcgggaaattggcattgcgattccacatggatgggcgacagagtcatcaccaccagcacccgcacctgggctctgcccacctacaacaaccatctgtacaagcaaatttccagccagtctggagccagcaacgacaaccactactttggctacagcaccccttgggggtattttgacttcaacagattccactgccacttctccccacgtgactggcaaagactcatcaacaacaattggggattccggcccaaaagactcaacttcaagctctttaacattcaagtcaaggaggtcacgcagaatgacggtacgacgacgattgccaataaccttaccagcacggttcaggtgtttactgactcggagtaccagctcccgtacgtcctcggctcggcgcatcaaggatgcctcccgccgttcccagcagacgtcttcatggtgccacagtatggatacctcaccctgaacaacgggagtcaggcggtaggacgctcttcattttactgcctggagtactttccttctcagatgctgcgtaccggaaacaactttaccttcagctacacctttgaggacgttccttttcacagcagctacgctcacagccagagtttggaccgtctcatgaatcctctcatcgaccagtacctgtattacttgagcagaacaaacactccaagcggaaccactacgcagtccaggcttcggttttctcaagccggagcgagtgacattcgggaccagtctaggaactggcttcctggaccctgttaccgccagcagcgagtatcaaagacagctgcggacaacaacaacagtgattactcgtggactggagctaccaagtatcacctcaatggaagagactctctggtgaatccgggcacagccatggccagccacaaggacgatgaagaaaagtattttcctcagagcggggttctcatcttcggaaaacaagactcgggaaaaactaatgtggacattgaaagggtcatgattacagacgaagaggaaatcaggaccaccaatcccgtggctacggagcagtatggttctgtatctaccaatctccagagcggcaacacacaagcagctacctcagatgtcaacacacaaggcgttcttccaggcatggtctggcaggacagagacgtgtacctgcagggacccatctgggcaaagattccacacacggacggacattttcacccttctcctcttatgggaggatttggactgaagcaccctcccccgcagattctcatcaagaataccccggtacctgcgaatccttctaccaccttcagcgcggcaaagtttgcttccttcatcacacagtactccacggggcaggtcagcgtggagatcgagtgggagctgcagaaagagaacagcaaacgctggaaccccgagatccagtatacctccaactacaacaagtctgttaatgtggactttactgtggacactaatggcgtgtattcagagcctcgccccattggcacaagatacctgactcgtaatctgtaa

SEQ ID NO: 11889 - DNA, 2208 bp, Artificial Sequence
  source: /note="Description of Artificial Sequence: Synthetic polynucleotide"
atggctgccgatggttatcttccagattggctcgaggacactctctctgaaggaataagacagtggtggaagctcaaacctggcccaccaccgccaaagcccgcagagcggcataaggacgacagcaggggtcttgtgcttcctgggtacaagtacctcggacccttcaacggactcgacaaaggagagccggtcaacgaggcagacgccgcggccctcgagcacgacaaggcctacgaccggcagctcgacagcggagacaacccgtacctcaagtacaaccacgccgacgcggagtttcaggagcgccttaaagaagatacgtcttttgggggcaacctcgcaagagcagtattccaggcgaaaaagagggttcttgaacctctgggcctggttgaggagcctgttaagacggctccgggaaaaaagaggccggtagagcactctcctgcggggccagattcctcctccggaactggaaagtcgggccaacagcctgcaagaaagagattgaattttggtcagactggagacgcagactccgtacctgacccccagcctctcggacagccaccagcagccccctctggtctgggaactaatacgatggcttcaggcagtggcgcaccaatggcagacaataacgagggcgccgacggagtgggtaattcctcgggaaattggcattgcgattccacatggatgggcgacagagtcatcaccaccagcacccgcacctgggctctgcccacctacaacaaccatctgtacaagcaaatttccagccagtctggagccagcaacgacaaccactactttggctacagcaccccttgggggtattttgacttcaacagattccactgccacttctccccacgtgactggcaaagactcatcaacaacaattggggattccggcccaaaagactcaacttcgagctctttaacattcaagtcaaggaggtcacgcagaatgacggtacgacgacgattgccaataaccttaccagcacggttcaggtgtttactgactcggagtaccagctcccgtacgtcctcggctcggcgcatcaaggatgcctcccgccgttcccagcagacgtcttcatggtgccacagtatggatacctcaccctgaacaacgggagtcaggcggtaggacgctcttcattttactgcctggagtactttccttctcagatgctgcgtaccggaaacaactttaccttcagctacacctttgaggacgttccttttcacagcagctacgctcacagccagagtttggaccgtctcatgaatcctctcatcgaccagtacctgtattacttgagcagaacaaacactccaagcggaaccactacgcagtccaggcttcagttttctcaagccggagcgagtgacattcgggaccagtctaggaactggcttcctggaccctgttaccgccagcagcgagtatcaaagacagctgcggacaacaacaacagtgattactcgtggactggagctaccaagtatcacctcaatggaagagactctctggtgaatccgggcacagccatggccagccacaaggacgatgaagaaaagtattttcctcagagcggggttctcatcttcggaaaacaagactcgggaaaaactaatgtggacattgaaaaggtcatgattacagacgaagaggaaatcaggaccaccaatcccgtggctacggagcagtatggttctgtatctaccaatctccagagcggcaacacacaagcagctacctcagatgtcaacacacaaggcgttcttccaggcatggtctggcaggacagagacgtgtacctgcagggacccatctgggcaaagattccacacacggacggacactttcacccttctcctcttatgggaggatttggactgaagcaccctcccccgcagattctcatcaagagtaccccggtacctgcgaatccttctaccaccttcagcgcggcaaagtttgcttccttcatcacacagtactccacggggcaggtcagcgtggagatcgagtgggagctgcagaaagagaacagcaaacgctggaaccccgagatccagtatacctccaactacaacaagtctgttaatgtggactttactgtggacactaatggcgtgtattcagatcctcgccccattggcacaagatacctgactcgtaatctgtaa

SEQ ID NO: 11890 - DNA, 2208 bp, Artificial Sequence
  source: /note="Description of Artificial Sequence: Synthetic polynucleotide"
atggctgccgatggttatcttccagattggctcgaggacactctctctgaaggaataagacagtggtggaagctcaaacctggcccaccaccaccaaggcccgcagagcggcatcaggacgacagcaggggtcttgtgcttcctgggtacaagtacctcggacccttcaacggactcgacaaaggagagccggtcaacgaggcagacgctgcggccctcgagcacgacaaggcctacgaccggcagctcgacagcggagacaacccgtacctcaagtacaaccacgccgacgcggagtttcaggagcgtcttaaagaagatacgtcttttgggggcaacctcggacgagcagtcttccaggcgaaaaagagggttcttgaacctctgggcctggttgaggaacctgttaagacggctccgggaaaaaagaggccggtagagcactctcctgcggagccagactcctcctcgggaaccggaaaagcgggccagcagcctgcaagaaagagattgaatttcggtcagactggagacgcagactccgtacctgacccccagcctctcggacagccaccagcagcccccacaagtttgggatctactacaatggctacaggcagtggcgcaccaatggcagacaataacgagggtgccgatggagtgggtaattcctcaggaaattggcattgcgattcccaatggctgggcgacagagtcatcaccaccagcacccgaacctgggccctgcccacctacaacaaccacctctacaagcaaatctccagccaatcaggagcatcgaacgacaaccactactttggctacagcaccccttgggggtattttgacttcaacagattccactgtcacttctccccacgtgactggcaaagactcatcaacaacaactggggattccgacccaagagactcaacttcaagctctttaacattcaagtcaaagaggtcacgcagaatgacggtacgacgacgattgccaataaccttaccagcacggttcaggtgtttactgactcggagtaccagctcccgtacgtcctcggctcggcgcatcaaggatgcctcccgccgtttccagcggacgtcttcatggtcccacagtatggatacctcaccctgaacaacgggagtcaggcggtaggacgctcttcattttactgcctggagtactttccttctcagatgctgcgtaccggaaacaactttaccttcagctacacctttgaggacgttccttttcacagcagctacgctcacagccagagtttggaccgtctcatgaatcctctcatcgaccagtacctgtattacttgagcagaacaaacactccaagcggaaccactacgcagtccaggcttcggttttctcaagccggagcgagtgacattcgggaccagtctaggaactggcttcctggaccctgttaccgccagcagcgagtatcaaagacagctgcggacaacaacaacagtgattactcgtggactggagctaccaagtatcacctcaatggaagagactctctggtgaatccgggcacagccatggccagccacaaggacgatgaagaaaagtattttcctcagagcggggttctcatcttcggaaaacaagactcgggaaaaactaatgtggacattgaaagggtcatgattacagacgaagaggaaatcaggaccaccaatcccgtggctacggagcagtatggttctgtatctaccaatctccagagcggcaacacacaagcagctacctcagatgtcaacacacaaggcgttcttccaggcatggtctggcaggacagagacgtgtacctgcagggacccatctgggcaaagattccacacacggacggacattttcacccttctcctcttatgggaggatttggactgaagcaccctcccccgcagattctcatcaagaataccccggtacctgcgaatccttctaccaccttcagcgcggcaaagtttgcttccttcatcacacagtactccacggggcaggtcagcgtggagatcgagtgggagctgcagaaagagaacagcaaacgctggaaccccgagatccagtatacctccaactacaacaagtctgttaatgtggactttactgtggacactaatggcgtgtattcagagcctcgccccattggcacaagatacctgactcgtaatctgtaa

SEQ ID NO: 11891 - DNA, 2208 bp, Artificial Sequence
  source: /note="Description of Artificial Sequence: Synthetic polynucleotide"
atggctgccgatggttatcttccagattggctcgaggacactctctctgaaggaataagacagtggtggaagctcaaacctggcccaccaccaccaaggcccgcagagcggcatcaggacgacagcaggggtcttgtgcttcctgggtacaagtacctcggacccttcaacggactcgacaaaggagagccggtcaacgaggcagacgctgcggccctcgagcacgacaaggcctacgaccggcagctcgacagcggagacaacccgtacctcaagtacaaccacgccgacgcggagtttcaggagcgtcttaaagaagatacgtcttttgggggcaacctcggacgagcagtcttccaggcgaaaaagagggttcttgaacctctgggcctggttgaggaacctgttaagacggctccgggaaaaaagaggccggtagagcactctcctgcggagccagactcctcctcgggaaccggaaaagcgggccagcagcctgcaagaaagagattgaatttcggtcagactggagacgcagactccgtacctgacccccagcctctcggacagccaccagcagccccctctggtctgggaactaatacgatggcttcaggcagtggcgcaccaatggcagacaataacgagggcgccgacggagtgggtaattcctcgggaaattggcattgcgattccacatggatgggcgacagagtcatcaccaccagcacccgcacctgggctctgcccacctacaacaaccatctgtacaagcaaatttccagccagtctggagccagcaacgacaaccactactttggctacagcaccccttgggggtattttgacttcaacagattccactgccacttctccccacgtgactggcaaagactcatcaacaacaattggggattccggcccaaaagactcaacttcaagctctttaacattcaagtcaaggaggtcacgcagaatgacggtacgacgacgattgccaataaccttaccagcacggttcaggtgtttactgactcggagtaccagctcccgtacgtcctcggctcggcgcatcaaggatgcctcccgccgttcccagcagacgtcttcatggtgccacagtatggatacctcaccctgaacaacgggagtcaggcggtaggacgctcttcattttactgcctggagtactttccttctcagatgctgcgtaccggaaacaactttaccttcagctacacctttgaggacgttccttttcacagcagctacgctcacagccagagtttggaccgtctcatgaatcctctcatcgaccagtacctgtattacttgagcagaacaaacactccaagcggaaccactacgcagtccaggcttcggttttctcaagccggagcgagtgacattcgggaccagtctaggaactggcttcctggaccctgttaccgccagcagcgagtatcaaagacagctgcggacaacaacaacagtgattactcgtggactggagctaccaagtatcacctcaatggaagagactctctggtgaatccgggcacagccatggccagccacaaggacgatgaagaaaagtattttcctcagagcggggttctcatcttcggaaaacaagactcgggaaaaactaatgtggacattgaaagggtcatgattacagacgaagaggaaatcaggaccaccaatcccgtggctacggagcagtatggttctgtatctaccaatctccagagcggcaacacacaagcagctacctcagatgtcaacacacaaggcgttcttccaggcatggtctggcaggacagagacgtgtacctgcagggacccatctgggcaaagattccacacacggacggacattttcacccttctcctcttatgggaggatttggactgaagcaccctcccccgcagattctcatcaagaataccccggtacctgcgaatccttctaccaccttcagcgcggcaaagtttgcttccttcatcacacagtactccacggggcaggtcagcgtggagatcgagtgggagctgcagaaagagaacagcaaacgctggaaccccgagatccagtatacctccaactacaacaagtctgttaatgtggactttactgtggacactaatggcgtgtattcagagcctcgccccattggcacaagatacctgactcgtaatctgtaa

SEQ ID NO: 11892 - DNA, 2208 bp, Artificial Sequence
  source: /note="Description of Artificial Sequence: Synthetic polynucleotide"
atggctgccgatggttatcttccagattggctcgaggacactctctctgaaggaataagacagtggtggaagctcaaacctggcccaccaccgccaaagcccgcagagcggcataaggacgacagcaggggtcttgtgcttcctgggtacaagtacctcggacccttcaacggactcgacaaaggagagccggtcaacgaggcagacgccgcggccctcgagcacgacaaggcctacgaccggcagctcgacagcggagacaacccgtacctcaagtacaaccacgccgacgcggagtttcaggagcgccttaaagaagatacgtcttttgggggcaacctcgcaagagcagtattccaggcgaaaaagagggttcttgaacctctgggcctggttgaggagcctgttaagacggctccgggaaaaaagaggccggtagagcactctcctgcggggccagattcctcctccggaactggaaagtcgggccaacagcctgcaagaaagagattgaattttggtcagactggagacgcagactccgtacctgacccccagcctctcggacagccaccagcagccccctctggtctgggaactaatacgatggcttcaggcagtggcgcaccaatggcagacaataacgagggcgccgacggagtgggtaattcctcgggaaattggcattgcgattccacatggatgggcgacagagtcatcaccaccagcacccgcacctgggctctgcccacctacaacaaccatctgtacaagcaaatttccagccagtctggagccagcaacgacaaccactactttggctacagcaccccttgggggtattttgacttcaacagattccactgccacttctccccacgtgactggcaaagactcatcaacaacaattggggattccggcccaaaagactcaacttcgagctctttaacattcaagtcaaggaggtcacgcagaatgacggtacgacgacgattgccaataaccttaccagcacggttcaggtgtttactgactcggagtaccagctcccgtacgtcctcggctcggcgcatcaaggatgcctcccgccgttcccagcagacgtcttcatggtgccacagtatggatacctcaccctgaacaacgggagtcaggcggtaggacgctcttcattttactgcctggagtactttccttctcagatgctgcgtaccggaaacaactttaccttcagctacacctttgaggacgttccttttcacagcagctacgctcacagccagagtttggaccgtctcatgaatcctctcatcgaccagtacctgtattacttgagcagaacaaacactccaagcggaaccactacgcagtccaggcttcagtttcctcaagccggagcgagtgacattcgggaccagtctaggaactggcttcctggaccctgttaccgccagcagcgagtatcaaagacagctgcggacaacaacaacagtgattactcgtggactggagctaccaagtatcacctcaatggaagagactctctggtgaatccgggcacagccatggccagccacaaggacgatgaagaaaagtattttcctcagagcggggttctcatcttcggaaaacaagactcgggaaaaactaatgtggacattgaaaaggtcatgattacagacgaagaggaaatcaggaccaccaatcccgtggctacggagcagtatggttctgtatctaccaatctccagagcggcaacacacaagcagctacctcagatgtcaacacacaaggcgttcttccaggcatggtctggcaggacagagacgtgtacctgcagggacccatctgggcaaagattccacacacggacggacactttcacccttctcctcttatgggaggatttggactgaagcaccctcccccgcagattctcatcaagagtaccccggtacctgcgaatccttctaccaccttcagcgcggcaaagtttgcttccttcatcacacagtactccacggggcaggtcagcgtggagatcgagtgggagctgcagaaagagaacagcaaacgctggaaccccgagatccagtatacctccaactacaacaagtctgttaatgtggactttactgtggacactaatggcgtgtattcagagcctcgccccattggcacaagatacctgactcgtaatctgtaa

SEQ ID NO: 11893 - DNA, 2208 bp, Artificial Sequence
  source: /note="Description of Artificial Sequence: Synthetic polynucleotide"
atggctgccgatggttatcttccagattggctcgaggacactctctctgaaggaataagacagtggtggaagctcaaacctggcccaccaccaccaaggcccgcagagcggcatcaggacgacagcaggggtcttgtgcttcctgggtacaagtacctcggacccttcaacggactcgacaaaggagagccggtcaacgaggcagacgctgcggccctcgagcacgacaaggcctacgaccggcagctcgacagcggagacaacccgtacctcaagtacaaccacgccgacgcggagtttcaggagcgtcttaaagaagatacgtcttttgggggcaacctcggacgagcagtcttccaggcgaaaaagagggttcttgaacctctgggcctggttgaggaacctgttaagacggctccgggaaaaaagaggccggtagagcactctcctgcggagccagattcctcctccggaactggaaagtcgggccaacagcctgcaagaaagagattgaattttggtcagactggagacgcagactccgtacctgacccccagcctctcggacagccaccagcagccccctctggtctgggaactaatacgatggcttcaggcagtggcgcaccaatggcagacaataacgagggcgccgacggagtgggtaattcctcgggaaattggcattgcgattccacatggatgggcgacagagtcatcaccaccagcacccgcacctgggctctgcccacctacaacaaccatctgtacaagcaaatttccagccagtctggagccagcaacgacaaccactactttggctacagcaccccttgggggtattttgacttcaacagattccactgccacttctccccacgtgactggcaaagactcatcaacaacaattggggattccggcccaaaagactcaacttcaagctctttaacattcaagtcaaggaggtcacgcagaatgacggtacgacgacgattgccaataaccttaccagcacggttcaggtgtttactgactcggagtaccagctcccgtacgtcctcggctcggcgcatcaaggatgcctcccgccgttcccagcagacgtcttcatggtgccacagtatggatacctcaccctgaacaacgggagtcaggcggtaggacgctcttcattttactgcctggagtactttccttctcagatgctgcgtaccggaaacaactttaccttcagctacacctttgaggacgttccttttcacagcagctacgctcacagccagagtttggaccgtctcatgaatcctctcatcgaccagtacctgtattacttgagcagaacaaacactccaagcggaaccactacgcagtccaggcttcggttttctcaagccggagcgagtgacattcgggaccagtctaggaactggcttcctggaccctgttaccgccagcagcgagtatcaaagacagctgcggacaacaacaacagtgattactcgtggactggagctaccaagtatcacctcaatggaagagactctctggtgaatccgggcacagccatggccagccacaaggacgatgaagaaaagtattttcctcagagcggggttctcatcttcggaaaacaagactcgggaaaaactaatgtggacattgaaagggtcatgattacagacgaagaggaaatcaggaccaccaatcccgtggctacggagcagtatggttctgtatctaccaatctccagagcggcaacacacaagcagctacctcagatgtcaacacacaaggcgttcttccaggcatggtctggcaggacagagacgtgtacctgcagggacccatctgggcaaagattccacacacggacggacattttcacccttctcctcttatgggaggatttggactgaagcaccctcccccgcagattctcatcaagaataccccggtacctgcgaatccttctaccaccttcagcgcggcaaagtttgcttccttcatcacacagtactccacggggcaggtcagcgtggagatcgagtgggagctgcagaaagagaacagcaaacgctggaaccccgagatccagtatacctccaactacaacaagtctgttaatgtggactttactgtggacactaatggcgtgtattcagagcctcgccccattggcacaagatacctgactcgtaatctgtaa

SEQ ID NO: 11894 - DNA, 2208 bp, Artificial Sequence
  source: /note="Description of Artificial Sequence: Synthetic polynucleotide"
atggctgccgatggttatcttccagattggctcgaggacactctctctgaaggaataagacagtggtggaagctcaaacctggcccaccaccgccaaagcccgcagagcggcataaggacgacagcaggggtcttgtgcttcctgggtacaagtacctcggacccttcaacggactcgacaaaggagagccggtcaacgaggcagacgccgcggccctcgagcacgacaaggcctacgaccggcagctcgacagcggagacaacccgtacctcaagtacaaccacgccgacgcggagtttcaggagcgccttaaagaagatacgtcttttgggggcaacctcgcaagagcagtattccaggcgaaaaagagggttcttgaacctctgggcctggttgaggagcctgttaagacggctccgggaaaaaagaggccggtagagcactctcctgcggagccagattcctcctccggaactggaaagtcgggccaacagcctgcaagaaagagattgaattttggtcagactggagacgcagactccgtacctgacccccagcctctcggacagccaccagcagccccctctggtctgggaactaatacgatggcttcaggcagtggcgcaccaatggcagacaataacgagggcgccgacggagtgggtaattcctcgggaaattggcattgcgattccacatggatgggcgacagagtcatcaccaccagcacccgcacctgggctctgcccacctacaacaaccatctgtacaagcaaatttccagccagtctggagccagcaacgacaaccactactttggctacagcaccccttgggggtattttgacttcaacagattccactgccacttctccccacgtgactggcaaagactcatcaacaacaattggggattccggcccaaaagactcaacttcaagctctttaacattcaagtcaaggaggtcacgcagaatgacggtacgacgacgattgccaataaccttaccagcacggttcaggtgtttactgactcggagtaccagctcccgtacgtcctcggctcggcgcatcaaggatgcctcccgccgttcccagcagacgtcttcatggtgccacagtatggatacctcaccctgaacaacgggagtcaggcggtaggacgctcttcattttactgcctggagtactttccttctcagatgctgcgtaccggaaacaactttaccttcagctacacctttgaggacgttccttttcacagcagctacgctcacagccagagtttggaccgtctcatgaatcctctcatcgaccagtacctgtattacttgagcagaacaaacactccaagcggaaccactacgcagtccaggcttcggttttctcaagccggagcgagtgacattcgggaccagtctaggaactggcttcctggaccctgttaccgccagcagcgagtatcaaagacagctgcggacaacaacaacagtgattactcgtggactggagctaccaagtatcacctcaatggaagagactctctggtgaatccgggcacagccatggccagccacaaggacgatgaagaaaagtattttcctcagagcggggttctcatcttcggaaaacaagactcgggaaaaactaatgtggacattgaaagggtcatgattacagacgaagaggaaatcaggaccaccaatcccgtggctacggagcagtatggttctgtatctaccaatctccagagcggcaacacacaagcagctacctcagatgtcaacacacaaggcgttcttccaggcatggtctggcaggacagagacgtgtacctgcagggacccatctgggcaaagattccacacacggacggacattttcacccttctcctcttatgggaggatttggactgaagcaccctcccccgcagattctcatcaagaataccccggtacctgcgaatccttctaccaccttcagcgcggcaaagtttgcttccttcatcacacagtactccacggggcaggtcagcgtggagatcgagtgggagctgcagaaagagaacagcaaacgctggaaccccgagatccagtatacctccaactacaacaagtctgttaatgtggactttactgtggacactaatggcgtgtattcagagcctcgccccattggcacaagatacctgactcgtaatctgtaa

SEQ ID NO: 11895 - DNA, 2208 bp, Artificial Sequence
  source: /note="Description of Artificial Sequence: Synthetic polynucleotide"
atggctgccgatggttatcttccagattggctcgaggacactctctctgaaggaataagacagtggtggaagctcaaacctggcccaccaccgccaaagcccgcagagcggcataaggacgacagcaggggtcttgtgcttcctgggtacaagtacctcggacccttcaacggactcgacaaaggagagccggtcaacgaggcagacgccgcggccctcgagcacgacaaggcctacgaccggcagctcgacagcggagacaacccgtacctcaagtacaaccacgccgacgcggagtttcaggagcgccttaaagaagatacgtcttttgggggcaacctcgcaagagcagtattccaggcgaaaaagagggttcttgaacctctgggcctggttgaggagcctgttaagacggctccgggaaaaaagaggccggtagagcactctcctgcggagccagattcctcctccggaactggaaagtcgggccaacagcctgcaagaaagagattgaattttggtcagactggagacgcagactccgtacctgacccccagcctctcggacagccaccagcagccccctctggtctgggaactaatacgatggcttcaggcagtggcgcaccaatggcagacaataacgagggcgccgacggagtgggtaattcctcgggaaattggcattgcgattccacatggatgggcgacagagtcatcaccaccagcacccgcacctgggctctgcccacctacaacaaccatctgtacaagcaaatttccagccagtctggagccagcaacgacaaccactactttggctacagcaccccttgggggtattttgacttcaacagattccactgccacttctccccacgtgactggcaaagactcatcaacaacaattggggattccggcccaaaagactcaacttcaagctctttaacattcaagtcaaggaggtcacgcagaatgacggtacgacgacgattgccaataaccttaccagcacggttcaggtgtttactgactcggagtaccagctcccgtacgtcctcggctcggcgcatcaaggatgcctcccgccgttcccagcagacgtcttcatggtgccacagtatggatacctcaccctgaacaacgggagtcagacggtaggacgctcttcattttactgcctggagtactttccttctcagatgctgcgtaccggaaacaactttaccttcagctacacctttgaggacgttccttttcacagcagctacgctcacagccagagtttggaccgtctcatgaatcctctcatcgaccagtacctgtattacttgagcagaacaaacactccaagcggaaccactacgcagtccaggcttcggttttctcaagccggagcgagtgacattcgggaccagtctaggaactggcttcctggaccctgttaccgccagcagcgagtatcaaagacagctgcggacaacaacaacagtgattactcgtggactggagctaccaagtatcacctcaatggaagagactctctggtgaatccgggcacagccatggccagccacaaggacgatgaagaaaagtattttcctcagagcggggttctcatcttcggaaaacaagactcgggaaaaactaatgtggacattgaaagggtcatgattacagacgaagaggaaatcaggaccaccaatcccgtggctacggagcagtatggttctgtatctaccaatctccagagcggcaacacacaagcagctacctcagatgtcaacacacaaggcgttcttccaggcatggtctggcaggacagagacgtgtacctgcagggacccatctgggcaaagattccacacacggacggacattttcacccttctcctcttatgggaggatttggactgaagcaccctcccccgcagattctcatcaagaataccccggtacctgcgaatccttctaccaccttcagcgcggcaaagtttgcttccttcatcacacagtactccacggggcaggtcagcgtggagatcgagtgggagctgcagaaagagaacagcaaacgctggaaccccgagatccagtatacctccaactacaacaagtctgttaatgtggactttactgtggacactaatggcgtgtattcagagcctcgccccattggcacaagatacctgactcgtaatctgtaa

SEQ ID NO: 11896 - DNA, 2208 bp, Artificial Sequence
  source: /note="Description of Artificial Sequence: Synthetic polynucleotide"
atggctgccgatggttatcttccagattggctcgaggacactctctctgaaggaataagacagtggtggaagctcaaacctggcccaccaccgccaaagcccgcagagcggcataaggacgacagcaggggtcttgtgcttcctgggtacaagtacctcggacccttcaacggactcgacaaaggagagccggtcaacgaggcagacgccgcggccctcgagcacgacaaggcctacgaccggcagctcgacagcggagacaacccgtacctcaagtacaaccacgccgacgcggagtttcaggagcgccttaaagaagatacgtcttttgggggcaacctcgcaagagcagtattccaggcgaaaaagagggttcttgaacctctgggcctggttgaggagcctgttaagacggctccgggaaaaaagaggccggtagagcactctcctgcggagccagattcctcctccggaactggaaagtcgggccaacagcctgcaagaaagagattgaattttggtcagactggagacgcagactccgtacctgacccccagcctctcggacagccaccagcagccccctctggtctgggaactaatacgatggcttcaggcagtggcgcaccaatggcagacaataacgagggcgccgacggagtgggtaattcctcgggaaattggcattgcgattccacatggatgggcgacagagtcatccccaccagcacccgcacctgggctctgcccacctacaacaaccatctgtacaagcaaatttccagccagtctggagccagcaacgacaaccactactttggctacagcaccccttgggggtattttgacttcaacagattccactgccacttctccccacgtgactggcaaagactcatcaacaacaattggggattccggcccaaaagactcaacttcaagctctttaacattcaagtcaaggaggtcacgcagaatgacggtacgacgacgattgccaataaccttaccagcacggttcaggtgtttactgactcggggtaccagctcccgtacgtcctcggctcggcgcatcaaggatgcctcccgccgttcccagcagacgtcttcatggtgccacagtatggatacctcaccctgaacaacgggagtcaggcggtaggacgctcttcattttactgcctggagtactttccttctcagatgctgcgtaccggaaacaactttaccttcagctacacctttgaggacgttccttttcacagcagctacgctcacagccagagtttggaccgtctcatgaatcctctcatcgaccagtacctgtattacttgagcagaacaaacactccaagcggaaccactacgcagtccaggcttcggttttctcaagccggagcgagtgacattcgggaccagtctaggaactggcttcctggaccctgttaccgccagcagcgagtatcaaagacagctgcggacaacaacaacagtgattactcgtggactggagctaccaagtatcacctcaatggaagagactctctggtgaatccgggcacagccatggccagccacaaggacgatgaagaaaagtattttcctcagagcggggttctcatcttcggaaaacaagactcgggaaaaactaatgtggacattgaaagggtcatgattacagacgaagaggaaatcaggaccaccaatcccgtggctacggagcagtatggttctgtatctaccaatctccagagcggcaacacacaagcagctacctcagatgtcaacacacaaggcgttcttccaggcatggtctggcaggacagagacgtgtacctgcagggacccatctgggcaaagattccacacacggacggacattttcacccttctcctcttatgggaggatttggactgaagcaccctcccccgcagattctcatcaagaataccccggtacctgcgaatccttctaccaccttcagcgcggcaaagtttgcttccttcatcacacagtactccacggggcaggtcagcgtggagatcgagtgggagctgcagaaagagaacagcaaacgctggaaccccgagatccagtatacctccaactacaacaagtctgttaatgtggactttactgtggacactaatggcgtgtattcagagcctcgccccattggcacaagatacctgactcgtaatctgtaa

SEQ ID NO: 11897 - DNA, 2208 bp, Artificial Sequence
  source: /note="Description of Artificial Sequence: Synthetic polynucleotide"
atggctgccgatggttatcttccagattggctcgaggacactctctctgaaggaataagacagtggtggaagctcaaacctggcccaccaccgccaaagcccgcagagcggcataaggacgacagcaggggtcttgtgcttcctgggtacaagtacctcggacccttcaacggactcgacaaaggagagccggtcaacgaggcagacgccgcggccctcgagcacgacaaggcctacgaccggcagctcgacagcggagacaacccgtacctcaagtacaaccacgccgacgcggagtttcaggagcgccttaaagaagatacgtcttttgggggcaacctcgcaagagcagtattccaggcgaaaaagagggttcttgaacctctgggcctggttgaggagcctgttaagacggctccgggaaaaaagaggccggtagagcactctcctgcggagccagattcctcctccggaactggaaagtcgggccaacagcctgcaagaaagagattgaattttggtcagactggagacgcagactccgtacctgacccccagcctctcggacagccaccagcagccccctctggtctgggaactaatacgatggcttcaggcagtggcgcaccaatggcagacaataacgagggcgccgacggagtgggtaattcctcgggaaattggcattgcgattccacatggatgggcgacagagtcatcaccaccagcacccgcacctgggctctgcccacctacaacaaccatctgtacaagcaaatttccagccagtctggagccagcaacgacaaccactactttggctacagcaccccttgggggtattttgacttcaacagattccactgccacttctccccacgtgactggcaaagactcatcaacaacaattggggattccggcccaaaagactcaacttcaagctctttaacattcaagtcaaggaggtcacgcagaatgacggtacgacgacgattgccaataaccttaccagcacggttcaggtgtttactgactcggagtaccagctcccgtacgtcctcggctcggcgcatcaaggatgcctcccgccgttcccagcagacgtcttcatggtgccacagtatggatacctcaccctgaacaacgggagtcaggcggtaggacgctcttcattttactgcctggagtactttccttctcagatgctgcgtaccggaaacaactttaccttcagctacacctttgaggacgttccttttcacagcagctacgctcacagccagagtttggaccgtctcatgaatcctctcatcgaccagtacctgtattacttgagcagaacaaacactccaagcggaaccactacgcagtccaggcttcggttttctcaagccggagcgagtgacattcgggaccagtctaggaactggcttcctggaccctgttaccgccagcagcgagtatcaaagacagctgcggacaacaacaacagtgattactcgtggactggagctaccaagtatcacctcaatggaagagactctctggtgaatccgggcacagccatggccagccacaaggacgatgaagaaaagtattttcctcagagcggggttctcatcttcggaaaacaagactcgggaaaaactaatgtggacattgaaagggtcatgattacagacgaagaggaaatcaggaccaccaatcccgtggctacggagcagtatggttctgtatctaccaatctccagagcggcgacacacaagcagctacctcagatgtcaacacacaaggcgttcttccaggcatggtctggcaggacagagacgtgtacctgcagggacccatctgggcaaagattccacacacggacggacattttcacccttctcctcttatgggaggatttggactgaagcaccctcccccgcagattctcatcaagaataccccggtacctgcgaatccttctaccaccttcagcgcggcaaagtttgcttccttcatcacacagtactccacggggcaggtcagcgtggagatcgagtgggagctgcagaaagagaacagcaaacgctggaaccccgagatccagtatacctccaactacaacaagtctgttaatgtggactttactgtggacactaatggcgtgtattcagagcctcgccccattggcacaagatacctgactcgtaatctgtaa

SEQ ID NO: 11898 - DNA, 2205 bp, Artificial Sequence
  source: /note="Description of Artificial Sequence: Synthetic polynucleotide"
atggctgccgatggttatcttccagattggctcgaggacactctctctgaaggaataagacagtggtggaagctcaaacctggcccaccaccgccaaagcccgcagagcggcataaggacgacagcaggggtcttgtgcttcctgggtacaagtacctcggacccttcaacggactcgacaaaggagagccggtcaacgaggcagacgccgcggccctcgagcacgacaaggcctacgaccggcagctcgacagcggagacaacccgtacctcaagtacaaccacgccgacgcggagtttcaggagcgccttaaagaagatacgtcttttgggggcaacctcgcaagagcagtattccaggcgaaaaagagggttcttgaacctctgggcctggttgaggagcctgttaagacggctccgggaaaaaagaggccggtagagcactctcctgcggagccagattcctcctccggaactggaaagtcgggccaacagcctgcaagaaagagattgaattttggtcagactggagacgcagactccgtacctgacccccagcctctcggacagccaccagcagccccctctggtctgggaactaatacgatggcttcaggcagtggcgcaccaatggcagacaataacgagggcgccgacggagtgggtaattcctcgggaaattggcattgcgattccacatggatgggcgacagagtcatcaccaccagcacccgcacctgggctctgcccacctacaacaaccatctgtacaagcaaatttccagccagtctggagccagcaacgacaaccactactttggctacagcaccccttgggggtattttgacttcaacagattccactgccacttctccccacgtgactggcaaagactcatcaacaacaattggggattccggcccaaaagactcaacttcaagctctttaacattcaagtcaaggaggtcacgcagaatgacggtacgacgacgattgccaataaccttaccagcacggttcaggtgtttactgactcggagtaccagctcccgtacgtcctcggctcggcgcatcaaggatgcctcccgccgttcccagcagacgtcttcatggtgccacagtatggatacctcaccctgaacaacgggagtcaggcggtaggacgctcttcattttactgcctggagtactttccttctcagatgctgcgtaccggaaacaactttaccttcagctacacctttgaggacgttccttttcacagcagctacgctcacagccagagtttggaccgtctcatgaatcctctcatcgaccagtacctgtattacttgagcagaacaaacactccaagcggaaccactacgcagtccaggcttcggttttctcaagccggagcgagtgacattcgggaccagtctaggaactggcttcctggaccctgttaccgccagcagcgagtatcaaagacagctgcggacaacaacagtgattactcgtggactggagctaccaagtatcacctcaatggaagagactctctggtgaatccgggcacagccatggccagccacaaggacgatgaagaaaagtattttcctcagagcggggttctcatcttcggaaaacaagactcgggaaaaactaatgtggacattgaaagggtcatgattacagacgaagaggaaatcaggaccaccaatcccgtggctacggagcagtatggttctgtatctaccaatctccagagcggcaacacacaagcagctacctcagatgtcaacacacaaggcgttcttccaggcatggtctggcaggacagagacgtgtacctgcagggacccatctgggcaaagattccacacacggacggacattttcacccttctcctcttatgggaggatttggactgaagcaccctcccccgcagattctcatcaagaataccccggtacctgcgaatccttctaccaccttcagcgcggcaaagtttgcttccttcatcacacagtactccacggggcaggtcagcgtggagatcgagtgggagctgcagaaagagaacagcaaacgctggaaccccgagatccagtatacctccaactacaacaagtctgttaatgtggactttactgtggacactaatggcgtgtattcagagcctcgccccattggcacaagatacctgactcgtaatctgtaa

SEQ ID NO: 11899 - DNA, 2208 bp, Artificial Sequence
  source: /note="Description of Artificial Sequence: Synthetic polynucleotide"
atggctgccgatggttatcttccagattggctcgaggacactctctctgaaggaataagacagtggtggaagctcaaacctggcccaccaccgccaaagcccgcagagcggcataaggacgacagcaggggtcttgtgcttcctgggtacaagtacctcggacccttcaacggactcgacaaaggagagccggtcaacgaggcagacgccgcggccctcgagcacgacaaggcctacgaccggcagctcgacagcggagacaacccgtacctcaagtacaaccacgccgacgcggagtttcaggagcgccttaaagaagatacgtcttttgggggcaacctcgcaagagcagtattccaggcgaaaaagagggttcttgaacctctgggcctggttgaggagcctgttaagacggctccgggaaaaaagaggccggtagagcactctcctgcggagccagattcctcctccggaactggaaagtcgggccaacagcctgcaagaaagagattgaattttggtcagactggagacgcagactccgtacctgacccccagcctctcggacagccaccagcagccccctctggtctgggaactaatacgatggcttcaggcagtggcgcaccaatggcagacaataacgagggcgccgacggagtgggtaattcctcgggaaattggcattgcgattccacatggatgggcgacagagtcatcaccaccagcacccgcacctgggctctgcccacctacaacaaccatctgtacaagcaaatttccagccagtctggagccagcaacgacaaccactactttggctacagcaccccttgggggtattttgacttcaacagattccactgccacttctccccacgtgactggcaaagactcatcaacaacaattggggattccggcccaaaagactcaacttcaagctctttaacattcaagtcaaggaggtcacgcagaatgacggtacgacgacgattgccaataaccttaccagcacggttcaggtgtttactgactcggagtaccagctcccgtacgtcctcggctcggcgcatcaaggatgcctcccgccgttcccagcagacgtcttcatggtgccacagtatggatacctcaccctgaacaacgggagtcaggcggtaggacgctcttcattttactgcctggagtactttccttctcagatgctgcgtaccggaaacaactttaccttcagctacacctttgaggacgttccttttcacagtagctacgctcacagccagagttcggaccgtctcatgaatcctctcatcgaccagtacctgtattacttgagcagaacaaacactccaagcggaaccactacgcagtccaggcttcggttttctcaagccggagcgagtgacattcgggaccagtctaggaactggcttcctgggccctgttaccgccagcagcgagtatcaaagacagctgcggacaacaacaacagtgattactcgtggactggagctaccaagtatcacctcaatggaagagactctctggtgaatccgggcacagccatggccagccacaaggacgatgaagaaaagtattttcctcagagcggggttctcatcttcggaaaacaagactcgggaaaaactaatgtggacattgaaagggtcatgattacagacgaagaggaaatcaggaccaccaatcccgtggctacggagcagtatggttctgtatctaccaatctccagagcggcaacacacaagcagctacctcagatgtcaacacacaaggcgttcttccaggcatggtctggcaggacagagacgtgtacctgcagggacccatctgggcaaagattccacacacggacggacattttcgcccttctcctcttatgggaggatttggactgaagcaccctcccccgcagattctcatcaagaataccccggtacctgcgaatccttctaccaccttcagcgcggcaaagtttgcttccttcatcacacagtactccacggggcaggtcagcgtggagatcgagtgggagctgcagaaagagaacagcaaacgctggaaccccgagatccagtatacctccaactacaacaagtctgttaatgtggactttactgtggacactaatggcgtgtattcagagcctcgccccattggcacaagatacctgactcgtaatctgtaa

SEQ ID NO: 11900 - DNA, 2208 bp, Artificial Sequence
  source: /note="Description of Artificial Sequence: Synthetic polynucleotide"
atggctgccgatggttatcttccagattggctcgaggacactctctctgaaggaataagacagtggtggaagctcaaacctggcccaccaccgccaaagcccgcagagcggcataaggacgacagcaggggtcttgtgcttcctgggtacaagtacctcggacccttcaacggactcgacaaaggagagccggtcaacgaggcagacgccgcggccctcgagcacgacaaggcctacgaccggcagctcgacagcggagacaacccgtacctcaagtacaaccacgccgacgcggagtttcaggagcgccttaaagaagatacgtcttttgggggcaacctcgcaagagcagtattccaggcgaaaaagagggttcttgaacctctgggcctggttgaggagcctgttaagacggctccgggaaaaaagaggccggtagagcactctcctgcggggccagattcctcctccggaactggaaagtcgggccaacagcctgcaagaaagagattgaattttggtcagactggagacgcagactccgtacctgacccccagcctctcggacagccaccagcagccccctctggtctgggaactaatacgatggcttcaggcagtggcgcaccaatggcagacaataacgagggcgccgacggagtgggtaattcctcgggaaattggcattgcgattccacatggatgggcgacagagtcatcaccaccagcacccgcacctgggctctgcccacctacaacaaccatctgtacaagcaaatttccagccagtctggagccagcaacgacaaccactactttggctacagcaccccttgggggtattttgacttcaacagattccactgccacttctccccacgtgactggcaaagactcatcaacaacaattggggtttccggcccaaaagactcaacttcgagctctttaacattcaagtcaaggaggtcacgcagaatgacggtacgacgacgattgccaataaccttaccagcacggttcaggtgtttactgactcggagtaccagctcccgtacgtcctcggctcggcgcatcaaggatgcctcccgccgttcccagcagacgtcttcatggtgccacagtatggatacctcaccctgaacaacgggagtcaggcggtaggacgctcttcattttactgcctggagtactttccttctcagatgctgcgtaccggaaacaactttaccttcagctacacctttgaggacgttccttttcacagcagctacgctcacagccagagtttggaccgtctcatgaatcctctcatcgaccagtacctgtattacttgagcagaacaaacactccaagcggaaccactacgcagtccaggcttcagttttctcaagccggagcgagtgacattcgggaccagtctaggaactggcttcctggaccctgttaccgccagcagcgagtatcaaagacagctgcggacaacaacaacagtgattactcgtggactggagctaccaagtatcacctcaatggaagagactctctggtgaatccgggcacagccatggccagccacaaggacgatgaagaaaagtattttcctcagagcggggttctcatcttcggaaaacaagactcgggaaaaactaatgtggacattgaaaaggtcatgattacagacgaagaggaaatcaggaccaccaatcccgtggctacggagcagtatggttctgtatctaccaatctccagagcggcaacacacaagcagctacctcagatgtcaacacacaaggcgttcttccaggcatggtctggcaggacagaggcgtgtacctgcagggacccatctgggcaaagattccacacacggacggacactttcacccttctcctcttatgggaggatttggactgaagcaccctcccccgcagattctcatcaagagtaccccggtacctgcgaatccttctaccaccttcagcgcggcaaagtttgcttccttcatcacacagtactccacggggcaggtcagcgtggagatcgagtgggagctgcagaaagagaacagcaaacgctggaaccccgagatccagtatacctccaactacaacaagtctgttaatgtggactttactgtggacactaatggcgtgtattcagatcctcgccccattggcacaagatacctgactcgtaatctgtaa

SEQ ID NO: 11901 - DNA, 2208 bp, Artificial Sequence
  source: /note="Description of Artificial Sequence: Synthetic polynucleotide"
atggctgccgatggttatcttccagattggctcgaggacactctctctgaaggaataagacagtggtggaagctcaaacctggcccaccaccgccaaagcccgcagagcggcataaggacgacagcaggggtcttgtgcttcctgggtacaagtacctcggacccttcaacggactcgacaaaggagagccggtcaacgaggcagacgccgcggccctcgagcacgacaaggcctacgaccggcagctcgacagcggagacaacccgtacctcaagtacaaccacgccgacgcggagtttcaggagcgccttaaagaagatacgtcttttgggggcaacctcgcaagagcagtattccaggcgaaaaagagggttcttgaacctctgggcctggttgaggagcctgttaagacggctccgggaaaaaagaggccggtagagcactctcctgcggagccagattcctcctccggaactggaaagtcgggccaacagcctgcaagaaagagattgaattttggtcagactggagacgcagactccgtacctgacccccagcctctcggacagccaccagcagccccctctggtctgggaactaatacgatggcttcaggcagtggcgcaccaatggcagacaataacgagggcgccgacggagtgggtaattcctcgggaaattggcattgcgattccacatggatgggcgacagagtcatcaccaccagcacccgcacctgggctctgcccacctacaacaaccatctgtacaagcaaatttccagccagtctggagccagcaacgacaaccactactttggctacagcaccccttgggggtattttgacttcaacagattccactgccacttctccccacgtggctggcaaagactcatcaacaacaattggggattccggcccaaaagactcaacttcaagctctttaacattcaagtcaaggaggtcacgcagaatgacggtacgacgacgattgccaataaccttaccagcacggttcaggtgtttactgactcggagtaccagctcccgtacgtcctcggctcggcgcatcaaggatgcctcccgccgttcccagcagacgtcttcatggtgccacagtatggatacctcaccctgaacaacgggagtcaggcggtaggacgctcttcattttactgcctggagtactttccttctcagatgctgcgtaccggaagcaactttaccttcagctacacctttgaggacgttccttttcacagcagctacgctcacagccagagtttggaccgtctcatgaatcctctcatcgaccagtacctgtattacttgagcagaacaaacactccaagcggaaccactacgcagtccaggcttcggttttctcaagccggagcgagtgacattcgggaccagtctaggaactggcttcctgggccctgttaccgccagcagcgagtatcaaagacagctgcggacaacaacaacagtgattactcgtggactggagctaccaagtatcacctcaatggaagagactctctggtgaatccgggcacagccatggccagccacaaggacgatgaagaaaagtattttcctcagagcggggttctcatcttcggaaaacaagactcgggaaaaactaatgtggacattgaaagggtcatgattacagacgaagaggaaatcaggaccaccaatcccgtggctacggagcagtatggttctgtatctaccaatctccagagcggcaacacacaagcagctacctcagatgtcaacacacaaggcgttcttccaggcatggtctggcaggacagagacgtgtacctgcagggacccatctgggcaaagattccacacacggacggacattttcacccttctcctcttatgggaggatttggactgaagcaccctcccccgcagattctcatcaagaataccccggtacctgcgaatccttctaccaccttcagcgcggcaaagtttgcttccttcatcacacagtactccacggggcaggtcagcgtggagatcgagtgggagctgcagaaagagaacagcaaacgctggaaccccgagatccagtatacctccaactacaacaagtctgttaatgtggactttactgtggacactaatggcgtgtattcagagcctcgccccattggcacaagatacctgactcgtaatctgtaa

SEQ ID NO: 11902 - DNA, 2208 bp, Artificial Sequence
  source: /note="Description of Artificial Sequence: Synthetic polynucleotide"
atggctgccgatggttatcttccagattggctcgaggacactctctctgaaggaataagacagtggtggaagctcaaacctggcccaccaccaccaaggcccgcagagcggcatcaggacgacagcaggggtcttgtgcttcctgggtacaagtacctcggacccttcaacggactcgacaaaggagagccggtcaacgaggcagacgctgcggccctcgagcacgacaaggcctacgaccggcagctcgacagcggagacaacccgtacctcaagtacaaccacgccgacgcggagtttcaggagcgtcttaaagaagatacgtcttttgggggcaacctcgcaagagcagtattccaggcgaaaaagagggttcttgaacctctgggcctggttgaggagcctgttaagacggctccgggaaaaaagaggccggtagagcactctcctgcggagccagattcctcctccggaactggaaagtcgggccaacagcctgcaagaaagagattgaattttggtcagactggagacgcagactccgtacctgacccccagcctctcggacagccaccagcagccccctctggtctgggaactaatacgatggcttcaggcagtggcgcaccaatggcagacaataacgagggcgccgacggagtgggtaattcctcgggaaattggcattgcgattccacatggatgggcgacagagtcatcaccaccagcacccgcacctgggctctgcccacctacaacaaccatctgtacaagcaaatttccagccagtctggagccagcaacgacaaccactactttggctacagcaccccttgggggtattttgacttcaacagattccactgccacttctccccacgtgactggcaaagactcatcaacaacaattggggattccggcccaaaagactcaacttcaagctctttaacattcaagtcaaggaggtcacgcagaatgacggtacgacgacgattgccaataaccttaccagcacggttcaggtgtttactgactcggagtaccagctcccgtacgtcctcggctcggcgcatcaaggatgcctcccgccgttcccagcagacgtcttcatggtgccacagtatggatacctcaccctgaacaacgggagtcaggcggtaggacgctcttcattttactgcctggagtactttccttctcagatgctgcgtaccggaaacaactttaccttcagctacacctttgaggacgttccttttcacagcagctacgctcacagccagagtttggaccgtctcatgaatcctctcatcgaccagtacctgtattacttgagcagaacaaacactccaagcggaaccactacgcagtccaggcttcggttttctcaagccggagcgagtgacattcgggaccagtctaggaactggcttcctggaccctgttaccgccagcagcgagtatcaaagacagctgcggacaacaacaacagtgattactcgtggactggagctaccaagtatcacctcaatggaagagactctctggtgaatccgggcacagccatggccagccacaaggacgatgaagaaaagtattttcctcagagcggggttctcatcttcggaaaacaagactcgggaaaaactaatgtggacattgaaagggtcatgattacagacgaagaggaaatcaggaccaccaatcccgtggctacggagcagtatggttctgtatctaccaatctccagagcggcaacacacaagcagctacctcagatgtcaacacacaaggcgttcttccaggcatggtctggcaggacagagacgtgtacctgcagggacccatctgggcaaagattccacacacggacggacattttcacccttctcctcttatgggaggatttggactgaagcaccctcccccgcagattctcatcaagaataccccggtacctgcgaatccttctaccaccttcagcgcggcaaagtttgcttccttcatcacacagtactccacggggcaggtcagcgtggagatcgagtgggagctgcagaaagagaacagcaaacgctggaaccccgagatccagtatacctccaactacaacaagtctgttaatgtggactttactgtggacactaatggcgtgtattcagagcctcgccccattggcacaagatacctgactcgtaatctgtaa

SEQ ID NO: 11903 - DNA, 2208 bp, Artificial Sequence
  source: /note="Description of Artificial Sequence: Synthetic polynucleotide"
atggctgccgatggttatcttccagattggctcgaggacactctctctgaaggaataagacagtggtggaagctcaaacctggcccaccaccgccaaagcccgcagagcggcataaggacgacagcaggggtcttgtgcttcctgggtacaagtacctcggacccttcaacggactcgacaaaggagagccggtcaacgaggcagacgccgcggccctcgagcacgacaaggcctacgaccggcagctcgacagcggagacaacccgtacctcaagtacaaccacgccgacgcggagtttcaggagcgccttaaagaagatacgtcttttgggggcaacctcgcaagagcagtattccaggcgaaaaagagggttcttgaacctctgggcctggttgaggagcctgttaagacggctccgggaaaaaagaggccggtagagcactctcctgcggagccagattcctcctccggaactggaaagtcgggccaacagcctgcaagaaagagattgaattttggtcagactggagacgcagactccgtacctgacccccagcctctcggacagccaccagcagccccctctggtctgggaactaatacgatggcttcaggcagtggcgcaccaatggcagacaataacgagggcgccgacggagtgggtaattcctcgggaaattggcattgcgattccacatggatgggcgacagagtcatcaccaccagcacccgcacctgggctctgcccacctacaacaaccatctgtacaagcaaatttccagccagtctggagccagcaacgacaaccactactttggctacagcaccccttgggggtattttgacttcaacagattccactgccacttctccccacgtgactggcaaagactcatcaacaacaattggggattccggcccaaaagactcaacttcaagctctttaacattcaagtcaaggaggtcacgcagaatgacggtacgacgacgattgccaataaccttaccagcacggttcaggtgtttactgactcggagtaccagctcccgtacgtccccggctcggcgcatcaaggatgcctcccgccgttcccagcagacgtcttcatggtgccacagtatggatacctcaccctgaacaacgggagtcaggcggtaggacgctcttcattttactgcctggagtactttccttctcagatgctgcgtaccggaaacaactttaccttcagctacacctttgaggacgttccttttcacagcagctacgctcacagccagagtttggaccgtctcatgaatcctctcatcgaccagtacctgtattacttgagcagaacaaacactccaagcggaaccactacgcagtccaggcttcggttttctcaagccggagcgagtgacattcgggaccagtctaggaactggcttcctggaccctgttaccgccagcagcgagtatcaaagacggctgcggacaacaacaacagtgattactcgtggactggagctaccaagtatcacctcaatggaagagactctctggtgaatccgggcacagccatggccagccacaaggacgatgaagaaaagtattttcctcagagcggggttctcatcttcggaaaacaagactcgggaaaaactaatgtggacattgaaagggtcatgattacagacgaagaggaaatcaggaccaccaatcccgtggctacggagcagtatggttctgtatctaccaatctccagagcggcaacacacaagcagctacctcagatgtcaacacacaaggcgttcttccaggcatggtctggcaggacagagacgtgtacctgcagggacccatctgggcaaagattccacacacggacggacattttcacccttctcctcttatgggaggatttggactgaagcaccctcccccgcagattctcatcaagaataccccggtacctgcgaatccttctaccaccttcagcgcggcaaagtttgcttccttcatcacacagtactccacggggcaggtcagcgtggagatcgagtgggagctgcagaaagagaacagcaaacgctggaaccccgagatccagtatacctccaactacaacaagtctgttaatgtggactttactgtggacactaatggcgtgtattcagagcctcgccccattggcacaagatacctgactcgtaatctgtaa

SEQ ID NO: 11904 - DNA, 2208 bp, Artificial Sequence
  source: /note="Description of Artificial Sequence: Synthetic polynucleotide"
atggctgccgatggttatcttccagattggctcgaggacactctctctgaaggaataagacagtggtggaagctcaaacctggcccaccaccgccaaagcccgcagagcggcataaggacgacagcaggggtcttgtgcttcctgggtacaagtacctcggacccttcaacggactcgacaaaggagagccggtcaacgaggcagacgccgcggccctcgagcacgacaaggcctacgaccggcagctcgacagcggagacaacccgtacctcaagtacaaccacgccgacgcggagtttcaggagcgccttaaagaagatacgtcttttgggggcaacctcgcaagagcagtattccaggcgaaaaagagggttcttgaacctctgggcctggttgaggagcctgttaagacggctccgggaaaaaagaggccggtagagcactctcctgcggagccagattcctcctccggaactggaaagtcgggccaacagcctgcaagaaagagattgaattttggtcagactggagacgcagactccgtacctgacccccagcctctcggacagccaccagcagccccctctggtctgggaactaatacgatggcttcaggcagtggcgcaccaatggcagacaataacgagggcgccgacggagtgggtaattcctcgggaaattggcattgcgattccacatggatgggcgacagagtcatcaccaccagcacccgcacctgggctctgcccacctacgacaaccatctgtacaagcaaatttccagccagtctggagccagcaacgacaaccactactttggctacagcaccccttgggggtattttgacttcaacagattccactgccacttctccccacgtgactggcaaagactcatcaacaacaattggggattccggcccaaaagactcaacttcaagctctttaacattcaagtcaaggaggtcacgcagaatgacggtacgacgacgattgccaataaccttaccagcacggttcaggtgtttactgactcggagtaccagctcccgtacgtcctcggctcggcgcatcaaggatgcctcccgccgttcccagcagacgtcttcatggtgccacagtatggatacctcaccctgaacaacgggagtcaggcggtaggacgctcttcattttactgcctggagtactttccttctcagatgctgcgtaccggaaacaactttaccttcagctacacctttgaggacgttccttttcacagcagctacgctcacagccagagtttggaccgtctcatgaatcctctcatcgaccagtacctgtattacttgagcagaacaaacacttcaagcggaaccactacgcagtccaggcttcggttttctcaagccggagcgagtgacattcgggaccagtctaggaactggcttcctggaccctgttaccgccagcagcgagtatcaaagacagctgcggacaacaacaacagtgattactcgtggactggagctaccaagtatcacctcaatggaagagactctctggtgaatccgggcacagccatggccagccacaaggacgatgaagaaaagtattttcctcagagcggggttctcatcttcggaaaacaagactcgggaaaaactaatgtggacattgaaagggtcatgattacagacgaagaggaaatcaggaccaccaatcccgtggctacggagcagtatggttctgtatctaccaatctccagagcggcaacacacaagcagctacctcagatgtcaacacacaaggcgttcttccaggcatggtctggcaggacagagacgtgtacctgcagggacccatctgggcaaagattccacacacggacggacattttcacccttctcctcttatgggaggatttggactgaagcaccctcccccgcagattctcatcaagaataccccggtacctgcgaatccttctaccaccttcagcgcggcaaagtttgcttccttcatcacacagtactccacggggcaggtcagcgtggagatcgagtgggagctgcagaaagagaacagcaaacgctggaaccccgagatccagtatacctccaactacaacaagtctgttaatgtggactttactgtggacactaatggcgtgtattcagagcctcgccccattggcacaagatacctgactcgtaatctgtaa

SEQ ID NO: 11905 - DNA, 2208 bp, Artificial Sequence
  source: /note="Description of Artificial Sequence: Synthetic polynucleotide"
atggctgccgatggttatcttccagattggctcgaggacactctctctgaaggaataagacagtggtggaagctcaaacctggcccaccaccaccaaggcccgcagagcggcatcaggacgacagcaggggtcttgtgcttcctgggtacaagtacctcggacccttcaacggactcgacaaaggagagccggtcaacgaggcagacgctgcggccctcgagcacgacaaggcctacgaccggcagctcgacagcggagacaacccgtacctcaagtacaaccacgccgacgcggagtttcaggagcgtcttaaagaagatacgtcttttgggggcaacctcggacgagcagtcttccaggcgaaaaagagggttcttgaacctctgggcctggttgaggaacctgttaagacggctccgggaaaaaagaggccggtagagcactctcctgcggagccagactcctcctcgggaaccggaaaagcgggccagcagcctgcaagaaagagattgaatttcggtcagactggagacgcagactccgtacctgacccccagcctctcggacagccaccagcagcccccacaagtttgggatctactacaatggctacaggcagtggcgcaccaatggcagacaataacgagggtgccgatggagtgggtaattcctcaggaaattggcattgcgattcccaatggctgggcgacagagtcatcaccaccagcacccgaacctgggccctgcccacctacaacaaccacctctacaagcaaatctccagccaatcaggagcatcgaacgacaaccactactttggctacagcaccccttgggggtattttgacttcaacagattccactgtcacttctccccacgtgactggcaaagactcatcaacaacaactggggattccgacccaagagactcaacttcaagctctttaacattcaagtcaaagaggtcacgcagaatgacggtacgacgacgattgccaataaccttaccagcacggttcaggtgtttactgactcggagtaccagctcccgtacgtcctcggctcggcgcatcaaggatgcctcccgccgtttccagcggacgtcttcatggtcccacagtatggatacctcaccctgaacaacgggagtcaggcggtaggacgctcttccttttactgcctggagtactttccttctcagatgctgcgtaccggaaacaactttaccttcagctacacctttgaggacgttccttttcacagcagctacgctcacagccagagtttggaccgtctcatgaatcctctcatcgaccagtacctgtattacttgagcagaacaaacactccaagcggaaccactacgcagtccaggcttcagttttctcaagccggagcgagtgacattcgggaccagtctaggaactggcttcctggaccctgttaccgccagcagcgagtatcaaagacagctgcggacaacaacaacagtgattactcgtggactggagctaccaagtatcacctcaatggaagagactctctggtgaatccgggcacagccatggccagccacaaggacgatgaagaaaagtattttcctcagagcggggttctcatcttcggaaaacaagactcgggaaaaactaatgtggacattgaaaaggtcatgattacagacgaagaggaaatcaggaccaccaatcccgtggctacggagcagtatggttctgtatctaccaatctccagagcggcaacacacaagcagctacctcagatgtcaacacacaaggcgttcttccaggcatggtctggcaggacagagacgtgtacctgcagggacccatctgggcaaagattccacacacggacggacactttcacccttctcctcttatgggaggatttggactgaagcaccctcccccgcagattctcatcaagagtaccccggtacctgcgaatccttctaccaccttcagcgcggcaaagtttgcttccttcatcacacagtactccacggggcaggtcagcgtggagatcgagtgggagctgcagaaagagaacagcaaacgctggaaccccgagatccagtatacctccaactacaacaagtctgttaatgtggactttactgtggacactaatggcgtgtattcagagcctcgccccattggcacaagatacctgactcgtaatctgtaa

SEQ ID NO: 11906 - DNA, 2208 bp, Artificial Sequence
  source: /note="Description of Artificial Sequence: Synthetic polynucleotide"
atggctgccgatggttatcttccagattggctcgaggacactctctctgaaggaataagacagtggtggaagctcaaacctggcccaccaccgccaaagcccgcagagcggcataaggacgacagcaggggtcttgtgcttcctgggtacaagtacctcggacccttcaacggactcgacaaaggagagccggtcaacgaggcagacgccgcggccctcgagcacgacaaggcctacgaccggcagctcgacagcggagacaacccgtacctcaagtacaaccacgccgacgcggagtttcaggagcgccttaaagaagatacgtcttttgggggcaacctcgcaagagcagtattccaggcgaaaaagagggttcttgaacctctgggcctggttgaggagcctgttaagacggctccgggaaaaaagaggccggtagagcactctcctgcggagccagattcctcctccggaactggaaagtcgggccaacagcctgcaagaaagagattgaattttggtcagactggagacgcagactccgtacctgacccccagcctctcggacagccaccagcagccccctctggtctgggaactaatacgatggcttcaggcagtggcgcaccaatggcagacaataacgagggcgccgacggagtgggtaattcctcgggaaattggcattgcgattccacatggatgggcgacagagtcatcaccaccagcacccgcacctgggctctgcccacctacaacaaccatctgtacaagcaaatttccagccagtctggagccagcaacgacaaccactactttggctacagcaccccttgggggtattttgacttcaacagattccactgccacttctccccacgtgactggcaaagactcatcaacaacaattggggattccggcccaaaagactcaacttcaagctctttaacattcaagtcaaggaggtcacgcagaatgacggtacgacgacgattgccaataaccttaccagcacggttcaggtgtttactgactcggagtaccagctcccgtacgtcctcggctcggcgcatcaaggatgcctcccgccgttcccagcagacgtcttcatggtgccacagtatggatacctcaccctgaacaacgggagtcaggcggtaggacgctcttcattttactgcctggagtactttccttctcagatgctgcgtaccggaaacaactttaccttcagctacacctttgaggacgttccttttcacagcagctacgctcacagccagagttcggaccgtctcatgaatcctctcatcgaccagtacctgtattacttgagcagaacaaacactccaagcggaaccactacgcagtccaggcttcggttttctcaagccggagcgagtgacattcgggaccagtctaggaactggcttcctggaccctgttaccgccagcagcgagtatcaaagacagctgcggacaacaacaacagtgattactcgtggactggagctaccaagtatcacctcaatggaagagactctctggtgaatccgggcacagccatggccagccacaaggacgatgaagaaaagtattttcctcagagcggggttctcatcttcggaaaacaagactcgggaaaaactaatgtggacattgaaagggtcatgattacagacgaagaggaaatcaggaccaccaatcccgtggctacggagcagtatggttctgtatctaccaatctccagagcggcaacacacaagcagctacctcagatgtcaacacacaaggcgttcttccaggcatggtctggcaggacagagacgtgtacctgcagggacccatctgggcaaagattccacacacggacggacattttcacccttctcctcttatgggaggatttggactgaagcaccctcccccgcagattctcatcaagaataccccggtacctgcgaatccttctaccaccttcagcgcggcaaagcttgcttccttcatcacacagtactccacggggcaggtcagcgtggagatcgagtgggagctgcagaaagagaacagcaaacgctggaaccccgagatccagtatacctccaactacaacaagtctgttaatgtggactttactgtggacactaatggcgtgtattcagagcctcgccccattggcacaagatacctgactcgtaatctgtaa

SEQ ID NO: 11907 - DNA, 2208 bp, Artificial Sequence
  source: /note="Description of Artificial Sequence: Synthetic polynucleotide"
atggctgccgatggttatcttccagattggctcgaggacactctctctgaaggaataagacagtggtggaagctcaaacctggcccaccaccgccaaagcccgcagagcggcataaggacgacagcaggggtcttgtgcttcctgggtacaagtacctcggacccttcaacggactcgacaaaggagagccggtcaacgaggcagacgccgcggccctcgagcacgacaaggcctacgaccggcagctcgacagcggagacaacccgtacctcaagtacaaccacgccgacgcggagtttcaggagcgccttaaagaagatacgtcttttgggggcaacctcgcaagagcagtattccaggcgaaaaagagggttcttgaacctctgggcctggttgaggagcctgttaagacggctccgggaaaaaagaggccggtagagcactctcctgcggagccagattcctcctccggaactggaaagtcgggccaacagcctgcaagaaagagattgaattttggtcagactggagacgcagactccgtacctgacccccagcctctcggacagccaccagcagccccctctggtctgggaactaatacgatggcttcaggcagtggcgcaccaatggcagacaataacgagggcgccgacggagtgggtaattcctcgggaaattggcattgcgattccacatggatgggcgacagagtcatcaccaccagcacccgcacctgggctctgcccacctacaacaaccatctgtacaagcaaatttccagccagtctggagccagcaacgacaaccactactttggctacagcaccccttgggggtattttgacttcaacagattccactgccacttctccccacgtgactggcaaagactcatcaacaacaattggggattccggcccaaaagactcaacttcaagctctttaacattcaagtcaaggaggtcacgcagaatgacggtacgacgacgattgccaataaccttaccagcacggttcaggtgtttactgactcggagtaccagctcccgtacgtcctcggctcggcgcatcaaggatgcctcccgccgttcccagcagacgtcttcatggtgccacagtatggatacctcaccctgaacaacgggagtcaggcggtaggacgctcttcattttactgcctggagtactttccttctcagatgctgcgtaccggaaacaactttaccttcagctacacctttgaggacgttccttttcacagcagctacgctcacagccagagtttggaccgtctcatgaatcctctcatcgaccagtacctgtattacttgagcagaacaaacactccaagcggaaccactacgcagtccaggcttcggttttctcaagccggagcgagtgacattcgggaccagtctaggaactggcttcctggaccctgttaccgccagcagcgagtatcaaagacagctgcggacaacaacaacagtgattactcgtggactggagctaccaagtatcacctcaatggaagagactctctggtgaatccgggcacagccatggccagccacaaggacgatgaagaaaagtattttcctcagagcggggttctcatcttcggaaaacaagactcgggaaaaactaatgtggacattgaaagggtcatgattacagacgaagaggaaatcaggaccaccaatcccgtggctacggagcagtatggttctgtatctaccaatctccagagcggcaacacacaagcagctacctcagatgtcaacacacaaggcgttcttccaggcatggtctggcaggacagagacgtgtacctgcagggacccatctgggcaaagattccacacacggacggacattttcacccttctcctcttatgggaggatttggactgaagcaccctcccccgcagattctcatcaagaataccccggtacctgcgaatccttctaccaccttcagcgcggcaaagtttgcttccttcatcacacagtactccacggggcaggtcagcgtggagatcgagtgggagctgcagaaggagaacagcaaacgctggaaccccgagatccagtacacttccaactacaacaaatctgttaatgtggactttactgtggacgctaatggtgtgtattcagagcctcgccccattggcaccagatacctgactcgtaatctgtaa

SEQ ID NO: 11908 - DNA, 2208 bp, Artificial Sequence
  source: /note="Description of Artificial Sequence: Synthetic polynucleotide"
atggctgccgatggttatcttccagattggctcgaggacactctctctgaaggaataagacagtggtggaagctcaaacctggcccaccaccgccaaagcccgcagagcggcataaggacgacagcaggggtcttgtgcttcctgggtacaagtacctcggacccttcaacggactcgacaaaggagagccggtcaacgaggcagacgccgcggccctcgagcacgacaaggcctacgaccggcagctcgacagcggagacaacccgtacctcaagtacaaccacgccgacgcggagtttcaggagcgccttaaagaagatacgtcttttgggggcaacctcgcaagagcagtattccaggcgaaaaagagggttcttgaacctctgggcctggttgaggagcctgttaagacggctccgggaaaaaagaggccggtagagcactctcctgcggggccagattcctcctccggaactggaaagtcgggccaacagcctgcaagaaagagattgaattttggtcagactggagacgcagactccgtacctgacccccagcctctcggacagccaccagcagccccctctggtctgggaactaatacgatggcttcaggcagtggcgcaccaatggcagacaataacgagggcgccgacggagtgggtaattcctcgggaaattggcattgcgattccacatggatgggcgacagagtcatcaccaccagcacccgcacctgggctctgcccacctacaacaaccatctgtacaagcaaatttccagccagtctggagccagcaacgacaaccactactttggctacagcaccccttgggggtattttgacttcaacagattccactgccacttctccccacgtgactggcaaagactcatcaacaacaattggggattccggcccaaaagactcaacttcgagctctttaacattcaagtcaaggaggtcacgcagaatgacggtacgacgacgattgccaataaccttaccagcacggttcaggtgtttactgactcggagtaccagctcccgtacgtcctcggctcggcgcatcaaggatgcctcccgccgttcccagcagacgtcttcatggtgccacagtatggatacctcaccctgaacaacgggagtcaggcggtaggacgctcttcattttactgcctggagtactttccttctcagatgctgcgtaccggaaacaactttaccttcagctacacctttgaggacgttccttttcacagcagctacgctcacagccagagtttggaccgtctcatgaatcctctcatcgaccagtacctgtattacttgagcagaacaaacactccaagcggaaccactacgcagtccaggcttcagttttctcaagccggagcgagtgacattcgggaccagtctaggaactggcttcctggaccctgttaccgccagcagcgagtatcaaagacagctgcggacaacaacaacagtgattactcgtggactggagctaccaagtatcacctcaatggaagagactctctggtgaatccgggcacagccatggccagccacaaggacgatgaagaaaagtattttcctcagagcggggttctcatcttcggaaaacaagactcgggaaaaactaatgtggacattgaaaaggtcatgattacagacgaagaggaaatcaggaccaccaatcccgtggctacggagcagtatggttctgtatctaccaatctccagagcggcaacacacaagcagctacctcagatgtcaacacacaaggcgttcttccaggcatggtctggcaggacagagacgtgtacctgcagggacccatctgggcaaagattccacacacggacggacactttcacccttctcctcttatgggaggatttggactgaagcaccctcccccgcagattctcatcaagagtaccccggtacctgcgaatccttctaccaccttcagcgcggcaaagtttgcttccttcatcacacagtactccacggggcaggtcagcgtggagatcgagtgggagctgcagaaagagaacagcaaacgctggaaccccgagatccagtatacctccaactgcaacaagtctgttaatgtggactttactgtggacactaatggcgtgtattcagatcctcgccccattggcacaagatacctgactcgtaatctgtaa

SEQ ID NO: 11909 - DNA, 2208 bp, Artificial Sequence
  source: /note="Description of Artificial Sequence: Synthetic polynucleotide"
atggctgccgatggttatcttccagattggctcgaggacactctctctgaaggaataagacagtggtggaagctcaaacctggcccaccaccgccaaagcccgcagagcggcataaggacgacagcaggggtcttgtgcttcctgggtacaagtacctcggacccttcaacggactcgacaaaggagagccggtcaacgaggcagacgccgcggccctcgagcacgacaaggcctacgaccggcagctcgacagcggagacaacccgtacctcaagtacaaccacgccgacgcggagcttcaggagcgccttaaagaagatacgtcttttgggggcaacctcgcaagagcagtattccaggcgaaaaagagggttcttgaacctctgggcctggttgaggagcctgttaagacggctccgggaaaaaagaggccggtagagcactctcctgcggagccagattcctcctccggaactggaaagtcgggccaacagcctgcaagaaagagattgaattttggtcagactggagacgcagactccgtacctgacccccagcctctcggacagccaccagcagccccctctggtctgggaactaatacgatggcttcaggcagtggcgcaccaatggcagacaataacgagggcgccgacggagtgggtaattcctcgggaaattggcattgcgattccacatggatgggcgacagagtcatcaccaccagcacccgcacctgggctctgcccacctacaacaaccatctgtacaagcaaatttccagccagtctggagccagcaacgacaaccactactttggctacagcaccccttgggggtattttgacttcaacagattccactgccacttctccccacgtgactggcaaagactcatcaacaacaattggggattccggcccaaaagactcaacttcaagctctttaacattcaagtcaaggaggtcacgcagaatgacggtacgacgacgattgccaataaccttaccagcacggttcaggtgtatactgactcggagtaccagctcccgtacgtcctcggctcggcgcatcaaggatgcctcccgccgttcccagcagacgtcttcatggtgccacagtatggatacctcaccctgaacaacgggagtcaggcggtaggacgctcttcattttactgcctggagtactttccttctcagatgctgcgtaccggaaacaactttaccttcagctacacctttgaggacgttccttttcacagcagctacgctcacagccagagtttggaccgtctcatgaatcctctcatcgaccagtacctgtattacttgagcagaacaaacactccaagcggaaccactacgcagtccaggcttcggttttctcaagccggagcgagtgacattcgggaccagtctaggaactggcttcctggaccctgttaccgccagcagcgagtatcaaagacagctgcggacaacaacaacagtgattactcgtggactggagctaccaagtatcacctcaatggaagagactctctggtgaatccgggcacagccatggccagccacaaggacgatgaagaaaagtattttcctcagagcggggttctcatcttcggaaaacaagactcgggaaaaactaatgtggacattgaaagggtcatgattacagacgaagaggaaatcaggaccaccaatcccgtggctacggagcagtatggttctgtatctaccaatctccagagcggcaacacacaagcagctacctcagatgtcaacacacaaggcgttcttccaggcatggtctggcaggacagagacgtgtacctgcagggacccatctgggcaaagattccacacacggacggacattttcacccttctcctcttatgggaggatttggactgaagcaccctcccccgcagattctcatcaagaataccccggtacctgcgaatccttctaccaccttcagcgcggcaaagtttgcttccttcatcacacagtactccacggggcaggtcagcgtggagatcgagtgggagctgcagaaagagaacagcaaacgctggaaccccgagatccagtatacctccaactacaacaagtctgttaatgtggactttactgtggacactaatggcgtgtattcagagcctcgccccattggcacaagatacctgactcgtaatctgtaa

SEQ ID NO: 11910 - DNA, 2208 bp, Artificial Sequence
  source: /note="Description of Artificial Sequence: Synthetic polynucleotide"
atggctgccgatggttatcttccagattggctcgaggacactctctctgaaggaataagacagtggtggaagctcaaacctggcccaccaccgccaaagcccgcagagcggcataaggacgacagcaggggtcttgtgcttcctgggtacaagtacctcggacccttcaacggactcgacaaaggagagccggtcaacgaggcagacgccgcggccctcgagcacgacaaggcctacgaccggcagctcgacagcggagacaacccgtacctcaagtacaaccacgccgacgcggagtttcaggagcgccttaaagaagatacgtcttttgggggcaacctcgcaagagcagtattccaggcgaaaaagagggttcttgaacctctgggcctggttgaggagcctgttaagacggctccgggaaaaaagaggccggtagagcactctcctgcggagccagattcctcctccggaactggaaagtcgggccaacagcctgtaagaaagagattgaattttggtcagactggagacgcagactccgtacctgacccccagcctctcggacagccaccagcagccccctctggtctgggaactaatacgatggcttcaggcagtggcgcaccaatggcagacaataacgagggcgccgacggagtgggtaattcctcgggaaattggcattgcgattccacatggatgggcgacagagtcatcaccaccagcacccgcacctgggctctgcccacctacaacaaccatctgtacaagcaaatttccagccagtctggagccagcaacgacaaccactactttggctacagcaccccttgggggtattttgacttcaacagattccactgccacttctccccacgtgactggcaaagactcatcaacaacaattggggattccggcccaaaagactcaacttcaagctctttaacattcaagtcaaggaggtcacgcagaatgacggtacgacgacgattgccaataaccttaccagcacggttcaggtgtttactgactcggagtaccagctcccgtacgtcctcggctcggcgcatcaaggatgcctcccgccgttcccagcagacgtcttcatggtgccacagtatggatacctcaccctgaacaacgggagtcaggcggtaggacgctcttcattttactgcctggagtactttccttctcagatgctgcgtaccggaagcaactttaccttcagctacacctttgaggacgttccttttcacagcagctacgctcacagccagagtttggaccgtctcatgaatcctctcatcgaccagtacctgtattacttgagcagaacaaacactccaagcggaaccactacgcagtccaggcttcggttttctcaagccggagcgagtgacattcgggaccagtctaggaactggcttcctgggccctgttaccgccagcagcgagtatcaaagacagctgcggacaacaacaacagtgattactcgtggactggagctaccaagtatcacctcaatggaagagactctctggtgaatccgggcacagccatggccagccacaaggacgatgaagaaaagtattttcctcagagcggggttctcatcttcggaaaacaagactcgggaaaaactaatgtggacattgaaagggtcatgattacagacgaagaggaaatcaggaccaccaatcccgtggctacggagcagtatggttctgtatctaccaatctccagagcggcaacacacaagcagctacctcagatgtcaacacacaaggcgttcttccaggcatggtctggcaggacagagacgtgtacctgcagggacccatctgggcaaagattccacacacggacggacattttcacccttctcctcttatgggaggatttggactgaagcaccctcccccgcagattctcatcaagaataccccggtacctgcgaatccttctaccaccttcagcgcggcaaagtttgcttccttcatcacacagtactccacggggcaggtcagcgtggagatcgagtgggagctgcagaaagagaacagcaaacgctggaaccccgagatccagtatacctccaactacaacaagtctgttaatgtggactttactgtggacactaatggcgtgtattcagagcctcgccccattggcacaagatacctgactcgtaatctgtaa

SEQ ID NO: 11911 - DNA, 2208 bp, Artificial Sequence
  source: /note="Description of Artificial Sequence: Synthetic polynucleotide"
atggctgccgatggttatcttccagattggctcgaggacactctctctgaaggaataagacagtggtggaagctcaaacccggcccaccaccaccaaggcccgcagagcggcatcaggacgacagcaggggtcttgtgcttcctgggtacaagtacctcggacccttcaacggactcgacaaaggagagccggtcaacgaggcagacgctgcggccctcgagcacgacaaggcctacgaccggcagctcgacagcggagacaacccgtacctcaagtacaaccacgccgacgcggagtttcaggagcgtcttaaagaagatacgtcttttgggggcaacctcggacgagcagtcttccaggcgaaaaagagggttcttgaacctctgggcctggttgaggagcctgttaagacggctccgggaaaaaagaggccggtagagcactctcctgcggggccagattcctcctccggaactggaaagtcgggccaacagcctgcaagaaagagattgaattttggtcagactggagacgcagactccgtacctgacccccagcctctcggacagccaccagcagccccctctggtctgggaactaatacgatggcttcaggcagtggcgcaccaatggcagacaataacgagggcgccgacggagtgggtaattcctcgggaaattggcattgcgattccacatggatgggcgacagagtcatcaccaccagcacccgcacctgggctctgcccacctacaacaaccatctgtacaagcaaatttccagccagtctggagccagcaacgacaaccactactttggctacagcaccccttgggggtattttgacttcaacagattccactgccacttctccccacgtgactggcaaagactcatcaacaacaattggggattccggcccaaaagactcaacttcgagctctttaacattcaagtcaaggaggtcacgcagaatgacggtacgacgacgattgccaataaccttaccagcacggttcaggtgtttactgactcggagtaccagctcccgtacgtcctcggctcggcgcatcaaggatgcctcccgccgttcccagcagacgtcttcatggtgccacagtatggatacctcaccctgaacaacgggagtcaggcggtaggacgctcttcattttactgcctggagtactttccttctcagatgctgcgtaccggaaacaactttaccttcagctacacctttgaggacgttccttttcacagcagctacgctcacagccagagtttggaccgtctcatgaatcctctcatcgaccagtacctgtattacttgagcagaacaaacactccaagcggaaccactacgcagtccaggcttcagttttctcaagccggagcgagtgacattcgggaccagtctaggaactggcttcctggaccctgttaccgccagcagcgagtatcaaagacagctgcggacaacaacaacagtgattactcgtggactggagctaccaagtatcacctcaatggaagagactctctggtgaatccgggcacagccatggccagccacaaggacgatgaagaaaagtattttcctcagagcggggttctcatcttcggaaaacaagactcgggaaaaactaatgtggacattgaaaaggtcatgattacagacgaagaggaaatcaggaccaccaatcccgtggctacggagcagtatggttctgtatctaccaatctccagagcggcaacacacaagcagctacctcagatgtcaacacacaaggcgttcttccaggcatggtctggcaggacagagacgtgtacctgcagggacccatctgggcaaagattccacacacggacggacactttcacccttctcctcttatgggaggatttggactgaagcaccctcccccgcagattctcatcaagagtaccccggtacctgcgaatccttctaccaccttcagcgcggcaaagtttgcttccttcatcacacagtactccacggggcaggtcagcgtggagatcgagtgggagctgcagaaagagaacagcaaacgctggaaccccgagatccagtatacctccaactacaacaagtctgttaatgtggactttactgtggacactaatggcgtgtattcagagcctcgccccattggcacaagatacctgactcgtaatctgtaa

SEQ ID NO: 11912 - DNA, 2208 bp, Artificial Sequence
  source: /note="Description of Artificial Sequence: Synthetic polynucleotide"
atggctgccgatggttatcttccagattggctcgaggacactctctctgaaggaataagacagtggtggaagctcaaacctggcccaccaccgccaaagcccgcagagcggcataaggacgacagcaggggtcttgtgcttcctgggtacaagtacctcggacccttcaacggactcgacaaaggagagccggtcaacgaggcagacgccgcggccctcgagcacgacaaggcctacgaccggcagctcgacagcggagacaacccgtacctcaagtacaaccacgccgacgcggagtttcaggagcgccttaaagaagatacgtcttttgggggcaacctcgcaagagcagtattccaggcgaaaaagagggttcttgaacctctgggcctggttgaggagcctgttaagacggctccgggaaaaaagaggccggtagagcactctcctgcggagccagattcctcctccggaactggaaagtcgggccaacagcctgcaagaaagagattgaattttggtcagactggagacgcagactccgtacctgacccccagcctctcggacagccaccagcagccccctctggtctgggaactaatacgatggcttcaggcagtggcgcaccaatggcagacaataacgagggcgccgacggagtgggtaattcctcgggaaattggcattgcgattccacatggatgggcgacagagtcatcaccaccagcacccgcacctgggctctgcccacctacaacaaccatctgtacaagcaaatttccagccagtctggagccagcaacgacaaccactactttggctacagcaccccttgggggtattttgacttcaacagattccacggccacttctccccacgtgactggcaaagactcatcaacaacaattggggattccggcccaaaagactcaacttcaagctctttaacattcaagtcaaggaggtcacgcagaatgacggtacgacgacgattgccaataaccttaccagcacggttcaggtgtttactgactcggagtaccagctcccgtacgtcctcggctcggcgcatcaaggatgcctcccgccgttcccagcagacgtcttcatggtgccacagtatggatacctcaccctgaacaacgggagtcaggcggtaggacgctcttcattttactgcctggagtactttccttctcagatgctgcgtaccggaaacaactttaccttcagctacacctttgaggacgttccttttcacagcagctacgctcacagccagagtttggaccgtctcatgaatcctctcatcgaccagtacctgtattacttgagcagaacaaacactccaagcggaaccactacgcagtccaggcttcggttttctcaagccggagcgagtgacattcgggaccagtctaggaactggcttcctggaccctgttaccgccagcagcgagtatcaaagacagctgcggacaacaacaacagtgattactcgtggactggagctaccaagtatcacctcaatggaagagactctctggtgaatccgggcacagccatggccagccacaaggacgatgaagaaaagtattttcctcagagcggggttctcatcttcggaaaacaagactcgggaaaaactaatgtggacattgaaagggtcatgattacagacgaagaggaaatcaggaccaccaatcccgtggctacggagcagtatggttctgtatctaccaatctccagagcggcaacacacaagcagctacctcagatgtcaacacacaaggcgttcttccaggcatggtctggcaggacagagacgtgtacctgcagggacccatctgggcaaagattccacacacggacggacattttcacccttctcctcttatgggaggatttggactgaagcaccctcccccgcagattctcatcaagaataccccggtacctgcgaatccttctaccaccttcagcgcggcaaagtttgcttccttcatcacacagtactccacggggcaggtcagcgtggagatcgagtgggagctgcagaaagagaacagcaaacgctggaaccccgagatccagtatacctccaactacaacaagtctgttaatgtggactttactgtggacactaatggcgtgtattcagagcctcgccccattggcacaagatacctgactcgtaatctgtaa

SEQ ID NO: 11913 - DNA, 2208 bp, Artificial Sequence
  source: /note="Description of Artificial Sequence: Synthetic polynucleotide"
atggctgccgatggttatcttccagattggctcgaggacactctctctgaaggaataagacagtggtggaagctcaaacctggcccaccaccgccaaagcccgcagagcggcataaggacgacagcaggggtcttgtgcttcctgggtacaagtacctcggacccttcaacggactcgacaaaggagagccggtcaacgaggcagacgccgcggccctcgagcacgacaaggcctacgaccggcagctcgacagcggagacaacccgtacctcaagtacaaccacgccgacgcggagtttcaggagcgccttaaagaagatacgtcttttgggggcaacctcgcaagagcagtattccaggcgaaaaagagggttcttgaacctctgggcctggttgaggagcctgttaagacggctccgggaaaaaagaggccggtagagcactctcctgcggagccagattcctcctccggaactggaaagtcgggccaacagcctgcaagaaagagattgaattttggtcagactggagacgcagactccgtacctgacccccagcctctcggacagccaccagcagccccctctggtctgggaactaatacgatggcttcaggcagtggcgcaccaatggcagacaataacgagggcgccgacggagtgggtaattcctcgggaaattggcattgcgattccacatggatgggcgacagagtcatcaccaccagcacccgcacctgggctctgcccacctacaacaaccatctgtacaagcaaatttccagccagtctggagccagcaacgacaaccactactttggctacagcaccccttgggggtattttgacttcaacagattccactgccacttctccccacgtgactggcaaagactcatcaacaacaattggggattccggcccaaaagactcaacttcaagctctttaacattcaagtcaaggaggtcacgcagaatgacggtacgacgacgattgccaataaccttaccagcacggttcaggtgtttactgactcggagtaccagctcccgtacgtcctcggctcggcgcatcaaggatgcctcccgccgttcccagcagacgtcttcatggtgccacagtatggatacctcaccctgaacaacgggagtcaggcggtaggacgctcttcattttactgcctggagtactttccttctcagatgctgcgtaccggaaacaactttaccttcagctacacctttgaggacgttccttttcacagtagctacgctcacagccagagtttggaccgtctcatgaatcctctcatcgaccagtacctgtattacttgagcagaacaaacactccaagcggaaccactacgcagtccaggcttcggttttctcaagccggagcgagtgacattcgggaccagtctaggaactggcttcctgggccctgttaccgccagcagcgagtatcaaagacagctgcggacaacaacaacagtgattactcgtggactggagctaccaagtatcacctcaatggaagagactctctggtgaatccgggcacagccatggccagccacaaggacgatgaagaaaagtattttcctcagagcggggttctcatcttcggaaaacaagactcgggaaaaactaatgtggacattgaaagggtcatgattacagacgaagaggaaatcaggaccaccaatcccgtggctacggagcagtatggttctgtatctaccaatctccagagcggcaacacacaagcagctacctcagatgtcaacacacaaggcgttcttccaggcatggtctggcaggacagagacgtgtacctgcagggacccatctgggcaaagattccacacacggacggacattttcgcccttctcctcttatgggaggatttggactgaagcaccctcccccgcagattctcatcaagaataccccggtacctgcgaatccttctaccaccttcagcgcggcaaagtttgcttccttcatcacacagtactccacggggcaggtcagcgtggagatcgagtgggagctgcagaaagagaacagcaaacgctggaaccccgagatccagtatacctccaactacaacaagtctgttaatgtggactttactgtggacactaatggcgtgtattcagagcctcgccccattggcacaagatacctgactcgtaatctgtaa

SEQ ID NO: 11914 - DNA, 2208 bp, Artificial Sequence
  source: /note="Description of Artificial Sequence: Synthetic polynucleotide"
atggctgccgatggttatcttccagattggctcgaggacactctctctgaaggaataagacagtggtggaagctcaaacctggcccaccaccaccaaagcccgcagagcggcataaggacgacagcaggggtcttgtgcttcctgggtacaagtacctcggacccttcaacggactcgacaagggagagccggtcaacgaggcagacgccgcggccctcgagcacgacaaagcctacgaccggcagctcgacagcggagacaacccgtacctcaagtacaaccacgccgacgcggagtttcaggagcgccttaaagaagatacgtcttttgggggcaacctcggacgagcagtcttccaggcgaaaaagagggctcttgaacctctgggcctggttgaggaacctgttaagacggctccgggaaaaaagaggccggtagagcactctcctgtggagccagactcctcctcgggaaccggaaaggcgggccagcagcctgcaagaaaaagattgaattttggtcagactggagacgcagactcggtacctgacccccagcctctcggacagccaccagcagccccctctggtctgggaactaatacgatggctacaggcagtggcgcaccaatggcagacaataacgagggcgccgacggagtgggtaattcctcgggaaattggcattgcgattccacatggatgggcgacagagtcatcaccaccagcacccgaacctgggccctgcccacctacaacaaccacctctacaaacaaatttccagccaatcaggagcctcgaacgacaatcactactttggctacagcaccccttgggggtattttgacttcaacagattccactgccacttttcaccacgtgactggcaaagactcatcaacaacaactggggattccgacccaagagactcaacttcaagctctttaacattcaagtcaaagaggtcacgcagaatgacggtacgacgacgattgccaataaccttaccagcacggttcaggtgtttactgactcggagtaccagctcccgtacgtcctcggctcggcgcatcaaggatgcctcccgccgttcccagcagacgtcttcatggtgccacagtatggatacctcaccctgaacaacgggagtcaggcagtaggacgctcttcattttactgcctggagtactttccttctcagatgctgcgtaccggaaacaactttaccttcagctacacttttgaggacgttcctttccacagcagctacgctcacagccagagtctggaccgtctcatgaatcctctcatcgaccagtacctgtattacttgagcagaacaaacactccaagtggaaccaccacgcagtcaaggcttcagttttctcaggccggagcgagtgacattcgggaccagtctaggaactggcttcctggaccctgttaccgccagcagcgagtatcaaagacatctgcggataacaacaacagtgaatactcgtggactggagctaccaagtaccacctcaatggcagagactctctggtgaatccgggcccggccatggcaagccacaaggacgatgaagaaaagttttttcctcagagcggggttctcatctttgggaagcaaggctcagagaaaacaaatgtggacattgaaaaggtcatgattacagacgaagaggaaatcaggacaaccaatcccgtggctacggagcagtatggttctgtatctaccaacctccagagaggcaacagacaagcagctaccgcagatgtcaacacacaaggcgttcttccaggcatggtctggcaggacagagatgtgtaccttcaggggcccatctgggcaaagattccacacacggacggacattttcacccctctcccctcatgggtggattcggacttaaacaccctcctccacagattctcatcaagaacaccccggtacctgcgaatccttcgaccaccttcagtgcggcaaagtttgcttccttcatcacacagtactccacgggacaggtcagcgtggagatcgagtgggagctgcagaaggaaaacagcaaacgctggaatcccgaaattcagtacacttccaactacaacaagtctgttaatgtggactttactgtggacactaatggcgtgtattcagagcctcgccccattggcaccagatacctgactcgtaatctgtaa

SEQ ID NO: 11915 - DNA, 2208 bp, Artificial Sequence
  source: /note="Description of Artificial Sequence: Synthetic polynucleotide"
atggctgccgatggttatcttccagattggctcgaggacactctctctgaaggaataagacagtggtggaagctcaaacctggcccaccaccaccaaagcccgcagagcggcataaggacgacagcaggggtcttgtgcttcctgggtacaagtacctcggacccttcaacggactcgacaagggagagccggtcaacgaggcagacgccgcggccctcgagcacgacaaagcctacgaccggcagctcgacagcggagacaacccgtacctcaagtacaaccacgccgacgcggagtttcaggagcgccttaaagaagatacgtcttttgggggcaacctcggacgagcagtcttccaggcgaaaaagagggtccttgaacctctgggcctggttgaggaacctgttaagacggctccgggaaaaaagaggccggtagagcactctcctgtggagccagactcctcctcgggaaccggaaaggcgggccagcagcctgcaagaaaaagattgaattttggtcagactggagacgcagactcagtacctgacccccagcctctcggacagccaccagcagccccctctggtctgggaactaatacgatggctacaggcagtggcgcaccaatggcagacaataacgagggcgccgacggagtgggtaattcctcgggaaattggcattgcgattccacatggatgggcgacagagtcatcaccaccagcacccgaacctgggccctgcccacctacaacaaccacctctacaaacaaatttccagccaatcaggagcctcgaacgacaatcactactttggctacagcaccccttgggggtattttgacttcaacagattccactgccacttttcaccacgtgactggcaaagactcatcaacaacaactggggattccgacccaagagactcaacttcaagctctttaacattcaagtcaaagaggtcacgcagaatgacggtacgacgacgattgccaataaccttaccagcacggttcaggtgtttactgactcggagtaccagctcccgtacgtcctcggctcggcgcatcaaggatgcctcccgccgttcccagcagacgtcttcatggtgccacagtatggatacctcaccctgaacaacgggagtcaggcagtaggacgctcttcattttactgcctggagtactttccttctcagatgctgcgtaccggaaacaactttaccttcagctacacttttgaggacgttcctttccacagcagctacgctcacagccagagtctggaccgtctcatgaatcctctcatcgaccagtacctgtattacttgagcagaacaaacactccaagtggaaccaccacgcagtcaaggcttcagttttctcaggccggagcgagtgacattcgggaccagtctaggaactggcttcctggaccctgttaccgccagcagcgagtatcaaagacatctgcggataacaacaacagtgaatactcgtggactggagctaccaagtaccacctcaatggcagagactctctggtgaatccgggcccggccatggcaagccacaaggacgatgaagaaaagttttttcctcagagcggggttctcatctttgggaagcaaggctcagagaaaacaaatgtggacattgaaaaggtcatgattacagacgaagaggaaatcaggacaaccaatcccgtggctacggagcagtatggttctgtatctaccaacctccagagaggcaacagacaagcagctaccgcagatgtcaacacgcaaggcgttcttccaggcacggtctggcaggacagagatgtgtaccttcaggggcccatctgggcaaagattccacacacggacggacattttcacccctctcccctcatgggtggattcggacttaaacaccctcctccacagattctcatcaagaacaccccggtacctgcgaatccttcgaccaccttcagtgcggcaaagtttgcttccttcatcacacagtactccacgggacaggtcagcgtggagatcgagtgggagctgcagaaggaaaacagcaaacgctggaatcccgaaattcagtacacttccaactacaacaagtctgttaatgtggactttactgtggacactaatggcgtgtattcagagcctcgccccattggcaccagatacctgactcgtaatctgtaa

SEQ ID NO: 11916 - DNA, 2208 bp, Artificial Sequence
  source: /note="Description of Artificial Sequence: Synthetic polynucleotide"
atggctgccgatggttatcttccagattggctcgaggacactctctctgaaggaataagacagtggtggaagctcaaacctggcccaccaccaccaaagcccgcagagcggcataaggacgacagcaggggtcttgtgcttcctgggtacaagtacctcggacccttcaacggactcgacaagggagagccggtcaacgaggcagacgccgcggccctcgagcacgacaaagcctacaaccggcagctcgacagcggagacaacccgtacctcaagtacaaccacgccgacgcggagtttcaggagcgccttaaagaagatacgtcttttgggggcaacctcggacgagcagtcttccaggcgaaaaagagggttcttgaacctctgggcctggttgaggaacctgttaagacggctccgggaaaaaagaggccggtagagcactctcctgtggagccagactcctcctcgggaaccggaaaggcgggccagcagcctgcaagaaaaagattgaattttggtcagactggagacgcagactcagtacctgacccccagcctctcggacagccaccagcagccccctctggtctgggaactaatacgatggctacaggcagtggcgcaccaatggcagacaataacgagggcgccgacggagtgggtaattcctcgggaaattggcattgcgattccacatggatgggcgacagagtcatcaccaccagcacccgaacctgggccctgcccacctacaacaaccacctctacaaacaaatttccagccaatcaggagcctcgaacgacaatcactactttggctacagcaccccttgggggtattttgacttcaacagattccactgccacttttcaccacgtgactggcaaagactcatcaacaacaactggggattccgacccaagagactcaacttcaagctctttaacattcaagtcaaagaggtcacgcagaatgacggtacgacgacgattgccaataaccttaccagcacggttcaggtgtttactgactcggagtaccagctcccgtacgtcctcggctcggcgcatcaaggatgcctcccgccgttcccagcagacgtcttcatggtgccacagtatggatacctcaccctgaacaacgggagtcaggcagtaggacgctcttcattttactgcctggagtactttccttctcagatgctgcgtaccggaaacaactttaccttcagctacacttttgaggacgttcctttccacagcagctacgctcacagccagagtctggaccgtctcatgaatcctctcatcgaccagtacctgtattacttgagcagaacaaacactccaagtggaaccaccacgcagtcaaggcttcagttttctcaggccggagcgagtgacattcgggaccagtctaggaactggcttcctggaccctgttaccgccagcagcgagtatcaaagacatctgcggataacaacaacagtgaatactcgtggactggagctaccaagtaccacctcaatggcagggactctctggtgaatccgggcccggccatggcaagccacaaggacgatgaagaaaagttttttcctcagagcggggttctcatctttgggaagcaaggctcagagaaaacaaatgtggacattgaaaaggtcatgattacagacgaagaggaaatcaggacaaccaatcccgtggctacggagcagtatggttctgtatctaccaacctccagagaggcaacagacaagcagctaccgcagatgtcaacacacaaggcgttcttccaggcatggtctggcaggacagagatgtgtaccttcaggggcccatctgggcaaagattccacacacggacggacattttcacccctctcccctcatgggtggattcggacttaaacaccctcctccacagattctcatcaagaacaccccggtacctgcgaatccttcgaccaccttcagtgcggcaaagtttgcttccttcatcacacagtactccacgggacaggtcagcgtggagatcgagtgggagctgcagaaggaaaacagcaaacgcgggaatcccgaaattcagtacacttccaactacaacaagtctgttaatgtggactttactgtggacactaatggcgtgtattcagagcctcgccccattggcaccagatacctgactcgtaatctgtaa

SEQ ID NO: 11917 - DNA, 2208 bp, Artificial Sequence
  source: /note="Description of Artificial Sequence: Synthetic polynucleotide"
atggctgccgatggttatcttccagattggctcgaggacactctctctgaaggaataagacagtggtggaagctcaaacctggcccaccaccaccaaagcccgcagagcggcataaggacgacagcaggggtcttgtgcttcctgggtacaagtacctcggacccttcaacggactcgacaagggagagccggtcaacgaggcagacgccgcggccctcgagcacgacaaagcctacgaccggcagctcgacagcggagacaacccgtacctcaagtacaaccacgccgacgcggagtttcaggagcgccttaaagaagatacgtcttttgggggcaacctcggacgagcagtcttccaggcgaaaaagagggttcttgaacctctgggcctggttgaggaacctgttaagacggctccgggaaaaaagaggccggtagagcactctcctgtggagccagactcctcctcgggaaccggaaaggcgggccagcagcctgcaagaaaaagattgaattttggtcagactggagacgcagactcagtacctgacccccagcctctcggacagccaccagcagccccctctggtctgggaactaatacgatggctacaggcagtggcgcaccaatggcagacaataacgagggcgccgacggagtgggtaattcctcgggaaattggcattgcgattccacatggatgggcgacagagtcatcaccaccagcacccgaacctgggccctgcccacctacaacaaccacctctacaaacaaatttccagccaatcaggagcctcgaacgacaatcactactttggctacagcaccccttgggggtattttgacttcaacagattccactgccacttttcaccacgtgactggcaaagactcatcaacaacaactggggattccgacccaagagactcaacttcaagctctttaacattcaagtcaaagaggtcacgcagaatgacggtacgacgacgattgccaataaccttaccagcacggttcaggtgtttactgactcggagtaccagctcccgtacgtcctcggctcggcgcatcaaggatgcctcccgccgttcccagcagacgtcttcatggtgccacagtatggatacctcaccctgaacaacgggagtcaggcagtaggacgctcttcattttactgcctggagtactttccttctcagatgctgcgtaccggaaacaactttaccttcagctacacttttgaggacgttcctttccacagcagctacgctcacagccagagtctggaccgtctcatgaatcctctcatcgaccagtacctgtattacttgagcagaacaaacactccaagtggaaccaccacgcagtcaaggcttcagttttctcaggccggagcgagtgacattcgggaccagtctaggaactggcttcctggaccctgttaccgccagcagcgagtatcaaagacatctgcggataacaacaacagtgaatacccgtggactggagctaccaagtaccacctcaatggcagagactctctggtgaatccgggcccggccatggcaagccacaaggacgatgaagaaaagttttttcctcagagcggggttctcatctttgggaagcaaggctcagagaaaacaaatgtggacattgaaaaggtcatgattacagacgaagaggaaatcaggacaaccaatcccgtggctacggagcagtatggttctgtatctaccaacctccagagaggcaacagacaagcagctaccgcagatgtcaacacacaaggcgttcttccaggcacggtctggcaggacagagatgtgtaccttcaggggcccatctgggcaaagattccacacacggacggacattttcacccctctcccctcatgggtggattcggacttaaacaccctcctccacagattctcatcaagaacaccccggtacctgcgaatccttcgaccaccttcagtgcggcaaagtttgcttccttcatcacacagtactccacgggacaggtcagcgtggagatcgagtgggagctgcagaaggaaaacagcaaacgctggaatcccgaaattcagtacacttccaactacaacaagtctgttaatgtggactttactgtggacactaatggcgtgtattcagagcctcgccccattggcaccagatacctgactcgtaatctgtaa

SEQ ID NO: 11918 - DNA, 2208 bp, Artificial Sequence
  source: /note="Description of Artificial Sequence: Synthetic polynucleotide"
atggctgccgatggttatcttccagattggctcgaggacactctctctgaaggaataagacagtggtggaagctcaaacctggcccaccaccaccaaagcccgcagagcggcataaggacgacagcaggggtcttgtgcttcctgggtacaagtacctcggacccttcaacggactcgacaagggagagccggtcaacgaggcagacgccgcggccctcgagcacgacaaagcctacgaccggcagctcgacagcggagacaacccgtacctcaagtacaaccacgccgacgcggagtttcaggagcgccttaaagaagatacgtcttttgggggcaacctcggacgagcagtcttccaggcgaaaaagagggttcttgaacctctgggcctggttgaggaacctgttaagacggctccgggaaaaaagaggccggtagagcactctcctgtggagccagactcctcctcgggaaccggaaaggcgggccagcagcctgcaagaaaaagattgaattttggtcagactggagacgcagactcagtacctgacccccagcctctcggacagccaccagcagccccctctggtctgggaactaatacgatggctacaggcagtggcgcaccaatggcagacaataacgagggcgccgacggagtgggtaattcctcgggaaattggcattgcgattccacatggatgggcgacagagtcatcaccaccagcacccgaacctgggccctgcccacctacaacaaccacctctacaaacaaatttccagccaatcaggagcctcgaacgacaatcactactttggctacagcaccccttgggggtattttgacttcaacagattccactgccacttttcaccacgtgactggcaaagactcatcaacaacaactggggattccgacccaagagactcaacttcaagctctttaacattcaagtcaaagaggtcacgcagaatgacggtacgacgacgattgccaataaccttaccagcacggttcaggtgtttactgactcggagtaccagctcccgtacgtcctcggctcggcgcatcaaggatgcctcccgccgttcccagcagacgtcttcatggtgccacagtatggatacctcaccctgaacaacgggagtcaggcagtaggacgctcttcattttactgcctggagtactttccttctcagatgctgcgtaccggaaacaactttaccttcagctacacttttgaggacgttcctttccacagcagctacgctcacagccagagtctggaccgtctcatgaatcctctcatcgaccagtacctgtattacttgagcagaacaaacactccaagtggaaccaccacgcagtcaaggcttcagttttctcaggccggagcgagtgacattcgggaccagtctaggaactggcttcctggaccctgttaccgccagcagcgagtatcaaagacatctgcggataacaacaacagtgaatactcgtggactggagctaccaagtaccacctcaatggcagagactctctggtgaatccgggcccggccatggcaagccacaaggacgatgaagaaaagttttttcctcagagcggggttctcatctttgggaagcaaggctcagagaaaacaaatgtgggcattgaaaaggtcatgattacagacgaagaggaaatcaggacaaccaatcccgtggctacggagcagtatggttctgtatctaccaacctccagagaggcaacagacaagcagctaccgcagatgtcaacacacaaggcgttcttccaggcacggtctggcaggacagagatgtgtaccttcaggggcccatctgggcaaagattccacacacggacggacattttcacccctctcccctcatgggtggattcggacttaaacaccctcctccacagattctcatcaagaacaccccggtacctgcgaatccttcgaccaccttcagtgcggcaaagtttgcttccttcatcacacagtactccacgggacaggtcagcgtggagatcgagtgggagctgcagaaggaaaacagcaaacgctggaatcccgaaattcagtacacttccaactacaacaagtctgttaatgtggactttactgtggacactaatggcgtgtattcagagcctcgccccattggcaccagatacctgactcgtaatctgtaa

SEQ ID NO: 11919 - DNA, 2208 bp, Artificial Sequence
  source: /note="Description of Artificial Sequence: Synthetic polynucleotide"
atggctgccgatggttatcttccagattggctcgaggacactctctctgaaggaataagacagtggtggaagctcaaacctggcccaccaccaccaaagcccgcagggcggcataaggacgacagcaggggtcttgtgcttcctgggtacaagtacctcggacccttcaacggactcgacaagggagagccggtcaacgaggcagacgccgcggccctcgagcacgacaaagcctacgaccggcagctcgacagcggagacaacccgtacctcaagtacaaccacgccgacgcggagtttcaggagcgccttaaagaagatacgtcttttgggggcaacctcggacgagcagtcttccaggcgaaaaagagggctcttgaacctctgggcctggttgaggaacctgttaagacggctccgggaaaaaagaggccggtagagcactctcctgtggagccagactcctcctcgggaaccggaaaggcgggccagcagcctgcaagaaaaagattgaattttggtcagactggagacgcagactcagtacctgacccccagcctctcggacagccaccagcagccccctctggtctgggaactaatacgatggctacaggcagtggcgcaccaatggcagacaataacgagggcgccgacggagtgggtaattcctcgggaaattggcattgcgattccacatggatgggcgacagagtcatcaccaccagcacccgaacctgggccctgcccacctacaacaaccacctctacaaacaaatttccagccaatcaggagcctcgaacgacaatcactactttggctacagcaccccttgggggtattttgacttcaacagattccactgccacttttcaccacgtgactggcaaagactcatcaacaacaactggggattccgacccaagagactcaacttcaagctctttaacattcaagtcaaagaggtcacgcagaatgacggtacgacgacgattgccaataaccttaccagcacggttcaggtgtttactgactcggagtaccagctcccgtacgtcctcggctcggcgcatcaaggatgcctcccgccgttcccagcagacgtcttcatggtgccacagtatggatacctcaccctgaacaacgggagtcaggcagtaggacgctcttcattttactgcctggagtactttccttctcagatgctgcgtaccggaaacaactttaccttcagctacacttttgaggacgttcctttccacagcagctacgctcacagccagagtctggaccgtctcatgaatcctctcatcgaccagtacctgtattacttgagcagaacaaacactccaagtggaaccaccacgcagtcaaggcttcagttttctcaggccggagcgagtgacattcgggaccagtctaggaactggcttcctggaccctgttaccgccagcagcgagtatcaaagacatctgcggataacaacaacagtgaatactcgtggactggagctaccaagtaccacctcaatggcagagactctctggtgaatccgggcccggccatggcaagccacaaggacgatgaagaaaagttttttcctcagagcggggttctcatctttgggaagcaaggctcagagaaaacaaatgtggacattgaaaaggtcatgattacagacgaagaggaaatcaggacaaccaatcccgtggctacggagcagtatggttctgtatctaccaacctccagagaggcaacagacaagcagctaccgcagatgtcaacacacaaggcgttcttccaggcatggtctggcaggacagagatgtgtaccttcaggggcccatctgggcaaagattccacacacggacggacattttcacccctctcccctcatgggtggattcggacttaaacaccctcctccacagattctcatcaagaacaccccggtacctgcgaatccttcgaccaccttcagtgcggcaaagtttgcttccttcatcacacagtactccacgggacaggtcagcgtggagatcgagtgggagctgcagaaggaaaacagcaaacgctggaatcccgaaattcagtacacttccaactacaacaagtctgttaatgtggactttactgtggacactaatggcgtgtattcagagcctcgccccattggcaccagatacctgactcgtaatctgtaa

SEQ ID NO: 11920 - DNA, 2208 bp, Artificial Sequence
  source: /note="Description of Artificial Sequence: Synthetic polynucleotide"
atggctgccgatggttatcttccagattggctcgaggacactctctctgaaggaataagacagtggtggaagctcaaacctggcccaccaccaccaaagcccgcagagcggcataaggacgacagcaggggtcttgtgcttcctgggtacaagtacctcggacccttcaacggactcgacaagggagagccggtcaacgaggcagacgccgcggccctcgagcacgacaaagcctacgaccggcagctcgacagcggagacaacccgtacctcaagtacaaccacgccgacgcggagtttcaggagcgccttaaagaagatacgtcttttgggggcaacctcggacgagcagtcttccaggcgaaaaagagggttcttgaacctctgggcctggttgaggaacctgttaagacggctccgggaaaaaagaggccggtagagcactctcctgtggagccagactcctcctcgggaaccggaaaggcgggccagcagcctgcaagaaaaagattgaattttggtcagactggagacgcagactcagtacctgacccccagcctctcggacagccaccagcagccccctctggtctgggaactaatacgatggctacaggcagtggcgcaccaatggcagacaataacgagggcgccgacggagtgggtaattcctcgggaaattggcattgcgattccacatggatgggcgacagagtcatcaccaccagcacccgaacctgggccctgcccacctacaacaaccacctctacaaacaaatttccagccaatcaggagcctcgaacgacaatcactactttggctacagcaccccttgggggtattttgacttcaacagattccactgccacttttcaccacgtgactggcaaagactcatcaacaacaactggggattccgacccaagagactcaacttcaagctctttaacattcaagtcaaagaggtcacgcagaatgacggtacgacgacgattgccaataaccttaccagcacggttcaggtgtttactgactcggagtaccagctcccgtacgtcctcggctcggcgcatcaaggatgcctcccgccgttcccagcagacgtcttcatggtgccacagtatggatacctcaccctgaacaacgggagtcaggcagtaggacgctcttcattttactgcctggagtactttccttctcagatgctgcgtaccggaaacaactttaccttcagctacacttttgaggacgttcctttccacagcagctacgctcacagccagagtctggaccgtctcatgaatcctctcatcgaccagtacctgtattacttgagcagaacaaacactccaagtggaaccaccacgcagtcaaggcctcagttttctcaggccggagcgagtgacattcgggaccagtctaggaactggcttcctggaccctgttaccgccagcagcgagtatcaaagacatctgcggataacaacaacagtgaatactcgtggactggagctaccaagtaccacctcaatggcagagactctctggtgaatccgggcccggccatggcaagccacaaggacgatgaagaaaagttttttcctcagagcggggttctcatctttgggaagcaaggctcagagaaaacaaatgtggacattgaaaaggtcatgattacagacgaagaggaaatcaggacaaccaatcccgtggctacggagcagtatggttctgtatctaccaacctccagagaggcaacagacaagcagctaccgcagatgtcaacacacaaggcgttcttccaggcacggtctggcaggacagagatgtgtaccttcaggggcccatctgggcaaagattccacacacggacggacattttcacccctctcccctcatgggtggattcggacttaaacaccctcctccacagattctcatcaagaacaccccggtacctgcgaatccttcgaccaccttcagtgcggcaaagtttgcttccttcatcacacagtactccacgggacaggtcagcgtggagatcgagtgggagctgcagaaggaaaacagcaaacgctggaatcccgaaattcagtacacttccaactacaacaagtctgttaatgtggactttactgtggacactaatggcgtgtattcagagcctcgccccattggcaccagatacctgactcgtaatctgtaa

SEQ ID NO: 11921 - DNA, 2208 bp, Artificial Sequence; identical to SEQ ID NO: 21
  source: /note="Description of Artificial Sequence: Synthetic polynucleotide"

SEQ ID NO: 11922 - DNA, 2208 bp, Artificial Sequence
  source: /note="Description of Artificial Sequence: Synthetic polynucleotide"
atggctgccgatggttatcttccagattggctcgaggacactctctctgaaggaataagacagtggtggaagctcaaacctggcccaccaccaccaaagcccgcagagcggcataaggacgacagcaggggtcttgtgcttcctgggtacaagtacctcggacccttcaacggactcgacaagggagagccggtcaacgaggcagacgccgcggccctcgagcacgacaaagcctacaaccggcaactcgacagcggagacaacccgtacctcaagtacaaccacgccgacgcggagtttcaggagcgccttaaagaagatacgtcttttgggggcaacctcggacgagcagtcttccaggcgaaaaagagggttcttgaacctctgggcctggttgaggaacctgttaagacggctccgggaaaaaagaggccggtagagcactctcctgtggagccagactcctcctcgggaaccggaaaggcgggccagcagcctgcaagaaaaagattgaattttggtcagactggagacgcagactcagtacctgacccccagcctctcggacagccaccagcagccccctctggtctgggaactaatacgatggctacaggcagtggcgcaccaatggcagacaataacgagggcgccgacggagtgggtaattcctcgggaaattggcattgcgattccacatggatgggcgacagagtcatcaccaccagcacccgaacctgggccctgcccacctacaacaaccacctctacaaacaaatttccagccaatcaggagcctcgaacgacaatcactactttggctacagcaccccttgggggtattttgacttcaacagattccactgccacttttcaccacgtgactggcaaagactcatcaacaacaactggggattccgacccaagagactcaacttcaagctctttaacattcaagtcaaagaggtcacgcagaatgacggtacgacgacgattgccaataaccttaccagcacggttcaggtgtttactgactcggagtaccagctcccgtacgtcctcggctcggcgcatcaaggatgcctcccgccgttcccagcagacgtcttcatggtgccacagtatggatacctcaccctgaacaacgggagtcaggcagtaggacgctcttcattttactgcctggagtactttccttctcagatgctgcgtaccggaaacaactttaccttcagctacacttttgaggacgttcctttccacagcagctacgctcacagccagagtctggaccgtctcatgaatcctctcatcgaccagtacctgtattacttgagcagaacaaacactccaagtggaaccaccacgcagtcaaggcttcagttttctcaggccggagcgagtgacattcgggaccagtctaggaactggcttcctggaccctgttaccgccagcagcgagtatcaaagacatctgcggataacaacaacagtgaatactcgtggactggagctaccaagtaccacctcaatggcagggactctctggtgaatccgggcccggccatggcaagccacaaggacgatgaagaaaagttttttcctcagagcggggttctcatctttgggaagcaaggctcagagaaaacaaatgtggacattgaaaaggtcatgattacagacgaagaggaaatcaggacaaccaatcccgtggctacggagcagtatggttctgtatctaccaacctccagagaggcaacagacaagcagctaccgcagatgtcaacacacaaggcgttcttccaggcatggtctggcaggacagagatgtgtaccttcaggggcccatctgggcaaagattccacacacggacggacattttcacccctctcccctcatgggtggattcggacttaaacaccctcctccacagattctcatcaagaacaccccggtacctgcgaatccttcgaccaccttcagtgcggcaaagtttgcttccttcatcacacagtactccacgggacaggtcagcgtggagatcgagtgggagctgcagaaggaaaacagcaaacgctggaatcccgaaattcagtacacttccaactacaacaagtctgttaatgtggactttactgtggacactaatggcgtgtattcagagcctcgccccattggcaccagatacctgactcgtaatctgtaa

SEQ ID NO: 11923 - DNA, 2208 bp, Artificial Sequence
  source: /note="Description of Artificial Sequence: Synthetic polynucleotide"
atggctgccgatggttatcttccagattggctcgaggacactctctctgaaggaataagacagtggtggaagctcaaacctggcccaccaccaccaaagcccgcagagcggcataaggacgacagcaggggtcttgtgcttcctgggtacaagtacctcggacccttcaacggactcgacaagggagagccggtcaacgaggcagacgccgcggccctcgagcacgacaaagcctacgaccggcagctcgacagcggagacaacccgtacctcaagtacaaccacgccgacgcggagtttcaggagcgccttaaagaagatacgtcttttgggggcaacctcggacgagcagtcttccaggcgaaaaagagggttcttgaacctctgggcctggttgaggaacctgttaagacggctccgggaaaaaagaggccggtagagcactctcctgtggagccagactcctcctcgggaaccggaaaggcgggccagcagcctgcaagaaaaagattgaattttggtcagactggagacgcagactcagtacctgacccccagcctctcggacagccaccagcagccccctctggtctgggaactaatacgatggctacaggcagtggcgcaccaatggcagacaataacgagggcgccgacggagtgggtaattcctcgggaaattggcattgcgattccacatggatgggcgacagagtcatcaccaccagcacccgaacctgggccctgcccacctacaacaaccacctctacaaacaaatttccagccaatcaggagcctcgaacgacaatcactactttggctacagcaccccttgggggtattttgacttcaacagattccactgccacttttcaccacgtgactggcaaagactcatcaacaacaactggggattccgacccaagagactcaacttcaagctctttaacattcaagtcaaagaggtcacgcagaatgacggtacgacgacgattgccaataaccttaccagcacggttcgggtgtttactgactcggagtaccagctcccgtacgtcctcggctcggcgcatcaaggatgcctcccgccgttcccagcagacgtcttcatggtgccacagtatggatacctcaccctgaacaacgggagtcaggcagtaggacgctcttcattttactgcctggagtactttccttctcagatgctgcgtaccggaaacaactttaccttcagctacacttttgaggacgttcctttccacagcagctacgctcacagccagagtctggaccgtctcatgaatcctctcatcgaccagtacctgtattacttgagcagaacaaacactccaagtggaaccaccacgcagtcaaggcttcagttttctcaggccggagcgagtgacattcgggaccagtctaggaactggcttcctggaccctgttaccgccagcagcgagtatcaaagacatctgcggataacaacaacagtgaatactcgtggactggagctaccaagtaccacctcaatggcagagactctctggtgaatccgggcccggccatggcaagccacaaggacgatgaagaaaagttttttcctcagagcggggttctcatctttgggaagcaaggctcagagaaaacaaatgtggacattgaaaaggtcatgattacagacgaagaggaaatcaggacaaccaatcccgtggctacggagcagtatggttctgtatctaccaacctccagagaggcaacagacaagcagctaccgcagatgtcaacacacaaggcgttcttccaggcacggtctggcaggacagagatgtgtaccttcaggggcccatctgggcaaagattccacacacggacggacattttcacccctctcccctcatgggtggattcggacttaaacaccctcctccacagattctcatcaagaacaccccggtacctgcgaatccttcgaccaccttcagtgcggcaaagtttgcttccttcatcacacagtactccacgggacaggtcagcgtggagatcgagtgggagctgcagaaggaaaacagcaaacgctggaatcccgaaattcagtacacttccaactacaacaagtctgttaatgtggactttactgtggacactaatggcgtgtattcagagcctcgccccattggcaccagatacctgactcgtaatctgtaa

SEQ ID NO: 11924 - DNA, 2208 bp, Artificial Sequence
  source: /note="Description of Artificial Sequence: Synthetic polynucleotide"
atggctgccgatggttatcttccagattggctcgaggacactctctctgaaggaataagacagtggtggaagctcaaacctggcccaccaccaccaaagcccgcagagcggcataaggacgacagcaggggtcttgtgcttcctgggtacaagtacctcggacccttcaacggactcgacaagggagagccggtcaacgaggcagacgccgcggccctcgagcacgacaaagcctacgaccggcagctcgacagcggagacaacccgtacctcaagtacaaccacgccgacgcggagtttcaggagcgccttaaagaagatacgtcttttgggggcaacctcggacgagcagtcttccaggcgaaaaagagggttcttgaacctctgggcctggttgaggaacctgttaagacggctccgggaaaaaagaggccggtagagcactctcctgtggagccagactcctcctcgggaaccggaaaggcgggccagcagcctgcaagaaaaagattgaattttggtcagactggagacgcagactcagtacctgacccccagcctctcggacagccaccagcagccccctctggtctgggaactaatacgatggctacaggcagtggcgcaccaatggcagacaataacgagggcgccgacggagtgggtaattcctcgggaaattggcattgcgattccacatggatgggcgacagagtcatcaccaccagcacccgaacctgggccctgcccacctacaacaaccacctctacaaacaaatttccagccaatcaggagcctcgaacgacaatcactactttggctacagcaccccttgggggtattttgacttcaacagattccactgccacttttcaccacgtgactggcaaagactcatcaacaacaactggggattccgacccaagagactcaacttcaagctctttaacattcaagtcaaagaggtcacgcagaatgacggtacgacgacgattgccaataaccttaccagcacggttcaggtgtttactgactcggagtaccagctcccgtacgtcctcggctcggcgcatcaaggatgcctcccgccgttcccagcagacgtcttcatggtgccacagtatggatacctcaccctgaacaacgggagtcaggcagtaggacgctcttcattttactgcctggagtactttccttctcagatgctgcgtaccggaaacaactttaccttcagctacacttttgaggacgctcctttccacagcagctacgctcacagccagagtctggaccgtctcatgaatcctctcatcgaccagtacctgtattacttgagcagaacaaacactccaagtggaaccaccacgcagtcaaggcttcagttttctcaggccggagcgagtgacattcgggaccagtctaggaactggcttcctggaccctgttaccgccagcagcgagtatcaaagacatctgcggataacaacaacagtgaatactcgtggactggagctaccaagtaccacctcaatggcagagactctctggtgaatccgggcccggccatggcaagccacaaggacgatgaagaaaagttttttcctcagagcggggttctcatctttgggaagcaaggctcagagaaaacaaatgtggacattgaaaaggtcatgattacagacgaagaggaaatcaggacaaccaatcccgtggctacggagcagtatggttctgtatctaccaacctccagagaggcaacagacaagcagctaccgcagatgtcaacacacaaggcgttcttccaggcacggtctggcaggacagagatgtgtaccttcaggggcccatctgggcaaagattccacacacggacggacattttcacccctctcccctcatgggtggattcggacttaaacaccctcctccacagattctcatcaagaacaccccggtacctgcgaatccttcgaccaccttcagtgcggcaaagtttgcttccttcatcacacagtactccacgggacaggtcagcgtggagatcgagtgggagctgcagaaggaaaacagcaaacgctggaatcccgaaattcagtacacttccaactacaacaagtctgttaatgtggactttactgtggacactaatggcgtgtattcagagcctcgccccattggcaccagatacctgactcgtaatctgtaa

SEQ ID NO: 11925 - DNA, 2205 bp, Artificial Sequence
  source: /note="Description of Artificial Sequence: Synthetic polynucleotide"
atggctgccgatggttatcttccagattggctcgaggacactctctctgaaggaataagacagtggtggaagctcaaacctggcccaccaccaaagcccgcagagcggcataaggacgacagcaggggtcttgtgcttcctgggtacaagtacctcggacccttcaacggactcgacaagggagagccggtcaacgaggcagacgccgcggccctcgagcacgacaaagcctacgaccggcagctcgacagcggagacaacccgtacctcaagtacaaccacgccgacgcggagtttcaggagcgccttaaagaagatacgtcttttgggggcaacctcggacgagcagtcttccaggcgaaaaagagggttcttgaacctctgggcctggttgaggaacctgttaagacggctccgggaaaaaagaggccggtagagcactctcctgtggagccagactcctcctcgggaaccggaaaggcgggccagcagcctgcaagaaaaagattgaattttggtcagactggagacgcagactcagtacctgacccccagcctctcggacagccaccagcagccccctctggtctgggaactaatacgatggctacaggcagtggcgcaccaatggcagacaataacgagggcgccgacggagtgggtaattcctcgggaaattggcattgcgattccacatggatgggcgacagagtcatcaccaccagcacccgaacctgggccctgcccacctacaacaaccacctctacaaacaaatttccagccaatcaggagcctcgaacgacaatcactactttggctacagcaccccttgggggtattttgacttcaacagattccactgccacttttcaccacgtgactggcaaagactcatcaacaacaactggggattccgacccaagagactcaacttcaagctctttaacattcaagtcaaagaggtcacgcagaatgacggtacgacgacgattgccaataaccttaccagcacggttcaggtgtttactgactcggagtaccagctcccgtacgtcctcggctcggcgcatcaaggatgcctcccgccgttcccagcagacgtcttcatggtgccacagtatggatacctcaccctgaacaacgggagtcaggcagtaggacgctcttcattttactgcctggagtactttccttctcagatgctgcgtaccggaaacaactttaccttcagctacacttttgaggacgttcctttccacagcagctacgctcacagccagagtctggaccgtctcatgaatcctctcatcgaccagtacctgtattacttgagcagaacaaacactccaagtggaaccaccacgcagtcaaggcttcagttttctcaggccggagcgagtgacattcgggaccagtctaggaactggcttcctggaccctgttaccgccagcagcgagtatcaaagacatctgcggataacaacaacagtgaatactcgtggactggagctaccaagtaccacctcaatggcagagactctctggtgaatccgggcccggccatggcaagccacaaggacgatgaagaaaagttttttcctcagagcggggttctcatctttgggaagcaaggctcagagaaaacaaatgtggacattgaaaaggtcatgattacagacgaagaggaaatcaggacaaccaatcccgtggctacggagcagtatggttctgtatctaccaacctccagagaggcaacagacaagcagctaccgcagatgtcaacacacaaggcgttcttccaggcacggtctggcaggacagagatgtgtaccttcaggggcccatctgggcaaagattccacacacggacggacattttcacccctctcccctcatgggtggattcggacttaaacaccctcctccacagattctcatcaagaacaccccggtacctgcgaatccttcgaccaccttcagtgcggcaaagtttgcttccttcatcacacagtactccacgggacaggtcagcgtggagatcgagtgggagctgcagaaggaaaacagcaaacgctggaatcccgaaattcagtacacttccaactacaacaagtctgttaatgtggactttactgtggacactaatggcgtgtattcagagcctcgccccattggcaccagatacctgactcgtaatctgtaa

SEQ ID NO: 11926 - DNA, 2208 bp, Artificial Sequence
  source: /note="Description of Artificial Sequence: Synthetic polynucleotide"
atggctgccgatggttatcttccagattggctcgaggacactctctctgaaggaataagacagtggtggaagctcaaacctggcccaccaccaccaaagcccgcagagcggcataaggacgacagcaggggtcttgtgcttcctgggtacaagtacctcggacccttcaacggactcgacaagggagagccggtcaacgaggcagacgccgcggccctcgagcacgacaaagcctacgaccggcagctcgacagcggagacaacccgtacctcaagtacaaccacgccgacgcggagtttcaggagcgccttaaagaagatacgtcttttgggggcaacctcggacgagcagtcttccaggcgaaaaagagggctcttgaacctctgggcctggttgaggaacctgttaagacggctccgggaaaaaagaggccggtagagcactctcctgtggagccagactcctcctcgggaaccggaaaggcgggccagcagcctgcaagaaaaagattgaattttggtcagactggagacgcagactcagtacctgacccccagcctctcggacagccaccagcagccccctctggtctgggaactaatacgatggctacaggcagtggcgcaccaatggcagacaataacgagggcgccgacggagtgggtaattcctcgggaaattggcattgcgattccacatggatgggcgacagagtcatcaccaccagcacccgaacctgggccctgcccacctacaacaaccacctctacaaacaaatttccagccaatcaggagcctcgaacgacaatcactactttggctacagcaccccttgggggtattttgacttcaacagattccactgccacttttcaccacgtgactggcaaagactcatcaacaacaactggggattccgacccaagagactcaacttcaagctctttaacattcaagtcaaagaggtcacgcagaatgacggtacgacgacgattgccaataaccttaccagcacggttcaggtgtttactgactcggagtaccagctcccgtacgtcctcggctcggcgcatcaaggatgcctcccgccgttcccagcagacgtcttcatggtgccacagtatggatacctcaccctgaacaacgggagtcaggcagtaggacgctcttcattttactgcctggagtactttccttctcagatgctgcgtaccggaaacaactttaccttcagctacacttttgaggacgttcctttccacagcagctacgctcacagccagagtctggaccgtctcatgaatcctctcatcgaccagtacctgtattacttgagcagaacaaacactccaagtggaaccaccacgcagtcaaggcttcggttttctcaggccggagcgagtgacattcgggaccagtctaggaactggcttcctggaccctgttaccgccagcagcgagtatcaaagacatctgcggataacaacaacagtgaatactcgtggactggagctaccaagtaccacctcaatggcagagactctctggtgaatccgggcccggccatggcaagccacaaggacgatgaagaaaagttttttcctcagagcggggttctcatctttgggaagcaaggctcagagaaaacaaatgtggacattgaaaaggtcatgattacagacgaagaggaaatcaggacaaccaatcccgtggctacggagcagtatggttctgtatctaccaacctccagagaggcaacagacaagcagctaccgcagatgtcaacacacaaggcgttcttccaggcatggtctggcaggacagagatgtgtaccttcaggggcccatctgggcaaagattccacacacggacggacattttcacccctctcccctcatgggtggattcggacttaaacaccctcctccacagattctcatcaagaacaccccggtacctgcgaatccttcgaccaccttcagtgcggcaaagtttgcttccttcatcacacagtactccacgggacaggtcagcgtggagatcgagtgggagctgcagaaggaaaacagcaaacgctggaatcccgaaattcagtacacttccaactacaacaagtctgttaatgtggactttactgtggacactaatggcgtgtattcagagcctcgccccattggcaccagatacctgactcgtaatctgtaa

SEQ ID NO: 11927 - DNA, 2208 bp, Artificial Sequence
  source: /note="Description of Artificial Sequence: Synthetic polynucleotide"
atggctgccgatggttatcttccagattggctcgaggacactctctctgaaggaataagacagtggtggaagctcaaacctggcccaccaccaccaaagcccgcagagcggcataaggacgacagcaggggtcttgtgcttcctgggtacaagtacctcggacccttcaacggactcgacaagggagagccggtcaacgaggcagacgccgcggccctcgagcacgacaaagcctacgaccggcagctcgacagcggagacaacccgtacctcaagtacaaccacgccgacgcggagtttcaggagcgccttaaagaagatacgtcttttgggggcaacctcggacgagcagtcttccaggcgaaaaagagggttcttgaacctctgggcctggttgaggaacctgttaagacggctccgggaaaaaagaggccggtagagcactctcctgtggagccagactcctcctcgggaaccggaaaggcgggccagcggcctgcaagaaaaagattgaattttggtcagactggagacgcagactcagtacctgacccccagcctctcggacagccaccagcagccccctctggtctgggaactaatacgatggctacaggcagtggcgcaccaatggcagacaataacgagggcgccgacggagtgggtaattcctcgggaaattggcattgcgattccacatggatgggcgacagagtcatcaccaccagcacccgaacctgggccctgcccacctacaacaaccacctctacaaacaaatttccagccaatcaggagcctcgaacgacaatcactactttggctacagcaccccttgggggtattttgacttcaacagattccactgccacttttcaccacgtgactggcaaagactcatcaacaacaactggggattccgacccaagagactcaacttcaagctctttaacattcaagtcaaagaggtcacgcagaatgacggtacgacgacgattgccaataaccttaccagcacggttcaggtgtttactgactcggagtaccagctcccgtacgtcctcggctcggcgcatcaaggatgcctcccgccgttcccagcagacgtcttcatggtgccacagtatggatacctcaccctgaacaacgggagtcaggcagtaggacgctcttcattttactgcctggagtactttccttctcagatgctgcgtaccggaaacaactttaccttcagctacacttttgaggacgttcctttccacagcagctacgctcacagccagagtctggaccgtctcatgaatcctctcatcgaccagtacctgtattacttgagcagaacaaacactccaagtggaaccaccacgcagtcaaggcttcagttttctcaggccggagcgagtgacattcgggaccagtctaggaactggcttcctggaccctgttaccgccagcagcgagtatcaaagacatctgcggataacaacaacagtgaatactcgtggactggagctaccaagtaccacctcaatggcagagactctctggtgaatccgggcccggccatggcaagccacaaggacgatgaagaaaagttttttcctcagagcggggttctcatctttgggaagcaaggctcagagaaaacaaatgtggacattgaaaaggtcatgattacagacgaagaggaaatcaggacaaccaatcccgtggctacggagcagtatggttctgtatctaccaacctccagagaggcaacagacaagcagctaccgcagatgtcaacacacaaggcgttcttccaggcacggtctggcaggacagagatgtgtaccttcaggggcccatctgggcaaagattccacacacggacggacattttcacccctctcccctcatgggtggattcggacttaaacaccctcctccacagattctcatcaagaacaccccggtacctgcgaatccttcgaccaccttcagtgcggcaaagtttgcttccttcatcacacagtactccacgggacaggtcagcgtggagatcgagtgggagctgcagaaggaaaacagcaaacgctggaatcccgaaattcagtacacttccaactacaacaagtctgttaatgtggactttactgtggacactaatggcgtgtattcagagcctcgccccattggcaccagatacctgactcgtaatctgtaa

SEQ ID NO: 11928 - DNA, 2208 bp, Artificial Sequence
  source: /note="Description of Artificial Sequence: Synthetic polynucleotide"
atggctgccgatggttatcttccagattggctcgaggacactctctctgaaggaataagacagtggtggaagctcaaacctggcccaccaccaccaaagcccgcagagcggcataaggacgacagcaggggtcttgtgcttcctgggtacaagtacctcggacccttcaacggactcgacaagggagagccggtcaacgaggcagacgccgcggccctcgagcacgacaaagcctacgaccggcagctcgacagcggagacaacccgtacctcaagtacaaccacgccgacgcggagtttcaggagcgccttaaagaagatacgtcttttgggggcaacctcggacgagcagtcttccaggcgaaaaagagggttcttgaacctctgggcctggttgaggaacctgttaagacggctccgggaaaaaagaggccggtagagcactctcctgtggagccagactcctcctcgggaaccggaaaggcgggccagcagcctgcaagaaaaagattgaattttggtcagactggagacgcagactcagtacctgacccccagcctctcggacagccaccagcagccccctctggtctgggaactaatacgatggctacaggcagtggcgcaccaatggcagacaataacgagggcgccgacggagtgggtaattcctcgggaaattggcattgcgattccacatggatgggcgacagagtcatcaccaccagcacccgaacctgggccctgcccacctacaacaaccacctctacaaacaaatttccagccaatcaggagcctcgaacgacaatcactactttggctacagcaccccttgggggtattttgacttcaacagattccactgccacttttcaccacgtgactggcaaagactcatcaacaacaactggggattccgacccaagagactcaacttcaagctctttaacattcaagtcaaagaggtcacgcagaatgacggtacgacgacgattgccaataaccttaccagcacggttcaggtgtttactgactcggagtaccagctcccgtacgtcctcggctcggcgcatcaaggatgcctcccgccgttcccagcagacgtcttcatggtgccacagtatggatacctcaccctgaacaacgggagtcaggcagtaggacgctcttcattttactgcctggagtactttccttctcagatgctgcgtaccggaaacaactttaccttcagctacacttttgaggacgttcctttccacagcagctacgctcacagccagagtctggaccgtctcatgaatcctctcatcgaccagtacctgtattacttgagcagaacaaacactccaagtggaaccaccacgcagtcaaggcttcagttttctcaggccggagcgagtgacattcgggaccagtctaggaactggcttcctggaccctgttaccgccagcagcgagtatcaaagacatctgcggataacaacaacagtgaatactcgtggactggagctaccaagtaccacctcaatggcagagactctctggtgaatccgggcccggccatggcaagccacaaggacgatgaagaaaagttttttcctcagagcggggttctcatctttgggaagcaaggctcagagaaaacaaatgtggacattgaaaaggtcatgattacagacgaagaggaaatcaggacaaccaatcccgtggctacggagcagtatggttctgtatctaccaacctccagagaggcaacagacaagcagctaccgcagatgtcaacacacaaggcgttcttccaggcatggtctggcaggacagagatgtgtaccttcaggggcccatctgggcaaagattccacacacggacggacattttcacccctctcccctcatgggtggattcggacttaaacaccctcctccacagattctcatcaagaacaccccggtacctgcgaatccttcgaccaccttcagtgcggcaaagtttgcttccttcatcacacagtactccacgggacaggtcagcgtggagatcgagtgggagctgcagaaggaaaacagcaaccgctggaatcccgaaattcagtacacttccaactacaacaagtctgttaatgtggactttactgtggacactaatggcgtgtattcagagcctcgccccattggcaccagatacctgactcgtaatctgtaa

SEQ ID NO: 11929 - DNA, 2208 bp, Artificial Sequence
  source: /note="Description of Artificial Sequence: Synthetic polynucleotide"
atggctgccgatggttatcttccagattggctcgaggacactctctctgaaggaataagacagtggtggaagctcaaacctggcccaccaccaccaaagcccgcagagcggcataaggacgacagcaggggtcttgtgcttcctgggtacaagtacctcggacccttcaacggactcgacaagggagagccggtcaacgaggcagacgccgcggccctcgagcacgacaaagcctacgaccggcagctcgacagcggagacaacccgtacctcaagtacaaccacgccgacgcggagtttcaggagcgccttaaagaagatacgtcttttgggggcaacctcggacgagcagtcttccaggcgaaaaagagggttcttgaacctctgggcctggttgaggaacctgttaagacggctccgggaaaaaagaggccggtagagcactctcctgtggagccagactcctcctcgggaaccggaaaggcgggccagcagcctgcaagaaaaagattgaattttggtcagactggagacgcagactcagtacctgacccccagcctctcggacagccaccagcagccccctctggtctgggaactaatacgatggctacaggcagtggcgcaccaatggcagacaataacgagggcgccgacggagtgggtaattcctcgggaaattggcattgcgattccacatggatgggcgacagagtcatcaccaccagcacccgaacctgggccctgcccacctacaacaaccacctctacaaacaaatttccagccaatcaggagcctcgaacgacaatcactactttggctacagcaccccttgggggtattttgacttcaacagattccactgccacttttcaccacgtgactggcaaagactcatcaacaacaactggggattccgacccaagagactcaacttcaagctctttaacattcaagtcaaagaggtcacgcagaatgacggtacgacgacgattgccaataaccttaccagcacggttcaggtgtttactgactcggagtaccagctcccgtacgtcctcggctcggcgcatcaaggatgcctcccgccgttcccagcagacgtcttcatggtgccacagtatggatacctcaccctgaacaacgggagtcaggcagtaggacgctcttcattttactgcctggagtactttccttctcagatgctgcgtaccggaaacaactttaccttcagctacacttttgaggacgttcctttccacagcagctacgctcacagccagagtctggaccgtctcatgaatcctctcatcgaccagtacctgtattacttgagcagaacaaacactccaagtggaaccaccacgcagtcaaggcttcagttttctcaggccggagcgagtgacattcgggaccagtctaggaactggcttcctggaccctgttaccgccagcagcgagtatcaaagacatctgcggataacaacaacagtgaatactcgtggactggagctaccaagtaccacctcaatggcagagactctctggtgaatccgggcccggccatggcaagccacaaggacgatgaagaaaagttttttcctcagagcggggttctcatctttgggaagcaaggctcagagaaaacaaatgtggacattgaaaaggtcatgattacagacgaagaggaaatcaggacaaccaatcccgtggctacggagcagtatggttctgtatctaccaacctccagagaggcaacagacaagcagctaccgcagatgtcaacacacaaggcgttcttccaggcacggtctggcaggacagagatgtgtaccttcaggggcccatctgggcaaagattccacacacggacggacattttcacccctctcccctcatgggtggattcggacttaaacaccctcctccacagattctcatcaagaacaccccggtacctgcgaatccttcgaccaccttcagtgcggcaaagtttgcttccttcatcacacagtactccacgggacaggtcggcgtggagatcgagtgggagctgcagaaggaaaacagcaaacgctggaatcccgaaattcagtacacttccaactacaacaagtctgttaatgtggactttactgtggacactaatggcgtgtattcagagcctcgccccattggcaccagatacctgactcgtaatctgtaa

SEQ ID NO: 11930 - DNA, 2208 bp, Artificial Sequence
  source: /note="Description of Artificial Sequence: Synthetic polynucleotide"
atggctgccgatggttatcttccagattggctcgaggacactctctctgaaggaataagacagtggtggaagctcaaacctggcccaccaccaccaaagcccgcagagcggcataaggacgacagcaggggtcttgtgcttcctgggtacaagtacctcggacccttcaacggactcgacaagggagagccggtcaacgaggcagacgccgcggccctcgagcacgacaaagcctacgaccggcagctcgacagcggagacaacccgtacctcaagtacaaccacgccgacgcggagtttcaggagcgccttaaagaagatacgtcttttgggggcaacctcggacgagcagtcttccaggcgaaaaagagggttcttgaacctctgggcctggttgaggaacctgttaagacggctccgggaaaaaagaggccggtagagcactctcctgtggagccagactcctcctcgggaaccggaaaggcgggccagcagcctgcaagaaaaagattgaattttggtcagactggagacgcagactcagtacctgacccccagcctctcggacagccaccagcagccccctctggtctgggaactaatacgatggctacaggcagtggcgcaccaatggcagacaataacgagggcgccgacggagtgggtaattcctcgggaaattggcattgcgattccacatggatgggcgacagagtcatcaccaccagcacccgaacctgggccctgcccacctacaacaaccacctctacaaacaaatttccagccaatcaggagcctcgaacgacaatcactactttggctacagcaccccttgggggtattttgacttcaacagattccactgccacttttcaccacgtgactggcaaagactcatcaacaacaactggggattccgacccaagagactcaacttcaagctctttaacattcaagtcaaagaggtcacgcagaatgacggtacgacgacgattgccaataaccttaccagcacggttcaggtgtttactgactcggagtaccagctcccgtacgtcctcggctcggcgcatcaaggatgcctcccgccgttcccagcagacgtcttcatggtgccacagtatggatacctcaccctgaacaacgggagtcaggcagtaggacgctcttcattttactgcctggagtactttccttctcagatgctgcgtaccggaaacaactttaccttcagctacacttttgaggacgttcctttccacagcagctacgctcacagccagagtctggaccgtctcatgaatcctctcatcgaccagtacctgtattacttgagcagaacaaacactccaagtggaaccaccacgcagtcaaggcttcagttttctcaggccggagcgagtgacattcgggaccagtctaggaactggcttcctggaccctgttaccgccagcagcgagtatcaaagacatctgcggataacaacaacagtgaatactcgtggactggagctaccaagtaccacctcaatggcagagactctctggtgaatccgggcccggccatggcaagccacaaggacgatgaagaaaagttttttcctcagagcggggttctcatctttgggaagcaaggctcagagaaaacaaatgtggacattgaaaaggtcatgattacagacgaagaggaaatcagggcaaccaatcccgtggctacggagcagtgtggttctgtatctaccaacctccagagaggcaacagacaagcagctaccgcagatgtcaacacacaaggcgttcttccaggcacggtctggcaggacagagatgtgtaccttcaggggcccatctgggcaaagattccacacacggacggacattttcacccctctcccctcatgggtggattcggacttaaacaccctcctccacagattctcatcaagaacaccccggtacctgcgaatccttcgaccaccttcagtgcggcaaagtttgcttccttcatcacacagtactccacgggacaggtcagcgtggagatcgagtgggagctgcagaaggaaaacagcaaacgctggaatcccgaaattcagtacacttccaactacaacaagtctgttaatgtggactttactgtggacactaatggcgtgtattcagagcctcgccccattggcaccagatacctgactcgtaatctgtaa

SEQ ID NO: 11931 - DNA, 2208 bp, Artificial Sequence
  source: /note="Description of Artificial Sequence: Synthetic polynucleotide"
atggctgccgatggttatcttccagattggctcgaggacactctctctgaaggaataagacagtggtggaagctcaaacctggcccaccaccaccaaagcccgcagagcggcataaggacgacagcaggggtcttgtgcttcctgggtacaagtacctcggacccttcaacggactcgacaagggagagccggtcaacgaggcagacgccgcggccctcgagcacgacaaagcctacgaccggcagctcgacagcggagacaacccgtacctcaagtacaaccacgccgacgcggagtttcaggagcgccttaaagaagatacgtcttttgggggcaacctcggacgagcagtcttccaggcgaaaaagagggctcttgaacctctgggcctggttgaggaacctgttaagacggctccgggaaaaaagaggccggtagagcactctcctgtggagccagactcctcctcgggaaccggaaaggcgggccagcagcctgcaagaaaaagattgaattttggtcagactggagacgcagactcagtacctgacccccagcctctcggacagccaccagcagccccctctggtctgggaactaatacgatggctacaggcagtggcgcaccaatggcagacaataacgagggcgccgacggagtgggtaattcctcgggaaattggcattgcgattccacatggatgggcgacagagtcatcaccaccagcacccgaacctgggccctgcccacctacaacaaccacctctacaaacaaatttccagccaatcaggagcctcgaacgacaatcactactttggctacagcaccccttgggggtattttgacttcaacagattccactgccacttttcaccacgtgactggcaaagactcatcaacaacaactggggattccgacccaagagactcaacttcaagctctttaacattcaagtcaaagaggtcacgcagaatgacggtacgacgacgattgccaataaccttaccagcacggttcaggtgtttactgactcggagtaccagctcccgtacgtcctcggctcggcgcatcaaggatgcctcccgccgttcccagcagacgtcttcgtggtgccacagtatggatacctcaccctgaacaacgggagtcaggcagtaggacgctcttcattttactgcctggagtactttccttctcagatgctgcgtaccggaaacaactttaccttcagctacacttttgaggacgttcctttccacagcagctacgctcacagccagagtctggaccgtctcatgaatcctctcatcgaccagtacctgtattacttgagcagaacaaacactccaagtggaaccaccacgcagtcaaggcttcagttttctcaggccggagcgagtgacattcgggaccagtctaggaactggcttcctggaccctgttaccgccagcagcgagtatcaaagacatctgcggataacaacaacagtgaatactcgtggactggagctaccaagtaccacctcaatggcagagactctctggtgaatccgggcccggccatggcaagccacaaggacgatgaagaaaagttttttcctcagagcggggttctcatctttgggaagcaaggctcagagaaaacaaatgtggacattgaaaaggtcatgattacagacgaagaggaaatcaggacaaccaatcccgtggctacggagcagtatggttctgtatctaccaacctccagagaggcaacagacaagcagctaccgcagatgtcaacacacaaggcgttcttccaggcatggtctggcaggacagagatgtgtaccttcaggggcccatctgggcaaagattccacacacggacggacattttcacccctctcccctcatgggtggattcggacttaaacaccctcctccacagattctcatcaagaacaccccggtacctgcgaatccttcgaccaccttcagtgcggcaaagtttgcttccttcatcacacagtactccacgggacaggtcagcgtggagatcgagtgggagctgcagaaggaaaacagcaaacgctggaatcccgaaattcagtacacttccaactacaacaagtctgttaatgtggactttactgtggacactaatggcgtgtattcagagcctcgccccattggcaccagatacctgactcgtaatctgtaa

SEQ ID NO: 11932 - DNA, 2208 bp, Artificial Sequence
  source: /note="Description of Artificial Sequence: Synthetic polynucleotide"
atggctgccgatggttatcttccagattggctcgaggacactctctctgaaggaataagacagtggtggaagctcaaacctggcccaccaccaccaaagcccgcagagcggcataaggacgacagcaggggtcttgtgcttcctgggtacaagtacctcggacccttcaacggactcgacaagggagagccggtcaacgaggcagacgccgcggccctcgagcacgacaaagcctacgaccggcagctcgacagcggagacaacccgtacctcaagtacaaccacgccgacgcggagtttcaggagcgccttaaagaagatacgtcttttgggggcaacctcggacgagcagtcttccaggcgaaaaagagggttcttgaacctctgggcctggttgaggaacctgttaagacggctccgggaaaaaagaggccggtagagcactctcctgtggagccagactcctcctcgggaaccggaaaggcgggccagcagcctgcaagaaaaagattgaattttggtcagactggagacgcagactcagtacctgacccccagcctctcggacagccaccagcagccccctctggtctgggaactaatacgatggctacaggcagtggcgcaccaatggcagacaataacgagggcgccgacggagtgggtaattcctcgggaaattggcattgcgattccacatggatgggcgacagagtcatcaccaccagcacccgaacctgggccctgcccacctacaacaaccacctctacaaacaaatttccagccaatcaggagcctcgaacgacaatcactactttggctacagcaccccttgggggtattttgacttcaacagattccactgccacttttcaccacgtgactggcaaagactcatcaacaacaactggggattccgacccaagagactcaacttcaagctctttaacattcaagtcaaagaggtcacgcagaatgacggtacgacgacgattgccaataaccttaccagcacggttcaggtgtttactgactcggagtaccagctcccgtacgtcctcggctcggcgcatcaaggatgcctcccgccgttcccagcagacgtcttcatggtgccacagtatggatacctcaccctgaacaacgggagtcaggcagtaggacgctcttcattttactgcctggagtactttccttctcagatgctgcgtaccggaaacaactttaccttcagctacacttttgaggacgttcctttccacagcagctacgctcacagccagagtctggaccgtctcatgaatcctctcatcgaccagtacctgtattacttgagcagaacaaacactccaagtggaaccaccacgcagtcaaggcttcagttttctcaggccggagcgagtgacattcgggaccagtctaggaactggcttcctggaccctgttaccgccagcagcgagtatcaaagacatctgcggataacaacaacagtgaatactcgtggactggagctaccaagtaccacctcaatggcagagactctctggtgaatccgggcccggccatggcaagccacaaggacgatgaagaaaagttttttcctcagagcggggttctcatctttgggaagcaaggctcagagaaaacaaatgtggacattgaaaaggtcatgattacagacgaagaggaaatcaggacaaccaatcccgtggctacggagcagtatggttctgtatctaccaacctccagagaggcaacagacaagcagctaccgcagatgtcaacacacaaggcgttcttccaggcacggtctggcaggacagagatgtgtaccttcaggggcccatctgggcaaagattccacacacggacggacattttcacccctctcccctcgtgggtggattcggacttaaacaccctcctccacagattctcatcaagaacaccccggtacctgcgaatccttcgaccaccttcagtgcggcaaagtttgcttccttcatcacacagtactccacgggacaggtcagcgtggagatcgagtgggagctgcagaaggaaaacagcaaacgctggaatcccgaaattcagtacacttccaactacaacaagtctgttaatgtggactttactgtggacactaatggcgtgtattcagagcctcgccccattggcaccagatacctgactcgtaatctgtaa

SEQ ID NO: 11933 - DNA, 2208 bp, Artificial Sequence
  source: /note="Description of Artificial Sequence: Synthetic polynucleotide"
atggctgccgatggttatcttccagattggctcgaggacactctctctgaaggaataagacagtggtggaagctcaaacctggcccaccaccaccaaagcccgcagagcggcataaggacgacagcaggggtcttgtgcttcctgggtacaagtacctcggacccttcaacggactcgacaagggagagccggtcaacgaggcagacgccgcggccctcgagcacgacaaagcctacgaccggcagctcgacagcggagacaacccgtacctcaagtacaaccacgccgacgcggagtttcaggagcgccttaaagaagatacgtcttttgggggcaacctcggacgagcagtcttccaggcgaaaaagagggttcttgaacctctgggcctggttgaggaacctgttaagacggctccgggaaaaaagaggccggtagagcactctcctgtggagccagactcctcctcgggaaccggaaaggcgggccagcagcctgcaagaaaaagattgaattttggtcagactggagacgcagactcagtacctgacccccagcctctcggacagccaccagcagccccctctggtctgggaactaatacgatggctacaggcagtggcgcaccaatggcagacaataacgagggcgccgacggagtgggtaattcctcgggaaattggcattgcgattccacatggatgggcgacagagtcatcaccaccagcacccgaacctgggccctgcccacctacaacaaccacctctacaaacaaatttccagccaatcaggagcctcgaacgacaatcactactttggctacagcaccccttgggggtattttgacttcaacagattccactgccacttttcaccacgtgactggcaaagactcatcaacaacaactggggattccgacccaagagactcaacttcaagctctttaacattcaagtcaaagaggtcacgcagaatgacggtacgacgacgattgccaataaccttaccagcacggttcaggtgtttactgactcggagtaccagctcccgtacgtcctcggctcggcgcatcaaggatgcctcccgccgttcccagcagacgtcttcatggtgccacagtatggatacctcaccctgaacaacgggagtcaggcagtaggacgctcttcattttactgcctggagtactttccttctcagatgctgcgtaccggaaacaactttaccttcagctacacttttgaggacgttcctttccacagcagctacgctcacagccagagtctggaccgtctcatgaatcctctcatcgaccagtacctgtattacttgagcagaacaaacactccaagtggaaccaccacgcagtcaaggcttcagttttctcaggccggagcgagtgacattcgggaccagtctaggaactggcttcctggaccctgttaccgccagcagcgagtatcaaagacatctgcggataacaacaacagtgaatactcgtggactggagctaccaagtaccacctcaatggcagagactctctggtgaatccgggcccggccatggcaagccacaaggacgatgaagaaaagttttttcctcagagcggggttctcatctttgggaagcaaggctcagagaaaacaaatgtggacattgaaaaggtcatgattacagacgaagaggaaatcaggacaaccaatcccgtggctacggagcagtatggttctgtatctaccaacctccagagaggcaacagacaagcagctaccgcagatgtcaacacacaaggcgttcttccaggcacggtctggcaggacagagatgtgtaccttcaggggcccatctgggcaaagattccacacacggacggacattttcacccctctcccctcatgggtggattcggacttaaacaccctcctccacagattctcatcaagaacaccccggtacctgcgaatccttcgaccaccctcagtgcggcaaagtttgcttccttcatcacacagtactccacgggacaggtcagcgtggagatcgagtgggagctgcagaaggaaaacagcaaacgctggaatcccgaaattcagtacacttccaactacaacaagtctgttaatgtggactttactgtggacactaatggcgtgtattcagagcctcgccccattggcaccagatacctgactcgtaatctgtaa

SEQ ID NO: 11934 - DNA, 2208 bp, Artificial Sequence
  source: /note="Description of Artificial Sequence: Synthetic polynucleotide"
atggctgccgatggttatcttccagattggctcgaggacactctctctgaaggaataagacagtggtggaagctcaaacctggcccaccaccaccaaagcccgcagagcggcataaggacgacagcaggggtcttgtgcttcctgggtacaagtacctcggacccttcaacggactcgacaagggagagccggtcaacgaggcagacgccgcggccctcgagcacgacaaagcctacgaccggcagctcgacagcggagacaacccgtacctcaagtacaaccacgccgacgcggagtttcaggagcgccttaaagaagatacgtcttttgggggcaacctcggacgagcagtcttccaggcgaaaaagagggttcttgaacctctgggcctggttgaggaacctgttaagacggctccgggaaaaaagaggccggtagagcactctcctgtggagccagactcctcctcgggaaccggaaaggcgggccagcagcctgcaagaaaaagattgaattttggtcagactggagacgcagactcagtacctgacccccagcctctcggacagccaccagcagccccctctggtctgggaactaatacgatggctacaggcagtggcgcaccaatggcagacaataacgagggcgccgacggagtgggtaattcctcgggaaattggcattgcgattccacatggatgggcgacagagtcatcaccaccagcacccgaacctgggccctgcccacctacaacaaccacctctacaaacaaatttccagccaatcaggagcctcgaacgacaatcactactttggctacagcaccccttgggggtattttgacttcaacagattccactgccacttttcaccacgtgactggcaaagactcatcaacaacaactggggattccgacccaagagactcaacttcaagctctttaacattcaagtcaaagaggtcacgcagaatgacggtacgacgacgattgccaataaccttaccagcacggttcaggtgtttactgactcggagtaccagctcccgtacgtcctcggctcggcgcatcaaggatgcctcccgccgttcccagcagacgtcttcatggtgccacagtatggatacctcaccctgaacaacgggagtcaggcagtagggcgctcttcattttactgcctggagtactttccttctcagatgctgcgtaccggaaacaactttaccttcagctacacttttgaggacgttcctttccacagcagctacgctcacagccagagtctggaccgtctcatgaatcctctcatcgaccagtacctgtattacttgagcagaacaaacactccaagtggaaccaccacgcagtcaaggcttcagttttctcaggccggagcgagtgacattcgggaccagtctaggaactggcttcctggaccctgttaccgccagcagcgagtatcaaagacatctgcggataacaacaacagtgaatactcgtggactggagctaccaagtaccacctcaatggcagagactctctggtgaatccgggcccggccatggcaagccacaaggacgatgaagaaaagttttttcctcagagcggggttctcatctttgggaagcaaggctcagagaaaacaaatgtggacattgaaaaggtcatgattacagacgaaggggaaatcaggacaaccaatcccgtggctacggagcagtatggttctgtatctaccaacctccagagaggcaacagacaagcagctaccgcagatgtcaacacacaaggcgttcttccaggcacggtctggcaggacagagatgtgtaccttcaggggcccatctgggcaaagattccacacacggacggacattttcacccctctcccctcatgggtggattcggacttaaacaccctcctccacagattctcatcaagaacaccccggtacctgcgaatccttcgaccaccttcagtgcggcaaagtttgcttccttcatcacacagtactccacgggacaggtcagcgtggagatcgagtgggagctgcagaaggaaaacagcaaacgctggaatcccgaaattcagtacacttccaactacaacaagtctgttaatgtggactttactgtggacactaatggcgtgtattcagagcctcgccccattggcaccagatacctgactcgtaatctgtaa

SEQ ID NO: 11935 - DNA, 2208 bp, Artificial Sequence
  source: /note="Description of Artificial Sequence: Synthetic polynucleotide"
atggctgccgatggttatcttccagattggctcgaggacactctctctgaaggaataagacagtggtggaagctcaaacctggcccaccaccaccaaagcccgcagagcggcataaggacgacagcaggggtcttgtgcttcctgggtacaagtacctcggacccttcaacggactcgacaagggagagccggtcaacgaggcagacgccgcggccctcgagcacgacaaagcctacgaccggcagctcgacagcggagacaacccgtacctcaagtacaaccacgccgacgcggagtttcaggagcgccttaaagaagatacgtcttttgggggcaacctcggacgagcagtcttccaggcgaaaaagagggctcttgaacctctgggcctggttgaggaacctgttaagacggctccgggaaaaaagaggccggtagagcactctcctgtggagccagactcctcctcgggaaccggaaaggcgggccagcagcctgcaagaaaaagattgaattttggtcagactggagacgcagactcagtacctgacccccagcctctcggacagccaccagcagccccctctggtctgggaactaatacgatggctacaggcagtggcgcaccaatggcagacaataacgagggcgccgacggagtgggtaattcctcgggaaattggcattgcgattccacatggatgggcgacagagtcatcaccaccagcacccgaacctgggccctgcccacctacaacaaccacctctacaaacaaatttccagccaatcaggagcctcgaacgacaatcactactttggctacagcaccccttgggggtattttgacttcaacagattccactgccacttttcaccacgtgactggcaaagactcatcaacaacaactggggattccgacccaagagactcaacttcaagctctttaacattcaagtcaaagaggtcacgcagaatgacggtacgacgacgattgccaataaccttaccagcacggttcaggtgtttactgactcggagtaccagctcccgtacgtcctcggctcggcgcatcaaggatgcctcccgccgttcccagcagacgtcttcatggtgccacagtatggatacctcaccctgaacaacgggagtcaggcagtaggacgctcttcattttactgcctggagtactttccttctcagatgctgcgtaccggaaacaactttaccttcagctacacttttgaggacgttcctttccacagcagctacgctcacagccagagtctggaccgtctcatgaatcctctcatcgaccagtacctgtattacttgagcagaacaaacactccaagtggaaccaccacgcagtcaaggcttcagttttctcaggccggagcgagtgacattcgggaccagtctaggaactggcttcctggaccctgttaccgccagcagcgagtatcaaagacatctgcggataacaacaacagtgaatactcgtggactggagctaccaagtaccacctcaatggcagagactctctggtgaatccgggcccggccatggcaagccacaaggacgatgaagaaaagttttttcctcagagcggggttctcatctttgggaagcaaggctcagagaaaacaaatgtggacattgaaaaggtcatgattacagacgaagaggaaatcaggacaaccaatcccgtggctacggagcagtatggttctgtatctaccaacctccagagaggcaacagacaagcagctaccgcagatgtcaacacacaaggcgttcttccaggcatggtctggcaggacagagatgtgtaccttcaggggcccatctgggcaaagattccacacacggacggacattttcacccctctcccctcatgggtggattcggacttaaacaccctcctccacagattctcatcaaaaacaccccggtacctgcgaatccttcgaccaccttcagtgcggcaaagtttgcttccttcatcacacagtactccgcgggacaggtcagcgtggagatcgagtgggagctgcagaaggaaaacagcaaacgctggaatcccgaaattcagtacacttccaactacaacaagtctgttaatgtggactttactgtggacactaatggcgtgtattcagagcctcgccccattggcaccagatacctgactcgtaatctgtaa

SEQ ID NO: 11936 - DNA, 2208 bp, Artificial Sequence
  source: /note="Description of Artificial Sequence: Synthetic polynucleotide"
atggctgccgatggttatcttccagattggctcgaggacactctctctgaaggaataagacagtggtggaagctcaaacctggcccaccaccaccaaagcccgcagagcggcataaggacgacagcaggggtcttgtgcttcctgggtacaagtacctcggacccttcaacggactcgacaagggagagccggtcaacgaggcagacgccgcggccctcgagcacgacaaagcctacgaccggcagctcgacagcggagacaacccgtacctcaagtacaaccacgccgacgcggagtttcaggagcgccttaaagaagatacgtcttttgggggcaacctcggacgagcagtcttccaggcgaaaaagagggttcttgaacctctgggcctggttgaggaacctgttaagacggctccgggaaaaaagaggccggtagagcactctcctgtggagccagactcctcctcgggaaccggaaaggcgggccagcagcctgcaagaaaaagattgaattttggtcagactggagacgcagactcagtacctgacccccagcctctcggacagccaccagcagccccctctggtctgggaactaatacgatggctacaggcagtggcgcaccaatggcagacaataacgagggcgccgacggagtgggtaattcctcgggaaattggcattgcgattccacatggatgggcgacagagtcatcaccaccagcacccgaacctgggccctgcccacctacaacaaccacctctacaaacaaatttccagccaatcaggagcctcgaacgacaatcactactttggctacagcaccccttgggggtattttgacttcaacagattccactgccacttttcaccacgtgactggcaaagactcatcaacaacaactggggattccgacccaagagactcaacttcaagctctttaacattcaagtcaaagaggtcacgcagaatgacggtacgacgacgattgccaataaccttaccagcacggttcaggtgtttactgactcggagtaccagctcccgtacgtcctcggctcggcgcatcaaggatgcctcccgccgttcccagcagacgtcttcatggtgccacagtatggatacctcaccctgaacaacgggagtcaggcagtaggacgctcttcattttactgcctggagtactttccttctcagatgctgcgtaccggaaacaactttaccttcagctacacttttgaggacgttcctttccacagcagctacgctcacagccagagtctggaccgtctcatgaatcctctcatcgaccagtacctgtattacttgagcagaacaaacactccaagtggaaccaccacgcagtcaaggcttcagttttctcaggccggagcgagtgacattcgggaccagtctaggaactggcttcctggaccctgttaccgccagcagcgagtatcaaagacatctgcggataacaacaacagtgaatactcgtggactggagctaccgagtaccacctcaatggcagagactctctggtgaatccgggcccggccatggcaagccacaaggacgatgaagaaaagttttttcctcagagcggggttctcatctttgggaagcaaggctcagagaaaacaaatgtggacattgaaaaggtcatgattacagacgaagaggaaatcaggacaaccaatcccgtggctacggagcagtatggttctgtatctaccaacctccagagaggcaacagacaagcagctaccgcagatgtcaacacacaaggcgttcttccaggcacggtctggcaggacagagatgtgtaccttcaggggcccatctgggcaaagattccacacacggacggacattttcacccctctcccctcatgggtggattcggacttaaacaccctcccccacagattctcatcaagaacaccccggtacctgcgaatccttcgaccaccttcagtgcggcaaagtttgcttccttcatcacacagtactccacgggacaggtcagcgtggagatcgagtgggagctgcagaaggaaaacagcaaacgctggaatcccgaaattcagtacacttccaactacaacaagtctgttaatgtggactttactgtggacactaatggcgtgtattcagagcctcgccccattggcaccagatacctgactcgtaatctgtaa

SEQ ID NO: 11937 - DNA, 2208 bp, Artificial Sequence
  source: /note="Description of Artificial Sequence: Synthetic polynucleotide"
atggctgccgatggttatcttccagattggctcgaggacactctctctgaaggaataagacagtggtggaagctcaaacctggcccaccaccaccaaagcccgcagagcggcataaggacgacagcaggggtcttgtgcttcctgggtacaagtacctcggacccttcaacggactcgacaagggagagccggtcaacgaggcagacgccgcggccctcgagcacggcaaagcctacgaccggcagctcgacagcggagacaacccgtacctcaagtacaaccacgccgacgcggagtttcaggagcgccttaaagaagatacgtcttttgggggcaacctcggacgagcagtcttccaggcgaaaaagagggttcttgaacctctgggcctggttgaggaacctgttaagacggctccgggaaaaaagaggccggtagagcactctcctgtggagccagactcctcctcgggaaccggaaaggcgggccagcagcctgcaagaaaaagattgaattttggtcagactggagacgcagactcagtacctgacccccagcctctcggacagccaccagcagccccctctggtctgggaactaatacgatggctacaggcagtggcgcaccaatggcagacaataacgagggcgccgacggagtgggtaattcctcgggaaattggcattgcgattccacatggatgggcgacagagtcatcaccaccagcacccgaacctgggccctgcccacctacaacaaccacctctacaaacaaatttccagccaatcaggagcctcgaacgacaatcactactttggctacagcaccccttgggggtattttgacttcaacagattccactgccacttttcaccacgtgactggcaaagactcatcaacaacaactggggattccgacccaagagactcaacttcaagctctttaacattcaagtcaaagaggtcacgcagaatgacggtacgacgacgattgccaataaccttaccagcacggttcaggtgtttactgactcggagtaccagctcccgtacgtcctcggctcggcgcatcaaggatgcctcccgccgttcccagcagacgtcttcatggtgccacagtatggatacctcaccctgaacaacgggagtcaggcagtaggacgctcttcattttactgcctggagtactttccttctcagatgctgcgtaccggaaacaactttaccttcagctacacttttgaggacgttcctttccacagcagctacgctcacagccagagtctggaccgtctcatgaatcctctcatcgaccagtacctgtattacttgagcagaacaaacactccaagtggaaccaccacgcagtcaaggcttcagttttctcaggccggagcgagtgacattcgggaccagtctaggaactggcttcctggaccctgttaccgccagcagcgagtatcaaagacatctgcggataacaacaacagtgaatactcgtggactggagctaccaagtaccacctcaatggcagagactctctggtgaatccgggcccggccatggcaagccacaaggacgatgaagaaaagttttttcctcagagcggggttctcatctttgggaagcaaggctcagagaaaacaaatgtggacattgaaaaggtcatgattacagacgaagaggaaatcaggacaaccaatcccgtggctacggagcagtatggttctgtatctaccaacctccagagaggcaacagacaagcagctaccgcagatgtcaacacacaaggcgttcttccaggcacggtctggcaggacagagatgtgtaccttcaggggcccatctgggcaaagattccacacacggacggacattttcacccctctcccctcatgggtggattcggacttaaacaccctcctccacagattctcatcaagaacaccccggtacctgcgaatccttcgaccaccttcagtgcggcaaagtttgcttccttcatcacacagtactccacgggacaggtcagcgtggagatcgagtgggagctgcagaaggaaaacagcaaacgctggaatcccgaaattcagtacacttccaactacaacaagtctgttaatgtggactttactgtggacactaatggcgtgtattcagagcctcgccccattggcaccagatacctgactcgtaatctgtaa

SEQ ID NO: 11938 - DNA, 2208 bp, Artificial Sequence
  source: /note="Description of Artificial Sequence: Synthetic polynucleotide"
atggctgccgatggttatcttccagattggctcgaggacactctctctgaaggaataagacagtggtggaagctcaaacctggcccaccaccaccaaagcccgcagagcggcataaggacgacagcaggggtcttgtgcttcctgggtacaagtacctcggacccttcaacggactcgacaagggagagccggtcaacgaggcagacgccgcggccctcgagcacgacaaagcctacgaccggcagctcgacagcggagacaacccgtacctcaagtacaaccacgccgacgcggagtttcaggagcgccttaaagaagatacgtcttttgggggcaacctcggacgagcagtcttccaggcgaaaaagagggctcttgaacctctgggcctggttgaggaacctgttaagacggctccgggaaaaaagaggccggtagagcactctcctgtggagccagactcctcctcgggaaccggaaaggcgggccagcagcctgcaagaaaaagattgaattttggtcagactggagacgcagactcagtacctgacccccagcctctcggacagccaccagcagccccctctggtctgggaactaatacgatggctacaggcagtggcgcaccaatggcagacaataacgagggcgccgacggagtgggtaattcctcgggaaattggcattgcgattccacatggatgggcgacagagtcatcaccaccagcacccgaacctgggccctgcccacctacaacaaccacctctacaaacaaatttccagccaatcaggagcctcgaacgacaatcactactttggctacagcaccccttgggggtattttgacttcaacagattccactgccacttttcaccacgtgactggcaaagactcatcaacaacaactggggattccgacccaagagactcaacttcaagctctttaacattcaagtcaaagaggtcacgcagaatgacggtacgacgacgattgccaataaccttaccagcacggttcaggtgtttactgactcggagtaccagctcccgtacgtcctcggctcggcgcatcaaggatgcctcccgccgttcccagcagacgtcttcatggtgccacagtatggatacctcaccctgaacaacgggagtcaggcagtaggacgctcttcattttactgcctggagtactttccttctcagatgctgcgtaccggaaacaactttaccttcagctacacttttgaggacgttcctttccacagcagctacgctcacagccagagtctggaccgtctcatgaatcctctcgtcgaccagtacctgtattacttgagcagaacaaacactccaagtggaaccaccacgcagtcaaggcttcagttttctcaggccggagcgagtgacattcgggaccagtctaggaactggcttcctggaccctgttaccgccagcagcgagtatcaaagacatctgcggataacaacaacagtgaatactcgtggaccggagctaccaagtaccacctcaatggcagagactctctggtgaatccgggcccggccatggcaagccacaaggacgatgaagaaaagttttttcctcagagcggggttctcatctttgggaagcaaggctcagagaaaacaaatgtggacattgaaaaggtcatgattacagacgaagaggaaatcaggacaaccaatcccgtggctacggagcagtatggttctgtatctaccaacctccagagaggcaacagacaagcagctaccgcagatgtcaacacacaaggcgttcttccaggcatggtctggcaggacagagatgtgtaccttcaggggcccatctgggcaaagattccacacacggacggacattttcacccctctcccctcatgggtggattcggacttaaacgccctcctccacagattctcatcaagaacaccccggtacctgcgaatccttcgaccaccttcagtgcggcaaagtttgcttccttcatcacacagtactccacgggacaggtcagcgtggagatcgagtgggagctgcagaaggaaaacagcaaacgctggaatcccgaaattcagtacacttccaactacaacaagtctgttaatgtggactttactgtggacactaatggcgtgtattcagagcctcgccccattggcaccagatacctgactcgtaatctgtaa

SEQ ID NO: 11939 - DNA, 2208 bp, Artificial Sequence
  source: /note="Description of Artificial Sequence: Synthetic polynucleotide"
atggctgccgatggttatcttccagattggctcgaggacactctctctgaaggaataagacagtggtggaagctcaaacctggcccaccaccaccaaagcccgcagagcggcataaggacgacagcaggggtcttgtgcttcctgggtacaagtacctcggacccttcaacggactcgacaagggagagccggtcaacgaggcagacgccgcggccctcgagcacgacaaagcctacgaccggcagctcgacagcggagacaacccgtacctcaagtacaaccacgccgacgcggagtttcaggagcgccttaaagaagatacgtcttttgggggcaacctcggacgagcagtcttccaggcgaaaaagagggttcttgaacctctgggcctggttgaggaacctgttaagacggctccgggaaaaaagaggccggtagagcactctcctgtggagccagactcctcctcgggaaccggaaaggcgggccagcagcctgcaagaaaaagattgaattttggtcagactggagacgcagactcagtacctgacccccagcctctcggacagccaccagcagccccctctggtctgggaactaatacgatggctacaggcagtggcgcaccaatggcagacaataacgagggcgccgacggagtgggtaattcctcgggaaattggcattgcgattccacatggatgggcgacagagtcatcaccaccagcacccgaacctgggccctgcccacctacaacaaccacctctacaaacaaatttccagccaatcaggagcctcgaacgacaatcactactttggctacagcaccccttgggggtattttgacttcaacagattccactgccacttttcaccacgtgactggcaaagactcatcaacaacaactggggattccgacccaagagactcaacttcaagctctttaacattcaagtcaaagaggtcacgcagaatgacggtacgacgacgattgccaataaccttaccagcacggttcaggtgtttactgactcggagtaccagctcccgtacgtcctcggctcggcgcatcaaggatgcctcccgccgttcccagcagacgtcttcatggtgccacagtatggatacctcaccctgaacaacgggagtcaggcagtaggacgctcttcattttactgcctggagtactttccttctcagatgctgcgtaccggaaacaactttaccttcagctacacttttgaggacgttcctttccacagcagctacgctcacagccagagtctggaccgtctcatgaatcctctcatcgaccagtacctgtattacttgagcagaacaaacactccaagtggaaccaccacgcagtcaaggcttcagttttctcaggccggagcgagtgacattcgggaccagtctaggaactggcttcctggaccctgttaccgccagcagcgagtatcaaagacatctgcggataacaacaacagtgaatactcgtggactggagctaccaagtaccacctcaatggcagagactctctggtgaatccgggcccggccatggcaagccacaaggacgatgaagaaaagttttttcctcagagcggggttctcatctttgggaagcaaggctcagagaaaacaaatgtggacattgaaaaggtcatgattacagacgaagaggaaatcaggacaaccaatcccgtggctacggagcagtatggttctgtatctaccaacctccagagaggcaacagacaagcagctaccgcagatgtcaacacacaaggcgttcttccaggcacggtctggcaggacagagatgtgtaccttcaggggcccatctgggcaaagattccacacacggacggacattttcacccctctcccctcatgggtggattcggacttaaacaccctcctccacagattctcatcaagaacaccccggtacctgcgaatccttcgaccaccttcagtgcggcaaagtttgcttccttcatcacacagcactccacgggacaggtcagcgtggagatcgagtgggagctgcagaaggaaaacagcaaacgctggaatcccgaaattcagtacacttccaactacaacaagtctgttaatgtggactttactgtggacactaatggcgtgtattcagagcctcgccccattggcaccagatacctgactcgtaatctgtaa

SEQ ID NO: 11940 - DNA, 2208 bp, Artificial Sequence
  source: /note="Description of Artificial Sequence: Synthetic polynucleotide"
atggctgccgatggttatcttccagattggctcgaggacactctctctgaaggaataagacagtggtggaagctcaaacctggcccaccaccgccaaagcccgcagagcggcataaggacgacagcaggggtcttgtgcttcctgggtacaagtacctcggacccttcaacggactcgacaagggagagccggtcaacgaggcagacgccgcggccctcgagcacgacaaggcctacgaccggcagctcgacagcggagacgacccgtacctcaagtacaaccacgccgacgcggagtttcaggagcgccttaaagaagatacgtcttttgggggcaacctcgcaagagcagtattccaggcgaaaaagagggttcttgaacctctgggcctggttgaggagcctgttaagacggctccgggaaaaaagaggccggtagagcattctcctgcggagccagactcctcctcgggaaccggaaaagcgggccagcagcctgcgagaaagagattgaatttcggtcagactggagacgcagactccgtacctgacccccagcctctcggacagccaccagcagccccctctggtctgggaactaatacgatggctacaggcagtggcgcaccaatggcagacaataacgagggtgccgacggagtgggtaattcctcaggaaattggcattgcgattccacatggatgggcgacagagtcatcaccaccagcacccgcacctgggctctgcccacctacaacaaccatctgtacaagcagatctccagccaatctggagccagcaacgacaaccactactttggctacagcaccccttgggggtattttgacttcaacagattccactgccacttctccccacgtgactggcaaagactcatcaacaacaactggggattccggcccaagagactcagcttcaagctctttaacattcaagtcaaggaggtcacgcagaatgacggtacgacgacgattgccaataaccttaccagcacggttcaggtctttactgactcggagtaccagctcccgtacgtcctcggctcggcgcatcaaggatgcctcccgccgttcccagcagacgtcttcatggtgccacagtatggatacctcaccctgaacaacgggagtcaggcggtaggacgctcttcattttactgcctggagtacttcccttctcagatgcttcgcacgggaaacaactttaccttcagctacacctttgaggacgtgccttttcacagcagctacgctcacagccaaagtctggaccgtctcatgaatcctctcatcgaccagtacctgtattacttgagcaaaacaaacgctccaagcggaaccaccacgatgtccaggcttcagttttctcaggccggagcaagtgacattcgggaccagtctagaaactggcttcctggaccctgttaccgccagcagcgagtatcaaagacagctgcggacaacaacaacagtgattactcgtggactggagctaccaagtaccacctcaatggaagagactctctggtgaacccgggcccagctatggccagccacaaggacgatgaagaaaaatattttcctcagagcggggttctcatcttcgggaaacaaggctcaaataaaactaatgtggacattgaaaaggttatgattacagacgaagaggaaatcaggaccaccaatcccgtggctacggagcagtatggttctgtatctaccaaccttcaaagcggcaacacacaagcagctacctcagatgtcaacacacaaggcgttcttcctggcatggtctggcaggacagagatgtgtacctgcaggggcccatctgggcaaagattccacacacggatggacactttcacccttctcctcttatgggaggatttggactgaagcaccctcccccgcagattctcatcaagaataccccggtacctgcgaatccttcgaccaccttcagtgcggcaaagtttgcttctttcatcacacagtactccacggggcaggtcagcgtggagatcgagtgggagctgcagaaggagaacagcaaacgctggaaccccgagatccagtatacttccaactacaacaaatctgttaatgtggactttactgtggacactaatggtgtgtattcagagcctcgccccattggcaccagatacctgactcgtaatctgtaa

SEQ ID NO: 11941 - DNA, 2208 bp, Artificial Sequence
  source: /note="Description of Artificial Sequence: Synthetic polynucleotide"
atggctgccgatggttatcttccagattggctcgaggacactctctctgaaggaataagacagtggtggaagctcaaacctggcccaccaccaccaaagcccgcagagcggcataaggacgacagcaggggtcttgtgcttcctgggtacaagtacctcggacccttcaacggactcgacaagggagagccggtcaacgaggcagacgccgcggccctcgagcacgacaaagcctacgaccggcagctcgacagcggagacaacccgtacctcaagtacaaccacgccgacgcggagtttcaggagcgccttaaagaagatacgtcttttgggggcaacctcggacgagcagtcttccaggcgaaaaagagggttcttgaacctctgggcctggttgaggaacctgttaagacggctccgggaaaaaagaggccggtagagcactctcctgtggagccagactcctcctcgggaaccggaaaggcgggccagcagcctgcaagaaaaagattgaattttggtcagactggagacgcagactcagtacctgacccccagcctctcggacagccaccagcagccccctctggtctgggaactaatacgatggctacaggcagtggcgcaccaatggcagacaataacgagggcgccgacggagtgggtaattcctcgggaaattggcattgcgattccacatggatgggcgacagagtcatcaccaccagcacccgaacctgggccctgcccacctacaacaaccacctctacaaacaaatttccagccaatcaggagcctcgaacgacaatcactactttggctacagcaccccttgggggtattttgacttcaacagattccactgccacttttcaccacgtgactggcaaagactcatcaacaacaactggggattccgacccaagagactcaacttcaagctctttaacattcaagtcaaagaggtcacgcagaatgacggtacgacgacgattgccaataaccttaccagcacggttcaggtgtttactgactcggagtaccagctcccgtacgtcctcggctcggcgcatcaaggatgcctcccgccgttcccagcagacgtcttcatggtgccacagtatggatacctcaccctgaacaacgggagtcaggcagtaggacgctcttcattttactgcctggagtactttccttctcagatgctgcgtaccggaaacaactttaccttcagctacacttttgaggacgttcctttccacagcagctacgctcacagccagagtctggaccgtctcatgaatcctctcatcgaccagtacctgtattacttgagcagaacaaacactccaagtggaaccaccacgcagccaaggcttcagttttctcaggccggagcgagtgacattcgggaccagtctaggaactggcttcctggaccctgttaccgccagcagcgagtatcaaagacatctgcggataacaacaacagtgaatactcgtggactggagctaccaagtaccacctcaatggcagagactctctggtgaatccgggcccggccatggcaagccacaaggacgatgaagaaaagttttttcctcagagcggggttctcatctttgggaagcaaggctcagagaaaacaaatgtggacattgaaaaggtcatgattacagacgaagaggaaatcaggacaaccaatcccgtggctacggagcagtatggttctgtatctaccaacctccagagaggcaacagacaagcagctaccgcagatgtcaacacacaaggcgttcttccaggcacggtctggcaggacagagatgtgtaccttcaggggcccatctgggcaaagattccacacacggacggacattttcacccctctcccctcatgggtggattcggacttaaacaccctcctccacagattctcatcaagaacaccccggtacctgcgaatccttcgaccaccttcagtgcggcaaagtttgcttccttcatcacacagtactccacgggacaggtcagcgtggagatcgagtgggagctgcagaaggaaaacagcaaacgctggaatcccgaaattcagtacacttccaactacaacaagtctgttaatgtggactttactgtggacactaatggcgtgtattcagagcctcgccccattggcaccagatacctgactcgtaatctgtaa

SEQ ID NO: 11942 - DNA, 2208 bp, Artificial Sequence
  source: /note="Description of Artificial Sequence: Synthetic polynucleotide"
atggctgccgatggttatcttccagattggctcgaggacactctctctgaaggaataagacagtggtggaagctcaaacctggcccaccaccaccaaagcccgcagagcggcataaggacgacagcaggggtcttgtgcttcctgggtacaagtacctcggacccttcaacggactcgacaagggagagccggtcaacgaggcagacgccgcggccctcgagcacgacaaagcctacgaccggcagctcgacagcggagacaacccgtacctcaagtacaaccacgccgacgcggagtttcaggagcgccttaaagaagatacgtcttttgggggcaacctcggacgagcagtcttccaggcgaaaaagagggttcttgaacctctgggcctggttgaggaacctgttaagacggctccgggaaaaaagaggccggtagagcactctcctgtggagccagactcctcctcgggaaccggaaaggcgggccagcagcctgcaagaaaaagattgaattttggtcagactggagacgcagactcagtacctgacccccagcctctcggacagccaccagcagccccctctggtctgggaactaatacgatggctacaggcagtggcgcaccaatggcagacaataacgagggcgccgacggagtgggtaattcctcgggaaattggcattgcgattccacatggatgggcgacagagtcatcaccaccagcacccgaacctgggccctgcccacctacaacaaccacctctacaaacaaatttccagccaatcaggagcctcgaacgacaatcactactttggctacagcaccccttgggggtattttgacttcaacagattccactgccacttttcaccacgtgactggcaaagactcatcaacaacaactggggattccgacccaagagactcaacttcaagctctttaacattcaagtcaaagaggtcacgcagaatgacggtacgacgacgattgccaataaccttaccagcacggttcaggtgtttactgactcggagtaccagctcccgtacgtcctcggctcggcgcatcaaggatgcctcccgccgttcccagcagacgtcttcatggtgccacagtatggatacctcaccctgaacaacgggagtcaggcagtaggacgctcttcattttactgcctggagtactttccttctcagatgctgcgtaccggaaacaactttaccttcagctacacttttgaggacgttcctttccacagcagctacgctcacagccagagtctggaccgtctcatgaatcctctcatcgaccagtacctgtattacttgagcagaacaaacactccaagtggaaccaccacgcagtcaaggcttcagttttctcaggccggagcgagtgacattcgggaccagtctaggaactggcttcctggaccctgttaccgccagcagcgagtatcaaagacatctgcggataacaacaacagtgaatacttgtggactggagctaccaagtaccacctcaatggcagagactctctggtgaatccgggcccggccatggcaagccacaaggacgatgaagaaaagttttttcctcagagcggggttctcatctttgggaagcaaggctcagagaaaacaaatgtggacattgaaaaggtcatgattacagacgaagaggaaatcaggacaaccaatcccgtggctacggagcagtatggttctgtatctaccaacctccagagaggcaacaggcaagcagctaccgcagatgtcaacacacaaggcgttcttccaggcacggtctggcaggacagagatgtgtaccttcaggggcccatctgggcaaagattccacacacggacggacattttcacccctctcccctcatgggtggattcggacttaaacaccctcctccacagattctcatcaagaacaccccggtacctgcgaatccttcgaccaccttcagtgcggcaaagtttgcttccttcatcacacagtactccacgggacaggtcagcgtggagatcgagtgggagctgcagaaggaaaacagcaaacgctggaatcccgaaattcagtacacttccaactacaacaagtctgttaatgtggactttactgtggacactaatggcgtgtattcagagcctcgccccattggcaccagatacctgactcgtaatctgtaa

SEQ ID NO: 11943 - DNA, 2208 bp, Artificial Sequence
  source: /note="Description of Artificial Sequence: Synthetic polynucleotide"
atggctgccgatggttatcttccagattggctcgaggacactctctctgaaggaataagacagtggtggaagctcaaacctggcccaccaccaccaaagcccgcagagcggcataaggacgacagcaggggtcttgtgcttcctgggtacaagtacctcggacccttcaacggactcgacaagggagagccggtcaacgaggcagacgccgcggccctcgagcacgacaaagcctacgaccggcagctcgacagcggagacaacccgtacctcaagtacaaccacgccgacgcggagtttcaggagcgccttaaagaagatacgtcttttgggggcaacctcggacgagcagtcttccaggcgaaaaagagggttcttgaacctctgggcctggttgaggaacctgttaagacggctccgggaaaaaagaggccggtagagcactctcctgtggagccagactcctcctcgggaaccggaaaggcgggccagcagcctgcaagaaaaagattgaattttggtcagactggagacgcagactcagtacctgacccccagcctctcggacagccaccagcagccccctctggtctgggaactaatacgatggctacaggcagtggcgcaccaatggcagacaataacgagggcgccgacggagtgggtaattcctcgggaaattggcattgcgattccacatggatgggcgacagagtcatcaccaccagcacccgaacctgggccctgcccacctacaacaaccacctctacaaacaaatttccagccaatcaggagcctcgaacgacaatcactactttggctacagcaccccttgggggtattttgacttcaacagattccactgccacttttcaccacgtgactggcaaagactcatcaacaacaactggggattccgacccaagagactcaacttcaagccctttaacattcaagtcaaagaggtcacgcagaatgacggtacgacgacgattgccaataaccttaccagcacggttcaggtgtttactgactcggagtaccagctcccgtacgtcctcggctcggcgcatcaaggatgcctcccgccgttcccagcagacgtcttcatggtgccacagtatggatacctcaccctgaacaacgggagtcaggcagtaggacgctcttcattttactgcctggagtactttccttctcagatgctgcgtaccggaaacaactttaccttcagctacacttttgaggacgttcctttccacagcagctacgctcacagccagagtctggaccgtctcatgaatcctctcatcgaccagtacctgtattacttgagcagaacaaacactccaagtggaaccaccacgcagtcaaggcttcagttttctcaggccggagcgagtgacattcgggaccagtctaggaactggcttcctggaccctgttaccgccagcagcgagtatcaaagacatctgcggataacaacaacagtgaatactcgtggactggagctaccaagtaccacctcaatggcagagactctctggtgaatccgggcccggccatggcaagccacaaggacgatgaagaaaagttttttcctcagagcggggttctcatctttgggaagcaaggctcagagaaaacaaatgtggacattgaaaaggtcatgattacagacgaagaggaaatcaggacaaccaatcccgtggctacggagcagtatggttctgtatctaccaacctccagagaggcaacagacaagcagctaccgcagatgtcaacacacaaggcgttcttccaggcacggtctggcaggacagagatgtgtaccttcaggggcccatctgggcaaagattccacacacggacggacattttcacccctctcccctcatgggtggattcggacttaaacaccctcctccacagattctcatcaagaacaccccggtacctgcgaatccttcgaccaccttcagtgcggcaaagtttgcttccttcatcacacagtactccacgggacaggtcagcgtggagatcgagtgggagctgcagaaggaaaacagcaaacgctggaatcccgaaattcagtacacttccaactacaacaagtctgttaatgtggactttactgtggacactaatggcgtgtattcagagcctcgccccattggcaccagatacctgactcgtaatctgtaa

SEQ ID NO: 11944 - DNA, 2208 bp, Artificial Sequence
  source: /note="Description of Artificial Sequence: Synthetic polynucleotide"
atggctgccgatggttatcttccagattggctcgaggacactctctctgaaggaataagacagtggtggaagctcaaacctggcccaccaccaccaaagcccgcagagcggcataaggacgacagcaggggtcttgtgcttcctgggtacaagtacctcggacccttcaacggactcgacaagggagagccggtcaacgaggcagacgccgcggccctcgagcacgacaaagcctacgaccggcagctcgacagcggagacaacccgtacctcaagtacaaccacgccgacgcggagtttcaggagcgccttaaagaagatacgtcttttgggggcaacctcggacgagcagtcttccaggcgaaaaagagggttcttgaacctctgggcctggttgaggaacctgttaagacggctccgggaaaaaagaggccggtagagcactctcctgtggagccagactcctcctcgggaaccggaaaggcgggccagcagcctgcaagaaaaagattgaattttggtcagactggagacgcagactcagtacctgacccccagcctctcggacagccaccagcagccccctctggtctgggaactaatacgatggctacaggcagtggcgcaccaatggcagacaataacgagggcgccgacggagtgggtaattcctcgggaaattggcattgcgattccacatggatgggcgacagagtcatcaccaccagcacccgaacctgggccctgcccacctacaacaaccacctctacaaacaaatttccagccaatcaggagcctcgaacgacaatcactactttggctacagcaccccttgggggtattttgacttcaacagattccactgccacttttcaccacgtgactggcaaagactcatcaacaacaactggggattccgacccaagagactcaacttcaagctctttaacattcaagtcaaagaggtcacgcagaatgacggtacgacgacgattgccaataaccttaccagcacggttcaggtgtttactgactcggagtaccagctcccgtacgtcctcggctcggcgcatcaaggatgcctcccgccgttcccagcagacgtcttcatggtgccacagtatggatacctcaccctgaacaacgggagtcaggcagtaggacgctcttcattttactgcctggagtactttccttctcagatgctgcgtaccggaaacaactttaccttcagctacacttttgaggacgttcctttccacagcagctacgctcacagccagagtctggaccgtctcatgaatcctctcatcgaccagtacccgtattacttgagcagaacaaacactccaagtggaaccaccacgcagtcaaggcttcagttttctcaggccggagcgagtgacattcgggaccagtctaggaactggcttcctggaccctgttaccgccagcagcgagtatcaaagacatctgcggataacaacaacagtgaatactcgtggactggagctaccaagtaccacctcaatggcagagactctctggtgaatccgggcccggccatggcaagccacaaggacgatgaagaaaagttttttcctcagagcggggttctcatctttgggaagcaaggctcagagaaaacaaatgtggacattgaaaaggtcatgattacagacgaagaggaaatcaggacaaccaatcccgtggctacggagcagtatggttctgtatctaccaacctccagagaggcaacagacaagcagctaccgcagatgtcaacacacaaggcgttcttccaggcacggtctggcaggacagagatgtgtaccttcaggggcccatctgggcaaagattccacacacggacggacattttcacccctctcccctcatgggtggattcggacttaaacaccctcctccacagattctcatcaagaacaccccggtacctgcgaatccttcgaccaccttcagtgcggcaaagtttgcttccttcatcacacagtactccacgggacaggtcagcgtggagatcgagtgggagctgcagaaggaaaacagcaaacgctggaatcccgaaattcagtacacttccaactacaacaagtctgttaatgtggactttactgtggacactaatggcgtgtattcagagcctcgccccattggcaccagatacctgactcgtaatctgtaa

SEQ ID NO: 11945 - DNA, 2208 bp, Artificial Sequence
  source: /note="Description of Artificial Sequence: Synthetic polynucleotide"
atggctgccgatggttatcttccagattggctcgaggacactctctctgaaggaataagacagtggtggaagctcaaacctggcccaccaccaccaaagcccgcagagcggcataaggacgacagcaggggtcttgtgcttcctgggtacaagtacctcggacccttcaacggactcgacaagggagagccggtcaacgaggcagacgccgcggccctcgagcacgacaaagcctacgaccggcagctcgacagcggagacaacccgtacctcaagtacaaccacgccgacgcggagtttcaggagcgccttaaagaagatacgtcttttgggggcaacctcggacgagcagtcttccaggcgaaaaagagggctcttgaacctctgggcctggttgaggaacctgttaagacggctccgggaaaaaagaggccggtagagcactctcctgtggagccagactcctcctcgggaaccggaaaggcgggccagcagcctgcaagaaaaagattgaattttggtcagactggagacgcagactcagtacctgacccccagcctctcggacagccaccagcagccccctctggtctgggaactaatacgatggctacaggcagtggcgcaccaatggcagacaataacgagggcgccgacggagtgggtaattcctcgggaaattggcattgcgattccacatggatgggcgacagagtcatcaccaccagcacccgaacctgggccctgcccacctacaacaaccacctctacaaacaaatttccagccaatcaggagcctcgaacgacaatcactactttggctacagcaccccttgggggtattttgacttcaacagattccactgccacttttcaccacgtgactggcaaagactcatcaacaacaactggggattccgacccaagagactcaacttcaagctctttaacattcaagtcaaagaggtcacgcagaatgacggtacgacgacgattgccaataaccttaccagcacggttcaggtgtttactgactcggagtaccagctcccgtacgtcctcggctcggcgcatcaaggatgcctcccgccgttcccagcagacgtcttcatggtgccacagtatggatacctcaccctgaacaacgggagtcaggcagtaggacgctcttcattttactgcctggagtactttccttctcagatgctgcgtaccggaaacaactttaccttcagctacacttttgaggacgttcctttccacagcagctacgctcacagccagagtctggaccgtctcatgaatcctctcatcgaccagtacctgtattacttgagcagaacaaacactccaagtggaaccaccacgcagtcaaggcttcagttttctcaggccggagcgagtgacattcgggaccagtctaggaactggcttcctggaccctgttaccgccagcagcgagtatcaaagacatctgcggataacaacaacagtgaatactcgtggactggagctaccaagtaccacctcaatggcagagactctctggtgaatccgggcccggccatggcaagccacaaggacgatgaagaaaagttttttcctcagagcggggttctcatctttgggaagcaaggctcagagaaaacaaatgtggacattgaaaaggtcatgattacagacgaagaggaaatcaggacaaccaatcccgtggctacggagcagtatggttctgtatctaccaacctccagagaggcaacagacaagcagctaccgcagatgtcaacacacaaggcgttcttccaggcacggtctggcaggacagagatgtgtaccttcaggggcccatctgggcaaagattccacacacggacggacattttcacccctctcccctcatgggtggattcggacttaaacaccctcctccacagattctcatcaagaacaccccggtacctgcgaatccttcgaccaccttcagtgcggcaaagtttgcttccttcatcacacagtactccacgggacaggtcagcgtggagatcgagtgggagctgcagaaggaaaacagcaaacgctggaatcccgaaattcagtacacttccaactacaacaagtctgttaatgtggactttactgtggacactaatggcgtgtattcagagcctcgccccattggcaccagatacctgactcgtaatctgtaa

SEQ ID NO: 11946 - DNA, 2208 bp, Artificial Sequence
  source: /note="Description of Artificial Sequence: Synthetic polynucleotide"
atggctgccgatggttatcttccagattggctcgaggacactctctctgaaggaataagacagtggtggaagctcaaacctggcccaccaccaccaaagcccgcagagcggcataaggacgacagcaggggtcttgtgcttcctgggtacaagtacctcggacccttcaacggactcgacaagggagagccggtcaacgaggcagacgccgcggccctcgagcacgacaaagcctacgaccggcagctcgacagcggagacaacccgtacctcaagtacaaccacgccgacgcggagtttcaggagcgccttaaagaagatacgtcttttgggggcaacctcggacgagcagtcttccaggcgaaaaagagggttcttgaacctctgggcctggttggggaacctgttaagacggctccgggaaaaaagaggccggtagagcactctcctgtggagccagactcctcctcgggaaccggaaaggcgggccagcagcctgcaagaaaaagattgaattttggtcagactggagacgcagactcagtacctgacccccagcctctcggacagccaccagcagccccctctggtctgggaactaatacgatggctacaggcagtggcgcaccaatggcagacaataacgagggcgccgacggagtgggtaattcctcgggaaattggcattgcgattccacatggatgggcgacagagtcatcaccaccagcacccgaacctgggccctgcccacctacaacaaccacctctacaaacaaatttccagccaatcaggagcctcgaacgacaatcactactttggctacagcaccccttgggggtattttgacttcaacagattccactgccacttttcaccacgtgactggcaaagactcatcaacaacaactggggattccgacccaagagactcaacttcaagctctttaacattcaagtcaaagaggtcacgcagaatgacggtacgacgacgattgccaataaccttaccagcacggttcaggtgtttactgactcggagtaccagctcccgtacgtcctcggctcggcgcatcaaggatgcctcccgccgttcccagcagacgtcttcatggtgccacagtatggatacctcaccctgaacaacgggagtcaggcagtaggacgctcttcattttactgcctggagtactttccttctcagatgctgcgtaccggaaacaactttaccttcagctacacttttgaggacgttcctttccacagcagctacgctcacagccagagtctggaccgtctcatgaatcctctcatcgaccagtacctgtattacttgagcagaacaaacactccaagtggaaccaccacgcagtcaaggcttcagttttctcaggccggagcgagtgacattcgggaccagtctaggaactggcttcctggaccctgttaccgccagcagcgagtatcaaagacatctgcggataacaacaacagtgaatactcgtggactggagctaccaagtaccacctcaatggcagagactctctggtgaatccgggcccggccatggcaagccacaaggacgatgaagaaaagttttttcctcagagcggggttctcatctttgggaagcaaggctcagagaaaacaaatgtggacattgaaaaggtcatgattacagacgaagaggaaatcaggacaaccaatcccgtggctacggagcagtatggttctgtatctaccaacctccagagaggcaacagacaagcagctaccgcagatgtcaacacacaaggcgttcttccaggcatggtctggcaggacagagatgtgtaccttcaggggcccatctgggcaaagattccacacacggacggacattttcacccctctcccctcatgggtggattcggacttaaacaccctcctccacagattctcatcaagaacaccccggtacctgcgaatccttcgaccaccttcagtgcggcaaagtttgcttccttcatcacacagtactccacgggacaggtcagcgtggagatcgagtgggagctgcagaaggaaaacagcaaacgctggaatcccgaaattcagtacacttccaactacaacaagtctgttaatgtggactttactgtggacactaatggcgtgtattcagagcctcgccccattggcaccagatacctgactcgtaatctgtaa

SEQ ID NO: 11947 - DNA, 2208 bp, Artificial Sequence
  source: /note="Description of Artificial Sequence: Synthetic polynucleotide"
atggctgccgatggttatcttccagattggctcgaggacactctctctgaaggaataagacagtggtggaagctcaaacctggcccaccaccaccaaagcccgcagagcggcataaggacgacagcaggggtcttgtgcttcctgggtacaagtacctcggacccttcaacggactcgacaagggagagccggtcaacgaggcagacgccgcggccctcgagcacgacaaagcctacgaccggcagcccgacagcggagacaacccgtacctcaagtacaaccacgccgacgcggagtttcaggagcgccttaaagaagatacgtcttttgggggcaacctcggacgagcagtcttccaggcgaaaaagagggttcttgaacctctgggcctggttgaggaacctgttaagacggctccgggaaaaaagaggccggtagagcactctcctgtggagccagactcctcctcgggaaccggaaaggcgggccagcagcctgcaagaaaaagattgaattttggtcagactggagacgcagactcagtacctgacccccagcctctcggacagccaccagcagccccctctggtctgggaactaatacgatggctacaggcagtggcgcaccaatggcagacaataacgagggcgccgacggagtgggtaattcctcgggaaattggcattgcgattccacatggatgggcgacagagtcatcaccaccagcacccgaacctgggccctgcccacctacaacaaccacctctacaaacaaatttccagccaatcaggagcctcgaacgacaatcactactttggctacagcaccccttgggggtattttgacttcaacagattccactgccacttttcaccacgtgactggcaaagactcatcaacaacaactggggattccgacccaagagactcaacttcaagctctttaacattcaagtcaaagaggtcacgcagaatgacggtacgacgacgattgccaataaccttaccagcacggttcaggtgtttactgactcggagtaccagctcccgtacgtcctcggctcggcgcatcaaggatgcctcccgccgttcccagcagacgtcttcatggtgccacagtatggatacctcaccctgaacaacgggagtcaggcagtaggacgctcttcattttactgcctggagtactttccttctcagatgctgcgtaccggaaacaactttaccttcagctacacttttgaggacgttcctttccacagcagctacgctcacagccagagtctggaccgtctcatgaatcctctcatcgaccagtacctgtattacttgagcagaacaaacactccaagtggaaccaccacgcagtcaaggcttcagttttctcaggccggagcgagtgacattcgggaccagtctaggaactggcttcctggaccctgttaccgccagcagcgagtatcaaagacatctgcggataacaacaacagtgaatactcgtggactggagctaccaagtaccacctcaatggcagagactctctggtgaatccgggcccggccatggcaagccacaaggacgatgaagaaaagttttttcctcagagcggggttctcatctttgggaagcaaggctcagagaaaacaaatgtggacattgaaaaggtcatgattacagacgaagaggaaatcaggacaaccaatcccgtggctacggagcagtatggttctgtatctaccaacctccagagaggcaacagacaagcagctaccgcagatgtcaacacacaaggcgttcttccaggcacggtctggcaggacagagatgtgtaccttcaggggcccatctgggcaaagattccacacacggacggacattttcacccctctcccctcatgggtggattcggacttaaacaccctcctccacagattctcatcaagaacaccccggtacctgcgaatccttcgaccaccttcagtgcggcaaagtttgcttccttcatcacacagtactccacgggacaggtcagcgtggagatcgagtgggagctgcagaaggaaaacagcaaacgctggaatcccgaaattcagtacacttccaactacaacaagtctgttaatgtggactttactgtggacactaatggcgtgtattcagagcctcgccccattggcaccagatacctgactcgtaatctgtaa

SEQ ID NO: 11948 - DNA, 2208 bp, Artificial Sequence
  source: /note="Description of Artificial Sequence: Synthetic polynucleotide"
atggctgccgatggttatcttccagattggctcgaggacactctctctgaaggaataagacagtggtggaagctcaaacctggcccaccaccaccaaagcccgcagagcggcataaggacgacagcaggggtcttgtgcttcctgggtacaagtacctcggacccttcaacggactcgacaagggagagccggtcaacgaggcagacgccgcggccctcgagcacgacaaagcctacgaccggcagctcgacagcggagacaacccgtacctcaagtacaaccacgccgacgcggagtttcaggagcgccttaaagaagatacgtcttttgggggcaacctcggacgagcagtcttccaggcgaaaaagagggttcttgaacctctgggcctggttgaggaacctgttaagacggctccgggaaaaaagaggccggtagagcactctcctgtggagccagactcctcctcgggaaccggaaaggcgggccagcagcctgcaagaaaaagattgaattttggtcagactggagacgcagactcagtacctgacccccagcctctcggacagccaccagcagccccctctggtctgggaactaatacgatggctacaggcagtggcgcaccaatggcagacaataacgagggcgccgacggagtgggtaattcctcgggaaattggcattgcgattccacatggatgggcgacagagtcatcaccaccagcacccgaacctgggccctgcccacctacaacaaccacctctacaaacaaatttccagccaatcaggagcctcgaacgacaatcactactttggctacagcaccccttgggggtattttgacttcaacagattccactgccacttttcaccacgtgactggcaaagactcatcaacaacaactggggattccgacccaagagactcaacttcaagctctttaacattcaagtcaaagaggtcacgcagaatgacggtacgacgacgattgccaataaccttaccagcacggttcaggtgtttactgactcggagtaccagctcccgtacgtcctcggctcggcgcatcaaggatgcctcccgccgttcccagcagacgtcttcatggtgccacagtatggatacctcaccctgaacaacgggagtcaggcagtaggacgctcttcattttactgcctggagtactttccttctcagatgctgcgtaccggaaacaactttaccttcagctacacttttgaggacgttcctttccacagcagctacgctcacagccagagtctggaccgtctcatgaatcctctcatcgaccagtacctgtattacttgagcagaacaaacaccccaagtggaaccaccacgcagtcaaggcttcagttttctcaggccggagcgagtgacattcgggaccagtctaggaactggcttcctggaccctgttaccgccagcagcgagtatcaaagacatctgcggataacaacaacagtgaatactcgtggactggagctaccaagtaccacctcaatggcagagactctctggtgaatccgggcccggccatggcaagccacaaggacgatgaagaaaagttttttcctcagagcggggttctcatctttgggaagcaaggctcagagaaaacaaatgtggacattgaaaaggtcatgattacagacgaagaggaaatcaggacaaccaatcccgtggctacggagcagtatggttctgtatctaccaacctccagagaggcaacagacaagcagctaccgcagatgtcaacacacaaggcgttcttccaggcatggtctggcaggacagagatgtgtaccttcaggggcccatctgggcaaagattccacacacggacggacattttcacccctctcccctcatgggtggattcggacttaaacaccctcctccacagattctcatcaagaacaccccggtacctgcgaatccttcgaccaccttcagtgcggcaaagtttgcttcctccatcacacagtactccacgggacaggtcagcgtggagatcgagtgggagctgcagaaggaaaacagcaaacgctggaatcccgaaattcagtacacttccaactacaacaagtctgttaatgtggactttactgtggacactaatggcgtgtattcagagcctcgccccattggcaccagatacctgactcgtaatctgtaa

SEQ ID NO: 11949 - DNA, 2208 bp, Artificial Sequence
  source: /note="Description of Artificial Sequence: Synthetic polynucleotide"
atggctgccgatggttatcttccagattggctcgaggacactctctctgaaggaataagacagtggtggaagctcaaacctggcccaccaccaccaaagcccgcagagcggcataaggacgacagcaggggtcttgtgcttcctgggtacaagtacctcggacccttcaacggactcgacaagggagagccggtcaacgaggcagacgccgcggccctcgagcacgacaaagcctacgaccggcagctcgacagcggagacaacccgtacctcaagtacaaccacgccgacgcggagtttcaggagcgccttaaagaagatacgtcttttgggggcaacctcggacgagcagtcttccaggcgaaaaagagggttcttgaacctctgggcctggttgaggaacctgttaagacggctccgggaaaaaagaggccggtagagcactctcctgtggagccagactcctcctcgggaaccggaaaggcgggccagcagcctgcaagaaaaagattgaattttggtcagactggagacgcagactcagtacctgacccccagcctctcggacagccaccagcagccccctctggtctgggaactaatacgatggctacaggcagtggcgcaccaatggcagacaataacgagggcgccgacggagtgggtaattcctcgggaaattggcattgcgattccacatggatgggcgacagagtcatcaccaccagcacccgaacctgggccctgcccacctacaacaaccacctctacaaacaaatttccagccaatcaggagcctcgaacgacaatcactactttggctacagcaccccttgggggtattttgacctcaacagattccactgccacttttcaccacgtgactggcaaagactcatcaacaacaactggggattccgacccaagagactcaacttcaagctctttaacattcaagtcaaagaggtcacgcagaatgacggtacgacgacgattgccaataaccttaccagcacggttcaggtgtttactgactcggagtaccagctcccgtacgtcctcggctcggcgcatcaaggatgcctcccgccgttcccagcagacgtcttcatggtgccacagtatggatacctcaccctgaacaacgggagtcaggcagtaggacgctcttcattttactgcctggagtactttccttctcagatgctgcgtaccggaaacaactttaccttcagctacacttttgaggacgttcctttccacagcagctacgctcacagccagagtctggaccgtctcatgaatcctctcatcgaccagtacctgtattacttgagcagaacaaacactccaagtggaaccaccacgcagtcaaggcttcagttttctcaggccggagcgagtgacattcgggaccagtctaggaactggcttcctggaccctgttaccgccagcagcgagtatcaaagacatctgcggataacaacaacagtgaatactcgtggactggagctaccaagtaccacctcaatggcagagactctctggtgaatccgggcccggccatggcaagccacaaggacgatgaagaaaagttttttcctcagagcggggttctcatctttgggaagcaaggctcagagaaaacaaatgtggacattgaaaaggtcatgattacagacgaagaggaaatcaggacaaccaatcccgtggctacggagcagtatggttctgtatctaccaacctccagagaggcaacagacaagcagctaccgcagatgtcaacacacaaggcgttcttccaggcacggtctggcaggacagagatgtgtaccttcaggggcccatctgggcaaagattccacacacggacggacattttcacccctctcccctcatgggtggattcggacttaaacaccctcctccacagattctcatcaagaacaccccggtacctgcgaatccttcgaccaccttcagtgcggcaaagtttgcttccttcatcacacagtactccacgggacaggtcagcgtggagatcgagtgggagctgcagaaggaaaacagcaaacgctggaatcccgaaattcagtacacttccaactacaacaagtctgttaatgtggactttactgtggacactaatggcgtgtattcagagcctcgccccattggcaccagatacctgactcgtaatctgtaa

SEQ ID NO: 11950 - DNA, 2208 bp, Artificial Sequence
  source: /note="Description of Artificial Sequence: Synthetic polynucleotide"
atggctgccgatggttatcttccagattggctcgaggacactctctctgaaggaataagacagtggtggaagctcaaacctggcccaccaccaccaaagcccgcagagcggcataaggacgacagcaggggtcttgtgcttcctgggtacaagtacctcggacccttcaacggactcgacaagggagagccggtcaacgaggcagacgccgcggccctcgagcacgacaaagcctacgaccggcagctcgacagcggagacaacccgtacctcaagtacaaccacgccgacgcggagtttcaggagcgccttaaagaagatacgtcttttgggggcaacctcggacgagcagtcttccaggcgaaaaagagggttcttgaacctctgggcctggttgaggaacctgttaagacggctccgggaaaaaagaggccggtagagcactctcctgtggagccagactcctcctcgggaaccggaaaggcgggccagcagcctgcaagaaaaagattgaattttggtcagactggagacgcagactcagtacctgacccccagcctctcggacagccaccagcagccccctctggtctgggaactaatacgatggctacaggcagtggcgcaccaatggcagacaataacgagggcgccgacggagtgggtaattcctcgggaaattggcattgcgattccacatggatgggcgacagagtcatcaccaccagcacccgaacctgggccctgcccacctacaacaaccacctctacaaacaaatttccagccaatcaggagcctcgaacgacaatcgctactttggctacagcaccccttgggggtattttgacttcaacagattccactgccacttttcaccacgtgactggcaaagactcatcaacaacaactggggattccgacccaagagactcaacttcaagctctttaacattcaagtcaaagaggtcacgcagaatgacggtacgacgacgattgccaataaccttaccagcacggttcaggtgtttactgactcggagtaccagctcccgtacgtcctcggctcggcgcatcaaggatgcctcccgccgttcccagcagacgtcttcatggtgccacagtatggatacctcaccctgaacaacgggagtcaggcagtaggacgctcttcattttactgcctggagtactttccttctcagatgctgcgtaccggaaacaactttaccttcagctacacttttgaggacgttcctttccacagcagctacgctcacagccagagtctggaccgtctcatgaatcctctcatcgaccagtacctgtattacttgagcagaacaaacactccaagtggaaccaccacgcagtcaaggcttcagttttctcaggccggagcgagtgacattcgggaccagtctaggaactggcttcctggaccctgttaccgccagcagcgagtatcaaagacatctgcggataacaacaacagtgaatactcgtggactggagctaccaagtaccacctcaatggcagagactctctggtgaatccgggcccggccatggcaagccacaaggacgatgaagaaaagttttttcctcagagcggggttctcatctttgggaagcaaggctcagagaaaacaaatgtggacattgaaaaggtcatgattacagacgaagaggaaatcaggacaaccaatcccgtggctacggagcagtatggttctgtatctaccaacctccagagaggcaacagacaagcagctaccgcagatgtcaacacacaaggcgttcttccaggcacggtctggcaggacagagatgtgtaccttcaggggcccatctgggcaaagattccacacacggacggacattttcacccctctcccctcatgggtggattcggacttaaacaccctcctccacagattctcatcaagaacaccccggtacctgcgaatccttcgaccaccttcagtgcggcaaagtttgcttccttcatcacacagtactccacgggacaggtcagcgtggagatcgagtgggagctgcagaaggaaaacagcaaacgctggaatcccgaaattcagtacacttccaactacaacaagtctgttaatgtggactttactgtggacactaatggcgtgtattcagagcctcgccccattggcaccagatacctgactcgtaatctgtaa

SEQ ID NO: 11951 - DNA, 2208 bp, Artificial Sequence
  source: /note="Description of Artificial Sequence: Synthetic polynucleotide"
atggctgccgatggttatcttccagattggctcgaggacactctctctgaaggaataagacagtggtggaagctcaaacctggcccaccaccaccaaagcccgcagagcggcataaggacgacagcaggggtcttgtgcttcctgggtacaagtacctcggacccttcaacggactcgacaagggagagccggtcaacgaggcagacgccgcggccctcgagcacgacaaagcctacgaccggcagctcgacagcggagacaacccgtacctcaagtacaaccacgccgacgcggagtttcaggagcgccttaaagaagatacgtcttttgggggcaacctcggacgagcagtcttccaggcgaaaaagagggttcttgaacctctgggcctggttgaggaacctgttaagacggctccgggaaaaaagaggccggtagagcactctcctgtggagccagactcctcctcgggaaccggaaaggcgggccagcagcctgcaagaaaaagattgaattttggtcagactggagacgcagactcagtacctgacccccagcctctcggacagccaccagcagccccctctggtctgggaactaatacgatggctacaggcagtggcgcaccaatggcagacaataacgagggcgccgacggagtgggtaattcctcgggaaattggcattgcgattccacatggatgggcgacagagtcatcaccaccagcacccgaacctgggccctgcccacctacaacaaccacctctacaaacaaatttccagccaatcaggagcctcgaacgacaatcactactttggctacagcaccccttgggggtattttgacttcaacagattccactgccacttttcaccacgtgactggcaaagactcatcaacaacaactggggattccgacccaagagactcaacttcaagctctttaacattcaagtcaaagaggtcacgcagaatgacggtacgacgacgattgccaataaccttaccagcacggttcaggtgtttactgactcggagtaccagctcccgtacgtcctcggctcggcgcatcaaggatgcctcccgccgttcccagcagacgtcttcatggtgccacagtatggatacctcaccctgaacaacgggagtcaggcagtaggacgctcttcattttactgcctggagtactttccttctcagatgctgcgtaccggaaacaactttaccttcagctacacttttgaggacgttcctttccacagcagctacgctcacagccagagtctggaccgtctcatgaatcctctcatcgaccagtacctgtattacttgagcagaacaaacactccaagtggaaccaccacgcagtcaaggcttcagttttctcaggccggagcgagtgacattcgggaccagtctaggaactggcttcctggaccctgttaccgccagcagcgagtatcaaagacatctgcggataacaacaacagtgaatactcgtggactggagctaccaagtaccacctcaatggcagagactctctggtgaatccgggcccggccatggcaagccacaaggacgatgaagaaaagttttttcctcagagcggggttctcatctttgggaagcaaggctcagagaaaacaaatgtggacattgaaaaggtcatgattacagacgaagaggaaatcaggacaaccaatcccgtggctacggagcagtatggttctgtatctaccaacctccagagaggcaacagacaagcagctaccgcagatgtcaacacacaaggcgttcttccaggcacggtctggcaggacagagatgtgtaccttcaggggcccatctgggcaaagattccacacacggacggacattttcacccctctcccctcatgggtggattcggacttaaacaccctcctccacagattctcatcaagaacaccccggtacctgcgaatccttcgaccaccttcagtgcggcaaagtttgcttccttcatcacacagtactccacgggacaggtcagcgtggagatcgagtgggagctgcagaaggaaaacagcaaacgctggaatcccgaaattcagtacacttccaactacaacaagtctgctaatgtggactttactgtggacactaatggcgtgtattcagagcctcgccccattggcaccagatacctgactcgtaatctgtaa

SEQ ID NO: 11952 - DNA, 2208 bp, Artificial Sequence
  source: /note="Description of Artificial Sequence: Synthetic polynucleotide"
atggctgccgatggttatcttccagattggctcgaggacactctctctgaaggaataagacagtggtggaagctcaaacctggcccaccaccaccaaagcccgcagagcggcataaggacgacagcaggggtcttgtgcttcctgggtacaagtacctcggacccttcaacggactcgacaagggagagccggtcaacgaggcagacgccgcggccctcgagcacgacaaagcctacgaccggcagctcgacagcggagacaacccgtacctcaagtacaaccacgccgacgcggagtttcaggagcgccttaaagaagatacgtcttttgggggcaacctcggacgagcagtcttccaggcgaaaaagagggttcttgaacctctgggcctggttgaggaacctgttaagacggctccgggaaaaaagaggccggtagagcactctcctgtggagccagactcctcctcgggaaccggaaaggcgggccagcagcctgcaagaaaaagattgaattttggtcagactggagacgcagactcagtacctgacccccagcctctcggacagccaccagcagccccctctggtctgggaactaatacgatggctacaggcagtggcgcaccaatggcaggcaataacgagggcgccgacggagtgggtaattcctcgggaaattggcattgcgattccacatggatgggcgacagagtcatcaccaccagcacccgaacctgggccctgcccacctacaacaaccacctctacaaacaaatttccagccaatcaggagcctcgaacgacaatcactactttggctacagcaccccttgggggtattttgacttcaacagattccactgccacttttcaccacgtgactggcaaagactcatcaacaacaactggggattccgacccaagagactcaacttcaagctctttaacattcaagtcaaagaggtcacgcagaatgacggtacgacgacgattgccaataaccttaccagcacggttcaggtgtttactgactcggagtaccagctcccgtacgtcctcggctcggcgcatcaaggatgcctcccgccgttcccagcagacgtcttcatggtgccacagtatggatacctcaccctgaacaacgggagtcaggcagtaggacgctcttcattttactgcctggagtactttccttctcagatgctgcgtaccggaaacaactttaccttcagctacacttttgaggacgttcctttccacagcagctacgctcacagccagagtctggaccgtctcatgaatcctctcatcgaccagtacctgtattacttgagcagaacaaacactccaagtggaaccaccacgcagtcaaggcttcagttttctcaggccggagcgagtgacattcgggaccagtctaggaactggcttcctggaccctgttaccgccagcagcgagtatcaaagacatctgcggataacaacaacagtgaatactcgtggactggagctaccaagtaccacctcaatggcagagactctctggtgaatccgggcccggccatggcaagccacaaggacgatgaagaaaagttttttcctcagagcggggttctcatctttgggaagcaaggctcagagaaaacaaatgtggacattgaaaaggtcatgattacagacgaagaggaaatcaggacaaccaatcccgtggctacggagcagtatggttctgtatctaccaacctccagagaggcaacagacaagcagctaccgcagatgtcaacacacaaggcgttcttccaggcacggtctggcaggacagagatgtgtaccttcaggggcccatctgggcaaagattccacacacggacggacattttcacccctctcccctcatgggtggattcggacttaaacaccctcctccacagattctcatcaagaacaccccggtacctgcgaatccttcgaccaccttcagtgcggcaaagtttgcttccttcatcacacagtactccacgggacaggtcagcgtggagatcgagtgggagctgcagaaggaaaacagcaaacgctggaatcccgaaattcagtacacttccaactacaacaagtctgttaatgtggactttactgtggacactaatggcgtgtattcagagcctcgccccattggcaccagatacctgactcgtaatctgtaa

SEQ ID NO: 11953 - DNA, 2208 bp, Artificial Sequence
  source: /note="Description of Artificial Sequence: Synthetic polynucleotide"
atggctgccgatggttatcttccagattggctcgaggacactctctctgaaggaataagacagtggtggaagctcaaacctggcccaccaccaccaaagcccgcagagcggcataaggacgacagcaggggtcttgtgcttcctgggtacaagtacctcggacccttcaacggactcgacaagggagagccggtcaacgaggcagacgccgcggccctcgagcacgacaaagcctacaaccggcagctcgacagcggagacaacccgtacctcaagtacaaccacgccgacgcggagtttcaggagcgccttaaagaagatacgtcttttgggggcaacctcggacgagcagtcttccaggcgaaaaagagggttcttgaacctctgggcctggttgaggaacctgttaagacggctccgggaaaaaagaggccggtagagcactctcctgtggagccagactcctcctcgggaaccggaaaggcgggccagcagcctgcaagaaaaagattgaattttggtcagactggagacgcagactcagtacctgacccccagcctctcggacagccaccagcagccccctctggtctgggaactaatacgatggctacaggcagtggcgcaccaatggcagacaataacgagggcgccgacggagtgggtaattcctcgggaaattggcattgcgattccacatggatgggcgacagagtcatcaccaccagcacccgaacctgggccctgcccacctacaacaaccacctctacaaacaaatttccagccaatcaggagcctcgaacgacaatcactactttggctacagcaccccttgggggtattttgacttcaacagattccactgccacttttcaccacgtgactggcaaagactcatcaacaacaactggggattccgacccaagagactcaacttcaagctctttaacattcaagtcaaagaggtcacgcagaatgacggtacgacgacgattgccaataaccttaccagcacggttcaggtgtttactgactcggagtaccagctcccgtacgtcctcggctcggcgcatcaaggatgcctcccgccgctcccagcagacgtcttcatggtgccacagtatggatacctcaccctgaacaacgggagtcaggcagtaggacgctcttcattttactgcctggagtactttccttctcagatgctgcgtaccggaaacaactttaccttcagctacacttttgaggacgttcctttccacagcagctacgctcacagccagagtctggaccgtctcatgaatcctctcatcgaccagtacctgtattacttgagcagaacaaacactccaagtggaaccaccacgcagtcaaggcttcagttttctcaggccggagcgagtgacattcgggaccagtctaggaactggcttcctggaccctgttaccgccagcagcgagtatcaaagacatctgcggataacaacaacagtgaatactcgtggactggagctaccaagtaccacctcaatggcagggactctctggtgaatccgggcccggccatggcaagccacaaggacgatgaagaaaagttttttcctcagagcggggttctcatctttgggaagcaaggctcagagaaaacaaatgtggacattgaaaaggtcatgattacagacgaagaggaaatcaggacaaccaatcccgtggctacggagcagtatggttctgtatctaccaacctccagagaggcaacagacaagcagctaccgcagatgtcaacacacaaggcgttcttccaggcatggtctggcaggacagagatgtgtaccttcaggggcccatctgggcaaagattccacacacggacggacattttcacccctctcccctcatgggtggattcggacttaaacaccctcctccacagattctcatcaagaacaccccggtacctgcgaatccttcgaccaccttcagtgcggcaaagtttgcttccttcatcacacagtactccacgggacaggtcagcgtggagatcgagtgggagctgcagaaggaaaacagcaaacgctggaatcccgaaattcagtacacttccaactacaacaagtctgttaatgtggactttactgtggacactaatggcgtgtattcagagcctcgccccattggcaccagatacctgactcgtaatctgtaa

SEQ ID NO: 11954 - DNA, 2208 bp, Artificial Sequence
  source: /note="Description of Artificial Sequence: Synthetic polynucleotide"
atggctgccgatggttatcttccagattggctcgaggacactctctctgaaggaataagacagtggtggaagctcaaacctggcccaccaccgccaaagcccgcagagcggcataaggacgacagcaggggtcttgtgcttcctgggtacaagtacctcggacccttcaacggactcgacaagggagagccggtcaacgaggcagacgccgcggccctcgagcacgacaaggcctacgaccggcagctcgacagcggagacaacccgtacctcaagtacaaccacgccgacgcggagtttcaggagcgccttaaagaagatacgtcttttgggggcaacctcgcaagagcagtattccaggcgaaaaagagggttcttgaacctctgggcctggttgaggagcctgttaagacggctccgggaaaaaagaggccggtagagcattctcctgcggagccagactcctcctcgggaaccggaaaagcgggccagcagcctgcgagaaagagattgaatttcggtcagactggagacgcagactccgtacctgacccccagcctctcggacagccaccagcagccccctctggtctgggaactaatacgatggctacaggcagtggcgcaccaatggcagacaataacgagggtgccgacggagtgggtaattcctcaggaaattggcattgcgattccacatggatgggcgacagagtcatcaccaccagcacccgcacctgggctctgcccacctacaacaaccatctgtacaagcagatctccagccaatctggagccagcaacgacaaccactactttggctacagcaccccttgggggtattttgacttcaacagattccactgccacttctccccacgtgactggcaaagactcatcaacaacaactggggattccggcccaagagactcagcttcaagctctttaacattcaagtcaaggaggtcacgcagaatgacggtgcgacgacgattgccaataaccttaccagcacggttcaggtctttactgactcggagtaccagctcccgtacgtcctcggctcggcgcatcaaggatgcctcccgccgttcccagcagacgtcttcatggtgccacagtatggatacctcaccctgaacaacgggagtcaggcggtaggacgctcttcattttactgcctggagtacttcccttctcagatgcttcgcacgggaaacaactttaccttcagctacacctttgaggacgtgccttttcacagcagctacgctcacagccaaagtctggaccgtctcatgaatcctctcatcgaccagtacctgtattacttgagcaaaacaaacgctccaagcggaaccaccacgatgtccaggcttcagttttctcaggccggagcaagtgacattcgggaccagtctagaaactggcttcctggaccctgttaccgccagcagcgagtatcaaagacagctgcggacaacaacaacagtgattactcgtggactggagctaccaagtaccacctcaatggaagagactctctggtgaacccgggcccagctatggccagccacaaggacgatgaagaaaaatattttcctcagagcggggttctcatcttcgggaaacaaggctcaaataaaactaatgtggacattgaaaaggttatgattacagacgaagaggaaatcaggaccaccaatcccgtggctacggagcagtatggttctgtatctaccaaccttcaaagcggcaacacacaagcagctacctcagatgtcaacacacaaggcgttcttcctggcatggtctggcaggacagagatgtgtacctgcaggggcccatctgggcaaagattccacacacggatggacactttcacccttctcctcttatgggaggatttggactgaagcaccctcccccgcagattctcatcaagaataccccggtacctgcgaatccttcgaccaccttcagtgcggcaaagtttgcttctttcatcacacagtactccacggggcaggtcagcgtggagatcgagtgggagctgcagaaggagaacagcaaacgctggaaccccgagatccagtatacttccaactacaacaaatctgttaatgtggactttactgtggacactaatggtgtgtattcagagcctcgccccattggcaccagatacctgactcgtaatctgtaa

SEQ ID NO: 11955 - DNA, 2205 bp, Artificial Sequence
  source: /note="Description of Artificial Sequence: Synthetic polynucleotide"
atggctgccgatggttatcttccagattggctcgaggacactctctctgaaggaataagacagtggtggaagctcaaacctggcccaccaccaaagcccgcagagcggcataaggacgacagcaggggtcttgtgcttcctgggtacaagtacctcggacccttcaacggactcgacaagggagagccggtcaacgaggcagacgccgcggccctcgagcacgacaaagcctacgaccggcagctcgacagcggagacaacccgtacctcaagtacaaccacgccgacgcggagtttcaggagcgccttaaagaagatacgtcttttgggggcaacctcggacgagcagtcttccaggcgaaaaagagggctcttgaacctctgggcctggttgaggaacctgttaagacggctccgggaaaaaagaggccggtagagcactctcctgtggagccagactcctcctcgggaaccggaaaggcgggccagcagcctgcaagaaaaagattgaattttggtcagactggagacgcagactcagtacctgacccccagcctctcggacagccaccagcagccccctctggtctgggaactaatacgatggctacaggcagtggcgcaccaatggcagacaataacgagggcgccgacggagtgggtaattcctcgggaaattggcattgcgattccacatggatgggcgacagagtcatcaccaccagcacccgaacctgggccctgcccacctacaacaaccacctctacaaacaaatttccagccaatcaggagcctcgaacgacaatcactactttggctacagcaccccttgggggtattttgacttcaacagattccactgccacttttcaccacgtgactggcaaagactcatcaacaacaactggggattccgacccaagagactcaacttcaagctctttaacattcaagtcaaagaggtcacgcagaatgacggtacgacgacgattgccaataaccttaccagcacggttcaggtgtttactgactcggagtaccagctcccgtacgtcctcggctcggcgcatcaaggatgcctcccgccgttcccagcagacgtcttcatggtgccacagtatggatacctcaccctgaacaacgggagtcaggcagtaggacgctcttcattttactgcctggagtactttccttctcagatgctgcgtaccggaaacaactttaccttcagctacacttttgaggacgttcctttccacagcagctacgctcacagccagagtctggaccgtctcatgaatcctctcatcgaccagtacctgtattacttgagcagaacaaacactccaagtggaaccaccacgcagtcaaggcttcagttttctcaggccggagcgagtgacattcgggaccagtctaggaactggcttcctggaccctgttaccgccagcagcgagtatcaaagacatctgcggataacaacaacagtgaatactcgtggactggagctaccaagtaccacctcaatggcagagactctctggtgaatccgggcccggccatggcaagccacaaggacgatgaagaaaagttttttcctcagagcggggttctcatctttgggaagcaaggctcagagaaaacaaatgtggacattgaaaaggtcatgattacagacgaagaggaaatcaggacaaccaatcccgtggctacggagcagtatggttctgtatctaccaacctccagagaggcaacagacaagcagctaccgcagatgtcaacacacaaggcgttcttccaggcatggtctggcaggacagagatgtgtaccttcaggggcccatctgggcaaagattccacacacggacggacattttcacccctctcccctcatgggtggattcggacttaaacaccctcctccacagattctcatcaagaacaccccggtacctgcgaatccttcgaccaccttcagtgcggcaaagtttgcttccttcatcacacagtactccacgggacaggtcagcgtggagatcgagtgggagctgcagaaggaaaacagcaaacgctggaatcccgaaattcagtacacttccaactacaacaagtctgttaatgtggactttactgtggacactaatggcgtgtattcagagcctcgccccattggcaccagatacctgactcgtaatctgtaa

SEQ ID NO: 11956 - DNA, 2208 bp, Artificial Sequence
  source: /note="Description of Artificial Sequence: Synthetic polynucleotide"
atggctgccgatggttatcttccagattggctcgaggacactctctctgaaggaataagacagtggtggaagctcaaacctggcccaccaccgccaaagcccgcagagcggcataaggacgacagcaggggtcttgtgcttcctgggtacaagtacctcggacccttcaacggactcgacaagggagagccggtcaacgaggcagacgccgcggccctcgagcacgacaaggcctacgaccggcagctcgacagcggagacaacccgtacctcaagtacaaccacgccgacgcggagtttcaggagcgccttaaagaagatacgtcttttgggggcaacctcgcaagagcagtattccaggcgaaaaagagggttcttgaacctctgggcctggttgaggagcctgttaagacggctccgggaaaaaagaggccggtagagcattctcctgcggagccagactcctcctcgggaaccggaaaagcgggccagcagcctgcgagaaagagattgaatttcggtcagactggagacgcagactccgtacctgacccccagcctctcggacagccaccagcagccccctctggtctgggaactaatacgatggctacaggcagtggcgcaccaatggcagacaataacgagggtgccgacggagtgggtaattcctcaggaaattggcattgcgattccacatggatgggcgacagagtcatcaccaccagcacccgcacctgggctctgcccacctacaacaaccatctgtacaagcagatctccagccaatctggagccagcaacgacaaccactactttggctacagcaccccttgggggtattttgacttcaacagattccactgccacttctccccacgtgactggcaaagactcatcaacaacaactggggattccggcccaagagactcagcttcaagctctttaacattcaagtcaaggaggtcacgcagaatgacggtacgacgacgattgccaataaccttaccagcacggttcaggtctttactgactcggagtaccagctcccgtacgtcctcggctcggcgcatcaaggatgcctcccgccgttcccagcagacgtcttcatggtgccacagtatggatacctcaccctgaacaacgggagtcaggcggtaggacgctcttcattttactgcctggagtacttcccttctcagatgcttcgcacgggaaacaactttaccttcagctacacctttgaggacgtgccttttcacagcagctacgctcacagccaaagtctggaccgtctcatgaatcctctcatcgaccagtacctgtattacttgagcaaaacaaacgctccaagcggaaccaccacgatgtccaggcttcagttttctcaggccggagcaagtgacattcgggaccagtctagaaactggcttcctggaccctgttaccgccagcagcgagtatcaaagacagctgcggacaacaacaacagtgattactcgtggactggagctaccaagtaccacctcaatggaagagactctctggtgaacccgggcccagctatggccagccacaaggacgatgaagaaaaatattttcctcagagcggggttctcatcttcgggaaacaaggctcaaataaaactaatgtggacattgaaaaggttatgattacagacgaagaggaaatcaggaccaccaatcccgtggctacggagcagtatggttctgtatctaccaaccttcaaagcggcaacacacaagcagctacctcagatgtcaacacacaaggcgttcttcctggcatggtctggcaggacagagatgtgtacctgcaggggcccatctgggcaaagattccacacacggatggacactttcacccttctcctcttatgggaggatttggactgaagcaccctcccccgcagattctcatcaagaataccccggtacctgcgaatccttcgaccaccttcagtgcggcaaagtttgcttctttcatcacacagtactccacggggcaggtcagcgtggagatcgagtgggagctgcagaaggagaacggcaaacgctggaaccccgagatccagtatacttccaactacaacaaatctgttaatgtggactttactgtggacactaatggtgtgtattcagagcctcgccccattggcaccagatacctgactcgtaatctgtaa

SEQ ID NO: 11957 - DNA, 2208 bp, Artificial Sequence
  source: /note="Description of Artificial Sequence: Synthetic polynucleotide"
atggctgccgatggttatcttccagattggctcgaggacactctctctgaaggaataagacagtggtggaagctcaaacctggcccaccaccaccaaagcccgcagagcggcataaggacgacagcaggggtcttgtgcttcctgggtacaagtacctcggacccttcaacggactcgacaagggagagccggtcaacgaggcagacgccgcggccctcgagcacgacaaagcctacgaccggcagctcgacagcggagacaacccgtacctcaagtacaaccacgccgacgcggagtttcaggagcgccttaaagaagatacgtcttttgggggcaacctcggacgagcagtcttccaggcgaaaaagagggttcttgaacctctgggcctggttgaggaacctgttaagacggctccgggaaaaaagaggccggtagagcactctcctgtggagccagactcctcctcgggaaccggaaaggcgggccagcagcctgcaagaaaaagattgaattttggtcagactggagacgcagactcagtacctgacccccagcctctcggacagccaccagcagccccctctggtctgggaactaatacgatggctacaggcagtggcgcaccaatggcagacaataacgagggcgccgacggagtgggtaattcctcgggaaattggcattgcgattccacatggatgggcgacagagtcatcaccaccagcacccgaacctgggccctgcccacctacaacaaccacctctacaaacaaatttccagccaatcaggggcctcgaacgacaatcactactttggctacagcaccccttgggggtattttgacttcaacagattccactgccacttttcaccacgtgactggcaaagactcatcaacaacaactggggattccgacccaagagactcaacttcaagctctttaacattcaagtcaaagaggtcacgcagaatgacggtacgacgacgattgccaataaccttaccagcacggttcaggtgtttactgactcggagtaccagctcccgtacgtcctcggctcggcgcatcaaggatgcctcccgccgttcccagcagacgtcttcatggtgccacagtatggatacctcaccctgaacaacgggagtcaggcagtaggacgctcttcattttactgcctggagtactttccttctcagatgctgcgtaccggaaacaactttaccttcagctacacttttgaggacgttcctttccacagcagctacgctcacagccagagtctggaccgtctcatgaatcctctcattgaccagtacctgtattacttgagcagaacaaacactccaagtggaaccaccacgcagtcaaggcttcagttttctcaggccggagcgagtgacattcgggaccagtctaggaactggcttcctagaccctgttaccgccagcagcgagtatcaaagacatctgcggataacaacaacagtgaatactcgtggactggagctaccaagtaccacctcaatggcagagactctctggtgaatccgggcccggccatggcaagccacaaggacgatgaagaaaagttttttcctcagagcggggttctcatctttgggaagcaaggctcagagaaaacaaatgtggacattgaaaaggtcatgattacagacgaagaggaaatcaggacaaccaatcccgtggctacggagcagtatggttctgtatctaccaacctccagagaggcaacagacaagcagctaccgcagatgtcaacacacaaggcgttcttccaggcacggtctggcaggacagagatgtgtaccttcaggggcccatctgggcaaagattccacacacggacggacattttcacccctctcccctcatgggtggattcggacttaaacaccctcctccacagattctcatcaagaacaccccggtacctgcgaatccttcgaccaccttcagtgcggcaaagtttgcttccttcatcacacagtactccacgggacaggtcagcgtggagatcgagtgggagctgcagaaggaaaacagcaaacgctggaatcccgaaattcagtacacttccaactacaacaagtctgttaatgtggactttactgtggacactaatggcgtgtattcagagcctcgccccattggcaccagatacctgactcgtaatctgtaa

SEQ ID NO: 11958 - DNA, 2208 bp, Artificial Sequence
  source: /note="Description of Artificial Sequence: Synthetic polynucleotide"
atggctgccgatggttatcttccagattggctcgaggacactctctctgaaggaataagacagtggtggaagctcaaacctggcccaccaccaccaaagcccgcagagcggcataaggacgacagcaggggtcttgtgcttcctgggtacaagtacctcggacccttcaacggactcgacaagggagagccggtcaacgaggcagacgccgcggccctcgagcacgacaaagcctacgaccggcagctcgacagcggagacaacccgtacctcaagtacaaccacgccgacgcggagtttcaggagcgccttaaagaagatacgtcttttgggggcaacctcggacgagcagtcttccaggcgaaaaagagggctcttgaacctctgggcctggttgaggaacctgttaagacggctccgggaaaaaagaggccggtagagcactctcctgtggagccagactcctcctcgggaaccggaaaggcgggccagcagcctgcaagaaaaagattgaattttggtcagactggagacgcagactcagtacctgacccccagcctctcggacagccaccagcagccccctctggtctgggaactaatacgatggctacaggcagtggcgcaccaatggcagacaataacgagggcgccgacggagtgggtaattcctcgggaaattggcattgcgattccacatggatgggcgacagagtcatcaccaccagcacccgaacctgggccctgcccacctacaacaaccacctctacaaacaaatttccagccaatcaggagcctcgaacgacaatcactactttggctacagcaccccttgggggtattttgacttcaacagattccactgccacttttcaccacgtgactggcaaagactcatcaacaacaactggggattccgacccaagagactcaacttcaagctctttaacattcaagtcaaagaggtcacgcagaatgacggtacgacgacgattgccaataaccttaccagcacggttcaggtgtttactgactcggagtaccagctcccgtacgtcctcggctcggcgcatcaaggatgcctcccgccgttcccagcagacgtcttcatggtgccacagtatggatacctcaccctgaacaacgggagtcaggcagtaggacgctcttcattttactgcctggagtactttccttctcagatgctgcgtaccggaaacaactttaccttcagctacacttttgaggacgttcctttccacagcagctacgctcacagccagagtctggaccgtctcatgaatcctctcatcgaccagtacctgtattacttgagcagaacaaacactccaagtggaaccaccacgcagtcaaggcttcagttttctcaggccggagcgagtgacattcgggaccagtctaggaactggcttcctggaccctgttaccgccagcagcgagtatcaaagacatctgcggataacaacaacagtgaatactcgtggactggagctaccaagtaccacctcaatggcagagactctctggtgaatccgggcccggccatggcaagccacaaggacgatgaagaaaagttttttcctcagagcggggttctcatctttgggaagcaaggctcagaggaaacaaatgtggacattgaaaaggtcatgattacagacgaagaggaaatcaggacaaccaatcccgtggctacggagcagtatggttctgtatctaccaacctccagagaggcaacagacaagcagctaccgcagatgtcaacacacaaggcgttcttccaggcatggtctggcaggacagagatgtgtaccttcaggggcccatctgggcaaagattccacacacggacggacattttcacccctctcccctcatgggtggattcggacttaaacaccctcctccacagattctcatcaagaacaccccggtacctgcgaatccttcgaccaccttcagtgcggcaaagtttgcttccttcatcacacagtactccacgggacaggtcagcgtggagatcgagtgggagctgcagaaggaaaacagcaaacgctggaatcccgaaattcagtacacttccaactacaacaagtctgttaatgtggactttactgtggacactaatggcgtgtattcagagcctcgccccattggcaccagatacctgactcgtaatctgtaa

SEQ ID NO: 11959 - DNA, 2208 bp, Artificial Sequence
  source: /note="Description of Artificial Sequence: Synthetic polynucleotide"
atggctgccgatggttatcttccagattggctcgaggacaccctctctgaaggaataagacagtggtggaagctcaaacctggcccaccaccaccgaagcccgcagagcggcataaggacgacagcaggggtcttgtgcttcctgggtacaagtacctcggacccttcaacggactcgacaagggagagccggccaacgaggcagacgccgcggccctcgagcacgacaaagcctacgaccggcagctcgacagcggagacaacccgtacctcaagtacaaccacgccgacgcggagtttcaggagcgccttaaagaagatacgtcttttgggggcaacctcggacgagcagtcttccaggcgaaaaagagggttcttgaacctctgggcctggttgaggaacctgttaagacggctccgggaaaaaagaggccggtagagcactctcctgtggagccagactcctcctcgggaaccggaaaggcgggccagcagcctgcaagaaaaagattgaattttggtcagactggagacgcagactcagtacctgacccccagcctctcggacagccaccagcagccccctctggtctgggaactaatacgatggctacaggcagtggcgcaccaatggcagacaataacgagggcgccgacggagtgggtaattcctcgggaaattggcattgcgattccacatggatgggcgacagagtcatcaccaccagcacccgaacctgggccctgcccacctacaacaaccacctctacaaacaaatttccagccaatcaggagcctcgaacgacaatcactactttggctacagcaccccttgggggtattttgacttcaacagattccactgccacttttcaccacgtgactggcaaagactcatcaacaacaactggggattccgacccaagagactcaacttcaagctctttaacattcaagtcaaagaggtcacgcagaatgacggtacgacgacgattgccaataaccttaccagcacggttcaggtgtttactgactcggagtaccagctcccgtacgtcctcggctcggcgcatcaaggatgcctcccgccgttcccagcagacgtcttcatggtgccacagtatggatacctcaccctgaacaacgggagtcaggcagtaggacgctcttcattttactgcctggagtactttccttctcagatgctgcgtaccggaaacaactttaccttcagctacacttttgaggacgttcctttccacagcagctacgctcacagccagagtctggaccgtctcatgaatcctctcatcgaccagtacctgtattacttgagcagaacaaacactccaagtggaaccaccacgcagtcaaggcttcagttttctcaggccggagcgagtgacattcgggaccagtctaggaactggcttcctggaccctgttaccgccagcagcgagtatcaaagacatctgcggataacaacaacagtgaatactcgtggactggagctaccaagtaccacctcaatggcagagactctctggtgaatccgggcccggccatggcaagccacaaggacgatgaagaaaagttttttcctcagagcggggttctcatctttgggaagcaaggctcagagaaaacaaatgtggacattgaaaaggtcatgattacagacgaagaggaaatcaggacaaccaatcccgtggctacggagcagtatggttctgtatctaccaacctccagagaggcaacagacaagcagctaccgcagatgtcaacacacaaggcgttcttccaggcacggtctggcaggacagagatgtgtaccttcaggggcccatctgggcaaagattccacacacggacggacattttcacccctctcccctcatgggtggattcggacttaaacaccctcctccacagattctcatcaagaacaccccggtacctgcgaatccttcgaccaccttcagtgcggcaaagtttgcttccttcatcacacagtactccacgggacaggtcagcgtggagatcgagtgggagctgcagaaggaaaacagcaaacgctggaatcccgaaattcagtacacttccaactacaacaagtctgttaatgtggactttactgtggacactaatggcgtgtattcagagcctcgccccattggcaccagatacctgactcgtaatctgtaa

SEQ ID NO: 11960 - DNA, 2208 bp, Artificial Sequence
  source: /note="Description of Artificial Sequence: Synthetic polynucleotide"
atggctgccgatggttatcttccagattggctcgaggacactctctctgaaggaataagacagtggtggaagctcaaacctggcccaccaccaccaaagcccgcagagcggcataaggacgacagcaggggtcttgtgcttcctgggtacaagtacctcggacccttcaacggactcgacaagggagagccggtcaacgaggcagacgccgcggccctcgagcacgacaaagcctacgaccggcagctcgacagcggagacaacccgtacctcaagtacaaccacgccgacgcggagtttcaggagcgccttaaagaagatacgtcttttgggggcaacctcggacgagcagtcttccaggcgaaaaagagggttcttgaacctctgggcctggttgaggaacctgttaagacggctccgggaaaaaagaggccggtagagcactctcctgtggagccagactcctcctcgggaaccggaaaggcgggccagcagcctgcaagaaaaagattgaattttggtcagactggagacgcagactcagtacctgacccccagcctctcggacagccaccagcagccccctctggtctgggaactaatacgatggctacaggcagtggcgcaccaatggcagacaataacgagggcgccgacggagtgggtaattcctcgggaaattggcattgcgattccacatggatgggcgacagagtcatcaccaccagcacccgaacctgggccctgcccacctacaacaaccacctctacaaacaaatttccagccaatcaggagcctcgaacgacaatcactactttggctacagcaccccttgggggtattttgacttcaacagattccactgccacttttcaccacgtgactggcaaagactcatcaacaacaactggggattccgacccaagagactcaacttcaagctctttaacattcaagtcaaagaggtcacgcagaatgacggtacgacgacgattgccaataaccttaccagcacggttcaggtgtttactgactcggagtaccagctcccgtacgtcctcggctcggcgcatcaaggatgcctcccgccgttcccagcagacgtcttcatggtgccacagtatggatacctcaccctgaacaacgggagtcaggcagtaggacgctcttcattttactgcctggagtactttccttctcagatgctgcgtaccggaaacaactttaccttcagctacacttttgaggacgttcctttccacagcagctacgctcacagccagagtctggaccgtctcatgaatcctctcatcgaccagtacctgtattacttgagcagaacaaacactccaagtggaaccaccacgcagtcaaggcttcagttttctcaggccggagcgagtgacattcgggaccagtctaggaactggcttcctggaccctgttaccgccagcagcgagtatcaaagacatctgcggataacaacaacagtgaatactcgtggactggagctaccaagtaccacctcaatggcagagactctctggtgaatccgggcccggccatggcaagccacaaggacgatgaagaaaagttttttcctcagagcggggttctcatctttgggaagcaaggctcagagaaaacaaatgtggacattgaaaaggtcatggttacagacgaagaggaaatcaggacaaccaatcccgtggctacggagcagtatggttctgtatctaccaacctccagagaggcaacagacaagcagctaccgcagatgtcaacacacaaggcgttcttccaggcacggtctggcaggacagagatgtgtaccttcaggggcccatctgggcaaagattccacacacggacggacattttcacccctctcccctcatgggtggattcggacttaaacaccctcctccacagattctcatcaagaacaccccggtacctgcgaatccttcgaccaccttcagtgcggcaaagtttgcttccttcatcacacagtactccacgggacaggtcagcgtggagatcgagtgggagctgcagaaggaaaacagcaaacgctggaatcccgaaattcagtacacttccaactacaacaagtctgttaatgtggactttactgtggacactaatggcgtgtattcagagcctcgccccattggcaccagatacctgactcgtaatctgtaa

SEQ ID NO: 11961 - DNA, 2208 bp, Artificial Sequence
  source: /note="Description of Artificial Sequence: Synthetic polynucleotide"
atggctgccgatggttatcttccagattggctcgaggacactctctctgaaggaataagacagtggtggaagctcaaacctggcccaccaccaccaaagcccgcagagcggcataaggacgacagcaggggtcttgtgcttcctgggtacaagtacctcggacccttcaacggactcgacaagggagagccggtcaacgaggcagacgccgcggccctcgagcacgacaaagcctacgaccggcagctcgacagcggagacaacccgtacctcaagtacaaccacgccgacgcggagtttcaggagcgccttaaagaagatacgtcttttgggggcaacctcggacgagcagtcttccaggcgaaaaagagggttcttgaacctctgggcctggttgaggaacctgttaagacggctccgggaaaaaagaggccggtagagcactctcctgtggagccagactcctcctcgggaaccggaaaggcgggccagcagcctgcaagaaaaagattgaattttggtcagactggagacgcagactcagtacctgacccccagcctctcggacagccaccagcagccccctctggtctgggaactaatacgatggctacaggcagtggcgcaccaatggcagacaataacgagggcgccgacggagtgggtaattcctcgggaaattggcattgcgattccacatggatgggcgacagagtcatcaccaccagcacccgaacctgggccctgcccacctacaacaaccacctctacaaacaaatttccagccaatcaggagcctcgaacgacaatcactactttggctacagcaccccttgggggtattttgacttcaacagattccactgccacttttcaccacgtgactggcaaagactcatcaacaacaactggggattccgacccaagagactcaacttcaagctctttaacattcaagtcaaagaggtcacgcagaatgacggtacgacgacgattgccaataaccttaccagcacggttcaggtgtttactgactcggagtaccagctcccgtacgtcctcggctcggcgcatcaaggatgcctcccgccgttcccagcagacgtcttcatggcgccacagtatggatacctcaccctgaacaacgggagtcaggcagtaggacgctcttcattttactgcctggagtactttccttctcagatgctgcgtaccggaaacaactttaccttcagctacacttttgaggacgttcctttccacagcagctacgctcacagccagagtctggaccgtctcatgaatcctctcatcgaccagtacctgtattacttgagcagaacaaacactccaagtggaaccaccacgcagtcaaggcttcagttttctcaggccggagcgagtgacattcgggaccagtctaggaactggcttcctggaccctgttaccgccagcagcgagtatcaaagacatctgcggataacaacaacagtgaatactcgtggactggagctaccaagtaccacctcaatggcagagactctctggtgaatccgggcccggccatggcaagccacaaggacgatgaagaaaagttttttcctcagagcggggttctcatctttgggaagcaaggctcagagaaaacaaatgtggacattgaaaaggtcatgattacagacgaagaggaaatcaggacaaccaatcccgtggctacggagcagtatggttctgtatctaccaacctccagagaggcaacagacaagcagctaccgcagatgtcaacacacaaggcgttcttccaggcacggtctggcaggacagagatgtgtaccttcaggggcccatctgggcaaagattccacacacggacggacattttcacccctctcccctcatgggtggattcggacttaaacaccctcctccacagattctcatcaagaacaccccggtacctgcgaatccttcgaccaccttcagtgcggcaaagtttgcttccttcatcacacagtactccacgggacaggtcagcgtggagatcgagtgggagctgcagaaggaaaacagcaaacgctggaatcccgaaattcagtacacttccaactacaacaagtctgttaatgtggactttactgtggacactaatggcgtgtattcagagcctcgccccattggcaccagatacctgactcgtaatctgtaa

SEQ ID NO: 11962 - DNA, 2208 bp, Artificial Sequence
  source: /note="Description of Artificial Sequence: Synthetic polynucleotide"
atggctgccgatggttatcttccagattggctcgaggacactctctctgaaggaataagacagtggtggaagctcaaacctggcccaccaccaccaaagcccgcagagcggcataaggacgacagcaggggtcttgtgcttcctgggtacaagtacctcggacccttcaacggactcgacaagggagagccggtcaacgaggcagacgccgcggccctcgagcacgacaaagcctacgaccggcagctcgacagcggagacaacccgtacctcaagtacaaccacgccgacgcggagtttcaggagcgccttaaagaagatacgtcttttgggggcaacctcggacgagcagtcttccaggcgaaaaagagggttcttgaacctctgggcctggttgaggaacctgttaagacggctccgggaaaaaagaggccggtagagcactctcctgtggagccagactcctcctcgggaaccggaaagacgggccagcagcctgcaagaaaaagattgaattttggtcagactggagacgcagactcagtacctgacccccagcctctcggacagccaccagcagccccctctggtctgggaactaatacgatggctacaggcagtggcgcaccaatggcagacaataacgagggcgccgacggagtgggtaattcctcgggaaattggcattgcgattccacatggatgggcgacagagtcatcaccaccagcacccgaacctgggccctgcccacctacaacaaccacctctacaaacaaatttccagccaatcaggagcctcgaacgacaatcactactttggctacagcaccccttgggggtattttgacttcaacagattccactgccacttttcaccacgtgactggcaaagactcatcaacaacaactggggattccgacccaagagactcaacttcaagctctttaacattcaagtcaaagaggtcacgcagaatgacggtacgacgacgattgccaataaccttaccagcacggttcaggtgtttactgactcggagtaccagctcccgtacgtcctcggctcggcgcatcaaggatgcctcccgccgttcccagcagacgtcttcatggtgccacagtatggatacctcaccctgaacaacgggagtcaggcagtaggacgctcttcattttactgcctggagtactttccttctcagatgctgcgtaccggaaacaactttaccttcagctacacttttgaggacgttcctttccacagcagctacgctcacagccagagtctggaccgtctcatgaatcctctcatcgaccagtacctgtattacttgagcagaacaaacactccaagtggaaccaccacgcagtcaaggcttcagttttctcaggccggagcgagtgacattcgggaccagtctaggaactggcttcctggaccctgttaccgccagcagcgagtatcaaagacatctgcggataacaacaacagtgaatactcgtggactggagctaccaagtaccacctcaatggcagagactctctggtgaatccgggcccggccatggcaagccacaaggacgatgaagaaaagttttttcctcagagcggggttctcatctttgggaagcaaggctcagagaaaacaaatgtggacattgaaaaggtcatgattacagacgaagaggaaatcaggacaaccaatcccgtggctacggagcagtatggttctgtatctaccaacctccagagaggcaacagacaagcagctaccgcagatgtcaacacacaaggcgttcttccaggcatggtctggcaggacagagatgtgtaccttcaggggcccatctgggcaaagattccacacacggacggacattttcacccctctcccctcatgggtggattcggacttaaacaccctcctccacagattctcatcaagaacaccccggtatctgcgaatccttcgaccaccttcagtgcggcaaagtttgcttccttcatcacacagtactccacgggacaggtcagcgtggagatcgagtgggagctgcagaaggaaaacagcaaacgctgggatcccgaaattcagtacacttccaactacaacaagtctgttaatgtggactttactgtggacactaatggcgtgtattcagagcctcgccccattggcaccagatacctgactcgtaatctgtaa

SEQ ID NO: 11963 - DNA, 2205 bp, Artificial Sequence
  source: /note="Description of Artificial Sequence: Synthetic polynucleotide"
atggctgccgatggttatcttccagattggctcgaggacactctctctgaaggaataagacagtggtggaagctcaaacctggcccaccaccaccaaagcccgcagagcggcataaggacgacagcaggggtcttgtgcttcctgggtacaagtacctcggacccttcaacggactcgacaagggagagccggtcaacgaggcagacgccgcggccctcgagcacgacaaagcctacgaccggcagctcgacagcggagacaacccgtacctcaagtacaaccacgccgacgcggagtttcaggagcgccttaaagaagatacgtcttttgggggcaacctcggacgagcagtcttccaggcgaaaaagagggttcttgaacctctgggcctggttgaggaacctgttaagacggctccgggaaaaaagaggccggtagagcactctcctgtggagccagactcctcctcgggaaccggaaaggcgggccagcagcctgcaagaaaaagattgaattttggtcagactggagacgcagactcagtacctgacccccagcctctcggacagccaccagcagccccctctggtctgggaactaatacgatggctacaggcagtggcgcaccaatggcagacaataacgagggcgccgacggagtgggtaattcctcgggaaattggcattgcgattccacatggatgggcgacagagtcatcaccaccagcacccgaacctgggccctgcccacctacaacaaccacctctacaaacaaatttccagccaatcaggagcctcgaacgacaatcactactttggctacagcaccccttgggggtattttgacttcaacagattccactgccacttttcaccacgtgactggcaaagactcatcaacaactggggattccgacccaagagactcaacttcaagctctttaacattcaagtcaaagaggtcacgcagaatgacggtacgacgacgattgccaataaccttaccagcacggttcaggtgtttactgactcggagtaccagctcccgtacgtcctcggctcggcgcatcaaggatgcctcccgccgttcccagcagacgtcttcatggtgccacagtatggatacctcaccctgaacaacgggagtcaggcagtaggacgctcttcattttactgcctggagtactttccttctcagatgctgcgtaccggaaacaactttaccttcagctacacttttgaggacgttcctttccacagcagctacgctcacagccagagtctggaccgtctcatgaatcctctcatcgaccagtacctgtattacttgagcagaacaaacactccaagtggaaccaccacgcagtcaaggcttcagttttctcaggccggagcgagtgacattcgggaccagtctaggaactggcttcctggaccctgttaccgccagcagcgagtatcaaagacatctgcggataacaacaacagtgaatactcgtggactggagctaccaagtaccacctcaatggcagagactctctggtgaatccgggcccggccatggcaagccacaaggacgatgaagaaaagttttttcctcagagcggggttctcatctttgggaagcaaggctcagagaaaacaaatgtggacattgaaaaggtcatgattacagacgaagaggaaatcaggacaaccaatcccgtggctacggagcagtatggttctgtatctaccaacctccagagaggcaacagacaagcagctaccgcagatgtcaacacacaaggcgttcttccaggcacggtctggcaggacagagatgtgtaccttcaggggcccatctgggcaaagattccacacacggacggacattttcacccctctcccctcatgggtggattcggacttaaacaccctcctccacagattctcatcaagaacaccccggtacctgcgaatccttcgaccaccttcagtgcggcaaagtttgcttccttcatcacacagtactccacgggacaggtcagcgtggagatcgagtgggagctgcagaaggaaaacagcaaacgctggaatcccgaaattcagtacacttccaactacaacaagtctgttaatgtggactttactgtggacactaatggcgtgtattcagagcctcgccccattggcaccagatacctgactcgtaatctgtaa

SEQ ID NO: 11964 - DNA, 2208 bp, Artificial Sequence
  source: /note="Description of Artificial Sequence: Synthetic polynucleotide"
atggctgccgatggttatcttccagattggctcgaggacactctctctgaaggaataagacagtggtggaagctcaaacctggcccaccaccaccaaagcccgcagagcggcataaggacgacagcaggggtcttgtgcttcctgggtacaagtacctcggacccttcaacggactcgacaagggagagccggtcaacgaggcagacgccgcggccctcgagcacgacaaagcctacgaccggcagctcgacagcggagacaacccgtacctcaagtacaaccacgccgacgcggagtttcaggagcgccttaaagaagatacgtcttttgggggcaacctcggacgagcagtcttccaggcgaaaaagagggttcttgaacctctgggcctggttgaggaacctgttaagacggctccgggaaaaaagaggccggtagagcactctcctgtggagccagactcctcctcgggaaccggaaaggcgggccagcagcctgcaagaaaaagattgaattttggtcagactggagacgcagactcagtacctgacccccagcctctcggacagccaccagcagccccctctggtctgggaactaatacgatggctacaggcagtggcgcaccaatggcagacaataacgagggcgccgacggagtgggtaattcctcgggaaattggcattgcgattccacatggatgggcgacagagtcatcaccaccagcacccgaacctgggccctgcccacctacaacaaccacctctacaaacaaatttccagccaatcaggagcctcgaacgacaatcactactttggctacagcaccccttgggggtattttgacttcaacagattccactgccacttttcaccacgtgactggcaaagactcatcaacaacaactggggattccgacccaagagactcaacttcaagctctttaacattcaagtcaaagaggtcacgcagaatgacggtacgacgacgattgccaataaccttaccagcacggttcaggtgtttactgactcggagtaccagctcccgtacgtcctcggctcggcgcatcaaggatgcctcccgccgttcccagcagacgtcttcatggtgccacagtatggatacctcaccctgaacaacgggagtcaggcagtaggacgctcttcattttactgcctggagtactttccttctcagatgctgcgtaccggaaacaactttaccttcagctacacttttgaggacgttcctttccacagcagctacgctcacagccagagtctggaccgtctcatgaatcctctcatcgaccagtacctgtattacttgagcagaacaaacactccaagtggaaccaccacgcagtcaaggcttcagttttctcaggccggagcgagtgacattcgggaccagtctaggaactggcttcctggaccctgttaccgccagcagcgagtatcaaagacatctgcggataacaacaacagtgaatactcgtggactggagctaccaagtaccacctcaatggcagagactctctggtgaatccgggcccggccatggcaagccacaaggacgatgaagaaaagttttttcctcagagcggggttctcatctttgggaagcaaggctcagagaaaacaaatgtggacattgaaaaggtcatgattacagacgaagaggaaatcaggacaaccaatcccgtggctacggagcagtatggttctgtatctaccaacctccagagaggcaacagacaagcagctaccgcagatgtcaacacacaaggcgttcttccaggcacggtctggcaggacagagatgtgtaccttcaggggcccatctgggcaaagattccacacacggacggacattttcacccctctcccctcatgggtggattcggacttaaacaccctcctccacagattctcatcaagaacaccccggtacctgcgaatccttcgaccaccttcagtgcggcaaagtttgcttccttcatcacacagtactccacgggacaggtcagcgtggagatcgagtgggagctgcagaaggaaaacggcaaacgctggaatcccgaaattcagtacacttccaactacaacaagtctgttaatgtggactttactgtggacactaatggcgtgtattcagagcctcgccccattggcaccagatacctgactcgtaatctgtaa

SEQ ID NO: 11965 - DNA, 2208 bp, Artificial Sequence
  source: /note="Description of Artificial Sequence: Synthetic polynucleotide"
atggctgccgatggttatcttccagattggctcgaggacactctctctgaaggaataagacagtggtggaagctcaaacctggcccaccaccaccaaagcccgcagagcggcataaggacgacagcaggggtcttgtgcttcctgggtacaagtacctcggacccttcaacggactcgacaagggagagccggtcaacgaggcagacgccgcggccctcgagcacgacaaagcctacgaccggcagctcgacagcggagacaacccgtacctcaagtacaaccacgccgacgcggagtttcaggagcgccctaaagaagatacgtcttttgggggcaacctcggacgagcagtcttccaggcgaaaaagagggttcttgaacctctgggcctggttgaggaacctgttaagacggctccgggaaaaaagaggccggtagagcactctcctgtggagccagactcctcctcgggaaccggaaaggcgggccagcagcctgcaagaaaaagattgaattttggtcagactggagacgcagactcagtacctgacccccagcctctcggacagccaccagcagccccctctggtctgggaactaatacgatggctacaggcagtggcgcaccaatggcagacaataacgagggcgccgacggagtgggtaattcctcgggaaattggcattgcgattccacatggatgggcgacagagtcatcaccaccagcacccgaacctgggccctgcccacctacaacaaccacctctacaaacaaatttccagccaatcaggagcctcgaacgacaatcactactttggctacagcaccccttgggggtattttgacttcaacagattccactgccacttttcaccacgtgactggcaaagactcatcaacaacaactggggattccgacccaagagactcaacttcaagctctttaacattcaagtcaaagaggtcacgcagaatgacggtacgacgacgattgccaataaccttaccagcacggttcaggtgtttactgactcggagtaccagctcccgtacgtcctcggctcggcgcatcaaggatgcctcccgccgttcccagcagacgtcttcatggtgccacagtatggatacctcaccctgaacaacgggagtcaggcagtaggacgctcttcattttactgcctggagtactttccttctcagatgctgcgtaccggaaacaactttaccttcagctacacttttgaggacgttcctttccacagcagctacgctcacagccagagtctggaccgtctcatgaatcctctcatcgaccagtacctgtattacttgagcagaacaaacactccaagtggaaccaccacgcagtcaaggcttcagttttctcaggccggagcgagtgacattcgggaccagtctaggaactggcttcctggaccctgttaccgccagcagcgagtatcaaagacatctgcggataacaacaacagtgaatacttgtggactggagctaccaagtaccacctcaatggcagagactctctggtgaatccgggcccggccatggcaagccacaaggacgatgaagaaaagttttttcctcagagcggggttctcatctttgggaagcaaggctcagagaaaacaaatgtggacattgaaaaggtcatgattacagacgaagaggaaatcaggacaaccaatcccgtggctacggagcagtatggttctgtatctaccaacctccagagaggcaacaggcaagcagctaccgcagatgtcaacacacaaggcgttcttccaggcacggtctggcaggacagagatgtgtaccttcaggggcccatctgggcaaagattccacacacggacggacattttcacccctctcccctcatgggtggattcggacttaaacaccctcctccacagattctcatcaagaacaccccggtacctgcgaatccttcgaccaccttcagtgcggcaaagtttgcttccttcatcacacagtactccacgggacaggtcagcgtggagatcgagtgggagctgcagaaggaaaacagcaaacgctggaatcccgaaattcagtacacttccaactacaacaagtctgttaatgtggactttactgtggacactaatggcgtgtattcagagcctcgccccattggcaccagatacctgactcgtaatctgtaa

SEQ ID NO: 11966 - DNA, 2208 bp, Artificial Sequence
  source: /note="Description of Artificial Sequence: Synthetic polynucleotide"
atggctgccgatggttatcttccagattggctcgaggacactctctctgaaggaataagacagtggtggaagctcaaacctggcccaccaccaccaaagcccgcagagcggcataaggacgacagcaggggtcttgtgcttcctgggtacaagtacctcggacccttcaacggactcgacaagggagagccggtcaacgaggcagacgccgcggccctcgagcacgacaaagcctacgaccggcagctcgacagcggagacaacccgtacctcaagtacaaccacgccgacgcggagtttcaggagcgccttaaagaagatacgtcttttgggggcaacctcggacgagcagtcttccaggcgaaaaagagggctcttgaacctctgggcctggttgaggaacctgttaagacggctccgggaaaaaagaggccggtagagcactctcctgtggagccagactcctcctcgggaaccggaaaggcgggccagcagcctgcaagaaaaagattggattttggtcagactggagacgcagactcagtacctgacccccagcctctcggacagccaccagcagccccctctggtctgggaactaatacgatggctacaggcagtggcgcaccaatggcagacaataacgagggcgccgacggagtgggtaattcctcgggaaattggcattgcgattccacatggatgggcgacagagtcatcaccaccagcacccggacctgggccctgcccacctacaacaaccacctctacaaacaaatttccagccaatcaggagcctcgaacgacaatcactactttggctacagcaccccttgggggtattttgacttcaacagattccactgccacttttcaccacgtgactggcaaagactcatcaacaacaactggggattccgacccaagagactcaacttcaagctctttaacattcaagtcaaagaggtcacgcagaatgacggtacgacgacgattgccaataaccttaccagcacggttcaggtgtttactgactcggagtaccagctcccgtacgtcctcggctcggcgcatcaaggatgcctcccgccgttcccagcagacgtcttcatggtgccacagtatggatacctcaccctgaacaacgggagtcaggcagtaggacgctcttcattttactgcctggagtactttccttctcagatgctgcgtaccggaaacaactttaccttcagctacacttttgaggacgttcctttccacagcagctacgctcacagccagagtctggaccgtctcatgaatcctctcatcgaccagtacctgtattacttgagcagaacaaacactccaagtggaaccaccacgcagtcaaggcttcagttttctcaggccggagcgagtgacattcgggaccagtctaggaactggcttcctggaccctgttaccgccagcagcgagtatcaaagacatctgcggataacaacaacagtgaatactcgtggactggagctaccaagtaccacctcaatggcagagactctctggtgaatccgggcccggccatggcaagccacaaggacgatgaagaaaagttttttcctcagagcggggttctcatctttgggaagcaaggctcagagaaaacaaatgtggacattgaaaaggtcatgattacagacgaagaggaaatcaggacaaccaatcccgtggctacggagcagtatggttctgtatctaccaacctccagagaggcaacagacaagcagctaccgcagatgtcaacacacaaggcgttcttccaggcatggtctggcaggacagagatgtgtaccttcaggggcccatctgggcaaagattccacacacggacggacattttcacccctctcccctcatgggtggattcggacttaaacaccctcctccacagattctcatcaagaacaccccggtacctgcgaatccttcgaccaccttcagtgcggcaaagtttgcttccttcatcacacagtactccacgggacaggtcagcgtggagatcgagtgggagctgcagaaggaaaacagcaaacgctggaatcccgaaattcagtacacttccaactacaacaagtctgttaatgtggactttactgtggacactaatggcgtgtattcagagcctcgccccattggcaccagatacctgactcgtaatctgtaa

SEQ ID NO: 11967 - DNA, 2208 bp, Artificial Sequence
  source: /note="Description of Artificial Sequence: Synthetic polynucleotide"
atggctgccgatggttatcttccagattggctcgaggacactctctctgaaggaataagacagtggtggaagctcaaacctggcccaccaccgccaaagcccgcagagcggcataaggacgacagcaggggtcttgtgcttcctgggtacaagtacctcggacccttcaacggactcgacaagggagagccggtcaacgaggcagacgccgcggccctcgagcacgacaaggcctacgaccggcagctcgacagcggagacaacccgtacctcaagtacaaccacgccgacgcggagtttcaggagcgccttaaagaagatacgtcttttgggggcaacctcgcaagagcagtattccaggcgaaaaagagggttcttgaacctctgggcctggttgaggagcctgttaagacggctccgggaaaaaagaggccggtagagcattctcctgcggagccagactcctcctcgggaaccggaaaagcgggccagcagcctgcgagaaagagattgaatttcggtcagactggagacgcagactccgtacctgacccccagcctctcggacagccaccagcagccccctctggtctgggaactaatacgatggctacaggcagtggcgcaccaatggcagacaataacgagggtgccgacggagtgggtaattcctcaggaaattggcattgcgattccacatggatgggcgacagagtcatcaccaccagcacccgcacctgggctctgcccacctacaacaaccatctgtacaagcagatctccagccaatctggagccagcaacgacaaccactactttggctacagcaccccttgggggtattttgacttcaacagattccactgccacttctccccacgtgactggcaaagactcatcaacaacaactggggattccggcccaagagactcagcttcaagctctttaacattcaagtcaaggaggtcacgcagaatgacggtacgacgacgattgccaataaccttaccagcacggttcaggtctttactgactcggagtaccagctcccgtacgtcctcggctcggcgcatcaaggatgcctcccgccgttcccagcagacgtcttcatggtgccacagtatggatacctcaccctgaacaacgggagtcaggcggtaggacgctcttcattttactgcctggagtacttcccttctcagatgcttcgcacgggaaacaactttaccttcagctacacctttgaggacgtgccttttcacagcagctacgctcacagccaaagtctggaccgtctcatgaatcctctcatcgaccagtacctgtattacttgagcaaaacaaacgctccaagcggaaccaccacgatgtccaggcttcagttttctcaggccggagcaagtgacattcgggaccagtctagaaactggcttcctggaccctgttaccgccagcagcgagtatcaaagacagctgcggacaacaacaacagtgattactcgtggactggagctaccaagtaccacctcaatggaagagactctctggtgaacccgggcccagctatggccagccacaaggacgatgaagaaaaatattttcctcagagcggggttctcatcttcgggaaacaaggctcaaataaaactaatgtggacattgaaaaggttatgattacagacgaagaggaaatcaggaccaccaatcccgtggctacggagcagtatggttctgtatctaccaaccttcaaagcggcaacacacaagcagctacctcagatgtcaacacacaaggcgttcttcctggcatggtctggcaggacagagatgtgtacctgcaggggcccatctgggcaaagattccacacacggatggacactttcacccttctcctcttatgggaggatttggactgaagcaccctcctccgcagattctcatcaagaataccccggtacctgcgaatccttcgaccaccttcagtgcggcaaagtttgcttctttcatcacacagtactccacggggcaggtcagcgtggagatcgagtgggagctgcagaaggagaacagcaaacgctggaaccccgagatccagtatacttccaactacaacaaatctgttaatgtggactttactgtggacactaatggtgtgtattcagagcctcgccccattggcaccagatacctgactcgtaatctgtaa

SEQ ID NO: 11968 - DNA, 2208 bp, Artificial Sequence
  source: /note="Description of Artificial Sequence: Synthetic polynucleotide"
atggctgccgatggttatcttccagattggctcgaggacactctctctgaaggaataagacagtggtggaagctcaaacctggcccaccaccaccaaagcccgcagagcggcataaggacgacagcaggggtcttgtgcttcctgggtacaagtacctcggacccttcaacggactcgacaagggagagccggtcaacgaggcagacgccgcggccctcgagcacgacaaagcctacgaccggcagctcgacagcggagacaacccgtacctcaagtacaaccacgccgacgcggagtttcaggagcgccttaaagaagatacgtcttttgggggcaacctcggacgagcagtcttccaggcgaaaaagagggttcttgaacctctgggcctggttgaggaacctgttaagacggctccgggaaaaaagaggccggtagagcactctcctgtggagccagactcctcctcgggaaccggaaaggcgggccagcagcctgcaagaaaaagattgaattttggtcagactggagacgcagactcagtacctgacccccagcctctcggacagccaccagcagccccctctggtctgggaactaatacgatggctacaggcagtggcgcaccaatggcagacaataacgagggcgccgacggagtgggtaattcctcgggaaattggcattgcgattccacatggatgggcgacagagtcatcaccaccagcacccgaacctgggccctgcccacctacaacaaccacctctacaaacaaatttccagccaatcaggagcctcgaacgacaatcactactttggctacagcaccccttgggggtattttgacttcaacagattccactgccacttttcaccacgtgactggcaaagactcatcaacaacaactggggattccgacccaagagactcaacttcaagctctttaacattcaagtcaaagaggtcacgcagaatgacggtacgacgacgattgccaataaccttaccagcacggttcaggtgtttactgactcggagtaccagctcccgtacgtcctcggctcggcgcatcaaggatgcctcccgccgttcccagcagacgtctccatggtgccacagtatggatacctcaccctgaacaacgggagtcaggcagtaggacgctcttcattttactgcctggagtactttccttctcagatgctgcgtaccggaaacaactttaccttcagctacacttttgaggacgttcctttccacagcagctacgctcacagccagagtctggaccgtctcatgaatcctctcatcgaccagtacctgtattacttgagcagaacaaacactccaagtggaaccaccacgcagtcaaggcttcagttttctcaggccggagcgagtgacattcgggaccagtctaggaactggcttcctggaccctgttaccgccagcagcgagtatcaaagacatctgcggataacaacaacagtgaatactcgtggactggagctaccaagtaccacctcaatggcagagactctctggtgaatccgggcccggccatggcaagccacaaggacgatgaagaaaagttttttcctcagagcggggttctcatctttgggaagcaaggctcagagaaaacaaatgtggacattgaaaaggtcatgattacagacgaagaggaaatcaggacaaccaatcccgtggctacggagcagtatggttctgtatctaccaacctccagagaggcaacagacaagcagctaccgcagatgtcaacacacaaggcgttcttccaggcacggtctggcaggacagagatgtgtaccttcaggggcccatctgggcaaagattccacacacggacggacattttcacccctctcccctcatgggtggattcggacttaaacaccctcctccacagattctcatcaagaacaccccggtacctgcgaatccttcgaccaccttcagtgcggcaaagtttgcttccttcatcacacagtactccacgggacaggtcagcgtggagatcgagtgggagctgcagaaggaaaacagcaaacgctggaatcccgaaattcagtacacttccaactacaacaagtctgttaatgtggactttactgtggacactaatggcgtgtattcagagcctcgccccattggcaccagatacctgactcgtaatctgtaa

SEQ ID NO: 11969 - DNA, 2208 bp, Artificial Sequence
  source: /note="Description of Artificial Sequence: Synthetic polynucleotide"
atggctgccgatggttatcttccagattggctcgaggacactctctctgaaggaataagacagtggtggaagctcaaacctggcccaccaccgccaaagcccgcagagcggcataaggacgacagcaggggtcttacgcttcctgggtacaagtacctcggacccttcaacggactcgacaaaggagagccggtcaacgaggcagacgccgcggccctcgagcacgacaaggcctacgaccggcagctcgacagcggagacaacccgtacctcaagtacaaccacgccgacgcggagtttcaggagcgccttaaagaagatacgtcttttgggggcaacctcgcaagagcagtattccaggcgaaaaagagggttcttgaacctctgggcctggttgaggagcctgttaagacggctccgggaaaaaagaggccggtagagcactctcctgcggagctagattcctcctccggaactggaaagtcgggccaacagcctgcaagaaagagattgaattttggtcagactggagacgcagactccgtacctgacccccagcctctcggacagccaccagcagccccctctggtctgggaactaatacgatggcttcaggcagtggcgcaccaatggcagacaataacgagggcgccgacggagtgggtaattcctcgggaaattggcattgcgattccacatggatgggcgacagagtcatcaccaccagcacccgcacctgggctctgcccacctacaacaaccatctgtacaagcaaatttccagccagtctggggccagcaacgacaaccactactttggctacagcaccccttgggggtattttgacttcaacagattccactgccacttctccccacgtgactggcaaagactcatcaacaacaattggggattccggcccaaaagactcaacttcaagctctttaacattcaagtcaaggaggtcacgcagaatgacggtacgacgacgattgccaataaccttaccagcacggttcaggtgtttactgactcggagtaccagctcccgtacgtcctcggctcggcgcatcaaggatgcctcccgccgttcccagcagacgtcttcatggtgccacagtatggatacctcaccctgaacaacgggagtcaggcggtaggacgctcttcattttactgcctggagtactttccttctcagatgctgcgtaccggaaacaactttaccttcagctacacctttgaggacgttccttttcacagcagctacgctcatagccagagtttggaccgtctcatgaatcctctcatcgaccagtacctgtattacttgagcagaacaaacactccaagcggaaccactacgcagtccaggcttcagttttctcaagccggagcgagtgacattcgggaccagtctaggaactggcttcctggaccctgttaccgccagcagcgagtatcaaagacagctgcggacaacaacaacagtgattactcgtggactggagctaccaagtatcacctcaatggaagagactctctggtgaatccgggcacagccatggccagccacaaggacgatgaagaaaagtattttcctcagagcggggttctcatcttcggaaaacaagactcgggaaaaactaatgtggacattgaaaaggtcatgattacagacgaagaggaaatcaggaccaccaatcccgtggctacggagcagtatggttctgtatctaccaatctccagagcggcaacacacaagcagctacctcagatgtcaacacacaaggcgttcttccaggcatggtctggcaggacagagacgtgtacctgcagggacccatctgggcaaagattccacacacggacggacattttcacccttctcctcttatgggaggatttggaccgaagcaccctcccccgcagattctcatcaagaataccccggtacctgcgaatccttctaccaccttcagcgcggcaaagtttgcttccttcatcacacagtactccacggggcaggtcagcgtggagatcgagtgggagctgcagaaagagaacagcaaacgctggaaccccgagatccagtatacctccaactacaacaagtctgttaatgtggactttactgtggacactaatggcgtgtattcagagcctcgccccattggcacaagatacctgactcgtaatctgtaa

SEQ ID NO: 11970 - DNA, 2208 bp, Artificial Sequence
  source: /note="Description of Artificial Sequence: Synthetic polynucleotide"
atggctgccgatggttatcttccagattggctcgaggacactctctctgaaggaataagacagtggtggaagctcaaacctggcccaccaccgccaaagcccgcagagcggcataaggacgacagcaggggtcttgtgcttcctgggtacaagtacctcggacccttcaacggactcgacaaaggagagccggtcaacgaggcagacgccgcggccctcgagcacgacaaggcctacgaccggcagctcgacagcggagacaacccgtacctcaagtacaaccacgccgacgcggagtttcaggagcgccttaaagaagatacgtcttttgggggcaacctcgcaagagcagtattccaggcgaaaaagagggttcttgaacctctgggcctggttgaggagcctgttaagacggctccgggaaaaaagaggccggtagagcactctcctgcggagccagattcctcctccggaactggagagtcgggccaacagcctgcaagaaagagattgaattttggtcagactggagacgcagactccgtacctgacccccagcctctcggacagccaccagcagccccctctggtctgggaactaatacgatggcttcaggcagtggcgcaccaatggcagacaataacgagggcgccgacggagtgggtaattcctcgggaaattggcattgcgattccacatggatgggcgacagagtcatcaccaccagcacccgcacctgggctctgcccacctacaacaaccatctgtacaagcaaatttccagccagtctggagccagcaacgacaaccactactttggctacagcaccccttgggggtattttgacttcaacagattccactgccacttctccccacgtgactggcaaagactcatcaacaacaattggggattccggcccaaaagactcaacttcaagctctttaacattcaagtcaaggaggtcacgcagaatgacggtacgacgacgattgccaataaccttaccagcacggttcaggtgtttactgactcggagtaccagctcccgtacgtcctcggctcggcgcatcaaggatgcctcccgccgttcccagcagacgtcttcatggtgccacagtatggatacctcaccctgaacaacgggagtcaggcggtaggacgctcttcattttactgcctggagtactttccttctcagatgctgcgtaccggaaacaactttaccttcagctacacctttgaggacgttccttttcacagcagctacgctcacagccagagtttggaccgtcttatgaatcctctcatcgaccagtacctgtattacttgagcagaacaaacactccaagcggaaccactacgcagtccaggcttcagttttctcaagccggagcgagtgacattcgggaccagtctaggaactggcttcctggaccctgttaccgccagcagcgagtatcaaagacagctgcggacaacaacaacagtgattactcgtggactggagctaccaagtatcacctcaatggaagagactctctggtgaatccgggcacagccatggccagccacaaggacgatgaagaaaagtattttcctcagagcggggttctcatcttcggaaaacaagactcgggaaaaactaatgtggacattgaaaaggtcatgattacagacgaagaggaaatcaggaccaccaatcccgtggctacggagcagtatggttctgtatctaccaatctccagagcggcaacacacaagcagctacctcagatgtcaacacacaaggcgttcttccaggcatggtccggcaggacagagacgtgtacctgcagggacccatctgggcaaagattccacacacggacggacattttcacccttctcctcttatgggaggatttggactgaagcaccctcccccgcagattctcatcaagaataccccggtacctgcgaatccttctaccaccttcagcgcggcaaagtttgcttccttcatcacacagtactccacggggcaggtcagcgtggagatcgagtgggagccgcagaaagagaacagcaaacgctggaaccccgagatccagtatacctccaactacaacaagtctgttaatgtggactttactgtggacactaatggcgtgtattcagagcctcgccccattggcacaagatacctgactcgtaatctgtaa

SEQ ID NO: 11971 - DNA, 2208 bp, Artificial Sequence
  source: /note="Description of Artificial Sequence: Synthetic polynucleotide"
atggctgccgatggttatcttccagattggctcgaggacactctctctgaaggaataagacagtggtggaagctcaaacctggcccaccaccgccaaagcccgcagagcggcataaggacgacagcaggggtcttgcgcttcctgggtacaagtacctcggacccttcaacggactcgacaaaggagagccggtcaacgaggcagacgccgcggccctcgagcacgacaaggcctacgaccggcagctcgacagcggagacaacccgtacctcaagtacaaccacgccgacgcggagtttcaggagcgccttaaagaagatacgtcttttgggggcaacctcgcaagagcagtattccaggcgaaaaagagggttcttgaacctctgggcctggttgaggagcctgttaagacggctccgggaaaaaagaggccggtagagcactctcctgcggagctagattcctcctccggaactggaaagtcgggccaacagcctgcaagaaagagattgaattttggtcagactggagacgcagactccgtacctgacccccagcctctcggacagccaccagcagccccctctggtctgggaactaatacgatggcttcaggcagtggcgcaccaatggcagacaataacgagggcgccgacggagtgggtaattcctcgggaaattggcattgcgattccacatggatgggcgacagagtcatcaccaccagcacccgcacctgggctctgcccacctacaacaaccatctgtacaagcaaatttccagccagtctggggccagcaacgacaaccactactttggctacagcaccccttgggggtattttgacttcaacagattccactgccacttctccccacgtgactggcaaagactcatcaacaacaattggggattccggcccaaaagactcaacttcaagctctttaacattcaagtcaaggaggtcacgcagaatgacggtacgacgacgattgccaataaccttaccagcacggttcaggtgtttactgactcggagtaccagctcccgtacgtcctcggctcggcgcatcaaggatgcctcccgccgttcccagcagacgtcttcatggtgccacagtatggatacctcaccctgaacaacgggagtcaggcggtaggacgctcttcattttactgcctggagtactttccttctcagatgctgcgtaccggaaacaactttaccttcagctacacctttgaggacgttccttttcacagcagctacgctcacagccagagtttggaccgtctcatgaatcctctcatcgaccagtacctgtattacttgagcagaacaaacactccaagcggaaccactacgcagtccgggcttcagttttctcaagccggagcgagtgacattcgggaccagtctaggaactggcttcctggaccctgttaccgccagcagcgagtatcaaagacagctgcggacaacaacaacagtgattactcgtggactggagctaccaagtatcacctcaatggaagagactctctggtgaatccgggcacagccatggccagccacaaggacgatgaagaaaagtattttcctcagagcggggttctcatcttcggaaaacaagactcgggaaaaactaatgtggacattgaaaaggtcatgattacagacgaagaggaaatcaggaccaccaatcccgtggctacggagcagtatggttctgtatctaccaatctccagagcggcaacacacaagcagctacctcagatgtcaacacacaaggcgttcttccaggcatggtctggcaggacagagacgtgtacctgcagggacccatctgggcaaagattccacacacggacggacattttcacccttctcctcttatgggagggtttggaccgaagcaccctcccccgcagattctcatcaagaataccccggtacctgcgaatccttctaccaccttcagcgcggcaaagtttgcttccttcatcacacagtactccacggggcaggtcagcgtggagatcgagtgggagctgcagaaagagaacagcaaacgctggaaccccgagatccagtatacctccaactacaacaagtctgttaatgtggactttactgtggacactaatggcgtgtattcagagcctcgccccattggcacaagatacctgactcgtaatctgtaa

SEQ ID NO: 11972 - DNA, 2208 bp, Artificial Sequence
  source: /note="Description of Artificial Sequence: Synthetic polynucleotide"
atggctgccgatggttatcttccagattggctcgaggacactctctctgaaggaataagacagtggtggaagctcaaacctggcccaccaccgccaaagcccgcagagcggcataaggacgacagcaggggtcttgtgcttcctgggtacaagtacctcggacccttcaacggactcgacaaaggagagccggtcaacgaggcagacgccgcggccctcgagcacgacaaggcctacgaccggcagctcgacagcggagacaacccgtacctcaagtacaaccacgccgacgcggagtttcaggagcgccttaaagaagatacgtcttttgggggcaacctcgcaagagcagtattccaggcgaaaaagagggttcttgaacctctgggcctggttgaggagcctgttaagacggctccgggaaaaaagaggccggtagagcactctcctgcggagccagattcctcctccggaactggaaagtcgggccaacagcctgcaagaaagagattgaattttggtcagactggagacgcagactccgtacctgacccccagcctctcggacagccaccagcagccccctctggtctgggaactaatacgatggcttcaggcagtggcgcaccaatggcagacaataacgagggcgccgacggagtgggtaattcctcgggaaattggcattgcgattccacatggatgggcgacagagtcatcaccaccagcacccgcacctgggctctgcccacctacaacaaccatctgtacaagcaaatttccagccagtctggagccagcaacgacaaccactactttggctacagcaccccttgggggtattttgacttcaacagattccactgccacttctccccacgtgactggcaaagactcatcaacaacaattggggattccggcccaaaagactcaacttcaagctctttaacattcaagtcaaggaggtcacgcagaatgacggtacgacgacggttgccaataaccttaccagcacggttcaggtgtttactgactcggagtaccagctcccgtacgtcctcggctcggcgcatcaaggatgcctcccgccgttcccagcagacgtcttcatggtgccacagtatggatacctcaccctgaacaacgggagtcaggcggtaggacgctcttcattttactgcctggagtacttcccttctcagatgctgcgtaccggaaacaactttaccttcagctacacctttgaggacgttccttttcacagcagctacgctcacagccagagtttggaccgtcttatgaatcctctcatcgaccagtacctgtattacttgagcagaacaaacactccaagcggaaccactacgcagtccaggcttcagttttctcaagccggagcgagtgacattcgggaccagtctaggaactggcttcctggaccctgttaccgccagcagcgagtatcaaagacagctgcggacaacaacaacagtgattactcgtggactggagctaccaagtatcacctcaatggaagagactctctggtgaatccgggcacagccatggccagccacaaggacgatgaagaaaagtattttcctcagagcggggttctcatcttcggaaaacaagactcgggaaaaactaatgtggacattgaaaaggtcatgattacagacgaagaggaaatcaggaccaccaatcccgtggctacggagcagtatggttctgtatctaccaatctccagagcggcaacacacaagcagctacctcagatgtcaacacacaaggcgttcttccaggcatggtccggcaggacagagacgtgtacctgcagggacccatctgggcaaagattccacacacggacggacattttcacccttctcctcttatgggaggatttggactgaagcaccctcccccgcagattctcatcaagaataccccggtacctgcgaatccttctaccaccttcagcgcggcaaagtttgcttccttcatcacacagtactccacggggcaggtcagcgtggagatcgagtgggagccgcagaaagagaacagcaaacgctggaaccccgagatccagtatacctccaactacaacaagtctgttaatgtggactttactgtggacactaatggcgtgtattcagagcctcgccccattggcacaagatacctgactcgtaatctgtaa

SEQ ID NO: 11973 - DNA, 2208 bp, Artificial Sequence
  source: /note="Description of Artificial Sequence: Synthetic polynucleotide"
atggctgccgatggttatcttccagattggctcgaggacactctctctgaaggaataagacagtggtggaagctcaaacctggcccaccaccgccaaagcccgcagagcggcataaggacgacagcaggggtcttgtgcttcctgggtacaagtacctcggacccttcaacggactcgacaaaggagagccggtcaacgaggcagacgccgcggccctcgagcacgacaaggcctacgaccggcagctcgacagcggagacaacccgtacctcaagtacaaccacgccgacgcggagtttcaggagcgccttaaagaagatacgtcttttgggggcaacctcgcaagagcagtattccaggcgaaaaagagggttcttgaacctctgggcctggttgaggagcctgttaagacggctccgggaaaaaagaggccggtagagcactctcctgcggagccagattcctcctccggaactggaaagtcgggccaacagcctgcaagaaagagattgaattttggtcagactggagacgcagactccgtacctgacccccagcctctcggacagccaccagcagccccctctggtctgggaactaatacgatggcttcaggcagtggcgcaccaatggcagacaataacgagggcgccgacggagtgggtaattcctcgggaaattggcattgcgattccacatggatgggcgacagagtcatcaccaccagcacccgcacctgggctctgcccacctacaacaaccatctgtacaagcaaatttccagccagtctggagccagcaacgacaaccactactttggctacagcaccccttgggggtattttgacttcaacagattccactgccacttctccccacgtgactggcaaagactcatcaacaacaattggggattccggcccaaaagactcaacttcaagctctttaacattcaagtcaaggaggtcacgcagaatgacggtacgacgacgattgccaataaccttaccagcacggttcaggtgtttactgactcggagtaccagctcccgtacgtcctcggctcggcgcatcaaggatgcctcccgccgttcccagcagacgtcttcatggtgccacagtatggatacctcaccctgaacaacgggagtcaggcggtaggacgctcttcattttactgcctggagtactttccttctcagatgctgcgtaccggaaacaactttaccttcagctacacctttgaggacgttccttttcacagcagctacgctcacagccagagtttggaccgtcttatgaatcctctcatcgaccagtacctgtattacttgagcagaacaaacactccaagcggaactactacgcagtccaggcttcagttttctcaagccggagcgagtgacattcgggaccagtctaggaactggcttcctggaccctgttaccgccagcagcgagtatcaaagacagctgcggacaacaacaacagtgattactcgtggactggagctaccaagtatcacctcaatggaagagactctctggtgaatccgggcacagccatggccagccacaaggacgatgaagaaaagtattttcctcagggcggggttctcatcttcggaaaacaagactcgggaaaaactaatgtggacattgaaaaggtcatgattacagacgaagaggaaatcaggaccaccaatcccgtggctacggagcagtatggttctgtatctaccaatctccagagcggcaacacacaagcagctacctcagatgtcaacacacaaggcgttcttccaggcatggtccggcaggacagagacgtgtacctgcagggacccatctgggcaaagattccacacacggacggacattttcacccttctcctcttatgggaggatttggactgaagcaccctcccccgcagattctcatcaagaataccccggtacctgcgaatccttctaccaccttcagcgcggcaaagtttgcttccttcatcacacagtactccacggggcaggtcagcgtggagatcgagtgggagccgcagaaagagaacagcaaacgctggaaccccgagatccagtatacctccaactacaacaagtctgttaatgtggactttactgtggacactaatggcgtgtattcagagcctcgccccattggcacaagatacctgactcgtaatctgtaa

SEQ ID NO: 11974 - DNA, 2208 bp, Artificial Sequence
  source: /note="Description of Artificial Sequence: Synthetic polynucleotide"
atggctgccgatggttatcttccagattggctcgaggacactctctctgaaggaataagacagtggtggaagctcaaacctggcccaccaccgccaaagcccgcagagcggcataaggacgacagcaggggtcttgcgcttcctgggtacaagtacctcggacccttcaacggactcgacaaaggagagccggtcaacgaggcagacgccgcggccctcgagcacgacaaggcctacgaccggcagctcgacagcggagacaacccgtacctcaagtacaaccacgccgacgcggagtttcaggagcgccttaaagaagatacgtcttttgggggcaacctcgcaagagcagtattccaggcgaaaaagagggttcttgaacctctgggcctggttgaggagcctgttaagacggctccgggaaaaaagaggccggtagagcactctcctgcggagctagattcctcctccggaactggaaagtcgggccaacagcctgcaagaaagagattgaattttggtcagactggagacgcagactccgtacctgacccccagcctctcggacagccaccagcagccccctctggtctgggaactaatacgatggcttcaggcagtggcgcaccaatggcagacaataacgagggcgccgacggagtgggtaattcctcgggaaattggcattgcgattccacatggatgggcgacagagtcatcaccaccagcacccgcacctgggctctgcccacctacaacaaccatctgtacaagcaaatttccagccagtctggggccagcaacgacaaccactactttggctacagcaccccttgggggtattttgacttcaacagattccactgccacttctccccacgtgactggcaaagactcatcaacaacaattggggattccggcccaaaagactcaacttcaagctctttaacattcaagtcaaggaggtcacgcagaatgacggtacgacgacgattgccaataaccttaccagcacggttcaggtgtttactgactcggagtaccagctcccgtacgtcctcggctcggcgcatcaaggatgcctcccgccgttcccagcagacgtcttcatggtgccacagtatggatacctcaccctgaacaacgggagtcaggcggtaggacgctcttcattttactgcctggagtactttccttctcagatgctgcgtaccggaaacaactttaccttcagctacacctttgaggacgttccttttcacagcagctacgctcacagccagagtttggaccgtctcatgaatcctctcatcgaccagtacctgtattacttgagcagaacaaacactccaagcggaaccactacgcagtccaggcttcagttttctcaagccggagcgagtgacattcgggaccagtctaggaactggcttcctggaccctgttaccgccagcagcgagtatcaaagacagctgcggacaacaacaacagtgattactcgtggactggagctaccaagtatcacctcaatggaagagactctctggtgaatccgggcacagccatggccggccacaaggacgatgaagaaaagtattttcctcagagcggggttctcatcttcggaaaacaagactcgggaaaaactaatgtggacattgaaaaggtcatgattacagacgaagaggaaatcaggaccaccaatcccgtggctacggagcagtatggttctgtatctaccaatctccagagcggcaacacacaagcagctacctcagatgtcaacacacaaggcgttcttccaggcatggtctggcaggacagagacgtgtacctgcagggacccatctgggcaaagattccacacacggacggacattttcacccttctcctcttatgggagggtttggaccgaagcaccctcccccgcagattctcatcaagaataccccggtacctgcgaatccttctaccaccttcagcgcggcaaagtttgcttccttcatcacacagtactccacggggcaggtcagcgtggagatcgagtgggagctgcagaaagagaacagcaaacgctggaaccccgagatccagtatacctccaactacaacaagtctgttaatgtggactttactgtggacactaatggcgtgtattcagagcctcgccccattggcacaagatacctgactcgtaatctgtaa

SEQ ID NO: 11975 - DNA, 2208 bp, Artificial Sequence
  source: /note="Description of Artificial Sequence: Synthetic polynucleotide"
atggctgccgatggttatcttccagattggctcgaggacactctctctgaaggaataagacagtggtggaagctcaaacctggcccaccaccgccaaagcccgcagagcggcataaggacgacagcaggggtcttgcgcttcctgggtacaagtacctcggacccttcaacggactcgacaaaggagagccggtcaacgaggcagacgccgcggccctcgagcacgacaaggcctacgaccggcagctcgacagcggagacaacccgtacctcaagtacaaccacgccgacgcggagtttcaggagcgccttaaagaagatacgtcttttgggggcaacctcgcaagagcagtattccaggcgaaaaagagggttcttgaacctctgggcctggttgaggagcctgttaagacggctccgggaaaaaagaggccggtagagcactctcctgcggagctagattcctcctccggaactggaaagtcgggccaacagcctgcaagaaagagattgaattttggtcagactggagacgcagactccgtacctgacccccagcctctcggacagccaccagcagccccctctggtctgggaactaatacgatggcttcaggcagtggcgcaccaatggcagacaataacgagggcgccgacggagtgggtaattcctcgggaaattggcattgcgattccacatggatgggcgacagagtcatcaccaccagcacccgcacctgggctctgcccacctacaacaaccatctgtacaagcaaatttccagccagtctggggccagcaacgacaaccactactttggctacagcaccccttgggggtattttgacttcaacagattccactgccacttctccccacgtgactggcaaagactcatcaacaacaattggggattccggcccaaaagactcaacttcaagctctttaacattcaagtcaaggaggtcacgcagaatgacggtacgacgacgattgccaataaccttaccagcacggttcaggtgtttactgactcggagtaccagctcccgtacgtcctcggctcggcgcatcaaggatgcctcccgccgttcccagcagacgtcttcatggtgccacagtatggatacctcaccctgaacaacgggagtcaggcggtaggacgctcttcattttactgcctggagtactttccttctcagatgctgcgtaccggaaacaactttaccttcagctacacctttgaggacgttccttttcacagcagctacgctcacagccagagtttggaccgtctcatgaatcctctcatcgaccagtacctgtattacttgagcagaacaaacactccaagcggaaccactacgcagtccaggcttcagttttctcaagccggagcgagtgacattcgggaccagtctaggaactggcttcctggaccctgttaccgccagcagcgagtatcaaagacagctgcggacaacaacaacagtgattactcgtggactggagctaccaagtatcacctcaatggaagagactctctggtgaatccgggcacagccatggccagccacaaggacgatgaagaaaagtattttcctcagagcggggttctcatcttcggaaaacaagactcgggaaaaactaatgtggacattgaaaaggtcatgattacagacgaagaggaaatcaggaccaccaatcccgtggctacggagcagtatggttctgtatctaccaatctccagagcggcaacacacaagcagctacctcagatgtcaacacacaaggcgttcttccaggcatggtctggcaggacagagacgtgtacctgcagggacccatctgggcaaagattccacacacggacggacattttcacccttctcctcttatgggaggatttggaccgaagcaccctcccccgcagattctcatcaagaataccccggtacctgcgaatccttctaccaccttcagcgcggcaaagtttgcttccttcatcacacagtactccacggggcaggtcagcgtggagatcgagtgggagctgcagaaagagaacagcaaacgctggaaccccgagatccagtatacctccaactacaacaagtctgttaatgtggactttactgtggacactaatggcgtgtattcagagcctcgccccattggcacaagatacctgactcgtaatctgtaa

SEQ ID NO: 11976 - DNA, 2208 bp, Artificial Sequence
  source: /note="Description of Artificial Sequence: Synthetic polynucleotide"
atggctgccgatggttatcttccagattggctcgaggacactctctctgaaggaataagacagtggtggaagctcaaacctggcccaccaccgccaaagcccgcagagcggcataaggacgacagcaggggtcttgtgcttcctgggtacaagtacctcggacccttcaacggactcgacaaaggagagccggtcaacgaggcagacgccgcggccctcgagcacgacaaggcctacgaccggcagctcgacagcggagacaacccgtacctcaagtacaaccacgccgacgcggagtttcaggagcgccttaaagaagatacgtcttttgggggcaacctcgcaagagcagtattccaggcgaaaaagagggttcttgaacctctgggcctggttgaggagcctgttaagacggctccgggaaaaaagaggccggtagagcactctcctgcggagccagattcctcctccggaactggaaagtcgggccaacagcctgcaagaaagagattgaattttggtcagactggagacgcagactccgtacctggcccccagcctctcggacagccaccagcagccccctctggtctgggaactaatacgatggcttcaggcagtggcgcaccaatggcagacaataacgagggcgccgacggagtgggtaattcctcgggaaattggcattgcgattccacatggatgggcgacagagtcatcaccaccagcacccgcacctgggctctgcccacctacaacaaccatctgtacaagcaaatttccagccagtctggagccagcaacgacaaccactactttggctacagcaccccttgggggtattttgacttcaacagattccactgccacttctccccacgtgactggcaaagactcatcaacaacaattggggattccggcccaaaagactcaacttcaagctctttaacattcaagtcaaggaggtcacgcagaatgacggtacgacgacggttgccaataaccttaccagcacggttcaggtgtttactgactcggagtaccagctcccgtacgtcctcggctcggcgcatcaaggatgcctcccgccgttcccagcagacgtcttcatggtgccacagtatggatacctcaccctgaacaacgggagtcaggcggtaggacgctcttcattttactgcctggagtactttccttctcagatgctgcgtaccggaaacaactttaccttcagctacacctttgaggacgttccttttcacagcagctacgctcacagccagagtttggaccgtcttatgaatcctctcatcgaccagtacctgtattacttgagcagaacaaacactccaagcggaaccactacgcagtccaggcttcagttttctcaagccggagcgagtgacattcgggaccagtctaggaactggcttcctggaccctgttaccgccagcagcgagtatcaaagacagctgcggacaacaacaacagtgattactcgtggactggagctaccaagtatcacctcaatggaagagactctctggtgaatccgggcacagccatggccagccacaaggacgatgaagaaaagtattttcctcagagcggggttctcatcttcggaaaacaagactcgggaaaaactaatgtggacattgaaaaggtcatgattacagacgaagaggaaatcaggaccaccaatcccgtggctacggagcagtatggttctgtatctaccaatctccagagcggcaacacacaagcagctacctcagatgtcaacacacaaggcgttcttccaggcatggtccggcaggacagagacgtgtacctgcagggacccatctgggcaaagattccacacacggacggacattttcacccttctcctcttatgggaggatttggactgaagcaccctcccccgcagattctcatcaagaataccccggtacctgcgaatccttctaccaccttcagcgcggcaaagtttgcttccttcatcacacagtactccacggggcaggtcagcgtggagatcgagtgggagccgcagaaagagaacagcaaacgctggaaccccgagatccagtatacctccaactacaacaagtctgttaatgtggactttactgtggacactaatggcgtgtattcagagcctcgccccattggcacaagatacctgactcgtaatctgtaa

SEQ ID NO: 11977 - DNA, 2208 bp, Artificial Sequence
  source: /note="Description of Artificial Sequence: Synthetic polynucleotide"
atggctgccgatggttatcttccagattggctcgaggacactctctctgaaggaataagacagtggtggaagctcaaacctggcccaccaccgccaaagcccgcagagcggcataaggacgacagcaggggtcttgtgcttcctgggtacaagtacctcggacccttcaacggactcgacaaaggagagccggtcaacgaggcagacgccgcggccctcgagcacgacaaggcctacgaccggcagctcgacagcggagacaacccgtacctcaagtacaaccacgccgacgcggagtttcaggagcgccttaaagaagatacgtcttttgggggcaacctcgcaagagcagtattccaggcgaaaaagagggttcttgaacctctgggcctggttgaggagcctgttaagacggctccgggaaaaaagaggccggtagagcactctcctgcggagccagattcctcctccggaactggaaagtcgggccaacagcctgcaagaaagagattgaattttggtcagactggagacgcagactccgtacctgacccccagcctctcggacagccaccagcagccccctctggtctgggaactaatacgatggcttcaggcagtggcgcaccaatggcagacaataacgagggcgccgacggagtgggtaattcctcgggaaattggcattgcgattccacatggatgggcgacagagtcatcaccaccagcacccgcacctgggctctgcccacctacaacaaccatctgtacaagcaaatttccagccagtctggagccagcaacgacaaccactactttggctacagcaccccttgggggtattttgacttcaacagattccactgccacttctccccacgtgactggcaaagactcatcaacaacaattggggattccggcccaaaagactcaacttcaagctctttaacattcaagtcaaggaggtcacgcagaatgacggtacgacgacgattgccaataaccttaccagcacggttcaggtgtttactgactcggagtaccagctcccgtacgtcctcggctcggcgcatcaaggatgcctcccgccgttcccagcagacgtcttcatggtgccacagtatggatacctcaccctgaacaacgggagtcaggcggtaggacgctcttcattttactgcctagagtactttccttctcagatgctgcgtaccggaaacaactttaccttcagctacacctttgaggacgctccttttcacagcagctacgctcacagccagagtttggaccgtcttatgaatcctctcatcgaccagtacctgtactacttgagcagaacaaacactccaagcggaaccactacgcagtccaggcttcagttttctcaagccggagcgagtgacattcgggaccagtctaggaactggcttcctggaccctgttaccgccagcagcgagtatcaaagacagctgcggacaacaacaacagtgattactcgtggactggagctaccaagtatcacctcaatggaagagactctctggtgaatccgggcacagccatggccagccacaaggacgatgaagaaaagtattttcctcagagcggggttctcatcttcggaaaacaagactcgggaaaaactaacgtggacattgaaaaggtcatgattacagacgaagaggaaatcaggaccaccaatcccgtggctacggagcagtatggttctgtatctaccaatctccagagcggcaacacacaagcagctacctcagatgtcaacacacaaggcgttcttccaggcatggtccggcaggacagagacgtgtacctgcagggacccatctgggcaaagattccacacacggacggacattttcacccttctcctcttatgggaggatttggactgaagcaccctcccccgcagattctcatcaagaataccccggtacctgcgaatccttctaccaccttcagcgcggcaaagtttgcttccttcatcacacagtactccacggggcaggtcagcgtggagatcgagtgggagccgcagaaagagaacagcaaacgctggaaccccgagatccagtatacctccaactacaacaagtctgttaatgtggactttactgtggacactaatggcgtgtattcagagcctcgccccattggcacaagatacctgactcgtaatctgtaa

SEQ ID NO: 11978 - DNA, 2208 bp, Artificial Sequence
  source: /note="Description of Artificial Sequence: Synthetic polynucleotide"
atggctgccgatggttatcttccagattggctcgaggacactctctctgaaggaataagacagtggtggaagctcaaacctggcccaccaccgccaaagcccgcagagcggcataaggacgacagcaggggtcttgtgcttcctgggtacaagtacctcggacccttcaacggactcgacaaaggagagccggtcaacgaggcagacgccgcggccctcgagcacgacaaggcctacgaccggcagctcgacagcggagacaacccgtacctcaagtacaaccacgccgacgcggagtttcaggagcgccttaaagaagatacgtcttttgggggcaacctcgcaagagcagtattccaggcgaaaaagagggttcttgaacctctgggcctggttgaggagcctgttaagacggctccgggaaaaaagaggccggtagagcactctcctgcggagccagattcctcctccggaactggaaagtcgggccaacagcctgcaagaaagagattgaattttggtcagactggagacgcagactccgtacctgacccccagcctctcggacagccaccagcagccccctctggtctgggaactaatacgatggcttcaggcagtggcgcaccaatggcagacaataacgagggcgccgacggagtgggtaattcctcgggaaattggcattgcgattccacatggatgggcgacagagtcatccccaccagcacccgcacctgggctctgcccacctacaacaaccatctgtacaagcaaatttccagccagtctggagccagcaacgacaaccactactttggctacagcaccccttgggggtattttgacttcaacagattccactgccacttctccccacgtgactggcaaagactcatcaacaacaattggggattccggcccaaaagactcaacttcaagctctttaacattcaagtcaaggaggtcacgcagaatgacggtacgacgacgattgccaataaccttaccagcacggttcaggtgtttactgactcggagtaccagctcccgtacgtcctcggctcggcgcatcaaggatgcctcccgccgttcccagcagacgtcttcatggtgccacagtatggatacctcaccctgaacaacgggagtcaggcggtaggacgctcttcattttactgcctggagtactttccttctcagatgctgcgtaccggaaacaactttaccttcagctacacctttgaggacgttccttttcacagcagctacgctcacagccagagtttggaccgtcttatgaatcctctcatcgaccagtacctgtattacttgagcagaacaaacactccaagcggaaccactacgcagtccaggcttcagttttctcaagccggagcgagtgacattcgggaccagtctaggaactggcttcctggaccctgttaccgccagcagcgagtatcaaagacagctgcggacaacaacaacagtgattactcgtggactggagctaccaagtatcacctcaatggaagagactctctggtgaatccgggcacagccatggccagccacaaggacgatgaagaaaagtattttcctcagagcggggttctcatcttcggaaaacaagactcgggaaaaactaatgtggacattgaaaaggtcatgattacagacgaagaggaaatcaggaccaccaatcccgtggctacggagcagtatggttctgtatctaccaatctccagagcggcaacacacaagcagctacctcagatgtcaacacacaaggcgttcttccaggcatggtccggcaggacagagacgtgtacctgcagggacccatctgggcaaagattccacacacggacggacattttcacccttctcctcttatgggaggatttggactgaagcaccctcccccgcagattctcatcaagaataccccggtacctgcgaatccttctaccaccttcagcgcggcaaagtttgcttccttcatcacacagtactccacggggcaggtcagcgtggagatcgagtgggagccgcagaaagagaacagcaaacgctggaaccccgagatccagtatacctccaactacaacaagtctgttaatgtggactttactgtggacactaatggcgtgtattcagagcctcgccccattggcacaagatacctgactcgtaatctgtaa

SEQ ID NO: 11979 - DNA, 2208 bp, Artificial Sequence
  source: /note="Description of Artificial Sequence: Synthetic polynucleotide"
atggctgccgatggttatcttccagattggctcgaggacactctctctgaaggaataagacagtggtggaagctcaaacctggcccaccaccgccaaagcccgcagagcggcataaggacgacagcaggggtcttgtgcttcctgggtacaagtacctcggacccttcaacggactcgacaaaggagagccggtcaacgaggcagacgccgcggccctcgagcacgacaaggcctacgaccggcagctcgacagcggagacaacccgtacctcaagtacaaccacgccgacgcggagtttcaggagcgccttaaagaagatacgtcttttgggggcaacctcgcaagagcagtattccaggcgaaaaagagggttcttgaacctctgggcctggttgaggagcctgttaagacggctccgggaaaaaagaggccggcagagcactctcctgcggagccagattcctcctccggaactggaaagtcgggccaacagcctgcaagaaagagattgaattttggtcagactggagacgcagactccgtacctgacccccagcctctcggacagccaccagcagccccctctggtctgggaactaatacgatggcttcaggcagtggcgcaccaatggcagacaataacgagggcgccgacggagtgggtaattcctcgggaaattggcattgcgattccacatggatgggcgacagagtcatcaccaccagcacccgcacctgggctctgcccacctacaacaaccatctgtacaagcaaatttccagccagtctggagccagcaacgacaaccactactttggctacagcaccccttgggggtattttgacttcaacagattccactgccacttctccccacgtgactggcaaagactcatcaacaacaattggggattccggcccaaaagactcaacttcaagctctttaacattcaagtcaaggaggtcacgcagaatgacggtacgacgacgattgccaataaccttaccagcacggttcaggtgtttactgactcggagtaccagctcccgtacgtcctcggctcggcgcatcaaggatgcctcccgccgttcccagcagacgtcttcatggtgccacagtatggatacctcaccctgaacaacgggagtcaggcggtaggacgctcttcattttactgcctagagtactttccttctcagatgctgcgtaccggaaacaactttaccttcagctacacctttgaggacgttccttttcacagcagctacgctcacagccagagtttggaccgtcttatgaatcctctcatcgaccagtacctgtattacttgagcagaacaaacactccaagcggaaccactacgcagtccaggcttcagttttctcaagccggagcgagtgacattcgggaccagtctaggaactggcttcctggaccctgttaccgccagcagcgagtatcaaagacagctgcggacaacaacaacagtgattactcgtggactggagctaccaagtatcacctcaatggaagagactctctggtgaatccgggcacagccatggccagccacaaggacgatgaagaaaagtattttcctcagagcggggttctcatcttcggaaaacaagactcgggaaaaactaatgtggacattgaaaaggtcatgattacagacgaagaggaaatcaggaccaccaatcccgtggctacggagcagtatggttctgtatctaccaatctccagagcggcaacacacaagcagctacctcagatgtcaacacacaaggcgttcttccaggcatggtccggcaggacagagacgtgtacctgcagggacccatctgggcaaagattccacacacggacggacattttcacccttctcctcttatgggaggatttggactgaagcaccctcccccgcagattctcatcaagaataccccggtacctgcgaatccttctaccaccttcagcgcggcaaagtttgcttccttcatcacacagtactccacggggcaggtcagcgtggagatcgagtgggagccgcagaaagagaacagcaaacgctggaaccccgagatccagtatacctccaactacaacaagtctgttaatgtggactttactgtggacactaatggcgtgtattcagagcctcgccccattggcacaagatacctgactcgtaatctgtaa

SEQ ID NO: 11980 - DNA, 2208 bp, Artificial Sequence
  source: /note="Description of Artificial Sequence: Synthetic polynucleotide"
atggctgccgatggttatcttccagattggctcgaggacactctctctgaaggaataagacagtggtggaagctcaaacctggcccaccaccgccaaagcccgcagagcggcataaggacgacagcaggggtcttgtgcttcctgggtacaagtacctcggacccttcaacggactcgacaaaggagagccggtcaacgaggcagacgccgcggccctcgagcacgacaaggcctacgaccggcagctcgacagcggagacaacccgtacctcaagtacaaccacgccgacgcggagtttcaggagcgccttaaagaagatacgtcttttgggggcaacctcgcaagagcagtattccaggcgaaaaagagggttcttgaacctctgggcctggttgaggagcctgttaagacggctccgggaaaaaagaggccggtagagcactctcctgcggagccagattcctcctccggaactggaaagtcgggccaacagcctgcaagaaagagattgaattttggtcagactggagacgcagactccgtacctgacccccagcctctcggacagccaccagcagccccctctggtctgggaactaatacgatggcttcaggcagtggcgcaccaatggcagacaataacgagggcgccgacggagtgggtaattcctcgggaaattggcattgcgattccacatggatgggcgacagagtcatcaccaccagcacccgcacctgggctctgcccacctacaacaaccatctgtacaagcaaatttccagccagtctggagccagcaacgacaaccactactttggctacagcaccccttgggggtattttgacttcaacagattccactgccacttctccccacgtgactggcaaagactcatcaacaacaattggggattccggcccaaaagactcaacttcaagctctttaacattcaagtcaaggaggtcacgcagaatgacggtacgacgacgattgccaataaccttaccagcacggttcaggtgtttactgactcggagtaccagctcccgtacgtcctcggctcggcgcatcaaggatgcctcccgccgttcccagcagacgtcttcatggtgccacagtatggatacctcaccctgaacaacgggagtcaggcggtaggacgctcttcattttactgcctggagtactttccttctcagatgctgcgtaccggaaacaactttaccttcagctacacctttgaggacgttccttttcacagcagctacgctcacagccagagtttggaccgtcttatgaatcctctcatcgaccagtacctgtattacttgagcagaacaaacactccaagcggaaccactacgcagtccaggcttcagttttctcaagccggagcgagtgacattcgggaccagtctaggaactggcttcctggaccctgttaccgccagcagcgagtatcaaggacagctgcggacaacaacaacagtgattactcgtggactggagctaccaagtatcacctcaatggaagagactctctggtgaatccgggcacagccatggccagccacaaggacgatgaagaaaagtattttcctcagagcggggttctcatcttcggaaaacaagactcgggaaaaactaatgtggacattgaaaaggtcatgattacagacgaagaggaaatcaggaccaccaatcccgtggctacggagcagtatggttctgtatctaccaatctccagagcggcaacacacaagcagctacctcagatgtcaacacacaaggcgttcttccaggcatggtccggcaggacagagacgtgtatctgcagggacccatctgggcaaagattccacacacggacggacattttcacccttctcctcttatgggaggatttggactgaagcaccctcccccgcagattctcatcaagaataccccggtacctgcgaatccttctaccaccttcagcgcggcaaagtttgcttccttcatcacacagtactccacggggcaggtcagcgtggagatcgagtgggagccgcagaaagagaacagcaaacgctggaaccccgagatccagtatacctccaactacaacaagtctgttaatgtggactttactgtggacactaatggcgtgtattcagagcctcgccccattggcacaagatacctgactcgtaatctgtaa

SEQ ID NO: 11981 - DNA, 2208 bp, Artificial Sequence
  source: /note="Description of Artificial Sequence: Synthetic polynucleotide"
atggctgccgatggttatcttccagattggctcgaggacactctctctgaaggaataagacagtggtggaagctcaaacctggcccaccaccgccaaagcccgcagagcggcataaggacgacagcaggggtcttgtgcttcctgggtacaagtacctcggacccttcaacggactcgacaaaggagagccggtcaacgaggcagacgccgcggccctcgagcacgacaaggcctacgaccggcagctcgacagcggagacaacccgtacctcaagtacaaccacgccgacgcggagtttcaggagcgccttaaagaagatacgtcttttgggggcaacctcgcaagagcagtattccaggcgaaaaagagggttcttgaacctctgggcctggttgaggagcctgttaagacggctccgggaaaaaagaggccggtagagcactctcctgcggggccagattcctcctccggaactggaaagtcgggccaacagcctgcaagaaagagattgaattttggtcagactggagacgcagactccgtacctgacccccagcctctcggacagccaccagcagccccctctggtctgggaactaatacgatggcttcaggcagtggcgcaccaatggcagacaataacgagggcgccgacggagtgggtaattcctcgggaaattggcattgcgattccacatggatgggcgacagagtcatcaccaccagcacccgcacctgggctctgcccacctacaacaaccatctgtacaagcaaatttccagccagtctggagccagcaacgacaaccactactttggctacagcaccccttgggggtattttgacttcaacagattccactgccacttctccccacgtgactggcaaagactcatcaacaacaattggggattccgggccaaaagactcaacttcgagctctttaacattcaagtcaaggaggtcacgcagaatgacggtacgacgacgattgccaataaccttaccagcacggttcaggtgtttactgactcggagtaccagctcccgtacgtcctcggctcggcgcatcaaggatgcctcccgccgttcccagcagacgtcttcatggtgccacagtatggatacctcaccctgaacaacgggagtcaggcggtaggacgctcttcattttactgcctggagtactttccttctcagatgctgcgtaccggaaacaactttaccttcagctacacctttgaggacgttccttttcacagcagctacgctcacagccagagtttggaccgtctcatgaatcctctcatcgaccagtacctgtattacttgagcagaacaaacactccaagcggaaccactacgcagtccaggcttcagttttctcaagccggagcgagtgacattcgggaccagtctaggaactggcttcctggaccctgttaccgccagcagcgagtatcaaagacagctgcggacaacaacaacagtgattactcgtggactggagctaccaagtatcacctcaatggaagagactctctggtgaatccgggcacagccatggccagccacaaggacgatgaagaaaagtattttcctcagagcggggttctcatcttcggaaaacaagactcgggaaaaactaatgtggacattgaaaaggtcatgattacagacgaagaggaaatcaggaccaccaatcccgtggctacggagcagtatggttctgtatctaccaatctccagagcggcaacacacaagcagctacctcagatgtcaacacacaaggcgttcttccaggcatggtctggcaggacagagacgtgtacctgcagggacccatctgggcaaagattccacacacggacggacactttcacccttctcctcttatgggaggatttggactgaagcaccctcccccgcagattctcatcaagagtaccccggtacctgcgaatccttctaccaccttcagcgcggcaaagtttgcttccttcatcacacagtactccacggggcaggtcagcgtggagatcgagtgggagctgcagaaagagaacagcaaacgctggaaccccgagatccagtatacctccaactacaacaagtctgttaatgtggactttactgtggacactaatggcgtgtattcagagcctcgccccattggcacaagatacctgactcgtaatctgtaa

SEQ ID NO: 11982 - DNA, 2208 bp, Artificial Sequence
  source: /note="Description of Artificial Sequence: Synthetic polynucleotide"
atggctgccgatggttatcttccagattggctcgaggacactctctctgaaggaataagacagtggtggaagctcaaacctggcccaccaccgccaaagcccgcagagcggcataaggacgacagcaggggtcttgtgcttcctgggtacaagtacctcggacccttcaacggactcgacaaaggagagccggtcaacgaggcagacgccgcggccctcgagcacgacaaggcctacgaccggcagctcgacagcggagacaacccgtacctcaagtacaaccacgccgacgcggagtttcaggagcgccttaaagaagatacgtcttttgggggcaacctcgcaagagcagtattccaggcgaaaaagagggttcttgaacctctgggcctggttgaggagcctgttaagacggctccgggaaaaaagaggccggtagagcactctcctgcggagccagattcctcctccggaactggaaagtcgggccaacagcctgcaagaaagagattgaattttggtcagactggagacgcagactccgtacctgacccccagcctctcggacagccaccagcagccccctctggtctgggaactaatacgatggcttcaggcagtggcgcaccaatggcagacaataacgagggcgccgacggagtgggtaattcctcgggaaattggcattgcgattccacatggatgggcgacagagtcatcaccaccagcacccgcacctgggctctgcccacctacaacaaccatctgtacaagcaaatttccagccagtctggagccagcaacgacaaccactactttggctacagcaccccttgggggtattttgacttcaacagattccactgccacttctccccacgtgactggcaaagactcatcaacaacaattggggattccggcccaaaagactcaacttcaagctctttaacattcaagtcaaggaggtcacgcagaatgacggtacgacgacgattgccaataaccttaccagcacggttcaggtgtttactgactcggagtaccagctcccgtacgtcctcggctcggcgcatcaaggatgcctcccgccgttcccagcagacgtcttcatggtgccacagtatggatacctcaccctgaacaacgggagtcaggcggtaggacgctcttcattttactgcctggagtactttccttctcagatgctgcgtaccggaaacaactttaccttcagctacacctttgaggacgttccttttcacagcagctacgctcacagccagagtttggaccgtctcatgaatcctctcatcgaccagtacctgtattacttgagcagaacaaacactccaagcggaaccactacgcagtccaggcttcggttttctcaagccggagcgagtgacattcgggaccagtctaggaactggcttcctggaccctgttaccgccagcagcgagtatcaaagacagctgcggacaacaacaacagtgattactcgtggactggagctaccaagtatcacctcaatggaagagactctctggtgaatccgggcacagccatggccagccacaaggacgatgaagaaaagtattttcctcagagcggggttctcatcttccggaaacaagactcgggaaaaactaatgtggacattgaaagggtcatgattacagacgaagaggaaatcaggaccaccaatcccgtggctacggagcagtatggttctgtatctaccaatctccagagcggcaacacacaagcagctacctcagatgtcaacacacaaggcgttcttccaggcatggtctggcaggacagagacgtgtacctgcagggacccatctgggcaaagattccacacacggacggacattttcacccttctcctcttatgggaggatttggactgaagcaccctcccccgcagattctcatcaagaataccccggtacctgcgaatccttctaccaccttcagcgcggcaaagtttgcttccttcatcacacagtactccacggggcaggtcagcgtggagatcgagtgggagctgcagaaagagaacagcaaacgctggaaccccgagatccagtatacctccaactacaacaagtctgttaatgtggactttactgtggacactaatggcgtgtattcagagcctcgccccattggcacaagatacctgactcgtaatctgtaa

SEQ ID NO: 11983 - DNA, 2208 bp, Artificial Sequence
  source: /note="Description of Artificial Sequence: Synthetic polynucleotide"
atggctgccgatggttatcttccagattggctcgaggacactctctctgaaggaataagacagtggtggaagctcaaacctggcccaccaccgccaaagcccgcagagcggcataaggacgacagcaggggtcttgtgcttcctgggtacaagtacctcggacccttcaacggactcgacaaaggagagccggtcaacgaggcagacgccgcggccctcgagcacgacaaggcctacgaccggcagctcgacagcggagacaacccgtacctcaagtacaaccacgccgacgcggagtttcaggagcgccttaaagaagatacgtcttttgggggcaacctcgcaagagcagtattccaggcgaaaaagagggttcttgaacctctgggcctggttgaggagcctgttaagacggctccgggaaaaaagaggccggtagagcactctcctgcggagccagattcctcctccggaactggaaagtcgggccaacagcctgcaagaaagagattgaattttggtcagactggagacgcagactccgtacctgacccccagcctctcggacagccaccagcagccccctctggtctgggaactaatacgatggcttcaggcagtggcgcaccaatggcagacaataacgagggcgccgacggagtgggtaattcctcgggaaattggcattgcgattccacatggatgggcgacagagtcatcaccaccagcacccgcacctgggctctgcccacctacaacaaccatctgtacaagcaaatttccagccagtctggagccagcaacgacaaccactactttggctacagcaccccttgggggtattttgacttcaacagattccactgccacttctccccacgtgactggcaaagactcatcaacaacaattggggattccgggccaaaagactcaacttcaagctctttaacattcaagtcaaggaggtcacgcagaatgacggtacgacgacgattgccaataaccttaccagcacggttcaggtgtttactgactcggagtaccagctcccgtacgtcctcggctcggcgcatcaaggatgcctcccgccgttcccagcagacgtcttcatggtgccacagtatggatacctcaccctgaacaacgggagtcaggcggtaggacgctcttcattttactgcctggagtactttccttctcagatgctgcgtaccggaaacaactttaccttcagctacacctttgaggacgttccttttcacagcagctacgctcacagccagagtttggaccgtctcatgaatcctctcatcgaccagtacctgtattacttgagcagaacaaacactccaagcggaaccactacgcagtccaggcttcggttttctcaagccggagcgagtgacattcgggaccagtctaggaactggcttcctggaccctgttaccgccagcagcgagtatcaaagacagctgcggacaacaacaacagtgattactcgtggactggagctaccaagtatcacctcaatggaagagactctctggtgaatccgggcacagccatggccagccacaaggacgatgaagaaaagtattttcctcagagcggggttctcatcttcggaaaacaagactcgggaaaaactaatgtggacattgaaagggtcatgattacagacgaagaggaaatcaggaccaccaatcccgtggctacggagcagtatggttctgtatctaccaatctccagagcggcaacacacaagcagctacctcagatgtcaacacacaaggcgttcttccaggcatggtctggcaggacagagacgtgtacctgcagggacccatctgggcaaagattccacacacggacggacattttcacccttctcctcttatgggaggatttggactgaagcaccctcccccgcagattctcatcaagaataccccggtacctgcgaatccttctaccaccttcagcgcggcaaagtttgcttccttcatcacacagtactccacggggcaggtcagcgtggagatcgagtgggagctgcagaaagagaacagcaaacgctggaaccccgagatccagtatacctccaactacaacaagtctgttaatgtggactttactgtggacactaatggcgtgtattcagagcctcgccccattggcacaagatacctgactcgtaatctgtaa

SEQ ID NO: 11984 - DNA, 2208 bp, Artificial Sequence
  source: /note="Description of Artificial Sequence: Synthetic polynucleotide"
atggctgccgatggttatcttccagattggctcgaggacactctctctgaaggaataagacagtggtggaagctcaaacctggcccaccaccaccaaggcccgcagagcggcatcaggacgacagcaggggtcttgtgcttcctgggtacaagtacctcggacccttcaacggactcgacaaaggagagccggtcaacgaggcagacgctgcggccctcgagcacgacaaggcctacgaccggcagctcgacagcggagacaacccgtacctcaagtacaaccacgccgacgcggagtttcaggagcgtcttaaagaagatacgtcttttgggggcaacctcggacgagcagtcttccaggcgaaaaagagggttcttgaacctctgggcctggttgaggaacctgttaagacggctccgggaaaaaagaggccggtagagcactctcctgcggagccagactcctcctcgggaaccggaaaagcgggccagcagcctgcaagaaagagattgaatttcggtcagactggagacgcagactccgtacctgacccccagcctctcggacagccaccagcagcccccacaagtttgggatctactacaatggctacaggcagtggcgcaccaatggcagacaataacgagggtgccgatggagtgggtaattcctcaggaaattggcattgcgattcccaatggctgggcgacagagtcatcaccaccagcacccgaacctgggccctgcccacctacaacaaccacctctacaagcaaatctccagccaatcaggagcatcgaacgacaaccactactttggctacagcaccccttgggggtattttgacttcaacagattccactgccacttctccccacgtgactggcaaagactcatcaacaacaattggggattccggcccaaaagactcaacttcgagctctttaacattcaagtcaaggaggtcacgcagaatgacggtacgacgacgattgccaataaccttaccagcacggttcaggtgtttactgactcggagtaccagctcccgtacgtcctcggctcggcgcatcaaggatgcctcccgccgttcccagcagacgtcttcatggtgccacagtatggatacctcaccctgaacaacgggagtcaggcggtaggacgctcttcattttactgcctggagtactttccttctcagatgctgcgtaccggaaacaactttaccttcagctacacctttgaggacgttccttttcacagcagctacgctcacagccagagtttggaccgtctcatgaatcctctcatcgaccagtacctgtattacttgagcagaacaaacactccaagcggaaccactacgcagtccaggcttcagttttctcaagccggagcgagtgacattcgggaccagtctaggaactggcttcctggaccctgttaccgccagcagcgagtatcaaagacagctgcggacaacaacaacagtgattactcgtggactggagctaccaagtatcacctcaatggaagagactctctggtgaatccgggcacagccatggccagccacaaggacgatgaagaaaagtattttcctcagagcggggttctcatcttcggaaaacaagactcgggaaaaactaatgtggacattgaaaaggtcatgattacagacgaagaggaaatcaggaccaccaatcccgtggctacggagcagtatggttctgtatctaccaatctccagagcggcaacacacaagcagctacctcagatgtcaacacacaaggcgttcttccaggcatggtctggcaggacagagacgtgtacctgcagggacccatctgggcaaagattccacacacggacggacactttcacccttctcctcttatgggaggatttggactgaagcaccctcccccgcagattctcatcaagagtaccccggtacctgcgaatccttctaccaccttcagcgcggcaaagtttgcttccttcatcacacagtactccacggggcaggtcagcgtggagatcgagtgggagctgcagaaagagaacagcaaacgctggaaccccgagatccagtatacctccaactacaacaagtctgttaatgtggactttactgtggacactaatggcgtgtattcagagcctcgccccattggcacaagatacctgactcgtaatctgtaa

SEQ ID NO: 11985 - DNA, 2208 bp, Artificial Sequence
  source: /note="Description of Artificial Sequence: Synthetic polynucleotide"
atggctgccgatggttatcttccagattggctcgaggacactctctctgaaggaataagacagtggtggaagctcaaacctggcccaccaccgccaaagcccgcagagcggcataaggacgacagcaggggtcttgtgcttcctgggtacaagtacctcggacccttcaacggactcgacaaaggagagccggtcaacgaggcagacgccgcggccctcgagcacgacaaggcctacgaccggcagctcgacagcggagacaacccgtacctcaagtacaaccacgccgacgcggagtttcaggagcgccttaaagaagatacgtcttttgggggcaacctcgcaagagcagtattccaggcgaaaaagagggttcttgaacctctgggcctggttgaggagcctgttaagacggctccgggaaaaaagaggccggtagagcactctcctgcggggccagattcctcctccggaactggaaagtcgggccaacagcctgcaagaaagagattgaattttggtcagactggagacgcagactccgtacctgacccccagcctctcggacagccaccagcagccccctctggtctgggaactaatacgatggcttcaggcagtggcgcaccaatggcagacaataacgagggcgccgacggagtgggtaattcctcgggaaattggcattgcgattccacatggatgggcgacagagtcatcaccaccagcacccgcacctgggctctgcccacctacaacaaccatctgtacaagcaaatttccagccagtctggagccagcaacgacaaccactactttggctacagcaccccttgggggtattttgacttcaacagattccactgccacttctccccacgtgactggcatagactcatcaacaacaattggggattccggcccaaaagactcaacttcgagctctttaacattcaagtcaaggaggtcacgcagaatgacggtacgacgacgattgccaataaccttaccagcacggttcaggtgtttactgactcggagtaccagctcccgtacgtcctcggctcggcgcatcaaggatgcctcccgccgttcccagcagacgtcttcatggtgccacagtatggatacctcaccctgaacaacgggagtcaggcggtaggacgctcttcattttactgcctggagtactttccttctcagatgctgcgtaccggaaacaactttaccttcagctacacctttgaggacgttccttttcacagcagctacgctcgcagccagagtttggaccgtctcatgaatcctctcatcgaccagtacctgtattacttgagcagaacaaacactccaagcggaaccactacgcagtccaggcttcagttttctcaagccggagcgagtgacattcgggaccagtctaggaactggcttcctggaccctgttaccgccagcagcgagtatcaaagacagctgcggacaacaacaacagtgattactcgtggactggagctaccaagtatcacctcaatggaagagactctctggtgaatccgggcacagccatggccagccacaaggacgatgaagaaaagtattttcctcagagcggggttctcatcttcggaaaacaagactcgggaaaaactaatgtggacattgaaaaggtcatgattacagacgaagaggaaatcaggaccaccaatcccgtggctacggagcagtatggttctgtatctaccaatctccagagcggcaacacacaagcagctacctcagatgtcaacacacaaggcgttcttccaggcatggtctggcaggacagagacgtgtacctgcagggacccatctgggcaaagattccacacacggacggacactttcacccttctcctcttatgggaggatttggactgaagcaccctcccccgcagattctcatcaagagtaccccggtacctgcgaatccttctaccaccttcagcgcggcaaagtttgcttccttcatcacacagtactccacggggcaggtcagcgtggagatcgagtgggagctgcagaaagagaacagcaaacgctggaaccccgagatccagtatacctccaactacaacaagtctgttaatgtggactttactgtggacactaatggcgtgtattcagagcctcgccccattggcacaagatacctgactcgtaatctgtaa

SEQ ID NO: 11986 - DNA, 2208 bp, Artificial Sequence
  source: /note="Description of Artificial Sequence: Synthetic polynucleotide"
atggctgccgatggttatcttccagattggctcgaggacactctctctgaaggaataagacagtggtggaagctcaaacctggcccaccaccgccaaagcccgcagagcggcataaggacgacagcaggggtcttgtgcttcctgggtacaagtacctcggacccttcaacggactcgacaaaggagagccggtcaacgaggcagacgccgcggccctcgagcacgacaaggcctacgaccggcagctcgacagcggagacaacccgtacctcaagtacaaccacgccgacgcggagtttcaggagcgccttaaagaagatacgtcttttgggggcaacctcgcaagagcagtattccaggcgaaaaagagggttcttgaacctctgggcctggttgaggagcctgttaagacggctccgggaaaaaagaggccggtagagcactctcctgcggggccagattcctcctccggaactggaaagtcgggccaacagcctgcaagaaagagattgaattttggtcagactggagacgcagactccgtacctgacccccagcctctcggacagccaccagcagccccctctggtctgggaactaatacgatggcttcaggcagtggcgcaccaatggcagacaataacgagggcgccgacggagtgggtaattcctcgggaaattggcattgcgattccacatggatgggcgacagagtcatcaccaccagcacccgcacctgggctctgcccacctacaacaaccatctgtacaagcaaatttccagccagtctggagccagcaacgacaaccactactttggctacagcaccccttgggggtattttgacttcaacagattccactgccacttctccccacgtgactggcaaagactcatcaacaacaattggggattccggcccaaaagactcaacttcgagctctttaacattcaagtcaaggaggtcacgcagaatgacggtacgacgacgattgccaataaccttaccagcacggttcaggtgtttactgactcggagtaccagctcccgtacgtcctcggctcggcgcatcaaggatgcctcccgccgttcccagcagacgtcttcatggtgccacagtatggatacctcaccctgaacaacgggagtcaggcggtaggacgctcttcattttactgcctggagtactttccttctcagatgctgcgtaccggaaacaactttaccttcagctacacctttgaggacgttccttttcacagcagctacgctcacagccagagtttggaccgtctcatgaatcctctcatcgaccagtacctgtattacttgagcagaacaaacactccaagcggaaccactacgcagtccaggcttcagttttctcaagccggagcgagtgacattcgggaccagtctaggaactggcttcctggaccctgttaccgccagcagcgagtatcaaagacagctgcggacaacaacaacagtgattactcgtggactggagctaccaagtatcacctcaatggaagagactctctggtgaatccgggcacagccatggccagccacaaggacgatgaagaaaagtattttcctcagagcggggttctcatcttcggaaaacaagactcgggaaaaactaatgtggacattgaaaaggtcatgattacagacgaagaggaaatcaggaccaccaatcccgtggctacggagcagtatggttctgtatctaccaatctccagagcggcaacacacaagcagctacctcagatgtcaacacacaaggcgttcttccaggcatggtctggcaggacagagacgtgtacctgcagggacccatctgggcaaagattccacacacggacggacactttcacccttctcctcttatgggaggatttggactgaagcaccctcccccgcagattctcatcaagagtaccccggtacctgcgaatccttctaccaccttcagcgcggcaaagtttgcttccttcatcacacagtactccacggggcaggtcagcgtggagatcgagtgggagctgcagaaggagaacagcaaacgctggaaccccgagatccagtacacttccaactacaacaaatctgttaatgtggactttactgtggacgctaatggtgtgtattcagagcctcgccccattggcaccagatacctgactcgtaatctgtaa

SEQ ID NO: 11987 - DNA, 2208 bp, Artificial Sequence
  source: /note="Description of Artificial Sequence: Synthetic polynucleotide"
atggctgccgatggttatcttccagattggctcgaggacactctctctgaaggaataagacagtggtggaagctcaaacctggcccaccaccgccaaagcccgcagagcggcataaggacgacagcaggggtcttgtgcttcctgggtacaagtacctcggacccttcaacggactcgacaaaggagagccggtcaacgaggcagacgccgcggccctcgagcacgacaaggcctacgaccggcagctcgacagcggagacaacccgtacctcaagtacaaccacgccgacgcggagtttcaggagcgccttaaagaagatacgtcttttgggggcaacctcgcaagagcagtattccaggcgaaaaagagggttcttgaacctctgggcctggttgaggagcctgttaagacggctccgggaaaaaagaggccggtagagcactctcctgcggggccagattcctcctccggaactggaaagtcgggccaacagcctgcaagaaagagattgaattttggtcagactggagacgcagactccgtacctgacccccagcctctcggacagccaccagcagccccctctggtctgggaactaatacgatggcttcaggcagtggcgcaccaatggcagacaataacgagggcgccgacggagtgggtaattcctcgggaaattggcattgcgattccacatggatgggcgacagagtcatcaccaccagcacccgcacctgggctctgcccacctacaacaaccatctgtacaagcaaatttccagccagtctggagccagcaacgacaaccactactttggctacagcaccccttgggggtattttgacttcaacagattccactgccacttctccccacgtgactggcaaagactcatcaacaacaatttgggattccgggccaaaagactcaacttcgagctctttaacattcaagtcaaggaggtcacgcagaatgacggtacgacgacgattgccaataaccttaccagcacggttcaggtgtttactgactcggagtaccagctcccgtacgtcctcggctcggcgcatcaaggatgcctcccgccgttcccagcagacgtcttcatggtgccacagtatggatacctcaccctgaacaacgggagtcaggcggtaggacgctcttcattttactgcctggagtactttccttctcagatgctgcgtaccggaaacaactttaccttcagctacacctttgaggacgttccttttcacagcagctacgctcacagccagagtttggaccgtctcatgaatcctctcatcgaccagtacctgtattacttgagcagaacaaacactccaagcggaaccactacgcagtccaggcttcagttttctcaagccggagcgagtgacattcgggaccagtctaggaactggcttcctggaccctgttaccgccagcagcgagtatcaaagacagctgcggacaacaacaacagtgattactcgtggactggagctaccaagtatcacctcaatggaagagactctctggtgaatccgggcacagccatggccagccacaaggacgatgaagaaaagtattttcctcagagcggggttctcatcttcggaaaacaagactcgggaaaaactaatgtggacattgaaaaggtcatgattacagacgaagaggaaatcaggaccaccaatcccgtggctacggagcagtatggttctgtatctaccaatctccagagcggcaacacacaagcagctacctcagatgtcaacacacaaggcgttcttccaggcatggtctggcaggacagagacgtgtacctgcagggacccatctgggcaaagattccacacacggacggacactttcacccttctcctcttatgggaggatttggactgaagcaccctcccccgcagattctcatcaagagtaccccggtacctgcgaatccttctaccaccttcagcgcggcaaagtttgcttccttcatcacacagtactccacggggcaggtcagcgtggagatcgagtgggagctgcagaaagagaacagcaaacgctggaaccccgagatccagtatacctccaactacaacaagtctgttaatgtggactttactgtggacactaatggcgtgtattcagagcctcgccccattggcacaagatacctgactcgtaatctgtaa

SEQ ID NO: 11988 - DNA, 2208 bp, Artificial Sequence
  source: /note="Description of Artificial Sequence: Synthetic polynucleotide"
atggctgccgatggttatcttccagattggctcgaggacactctctctgaaggaataagacagtggtggaagctcaaacctggcccaccaccgccaaagcccgcagagcggcataaggacgacagcaggggtcttgtgcttcctgggtacaagtacctcggacccttcaacggactcgacaaaggagagccggtcaacgaggcagacgccgcggccctcgagcacgacaaggcctacgaccggcagctcgacagcggagacaacccgtacctcaagtacaaccacgccgacgcggagtttcaggagcgccttaaagaagatacgtcttttgggggcaacctcgcaagagcagtattccaggcgaaaaagagggttcttgaacctctgggcctggttgaggagcctgttaagacggctccgggaaaaaagaggccggtagagcactctcctgcggagccagattcctcctccggaactggaaagtcgggccaacagcctgcaagaaagagattgaattttggtcagactggagacgcagactccgtacctgacccccagcctctcggacagccaccagcagccccctctggtctgggaactaatacgatggcttcaggcagtggcgcaccaatggcagacaataacgagggcgccgacggagtgggtaattcctcgggaaattggcattgcgattccacatggatgggcgacagagtcatcaccaccagcacccgcacctgggctctgcccacctacaacaaccatctgtacaagcaaatttccagccagtctggagccagcaacgacaaccactactttggctacagcaccccttgggggtattttgacttcaacagattccactgccacttctccccacgtgactggcaaagactcatcaacaacaattggggattccggcccaaaagactcaacttcgagctctttaacattcaagtcaaggaggtcacgcagaatgacggtacgacgacgattgccaataaccttaccagcacggttcaggtgtttactgactcggagtaccagctcccgtacgtcctcggctcggcgcatcaaggatgcctcccgccgttcccagcagacgtcttcatggtgccacagtatggatacctcaccctgaacaacgggagtcaggcggtaggacgctcttcattttactgcctggagtactttccttctcagatgctgcgtaccggaaacaactttaccttcagctacacctttgaggacgttccttttcacagcagctacgctcacagccagagtttggaccgtctcatgaatcctctcatcgaccagtacctgtattacttgagcagaacaaacactccaagcggaaccactacgcagtccaggcttcagttttctcaagccggagcgagtgacattcgggaccagtctaggaactggcttcctggaccctgttaccgccagcagcgagtatcaaagacagctgcggacaacaacaacagtgattactcgtggactggagctaccaagtatcacctcaatggaagagactctctggtgaatccgggcacagccatggccagccacaaggacgatgaagaaaagtattttcctcagagcggggttctcatcttccggaaacaagactcgggaaaaactaatgtggacattgaaaaggtcatgattacagacgaagaggaaatcaggaccaccaatcccgtggctacggagcagtatggttctgtatctaccaatctccagagcggcaacacacaagcagctacctcagatgtcaacacacaaggcgttcttccaggcatggtctggcaggacagagacgtgtacctgcagggacccatctgggcaaagattccacacacggacggacactttcacccttctcctcttatgggaggatttggactgaagcaccctcccccgcagattctcatcaagagtaccccggtacctgcgaatccttctaccaccttcagcgcggcaaagtttgcttccttcatcacacagtactccacggggcaggtcagcgtggagatcgagtgggagctgcagaaagagaacagcaaacgctggaaccccgagatccagtatacctccaactacaacaagtctgttaatgtggactttactgtggacactaatggcgtgtattcagagcctcgccccattggcacaagatacctgactcgtaatctgtaa

SEQ ID NO: 11989 - DNA, 2208 bp, Artificial Sequence
  source: /note="Description of Artificial Sequence: Synthetic polynucleotide"
atggctgccgatggttatcttccagattggctcgaggacactctctctgaaggaataagacagtggtggaagctcaaacctggcccaccaccaccaaagcccgcagagcggcatcaggacgacagcaggggtcttgtgcttcccgggcacaagtacctcggacccttcaacggactcgacaaaggagagccggtcaacgaggcagacgctgcggccctcgagcacgacaaggcctacgaccggcagctcgacagcggagacaacccgtacctcaagtacaaccacgccgacgcggagtttcaggagcgtcttaaagaagatacgtcttttgggggcaacctcggacgagcagtcttccaggcgaaaaagagggttcttgaacctctgggcctggttgaggagcctgttaagacggctccgggaaaaaagaggccggtagagcactctcctgcggggccagattcctcctccggaactggaaagtcgggccaacagcctgcaagaaagagattgaattttggtcagactggagacgcagactccgtacctgacccccagcctctcggacagccaccagcagccccctctggtctgggaactaatacgatggcttcaggcagtggcgcaccaatggcagacaataacgagggcgccgacggagtgggtaattcctcgggaaattggcattgcgattccacatggatgggcgacagagtcatcaccaccagcacccgcacctgggctctgcccacctacaacaaccatctgtacaagcaaatttccagccagtctggagccagcaacgacaaccactactttggctacagcaccccttgggggtattttgacttcaacagattccactgccacttctccccacgtgactggcaaagactcatcaacaacaattggggattccggcccaaaagactcaacttcgagctctttaacattcaagtcaaggaggtcacgcagaatgacggtacgacgacgattgccaataaccttaccagcacggttcaggtgtttactgactcggagtaccagctcccgtacgtcctcggctcggcgcatcaaggatgcctcccgccgttcccagcagacgtcttcatggtgccacagtatggatacctcaccctgaacaacgggagtcaggcggtaggacgctcttcattttactgcctggagtactttccttctcagatgctgcgtaccggaaacaactttaccttcagctacacctttgaggacgttccttttcacagcagctacgctcacagccagagtttggaccgtctcatgaatcctctcatcgaccagtacctgtattacttgagcagaacaaacactccaagcggaaccactacgcagtccaggcttcagttttctcaagccggagcgagtgacattcgggaccagtctaggaactggcttcctggaccctgttaccgccagcagcgagtatcaaagacagctgcggacaacaacaacagtgattactcgtggactggagctaccaagtatcacctcaatggaagagactctctggtgaatccgggcacagccatggccagccacaaggacgatgaagaaaagtattttcctcagagcggggttctcatcttcggaaaacaagactcgggaaaaactaatgtggacattgaaaaggtcatgattacagacgaagaggaaatcaggaccaccaatcccgtggctacggagcagtatggttctgtatctaccaatctccagagcggcaacacacaagcagctacctcagatgtcaacacacaaggcgttcttccaggcatggtctggcaggacagagacgtgtacctgcagggacccatctgggcaaagattccacacacggacggacactttcacccttctcctcttatgggaggatttggactgaagcaccctcccccgcagattctcatcaagagtaccccggtacctgcgaatccttctaccaccttcagcgcggcaaagtttgcttccttcatcacacagtactccacggggcaggtcagcgtggagatcgagtgggagctgcagaaagagaacagcaaacgctggaaccccgagatccagtatacctccaactacaacaagtctgttaatgtggactttactgtggacactaatggcgtgtattcagagcctcgccccattggcacaagatacctgactcgtaatctgtaa

SEQ ID NO: 11990 - DNA, 2208 bp, Artificial Sequence
  source: /note="Description of Artificial Sequence: Synthetic polynucleotide"
atggctgccgatggttatcttccagattggctcgaggacactctctctgaaggaataagacagtggtggaagctcaaacctggcccaccaccgccaaagcccgcagagcggcataaggacgacagcaggggtcttgtgcttcctgggtacaagtacctcggacccttcaacggactcgacaaaggagagccggtcaacgaggcagacgccgcggccctcgagcacgacaaggcctacgaccggcagctcgacagcggagacaacccgtacctcaagtacaaccacgccgacgcggagtttcaggagcgccttaaagaagatacgtcttttgggggcaacctcgcaagagcagtattccaggcgaaaaagagggttcttgaacctctgggcctggttgaggagcctgttaagacggctccgggaaaaaagaggccggtagagcactctcctgcggggccagattcctcctccggaactggaaagtcgggccaacagcctgcaagaaagagattgaattttggtcagactggagacgcagactccgtacctgacccccagcctctcggacagccaccagcagccccctctggtctgggaactaatacgatggcttcaggcagtggcgcaccaatggcagacaataacgagggcgccgacggagtgggtaattcctcgggaaattggcattgcgattccacatggatgggcgacagagtcatcaccaccagcacccgcacctgggctctgcccacctacaacaaccatctgtacaagcaaatttccagccagtctggagccagcaacgacaaccactactttggctacagcaccccttgggggtattttgacttcaacagattccactgccacttctccccacgtgactggcatagactcatcaacaacaattggggattccggcccaaaagactcaacttcgagctctttaacattcaagtcaaggaggtcacgcagaatgacggtacgacgacgattgccaataaccttaccagcacggttcaggtgtttactgactcggagtaccagctcccgtacgtcctcggctcggcgcatcaaggatgcctcccgccgttcccagcagacgtcttcatggtgccacagtatggatacctcaccctgaacaacgggagtcaggcggtaggacgctcttcattttactgcctggagtactttccttctcagatgctgcgtaccggaaacaactttaccttcagctacacctttgaggacgttccttttcacagcagctacgctcacagccagagtttggaccgtctcatgaatcctctcatcgaccagtacctgtattacttgagcagaacaaacactccaagcggaaccactacgcagtccaggcttcagttttctcaagccggagcgagtgacattcgggaccagtctaggaactggcttcctggaccctgttaccgccagcagcgagtatcaaagacagctgcggacaacaacaacagtgattactcgtggactggagctaccaagtatcacctcaatggaagagactctctggtgaatccgggcacagccatggccagccacaaggacgatgaagaaaagtattttcctcagagcggggttctcatcttcggaaaacaagactcgggaaaaactaatgtggacattgaaaaggtcatgattacagacgaagaggaaatcaggaccaccaatcccgtggctacggagcagtatggttctgtatctaccaatctccagagcggcaacacacaagcagctacctcagatgtcaacacacaaggcgttcttccaggcatggtctggcaggacagagacgtgtacctgcagggacccatctgggcaaagattccacacacggacggacactttcacccttctcctcttatgggaggatttggactgaagcaccctcccccgcagattctcatcaagagtaccccggtacctgcgaatccttctaccaccttcagcgcggcaaagtttgcttccttcatcacacagtactccacggggcaggtcagcgtggagatcgagtgggagctgcagaaagagaacagcaaacgctggaaccccgagatccagtatacctccaactacaacaagtctgttaatgtggactttactgtggacactaatggcgtgtattcagagcctcgccccattggcacaagatacctgactcgtaatctgtaa

SEQ ID NO: 11991 - DNA, 2208 bp, Artificial Sequence
  source: /note="Description of Artificial Sequence: Synthetic polynucleotide"
atggctgccgatggttatcttccagattggctcgaggacactctctctgaaggaataagacagtggtggaagctcaaacctggcccaccaccgccaaagcccgcagagcggcataaggacgacagcaggggtcttgtgcttcctgggtacaagtacctcggacccttcaacggactcgacaagggggagccggtcaacgaggcagacgccgcggccctcgagcacgacaaggcctacgaccggcagctcgacagcggagacaacccgtacctcaagtacaaccacgccgacgcggagtttcaggagcgtcttaaagaagatacgtcttttgggggcaacctcggacgagcagtcttccaggcgaaaaagagggttcttgaacctctgggcctggttgaggaacctgttaagacggctccgggaaaaaagaggccggtagagcactctcctgtggagccagactcctcctcgggaaccggaaaggcgggccagcagcctgcaagaaaaagattgaatttcggtcagactggagacgcagactccgtacctgacccccagcctctcggacagccaccagcagccccctctggtctgggaactaatacgatggctacaggcagtggcgcaccaatggcagacaataacgagggcgccgacggagtgggtaattcctcgggaaattggcattgcgattccacatggatgggcgacagagtcatcaccaccagcacccgcacctgggctctgcccacctacaacaaccatctgtacaagcaaatttccagccaatcaggagcatcgaacgacaaccactactttggctacagcaccccctgggggtattttgacttcaacagattccactgccacttttcgccacgtgactggcaaagactcatcaacaacaactggggattccggcccaagagactcagcttcaagctctttaacattcaagtcaaggaggtcacgcagaatgacggtacgacgacgattgccaataaccttaccagcacggttcaggtctttactgactcggagtaccagctcccgtacgtcctcggctcggcgcatcaaggatgcctcccgccgttcccagcagacgtcttcatggtgccacagtatggatacctcaccctgaacaacgggagtcaggcggtaggacgctcttcattttactgcctggagtacttcccttctcagatgcttcgcacgggaaacaactttaccttcagctacacctttgaggacgtgccttttcacagcggctacgctcacagccaaagtctggaccgtctcatgaatcctctcatcgaccaatacctgtattacttgagcaaaacaaacgctccaagcggaaccaccacgatgtccaggcttcagttttctcaggccggagcgagtgacattcgggaccagtctagaaactggcttcctggaccctgttaccgccagcagcgagtatcaaagacagctgcggacaacaacaacagtgattactcgtggactggagctaccaagtaccacctcaatggaagagactctctggtgaacccgggcccagctatggccagccacaaggatgatgaagaaaaatattttcctcagagcggggttctcatcttcgggaaacaaggctcaaataaaactaatgtggacattgaaaaggttatgattacagacgaagaggaaatcaggaccaccaatcccgtggctacggagcagtatggttctgtatctaccaaccttcaaagcggcaacacacaagcagctacctcagatgtcaacacacaaggcgttcttcctggcatggtctggcaggacagagatgtgtacctgcaggggcccatctgggcaaagattcctcacacggacggacactttcacccttctcccctcatgggcggatttggattgaagcaccctcccccacagattctcatcaagaataccccggtacctgcgaatccttcgaccaccttcagtgcggcaaagtttgcttccttcatcacacagtattccacgggacaggtcagcgtggagatagagtgggagctgcagaaggagaacagcaaacgctggaaccccgagatccagtatacttccaactacaacaaatctgttaatgtggactttactgtggacactaatggtgtgtattcagagcctcgccccattggcaccagatacctgactcgtaatctgtaa

SEQ ID NO: 11992 - DNA, 2208 bp, Artificial Sequence
  source: /note="Description of Artificial Sequence: Synthetic polynucleotide"
atggctgccgatggttatcttccagattggctcgaggacactctctctgaaggaataagacagtggtggaagctcaaacctggcccaccaccaccaaggcccgcagagcggcatcaggacgacagcaggggtcttgtgcttcctgggtacaagtacctcggacccttcaacggactcgacaaaggagagccggtcaacgaggcagacgctgcggccctcgagcacgacaaggcctacgaccggcagctcgacagcggagacaacccgtacctcaagtacaaccacgccgacgcggagtttcaggagcgtcttaaagaagatacgtcttttgggggcaacctcggacgagcagtcttccaggcgaaaaagagggttcttgaacctctgggcctggttgaggaacctgttaagacggctccgggaaaaaagaggccggtagagcactctcctgcggagccagactcctcctcgggaaccggaaaagcgggccagcagcctgcaagaaagagattgaatttcggtcagactggagacgcagactccgtacctgacccccagcctctcggacagccaccagcagcccccacaagtttgggatctactacaatggctacaggcagtggcgcaccaatggcagacaataacgagggcgccgacggagtgggtaattcctcgggaaattggcattgcgattccacatggatgggcgacagagtcatcaccaccagcacccgcacctgggctctgcccacctacaacaaccatctgtacaagcaaatttccagccagtctggagccagcaacgacaaccactactttggctacagcaccccttgggggtattttgacttcaacagattccactgccacttctccccacgtgactggcaaagactcatcaacaacaattggggattccggcccaaaagactcaacttcgagctctttaacattcaagtcaaggaggtcacgcagaatgacggtacgacgacgattgccaataaccttaccagcacggttcaggtgtttactgactcggagtaccagctcccgtacgtcctcggctcggcgcatcaaggatgcctcccgccgttcccagcagacgtcttcatggtgccacagtatggatacctcaccctgaacaacgggagtcaggcggtaggacgctcttcattttactgcctggagtactttccttctcagatgctgcgtaccggaaacaactttaccttcagctacacctttgaggacgttccttttcacagcagctacgctcacagccagagtttggaccgtctcatgaatcctctcatcgaccagtacctgtattacttgagcagaacaaacactccaagcggaaccactacgcagtccaggcttcagttttctcaagccggagcgagtgacattcgggaccagtctaggaactggcttcctggaccctgttaccgccagcagcgagtatcaaagacagctgcggacaacaacaacagtgattactcgtggactggagctaccaagtatcacctcaatggaagagactctctggtgaatccgggcacagccatggccagccacaaggacgatgaagaaaagtattttcctcagagcggggttctcatcttcggaaaacaagactcgggaaaaactaatgtggacattgaaaaggtcatgattacagacgaagaggaaatcaggaccaccaatcccgtggctacggagcagtatggttctgtatctaccaatctccagagcggcaacacacaagcagctacctcagatgtcaacacacaaggcgttcttccaggcatggtctggcaggacagagacgtgtacctgcagggacccatctgggcaaagattccacacacggacggacactttcacccttctcctcttatgggaggatttggactgaagcaccctcccccgcagattctcatcaagagtaccccggtacctgcgaatccttctaccaccttcagcgcggcaaagtttgcttccttcatcacacagtactccacggggcaggtcagcgtggagatcgagtgggagctgcagaaagagaacagcaaacgctggaaccccgagatccagtatacctccaactacaacaagtctgttaatgtggactttactgtggacactaatggcgtgtattcagagcctcgccccattggcacaagatacctgactcgtaatctgtaa

SEQ ID NO: 11993 - DNA, 2208 bp, Artificial Sequence
  source: /note="Description of Artificial Sequence: Synthetic polynucleotide"
atggctgccgatggttatcttccagattggctcgaggacactctctctgaaggaataagacagtggtggaagctcaaacctggcccaccaccaccaaagcccgcagagcggcatcaggacgacagcaggggtcttgtgcttcccgggcacaagtacctcggacccttcaacggactcgacaaaggagagccggtcaacgaggcagacgctgcggccctcgagcacgacaaggcctacgaccggcagctcgacagcggagacaacccgtacctcaagtacaaccacgccgacgcggagtttcaggagcgtcttaaagaagatacgtcttttgggggcaacctcggacgagcagtcttccaggcgaaaaagagggttcttgaacctctgggcctggttgaggaacctgttaagacggctccgggaaaaaagaggccggtagagcactctcctgcggagccagactcctcctcgggaaccggaaaagcgggccagcagcctgcaagaaagagattgaatttcggtcagactggagacgcagactccgtacctgacccccagcctctcggacagccaccagcagccccctctggtctgggaactaatacgatggcttcaggcagtggcgcaccaatggcagacaataacgagggcgccgacggagtgggtaattcctcgggaaattggcattgcgattccacatggatgggcgacagagtcatcaccaccagcacccgcacctgggctctgcccacctacaacaaccatctgtacaagcaaatttccagccagtctggagccagcaacgacaaccactactttggctacagcaccccttgggggtattttgacttcaacagattccactgccacttctccccacgtgactggcaaagactcatcaacaacaattggggattccggcccaaaagactcaacttcgagctctttaacattcaagtcaaggaggtcacgcagaatgacggtacgacgacgattgccaataaccttaccagcacggttcaggtgtttactgactcggagtaccagctcccgtacgtcctcggctcggcgcatcaaggatgcctcccgccgttcccagcagacgtcttcatggtgccacagtatggatacctcaccctgaacaacgggagtcaggcggtaggacgctcttcattttactgcctggagtactttccttctcagatgctgcgtaccggaaacaactttaccttcagctacacctttgaggacgttccttttcacagcagctacgctcacagccagagtttggaccgtctcatgaatcctctcatcgaccagtacctgtattacttgagcagaacaaacactccaagcggaaccactacgcagtccaggcttcagttttctcaagccggagcgagtgacattcgggaccagtctaggaactggcttcctggaccctgttaccgccagcagcgagtatcaaagacagctgcggacaacaacaacagtgattactcgtggactggagctaccaagtatcacctcaatggaagagactctctggtgaatccgggcacagccatggccagccacaaggacgatgaagaaaagtattttcctcagagcggggttctcatcttcggaaaacaagactcgggaaaaactaatgtggacattgaaaaggtcatgattacagacgaagaggaaatcaggaccaccaatcccgtggctacggagcagtatggttctgtatctaccaatctccagagcggcaacacacaagcagctacctcagatgtcaacacacaaggcgttcttccaggcatggtctggcaggacagagacgtgtacctgcagggacccatctgggcaaagattccacacacggacggacactttcacccttctcctcttatgggaggatttggactgaagcaccctcccccgcagattctcatcaagagtaccccggtacctgcgaatccttctaccaccttcagcgcggcaaagtttgcttccttcatcacacagtactccacggggcaggtcagcgtggagatcgagtgggagctgcagaaagagaacagcaaacgctggaaccccgagatccagtatacctccaactacaacaagtctgttaatgtggactttactgtggacactaatggcgtgtattcagagcctcgccccattggcacaagatacctgactcgtaatctgtaa

SEQ ID NO: 11994 - DNA, 2208 bp, Artificial Sequence
  source: /note="Description of Artificial Sequence: Synthetic polynucleotide"
atggctgccgatggttatcttccagattggctcgaggacactctctctgaaggaataagacagtggtggaagctcaaacctggcccaccaccgccaaagcccgcagagcggcataaggacgacagcaggggtcttgtgcttcctgggtacaagtacctcggacccttcaacggactcgacaaaggagagccggtcaacgaggcagacgccgcggccctcgagcacgacaaggcctacgaccggcagctcgacagcggagacaacccgtacctcaagtacaaccacgccgacgcggagtttcaggagcgccttaaagaagatacgtcttttgggggcaacctcgcaagagcagtattccaggcgaaaaagagggttcttgaacctctgggcctggttgaggagcctgttaagacggctccgggaaaaaagaggccggtagagcactctcctgcggagccagattcctcctccggaactggaaagtcgggccaacagcctgcaagaaagagattgaattttggtcagactggagacgcagactccgtacctgacccccagcctctcggacagccaccagcagccccctctggtctgggaactaatacgatggcttcaggcagtggcgcaccaatggcagacaataacgagggcgccgacggagtgggtaattcctcgggaaattggcattgcgattccacatggatgggcgacagagtcatcaccaccagcacccgcacctgggctctgcccacctacaacaaccatctgtacaagcaaatttccagccagtctggagccagcaacgacaaccactactttggctacagcaccccttgggggtattttgacttcaacagattccactgccacttctccccacgtgactggcaaagactcatcaacaacaattggggattccggcccaaaagactcaacttcaagctctttaacattcaagtcaaggaggtcacgcagaatgacggtacgacgacgattgccaataaccttaccagcacggttcaggtgtttactgactcggagtaccagctcccgtacgtcctcggctcggcgcatcaaggatgcctcccgccgttcccagcagacgtcttcatggtgccacagtatggatacctcaccctgaacaacgggagtcaggcggtaggacgctcttcattttactgcctggagtactttccttctcagatgctgcgtaccggaaacaactttaccttcagctacacctttgaggacgttccttttcacagcagctacgctcacagccagagtttggaccgtctcatgaatcctctcatcgaccagtacctgtattacttgagcagaacaaacactccaagcggaaccactacgcagtccaggcttcggttttctcaagccggagcgagtgacattcgggaccagtctaggaactggcttcctggaccctgttaccgccagcagcgagtatcaaagacagctgcggacaacaacaacagtgattactcgtggactggagctaccaagtatcacctcaatggaagagactctctggtgaatccgggcacagccatggccagccacaaggacgatgaagaaaagtattttcctcagagcggggttctcatcttcggaaaacaagactcggaaaaaactaatgtggacattgaaagggtcatgattacagacgaagaggaaatcaggaccaccaatcccgtggctacggagcagtatggttctgtatctaccaatctccagagcggcaacacacaagcagctacctcagatgtcaacacacaaggcgttcttccaggcatggtctggcaggacagagacgtgtacctgcagggacccatctgggcaaagattccacacacggacggacattttcacccttctcctcttatgggaggatttggactgaagcaccctcccccgcagattctcatcaagaataccccggtacctgcgaatccttctaccaccttcagcgcggcaaagtttgcttccttcatcacacagtactccacggggcaggtcagcgtggagatcgagtgggagctgcagaaagagaacagcaaacgctggaaccccgagatccagtatacctccaactacaacaagtctgttaatgtggactttactgtggacactaatggcgtgtattcagagcctcgccccattggcacaagatacctgactcgtaatctgtaa

SEQ ID NO: 11995 - DNA, 2208 bp, Artificial Sequence
  source: /note="Description of Artificial Sequence: Synthetic polynucleotide"
atggctgccgatggttatcttccagattggctcgaggacactctctctgaaggaataagacagtggtggaagctcaaacctggcccaccaccaccaaagcccgcagagcggcatcaggacgacagcaggggtcttgtgcttcctgggtacaagtacctcggacccttcaacggactcgacaaaggagagccggtcaacgaggcagacgccgcggccctcgagcacgacaaggcctacgaccggcagctcgacagcggagacaacccgtacctcaagtacaaccacgccgacgcggagtttcaggagcgtcttaaagaagatacgtcttttgggggcaacctcggacgagcagtcttccaggcgaaaaagagggttcttgaacctctgggcctggttgaggaacctgttaagacggctccgggaaaaaagaggccggtagagcactctcctgtggagccagactcctcctcgggaaccggaaaggcgggccagcagcctgcaagaaaaagattgaatttcggtcagactggagacgcagactccgtacctgacccccagcctctcggacagccaccagcagccccctctggtctgggaactaatacgatggctacaggcagtggcgcaccaatggcagacaataacgagggcgccgacggagtgggtaattcctcgggaaattggcattgcgattccacatggatgggcgacagagtcatcaccaccagcacccgcacctgggctctgcccacctacaacaaccatctgtacaagcaaatttccagccaatcaggagcatcgaacgacaaccactactttggctacagcaccccctgggggtattttgacttcaacagattccactgccacttttcgccacgtgactggcaaagactcatcaacaacaactggggattccggcccaagagactcagcttcaagctctttaacattcaagtcaaggaggtcacgcagaatgacggtacgacgacgattgccaataaccttaccagcacggttcaggtctttactgactcggagtaccagctcccgtacgtcctcggctcggcgcatcaaggatgcctcccgccgttcccagcagacgtcttcatggtgccacagtatggatacctcaccctgaacaacgggagtcaggcggtaggacgctcttcattttactgcctggagtacttcccttctcagatgcttcgcacgggaaacaactttaccttcagctacacctttgaggacgtgccttttcacagcagctacgctcacagccaaagtctggaccgtctcatgaatcctctcatcgaccaatacctgtattacttgagcaaaacaaacgctccaagcggaaccaccacgatgtccaggcttcagttttctcaggccggagcgagtgacattcgggaccagtctagaaactggcttcctggaccctgttaccgccagcagcgagtatcaaagacagctgcggacaacaacaacagtgattactcgtggactggagctaccaagtaccacctcaatggaagagactctctggtgaacccgggcccagctatggccagccacaaggatgatgaagaaaaatattttcctcagagcggggttctcatcttcgggaaacaaggctcaaataaaactaatgtggacattgaaaaggttatgattacagacgaagaggaaatcaggaccaccaatcccgtggctacggagcagtatggttctgtatctaccaaccttcaaagcggcaacacacaagcagctacctcagatgtcaacacacaaggcgttcttcctggcatggtctggcaggacagagatgtgtacctgcaggggcccatctgggcaaagattcctcacacggacggacactttcacccttctcccctcatgggcggatttggattgaagcaccctcccccacagattctcatcaagaataccccggtacctgcgaatccttcgaccaccttcagtgcggcaaagtttgcttccttcatcacacagtattccacgggacaggtcagcgtggagatagagtgggagctgcagaaggagaacagcaaacgctggaaccccgagatccagtatacttccaactacaacaaatctgttaatgtggactttactgtggacactaatggtgtgtattcagagcctcgccccattggcaccagatacctgactcgtaatctgtaa

SEQ ID NO: 11996 - DNA, 2208 bp, Artificial Sequence
  source: /note="Description of Artificial Sequence: Synthetic polynucleotide"
atggctgccgatggttatcttccagattggctcgaggacactctctctgaaggaataagacagtggtggaagctcaaacctggcccaccaccaccaaggcccgcagagcggcatcaggacgacagcaggggtcttgtgcttcctgggtacaagtacctcggacccttcaacggactcgacaaaggagagccggtcaacgaggcagacgctgcggccctcgagcacgacaaggcctacgaccggcagctcgacagcggagacaacccgtacctcaagtacaaccacgccgacgcggagtttcaggagcgtcttaaagaagatacgtcttttgggggcaacctcggacgagcagtcttccaggcgaaaaagagggttcttgaacctctgggcctggttgaggaacctgttaagacggctccgggaaaaaagaggccggtagagcactctcctgcggggccagattcctcctccggaactggaaagtcgggccaacagcctgcaagaaagagattgaattttggtcagactggagacgcagactccgtacctgacccccagcctctcggacagccaccagcagccccctctggtctgggaactaatacgatggcttcaggcagtggcgcaccaatggcagacaataacgagggcgccgacggagtgggtaattcctcgggaaattggcattgcgattccacatggatgggcgacagagtcatcaccaccagcacccgcacctgggctctgcccacctacaacaaccatctgtacaagcaaatttccagccagtctggagccagcaacgacaaccactactttggctacagcaccccttgggggtattttgacttcaacagattccactgccacttctccccacgtgactggcaaagactcatcaacaacaattggggattccgggccaaaagactcaacttcgagctctttaacattcaagtcaaggaggtcacgcagaatgacggtacgacgacgattgccaataaccttaccagcacggttcaggtgtttactgactcggagtaccagctcccgtacgtcctcggctcggcgcatcaaggatgcctcccgccgttcccagcagacgtcttcatggtgccacagtatggatacctcaccctgaacaacgggagtcaggcggtaggacgctcttcattttactgcctggagtactttccttctcagatgctgcgtaccggaaacaactttaccttcagctacacctttgaggacgttccttttcacagcagctacgctcacagccagagtttggaccgtctcatgaatcctctcatcgaccagtacctgtattacttgagcagaacaaacactccaagcggaaccactacgcagtccaggcttcagttttctcaagccggagcgagtgacattcgggaccagtctaggaactggcttcctggaccctgttaccgccagcagcgagtatcaaagacagctgcggacaacaacaacagtgattactcgtggactggagctaccaagtatcacctcaatggaagagactctctggtgaatccgggcacagccatggccagccacaaggacgatgaagaaaagtattttcctcagagcggggttctcatcttcggaaaacaagactcgggaaaaactaatgtggacattgaaaaggtcatgattacagacgaagaggaaatcaggaccaccaatcccgtggctacggagcagtatggttctgtatctaccaatctccagagcggcaacacacaagcagctacctcagatgtcaacacacaaggcgttcttccaggcatggtctggcaggacagagacgtgtacctgcagggacccatctgggcaaagattccacacacggacggacactttcacccttctcctcttatgggaggatttggactgaagcaccctcccccgcagattctcatcaagagtaccccggtacctgcgaatccttctaccaccttcagcgcggcaaagtttgcttccttcatcacacagtactccacggggcaggtcagcgtggagatcgagtgggagctgcagaaagagaacagcaaacgctggaaccccgagatccagtatacctccaactacaacaagtctgttaatgtggactttactgtggacactaatggcgtgtattcagagcctcgccccattggcacaagatacctgactcgtaatctgtaa

SEQ ID NO: 11997 - DNA, 2208 bp, Artificial Sequence
  source: /note="Description of Artificial Sequence: Synthetic polynucleotide"
atggctgccgatggttatcttccagattggctcgaggacactctctctgaaggaataagacagtggtggaagctcaaacctggcccaccaccgccaaagcccgcagagcggcataaggacgacagcaggggtcttgtgcttcctgggtacaagtacctcggacccttcaacggactcgacaaaggagagccggtcaacgaggcagacgccgcggccctcgagcacgacaaggcctacgaccggcagctcgacagcggagacaacccgtacctcaagtacaaccacgccgacgcggagtttcaggagcgccttaaagaagatacgtcttttgggggcaacctcgcaagagcagtattccaggcgaaaaagagggttcttgaacctctgggcctggttgaggagcctgttaagacggctccgggaaaaaagaggccggtagagcactctcctgcggggccagattcctcctccggaactggaaagtcgggccaacagcctgcaagaaagagattgaattttggtcagactggagacgcagactccgtacctgacccccagcctctcggacagccaccagcagccccctctggtctgggaactaatacgatggcttcaggcagtggcgcaccaacggcagacaataacgagggcgccgacggagtgggtaattcctcgggaaattggcattgcgattccacatggatgggcgacagagtcatcaccaccagcacccgcacctgggctctgcccacctacaacaaccatctgtacaagcaaatttccagccagtctggagccagcaacgacaaccactactttggctacagcaccccttgggggtattttgacttcaacagattccactgccacttctccccacgtgactggcaaagactcatcaacaacaattggggattccggcccaaaagactcaacttcgagctctttaacattcaagtcaaggaggtcacgcagaatgacggtacgacgacgattgccaataaccttaccagcacggttcaggtgtttaccgactcggagtaccagctcccgtacgtcctcggctcggcgcatcaaggatgcctcccgccgttcccagcagacgtcttcatggtgccacagtatggatacctcaccctgaacaacgggagtcaggcggtaggacgctcttcattttactgcctggagtactttccttctcagatgctgcgtaccggaaacaactttaccttcagctacacctttgaggacgttccttttcacagcagctacgctcacagccagagtttggaccgtctcatgaatcctctcatcgaccagtacctgtattacttgagcagaacaaacactccaagcggaaccactacgcagtccaggcttcagttttctcaagccggagcgagtgacattcgggaccagtctaggaactggcttcctggaccctgttaccgccagcagcgagtatcaaagacagctgcggacaacaacaacagtgattactcgtggactggagctaccaagtatcacctcaatggaagagactctctggtgaatccgggcacagccatggccagccacaaggacgatgaagaaaagtattttcctcagagcggggttctcatcttcggaaaacaagactcgggaaaaactaatgtggacattgaaaaggtcatgattacagacgaagaggaaatcaggaccaccaatcccgtggctacggagcagtatggttctgtatctaccaatctccagagcggcaacacacaagcagctacctcagatgtcaacacacaaggcgttcttccaggcatggtctggcaggacagagacgtgtacctgcagggacccatctgggcaaagattccacacacggacggacactttcacccttctcctcttatgggaggatttggactgaagcaccctcccccgcagattctcatcaagagtaccccggtacctgcgaatccttctaccaccttcagcgcggcaaagtttgcttccttcatcacacagtactccacggggcaggtcagcgtggagatcgagtgggagctgcagaaagagaacagcaaacgctggaaccccgagatccagtatacctccaactacaacaagtctgttaatgtggactttactgtggacactaatggcgtgtattcagagcctcgccccattggcacaagatacctgactcgtaatctgtaa

SEQ ID NO: 11998 - DNA, 2208 bp, Artificial Sequence
  source: /note="Description of Artificial Sequence: Synthetic polynucleotide"
atggctgccgatggttatcttccagattggctcgaggacactctctctgaaggaataagacagtggtggaagctcaaacctggcccaccaccgccaaagcccgcagagcggcataaggacgacagcaggggtcttgtgcttcctgggtacaagtacctcggacccttcaacggactcgacaaaggagagccggtcaacgaggcagacgccgcggccctcgagcacgacaaggcctacgaccggcagctcgacagcggagacaacccgtacctcaagtacaaccacgccgacgcggagtttcaggagcgccttaaagaagatacgtcttttgggggcaacctcgcaagagcagtattccaggcgaaaaagagggttcttgaacctctgggcctggttgaggagcctgttaagacggctccgggaaaaaagaggccggtagagcactctcctgcggggccagattcctcctccggaactggaaagtcgggccaacagcctgcaagaaagagattgaattttggtcagactggagacgcagactccgtacctgacccccagcctctcggacagccaccagcagccccctctggtctgggaactaatacgatggcttcaggcagtggcgcaccaatggcagacaataacgagggcgccgacggagtgggtaattcctcgggaaattggcattgcgattccacatggatgggcgacagagtcatcaccaccagcacccgcacctgggctctgcccacctacaacaaccatctgtacaagcaaatttccagccagtctggagccagcaacgacaaccactactttggctacagcaccccttgggggtattttgacttcaacagattccactgccacttctccccacgtgactggcaaagactcatcaacaacaattggggattccggcccaaaagactcaacttcgagctctttaacattcaagtcaaggaggtcacgcagaatgacggtacgacgacgattgccaataaccttaccagcacggttcaggtgtttactgactcggagtaccagctcccgtacgtcctcggctcggcgcatcaaggatgcctcccgccgttcccagcagacgtcttcatggtgccacagtatggatacctcaccctgaacaacgggagtcaggcggtaggacgctcttcattttactgcctggagtactttccttctcagatgctgcgtaccggaaacaactttaccttcagctacacctttgaggacgttccttttcacagcagctacgctcacagccagagtttggaccgtctcatgaatcctctcatcgaccagtacctgtattacttgagcagaacaaacactccaagcggaaccactacgcagtccaggcttcagttttctcaagccggagcgagtgacattcgggaccagtctaggaactggcttcctggaccctgttaccgccagcagcgagtatcaaagacagctgcggacaacaacaacagtgattactcgtggactggagctaccaagtatcacctcaatggaagagactctctggtgaatccgggcacagccatggccagccacaaggacgatgaagaaaagtattttcctcagagcggggttctcatcttccggaaacaagactcgggaaaaactaatgtggacattgaaaaggtcatgattacagacgaagaggaaatcaggaccaccaatcccgtggctacggagcagtatggttctgtatctaccaatctccagagcggcaacacacaagcagctacctcagatgtcaacacacaaggcgttcttccaggcatggtctggcaggacagagacgtgtacctgcagggacccatctgggcaaagattccacacacggacggacactttcacccttctcctcttatgggaggatttggactgaagcaccctcccccgcagattctcatcaagagtaccccggtacctgcgaatccttctaccaccttcagcgcggcaaagtttgcttccttcatcacacagtactccacggggcaggtcagcgtggagatcgagtgggagctgcagaaagagaacagcaaacgctggaaccccgagatccagtatacctccaactacaacaagtctgttaatgtggactttactgtggacactaatggcgtgtattcagagcctcgccccattggcacaagatacctgactcgtaatctgtaa

SEQ ID NO: 11999 - DNA, 2208 bp, Artificial Sequence
  source: /note="Description of Artificial Sequence: Synthetic polynucleotide"
atggctgccgatggttatcttccagattggctcgaggacactctctctgaaggaataagacagtggtggaagctcaaacctggcccaccaccgccaaagcccgcagagcggcataaggacgacagcaggggtcttgtgcttcctgggtacaagtacctcggacccttcaacggactcgacaaaggagagccggtcaacgaggcagacgccgcggccctcgagcacgacaaggcctacgaccggcagctcgacagcggagacaacccgtacctcaagtacaaccacgccgacgcggagtttcaggagcgccttaaagaagatacgtcttttgggggcaacctcgcaagagcagtattccaggcgaaaaagagggttcttgaacctctgggcctggttgaggagcctgttaagacggctccgggaaaaaagaggccggtagagcactctcctgcggagccagattcctcctccggaactggaaagtcgggccaacagcctgcaagaaagagattgaattttggtcagactggagacgcagactccgtacctgaccctcagcctctcggacagccaccagcagccccctctggtctgggaactaatacgatggcttcaggcagtggcgcaccaatggcagacaataacgagggcgccgacggagtgggtaattcctcgggaaattggcattgcgattccacatggatgggcgacagagtcatcaccaccagcacccgcacctgggctctgcccacctacaacaaccatctgtacaagcaaatttccagccagtctggagccagcaacgacaaccactactttggctacagcaccccttgggggtattttgacttcaacagattccactgccacttctccccacgtgactggcaaagactcatcaacaacaattggggattccggcccaaaagactcaacttcaagctctttaacattcaagtcaaggaggtcacgcagaatgacggtacgacgacgattgccaataaccttaccagcacggttcaggtgtttactgactcggagtaccagctcccgtacgtcctcggctcggcgcatcaaggatgcctcccgccgttcccagcagacgtcttcatggtgccacagtatggatacctcaccctgaacaacgggagtcaggcggtaggacgctcttcattttactgcctggagtactttccttctcagatgctgcgtaccggaaacaactttaccttcagctacacctttgaggacgttccttttcacagcagctacgctcacagccagagtttggaccgtctcatgaatcctctcatcgaccagtacctgtattacttgagcagaacaaacactccaagcggaaccactacgcagtccaggcttcagttttctcaagccggagcgagtgacattcgggaccagtctaggaactggcttcctggaccctgttaccgccagcagcgagtatcaaagacagctgcggacaacaacaacagtgattactcgtggactggagctaccaagtatcacctcaatggaagagactctctggtgaatccgggcacagccatggccagccacaaggacgatgaagaaaagtattttcctcagagcggggctctcatcttcggaaaacaagactcgggaaaaactaatgtggacattgaaaaggtcatgattacagacgaagaggaaatcaggaccaccaatcccgtggctacggagcagtatggttctgtatctaccaatctccagagcggcaacacacaagcagctacctcagatgtcaacacacaaggcgttcttccaggcatggtctggcaggacagagacgtgtacctgcagggacccatctgggcaaagattccacacacggacggacattttcacccttctcctcttatgggaggatttggactgaagcaccctcccccgcagattctcatcaagaataccccggtacctgcgaatccttctaccaccttcagcgcggcaaagtttgcttccttcatcacacagtactccacggggcaggtcagcgtggagatcgagtgggagctgcagaaagagaacagcaaacgctggaaccccgagatccagtatacctccaactacaacaagtctgttaatgtggactttactgtggacactaatggcgtgtattcagagcctcgccccattggcacaagatacctgactcgtaatctgtaa

SEQ ID NO: 12000 - DNA, 2208 bp, Artificial Sequence
  source: /note="Description of Artificial Sequence: Synthetic polynucleotide"
atggctgccgatggttatcttccagattggctcgaggacactctctctgaaggaataagacagtggtggaagctcaaacctggcccaccaccgccaaagcccgcagagcggcataaggacgacagcaggggtcttgtgcttcctgggtacaagtacctcggacccttcaacggactcgacaaaggagagccggtcaacgaggcagacgccgcggccctcgagcacgacaaggcctacgaccggcagctcgacagcggagacaacccgtacctcaagtacaaccacgccgacgcggagtttcaggagcgccttaaagaagatacgtcttttgggggcaacctcgcaagagcagtattccaggcgaaaaagagggttcttgaacctctgggcctggttgaggagcctgttaagacggctccgggaaaaaagaggccggtagagcactctcctgcggagccaggttcctcctccggaactggaaagtcgggccaacagcctgcaagaaagagattgaattttggtcagactggagacgcagactccgtacctgacccccagcctctcggacagccaccagcagccccctctggtctgggaactaatacgatggcttcaggcagtggcgcaccaatggcagacaataacgagggcgccgacggagtgggtaattcctcgggaaattggcattgcgattccacatggatgggcgacagagtcatcaccaccagcacccgcacctgggctctgcccacctacaacaaccatctgtacaagcaaatttccagccagtctggagccagcaacgacaaccactactttggctacagcaccccttgggggtattttgacttcaacagattccactgccacttctccccacgtgactggcaaagactcatcaacaacaattggggattccggcccaaaagactcaacttcaagctctttaacattcaagtcaaggaggtcacgcagaatgacggtacgacgacgattgccaataaccttaccagcacggttcaggtgtttactgactcggagtaccagctcccgtacgtcctcggctcggcgcatcaaggatgcctcccgccgttcccagcagacgtcttcatggtgccacagtatggatacctcaccctgaacaacgggagtcaggcggtaggacgctcttcattttactgcctggagtactttccttctcagatgctgcgtaccggaaacaactttaccttcagctacacctttgaggacgttccttttcacagcagctacgctcgcagccagagtttggaccgtctcatgaatcctctcatcgaccagtacctgtattacttgagcagaacaaacactccaagcggaaccactacgcagtccaggcttcggttttctcaagccggagcgagtgacattcgggaccagtctaggaactggcttcctggaccctgttaccgccagcagcgagtatcaaagacagctgcggacaacaacaacagtgattactcgtggactggagctaccaagtatcacctcaatggaagagactctctggtgaatccgggcacagccatggccagccacaaggacgatgaagaaaagtattttcctcagagcggggttctcatcttcggaaaacaagactcgggaaaaactaatgtggacattgaaagggtcatgattacagacgaagaggaaatcaggaccaccaatcccgtggctacggagcagtatggttctgtatctaccaatctccagagcggcaacacacaagcagctacctcagatgtcaacacacaaggcgttcttccaggcatggtctggcaggacagagacgtgtacctgcagggacccatctgggcaaagattccacacacggacggacattttcacccttctcctcttatgggaggatttggactgaagcaccctcccccgcagattctcatcaagaataccccggtacctgcgaatccttctaccaccttcagcgcggcaaagtttgcttccttcatcacacagtactccacggggcaggtcagcgtggagatcgagtgggagctgcagaaagagaacagcaaacgctggaaccccgagatccagtatacctccaactacaacaagtctgttaatgtggactttactgtggacactaagggcgtgtattcagagcctcgccccattggcacaagatacctgactcgtaatctgtaa

SEQ ID NO: 12001 - DNA, 2208 bp, Artificial Sequence
  source: /note="Description of Artificial Sequence: Synthetic polynucleotide"
atggctgccgatggttatcttccagattggctcgaggacactctctctgaaggaataagacagtggtggaagctcaaacctggcccaccaccgccaaagcccgcagagcggcataaggacgacagcaggggtcttgtgcttcctgggtacaagtacctcggacccttcaacggactcgacaaaggagagccggtcaacgaggcagacgccgcggccctcgagcacgacaaggcctacgaccggcagctcgacagcggagacaacccgtacctcaagtacaaccacgccgacgcggagtttcaggagcgccttaaagaagatacgtcttttgggggcaacctcgcaagagcagtattccaggcgaaaaagagggttcttgaacctctgggcctggttgaggagcctgttaagacggctccgggaaaaaagaggccggtagagcactctcctgcggagccagattcctcctccggaactggaaagtcgggccaacagcctgcaagaaagagattgaattttggtcagactggagacgcagactccgtacctgacccccagcctctcggacagccaccagcagccccctctggtctgggaactaatacgatggcttcaggcagtggcgcaccaatggcagacaataacgagggcgccgacggagtgggtaattcctcgggaaattggcattgcgattccacatggatgggcgacagagtcatcaccaccagcacccgcacctgggctctgcccacctacaacaaccatctgtacaagcaaatttccagccagtctggagccagcaacgacaaccactactttggctacagcaccccttgggggtattttgacttcaacagattccactgccacttctccccacgtgactggcaaagactcatcaacaacaattggggattccggcccaaaagactcaacttcaagctctttaacattcaagtcaaggaggtcacgcagaatgacggtacgacgacgattgccaataaccttaccagcacggttcaggtgtttactgactcggagtaccagctcccgtacgtcctcggctcggcgcatcaaggatgcctcccgccgttcccagcagacgtcttcatggtgccacagtatggatacctcaccctgaacaacgggagtcaggcggtaggacgctcttcattttactgcctggagtactttccttctcagatgctgcgtaccggaaacaactttaccttcagctacacctttgaggacgttccttttcacagcagctacgctcacagccagagtttggaccgtctcatgaatcctctcatcgaccagtacctgtattacttgagcagaacaaacactccaagcggaaccactacgcagtccaggcttcagttttctcaagccggagcgagtgacattcgggaccagtctaggaactggcttcctggaccctgttaccgccagcagcgagtatcaaagacagctgcggacaacaacaacagtgattactcgtggactggagctaccaagtatcacctcaatggaagagactctctggtgaatccgggcacagccatggccagccacaaggacgatgaagaaaagtattttcctcagagcggggttctcatcttcggaaaacaagactcgggaaaaactaatgtggacattgaaaaggtcatgattacagacgaagaggaaatcaggaccaccaatcccgtggctacggagcagtatggttctgtatctaccaatctccagagcggcaacacacaagcagctacctcagatgtcaacacacaaggcgttcttccaggcatggtctggcaggacagagacgtgtacctgcagggacccatctgggcaaagattccacacacggacggacactttcacccttctcctcttatgggaggatttggactgaagcaccctcccccgcagattctcatcaagagtaccccggtacctgcgaatccttctaccaccttcagcgcggcaaagtttgcttccttcatcacacagtactccacggggcaggtcagcgtggagatcgagtgggagctgcagaaagagaacagcaaacgctggaaccccgagatccagtatacctccaactacaacaagtctgttaatgtggactttactgtggacactaatggcgtgtattcagagcctcgccccattggcacaagatacctgactcgtaatctgtaa

SEQ ID NO: 12002 - DNA, 2208 bp, Artificial Sequence
  source: /note="Description of Artificial Sequence: Synthetic polynucleotide"
atggctgccgatggttatcttccagattggctcgaggacactctctctgaaggaataagacagtggtggaagctcaaacctggcccaccaccgccaaagcccgcagagcggcataaggacgacagcaggggtcttgtgcttcctgggtacaagtacctcggacccttcaacggactcgacaaaggagagccggtcaacgaggcagacgccgcggccctcgagcacgacaaggcctacgaccggcagctcgacagcggagacaacccgtacctcaagtacaaccacgccgacgcggagtttcaggagcgccttaaagaagatacgtcttttgggggcaacctcgcaagagcagtattccaggcgaaaaagagggttcttgaacctctgggcctggttgaggagcctgttaagacggctccgggaaaaaagaggccggtagagcactctcctgcggagctagattcctcctccggaactggaaagtcgggccaacagcctgcaagaaagagattgaattttggtcagactggagacgcagactccgtacctgacccccagcctctcggacagccaccagcagccccctctggtctgggaactaatacgatggcttcaggcagtggcgcaccaatggcagacaataacgagggcgccgacggagtgggtaattcctcgggaaattggcattgcgattccacatggatgggcgacagagtcatcaccaccagcacccgcacctgggctctgcccacctacaacaaccatctgtacaagcaaatttccagccagtctggggccagcaacgacaaccactactttggctacagcaccccttgggggtattttgacttcaacagattccactgccacttctccccacgtgactggcaaagactcatcaacaacaattggggattccggcccaaaagactcaacttcaagctctttaacattcaagtcaaggaggtcacgcagaatgacggtacgacgacgattgccaataaccttaccagcacggttcaggtgtttactgactcggagtaccagctcccgtacgtcctcggctcggcgcatcaaggatgcctcccgccgttcccagcagacgtcttcatggtgccacagtatggatacctcaccctgaacaacgggagtcaggcggtaggacgctcttcattttactgcctggagtactttccttctcagatgctgcgtaccggaaacaactttaccttcagctacacctttgaggacgttccttttcacagcagctacgctcacagccagagtttggaccgtctcatgaatcctctcatcgaccagtacctgtattacttgagcagaacaaacactccaagcggaaccactacgcagtccaggcttcagttttctcaagccggagcgagtgacattcgggaccagtctaggaactggcttcctggaccctgttaccgccagcagcgagtatcaaagacagctgcggacaacaacaacagtgattactcgtggactggagctaccaagtatcacctcaatggaagagactctctggtgaatccgggcacagccatggccagccacaaggacgatgaagaaaagtattttcctcagagcggggttctcatcttcggaaaacaagactcgggaaaaactaatgtggacattgaaaaggtcatgattacagacgaagaggaaatcaggaccaccaatcccgtggctacggagcagtatggttctgtatctaccaatctccagagcggcaacacacaagcagctacctcagatgtcaacacacaaggcgttcttccaggcatggtctggcaggacagagacgtgtacctgcagggacccatctgggcaaagattccacacacggacggacattttcacccttctcctcttatgggaggatttggaccgaagcaccctcccccgcagattctcatcaagaataccccggtacctgcgaatccttctaccaccttcagcgcggcaaagtttgcttccttcatcacacagtactccacggggcaggtcagcgtggagatcgagtgggagctgcagaaagagaacagcaaacgctggaaccccgagatccagtatacctccaactacaacaagtctgttaatgtggactttactgtggacgctaatggcgtgtattcagagcctcgccccattggcacaagatacctgactcgtaatctgtaa

SEQ ID NO: 12003 - DNA, 2208 bp, Artificial Sequence
  source: /note="Description of Artificial Sequence: Synthetic polynucleotide"
atggctgccgatggttatcttccagattggctcgaggacactctctctgaaggaataagacagtggtggaagctcaaacctggcccaccaccgccaaagcccgcagagcggcataaggacgacagcaggggtcttgtgcttcctgggtacaagtacctcggacccttcaacggactcgacaaaggagagccggtcaacgaggcagacgccgcggccctcgagcacgacaaggcctacgaccggcagctcgacagcggagacaacccgtacctcaagtacaaccacgccgacgcggagtttcaggagcgccttaaagaagatacgtcttttgggggcaacctcgcaagagcagtattccaggcgaaaaagagggttcttgaacctctgggcctggttgaggagcctgttaagacggctccgggaaaaaagaggccggtagagcactctcctgcggagctagattcctcctccggaactggaaagtcgggccaacagcctgcaagaaagagattgaattttggtcagactggagacgcagactccgtacctgacccccagcctctcggacagccaccagcagccccctctggtctgggaactaatacgatggcttcaggcagtggcgcaccaatggcagacaataacgagggcgccgacggagtgggtaattcctcgggaaattggcattgcgattccacatggatgggcgacagagtcatcaccaccagcacccgcacctgggctctgcccacctacaacaaccatctgtacaagcaaatttccagccagtctggggccagcaacgacaaccactactttggctacagcaccccttgggggtattttgacttcaacagattccactgccacttctccccacgtgactggcaaagactcatcaacaacaattggggattccggcccaaaagactcaacttcaagctctttaacattcaagtcaaggaggtcacgcagaatgacggtacgacgacgattgccaataaccttaccagcacggttcaggtgtttactgactcggagtaccagctcccgtacgtcctcggctcggcgcatcaaggatgcctcccgccgttcccagcagacgtcttcatggtgccacagtatggatacctcaccctgaacaacgggagtcaggcggtaggacgctcttcattttactgcctggagtactttccttctcagatgctgcgtaccggaaacaactttaccttcagctacacctttgaggacgttccttttcacagcagctacgctcacagccagagtttggaccgtctcatgaatcctctcatcgaccagtacctgtattacttgagcagaacaaacactccaagcggaaccactacgcagtccaggcttcagttttctcaagccggagcgagtgacattcgggaccagtctaggaactggcttcctggaccctgttaccgccagcagcgagtatcaaagacagctgcggacaacaacaacagtgattactcgtggactggagctaccaagtatcacctcaatggaagagactctctggtgaatccgggcacagccatggccagccacaaggacgatgaagaaaagtattttcctcagagcggggttctcatcttcggaaaacaagactcgggaaaaactaatgtggacattgaaaaggtcatgattacagacgaagaggaaatcaggaccaccaatcccgtggctacggagcagtatggttctgtatctaccaatctccggagcggcaacacacaagcagctacctcagatgtcaacacacaaggcgttcttccaggcatggtctggcaggacagagacgtgtacctgcagggacccatctgggcaaagattccacacacggacggacattttcacccttctcctcttatgggaggatttggaccgaagcaccctcccccgcagattctcatcaagaataccccggtacctgcgaatccttctaccaccttcagcgcggcaaagtttgcttccttcatcacacagtactccacggggcaggtcagcgtggagatcgagtgggagctgcagaaagagaacagcaaacgctggaaccccgagatccagtatacctccaactacaacaagtctgttaatgtggactttactgtggacactaatggcgtgtattcagagcctcgccccattggcacaagatacctgactcgtaatctgtaa

SEQ ID NO: 12004 - DNA, 2208 bp, Artificial Sequence
  source: /note="Description of Artificial Sequence: Synthetic polynucleotide"
atggctgccgatggttatcttccagattggctcgaggacactctctctgaaggaataagacagtggtggaagctcaaacctggcccaccaccgccaaagcccgcagagcggcataaggacgacagcaggggtcttgtgcttcctgggtacaagtacctcggacccttcaacggactcgacaaaggagagccggtcaacgaggcagacgccgcggccctcgagcacgacaaggcctacgaccggcagctcgacagcggagacaacccgtacctcaagtacaaccacgccgacgcggagtttcaggagcgccttaaagaagatacgccttttgggggcaacctcgcaagagcagtattccaggcgaaaaagagggttcttgaacctctgggcctggttgaggagcctgttaagacggctccgggaaaaaagaggccggtagagcactctcctgcggagctagattcctcctccggaactggaaagtcgggccaacagcctgcaagaaagagattgaattttggtcagactggagacgcagactccgtacctgacccccagcctctcggacagccaccagcagccccctctggtctgggaactaatacgatggcttcaggcagtggcgcaccaatggcagacaataacgagggcgccgacggagtgggtaattcctcgggaaattggcattgcgattccacatggatgggcgacagagtcatcaccaccagcacccgcacctgggctctgcccacctacaacaaccatctgtacaagcaaatttccagccagtctggggccagcaacgacaaccactactttggctacagcaccccttgggggtattttgacttcaacagattccactgccacttctccccacgtgactggcaaagactcatcaacaacaattggggattccggcccaaaggactcaacttcaagctctttaacattcaagtcaaggaggtcacgcagaatgacggtacgacgacgattgccaataaccttaccagcacggttcaggtgtttactgactcggagtaccagctcccgtacgtcctcggctcggcgcatcaaggatgcctcccgccgttcccagcagacgtcttcatggtgccacagtatggatacctcaccctgaacaacgggagtcaggcggtaggacgctcttcattttactgcctggagtactttccttctcagatgctgcgtaccggaaacaactttaccttcagctacacctttgaggacgttccttttcacagcagctacgctcacagccagagtttggaccgtctcatgaatcctctcatcgaccagtacctgtattacttgagcagaacaaacactccaagcggaaccactacgcagtccaggcttcagttttctcaagccggagcgagtgacattcgggaccagtctaggaactggcttcctggaccctgttaccgccagcagcgagtatcaaagacagctgcggacaacaacaacagtgattactcgtggactggagctaccaagtatcacctcaatggaagagactctctggtgaatccgggcacagccatggccagccacaaggacgatgaagaaaagtattttcctcagagcggggttctcatcttcggaaaacaagactcgggaaaaactaatgtggacattgaaaaggtcatgattacagacgaagaggaaatcaggaccaccaatcccgtggctacggagcagtatggttctgtatctaccaatctccagagcggcaacacacaagcagctacctcagatgtcaacacacaaggcgttcttccaggcatggtctggcaggacagagacgtgtacctgcagggacccatctgggcaaagattccacacacggacggacattttcacccttctcctcttatgggaggatttggaccgaagcaccctcccccgcagattctcatcaagaataccccggtacctgcgaatccttctaccaccttcagcgcggcaaagtttgcttccttcatcacacagtactccacggggcaggtcagcgtggagatcgagtgggagctgcagaaagagaacagcaaacgctggaaccccgagatccagtatacctccaactacaacaagtctgttaatgtggactttactgtggacactaatggcgtgtattcagagcctcgccccattggcacaagatacctgactcgtaatctgtaa

SEQ ID NO: 12005 - DNA, 2208 bp, Artificial Sequence
  source: /note="Description of Artificial Sequence: Synthetic polynucleotide"
atggctgccgatggttatcttccagattggctcgaggacactctctctgaaggaataagacagtggtggaagctcaaacctggcccaccaccgccaaagcccgcagagcggcataaggacgacagcaggggtcttgtgcttcctgggtacaagtacctcggacccttcaacggactcgacaaaggagagccggtcaacgaggcagacgccgcggccctcgagcacgacaaggcctacgaccggcagctcgacagcggagacaacccgtacctcaagtacaaccacgccgacgcggagtttcaggagcgccttaaagaagatacgtcttttgggggcaacctcgcaagagcagtattccaggcgaaaaagagggttcttgaacctctgggcctggttgaggagcctgttaagacggctccgggaaaaaagaggccggtagagcactctcctgcggagctagattcctcctccggaactggaaagtcgggccaacagcctgcaagaaagagattgaattttggtcagactggagacgcagactccgtacctgacccccagcctctcggacagccaccagcagccccctctggtctgggaactaatacgatggcttcaggcagtggcgcaccaatggcagacaataacgagggcgccgacggggtgggtaattcctcgggaaattggcattgcgattccacatggatgggcgacagagtcatcaccaccagcacccgcacctgggctctgcccacctacaacaaccatctgtacaagcaaatttccagccagtctggggccagcaacgacaaccactaccttggctacagcaccccttgggggtattttgacttcaacagattccactgccacttctccccacgtgactggcaaagactcatcaacaacaattggggattccggcccaaaagactcaacttcaagctctttaacattcaagtcaaggaggtcacgcagaatgacggtacgacgacgattgccaataaccttaccagcacggttcaggtgtttactgactcggagtaccagctcccgtacgtcctcggctcggcgcatcaaggatgcctcccgccgttcccagcagacgtcttcatggtgccacagtatggatacctcaccctgaacaacgggagtcaggcggtaggacgctcttcattttactgcctggagtactttccttctcagatgctgcgtaccggaaacaactttaccttcagctacacctttgaggacgttccttttcacagcagctacgctcacagccagagtttggaccgtctcatgaatcctctcatcgaccagtacctgtattacttgagcagaacaaacactccaagcggaaccactacgcagtccaggcttcagttttctcaagccggagcgagtggcattcgggaccagtctaggaactggcttcctggaccctgttaccgccagcagcgagtatcaaagacagctgcggacaacaacaacagtgattactcgtggactggagctaccaagtatcacctcaatggaagagactctctggtgaatccgggcacagccatggccagccacaaggacgatgaagaaaagtattttcctcagagcggggttctcatcttcggaaaacaagactcgggaaaaactaatgtggacattgaaaaggtcatgattacagacgaagaggaaatcaggaccaccaatcccgtggctacggagcagtatggttctgtatctaccaatctccagagcggcaacacacaagcagctacctcagatgtcaacacacaaggcgttcttccaggcatggtctggcaggacagagacgtgtacctgcagggacccatctgggcaaagattccacacacggacggacattttcacccttctcctcttatgggaggatttggaccgaagcaccctcccccgcagattctcatcaagaataccccggtacctgcgaatccttctaccaccttcagcgcggcaaagtttgcttccttcatcacacagtactccacggggcaggtcagcgtggagatcgagtgggagctgcagaaagggaacagcaaacgctggaaccccgagatccagtatacctccaactacaacaagtctgttaatgtggactttactgtggacactaatggcgtgtattcagagcctcgccccattggcacaagatacctgactcgtaatctgtaa

SEQ ID NO: 12006 - DNA, 2208 bp, Artificial Sequence
  source: /note="Description of Artificial Sequence: Synthetic polynucleotide"
atggctgccgatggttatcttccagattggctcgaggacactctctctgaaggaataagacagtggtggaagctcaaacctggcccaccaccgccaaagcccgcagagcggcataaggacgacagcaggggtcttgtgcttcctgggtacaagtacctcggacccttcaacggactcgacaaaggagagccggtcaacgaggcagacgccgcggccctcgagcacgacaaggcctacgaccggcagctcgacagcggagacaacccgtacctcaagtacaaccacgccgacgcggagtttcaggagcgccttaaagaagatacgtcttttgggggcaacctcgcaagagcagtattccaggcgaaaaagagggttcttgaacctctgggcctggttgaggagcctgttaagacggctccgggaaaaaagaggccggtagagcactctcctgcggagctagattcctcctccggaactggaaagtcgggccaacagcctgcaagaaagagattgaattttggtcagactggagacgcagactccgtacctgacccccagcctctcggacagccaccagcagccccctctggtctgggaactaatacgatggcttcaggcagtggcgcaccaatggcagacaataacgagggcgccgacggagtgggtaattcctcgggaaattggcattgcgattccacatggatgggcgacagagtcatcaccaccagcacccgcacctgggctctgcccacctacaacaaccatctgtacaagcaaatttccagccagtctggggccagcaacgacaaccactactttggctacagcaccccttgggggtattttgacttcaacagattccactgccacttctccccacgtgactggcaaagactcatcaacaacaattggggattccggcccaaaagactcaacttcaagctctttaacattcaagtcaaggaggtcacgcagaatgacggtacgacgacgattgccaataaccttaccagcacggttcaggtgtttactgactcggagtaccagctcccgtacgtcctcggctcggcgcatcaaggatgcctcccgccgttcccagcagacgtcttcatggtgccacagtatggatacctcaccctgaacaacgggagtcaggcggtaggacgctcttcattttactgcctggagtactttccttctcagatgctgcgtaccggaaacaactttaccttcagctacacctttgaggacgttccttttcacagcagctacgctcacagccagagtttggaccgtctcatgaatcctctcatcgaccagtacctgtattacttgagcagaacaaacactccaagcggaaccactacgcagtccaggcttcagttttctcaagccggagcgagtgacattcgggaccagtctaggaactggcttcctggaccctgttaccgccagcagcgagtatcaaagacagctgcggacaacaacaacagtgattactcgtggactggagctaccaagtatcacctcaatggaagagactctctggtgaatccgggcacagccatggccagccacaaggacgatgaagaaaagtattttcctcagagcggggttctcatcttcggaaaacaagactcgggaaaaactaatgtggacattgaaaaggtcatgattacagacgaagaggaaatcaggaccaccaatcccgtggctacggagcagtatggttctgtatctaccaatctccagagcggcaacacacaagcagctacctcagatgtcaacacacaaggcgttcttccaggcatggtctggcaggacagagacgtgtacctgcagggacccatctgggcaaagattccacacacggacggacattttcacccttctcctcttatgggaggatttggaccgaagcaccctcccccgcagattctcatcaagaataccccggtacctgcgaatccttctaccaccttcagcgcggcaaagtttgcttccttcatcacacagtactccacggggcaggtcagcgtggagatcgagtgggagctgcagaaagagaacagcaaacgctggaaccccgagatccagtatacctccaactacaacaagtctgttaatgtggactttactgtggacactaatggcgtgtattcagagcctcgccccattggcacaagatacccgactcgtaatctgtaa

SEQ ID NO: 12007 - DNA, 2208 bp, Artificial Sequence
  source: /note="Description of Artificial Sequence: Synthetic polynucleotide"
atggctgccgatggttatcttccagattggctcgaggacactctctctgaaggaataagacagtggtggaagctcaaacctggcccaccaccgccaaagcccgcagagcggcataaggacgacagcaggggtcttgtgcttcctgggtacaagtacctcggacccttcaacggactcgacaaaggagagccggtcaacgaggcagacgccgcggccctcgagcacgacaaggcctacgaccggcagctcgacagcggagacaacccgtacctcaagtacaaccacgccgacgcggagtttcaggagcgccttaaagaagatacgtcttttgggggcaacctcgcaagagcagtattccaggcgaaaaagagggttcttgaacctctgggcctggttgaggagcctgttaagacggctccgggaaaaaagaggccggtagagcactctcctgcggagctagattcctcctccggaactggaaagtcgggccaacagcctgcaagaaagagattgaattttggtcagactggagacgcagactccgtacctgacccccagcctctcggacagccaccagcagccccctctggtctgggaactaatacgatggcttcaggcagtggcgcaccaatggcagacaataacgagggcgccgacggagtgggtaattcctcgggaaattggcattgcgattccacatggatgggcgacagagtcatcaccaccagcacccgcacctgggctctgcccacctacaacaaccatctgtacaagcaaatttccagccagtctggggccagcaacgacaaccactactttggctacagcaccccttgggggtattttgacttcaacagattccactgccacttctccccacgtgactggcaaagactcatcaacaacaattggggattccggcccaaaagactcaacttcaagctctttaacattcaagtcaaggaggtcacgcagaatgacggtacgacgacgattgccaataaccttaccagcacggttcaggtgtttactgactcggagtaccagctcccgtacgtcctcggctcggcgcatcaaggatgcctcccgccgttcccagcagacgtcttcatggtgccacagtatggatacctcaccctgaacaacgggagtcaggcggtaggacgctcttcattttactgcctggagtactttccttctcagatgctgcgtaccggaaacaactttaccttcagctacacctttgaggacgttccttttcacagcagctacgctcacagccagagtttggaccgtctcatgaatcctctcatcgaccagtacctgtattacttgagcagaacaaacactccaagcggaaccactacgcagtccaggcttcagttttctcaagccggagcgagtgacattcgggaccagtctaggaactggcttcctggaccctgttaccgccagcagcgagtatcaaagacagctgcggacaacaacaacagtgattactcgtggactggagctaccaagtatcacctcaatggaagagactctctggtgaatccgggcacagccatggccagccacaaggacgatgaagaaaagtattttcctcagagcggggttctcatcttcggaaaacaagactcgggaaaaactaatgtggacattgaaaaggtcatgattacagacgaagaggaaatcaggaccaccaatcccgtggctacggagcagtatggttctgtatctaccaatctccagagcggcaacacacaagcagctacctcagatgtcaacacacaaggcgttcttccaggcatggtctggcaggacagagacgtgtacctgcagggacccatctgggcaaagattccacacacggacggacattttcacccttctcctcttatgggaggatttggaccgaagcaccctcccccgcagattctcatcaagaataccccggtacctgcgaatccttctaccaccttcagcgcggcaaagcttgcttccttcatcacacagtactccacggggcaggtcagcgtggagatcgagtgggagctgcagaaagagaacagcaaacgctggaaccccgagatccagtatacctccaactacaacaagtctgttaatgtggactttactgtggacactaatggcgtgtattcagagcctcgccccattggcacaagatacctgactcgtaatctgtaa

SEQ ID NO: 12008 - DNA, 2208 bp, Artificial Sequence
  source: /note="Description of Artificial Sequence: Synthetic polynucleotide"
atggctgccgatggttatcttccagattggctcgaggacactctctctgaaggaataagacagtggtggaagctcaaacctggcccaccaccgccaaagcccgcagagcggcataaggacgacagcaggggtcttgtgcttcctgggtacaagtacctcggacccttcaacggactcgacaaaggagagccggtcaacgaggcagacgccgcggccctcgagcacgacaaggcctacgaccggcagctcgacagcggagacaacccgtacctcaagtacaaccacgccgacgcggagtttcaggagcgccttaaagaagatacgtcttttgggggcaacctcgcaagagcagtattccaggcgaaaaagagggttcttgaacctctgggcctggttgaggagcctgttaagacggctccgggaaaaaagaggccggtagagcactctcctgcggagctagattcctcctccggaactggaaagtcgggccaacagcctgcaagaaagagattgaattttggtcagactggagacgcagactccgtacctgacccccagcctctcggacagccaccagcagccccctctggtctgggaactaatacgatggcttcaggcagtggcgcaccaatggcagacaataacgagggcgccgacggagtgggtaattcctcgggaaattggcattgcgattccacatggatgggcgacagagtcatcaccaccagcacccgcacctgggctctgcccacctacaacaaccatctgtacaagcaaatttccagccagtctggggccagcaacgacaaccactactttggctacagcaccccttgggggtattttgacttcaacagattccactgccacttctccccacgtgactggcaaagactcatcaacaacaattggggattccggcccaaaagactcaacttcaagctctttaacattcaagtcaaggaggtcacgcagaatgacggtacgacgacgattgccaataaccttaccagcacggttcaggtgtttactgactcggagtaccagctcccgtacgtcctcggctcggcgcatcaaggatgcctcccgccgttcccagcagacgtcttcatggtgccacagtatggatacctcaccctgaacaacgggagtcaggcggtaggacgctcttcattttactgcctggagtactttccttctcagatgctgcgtaccggaaacaactttaccttcagctacacctttgaggacgttccttttcacagcagctacgctcacagccagagtttggaccgtctcatgaatcctctcatcgaccagtacctgtattacttgagcagaacaaacactccaagcggaaccactacgcagtccaggcttcagttttctcaagccggagcgagtgacattcgggaccagtctaggaactggcttcctggaccctgttaccgccagcagcgagtatcaaagacagctgcggacaacaacaacagtgattactcgtggactggagctaccaagtatcacctcaatggaagagactctctggtgaatccgggcacagccatggccagccacaaggacgatgaagaaaagtattttcctcagagcggggttctcatcttcggaaaacaagactcgggaaaaactaatgtggacattgaaaaggtcatgattacagacgaagaggaaatcaggaccaccaatcccgtggctacggagcagtatggttctgtatctaccaatctccagagcggcaacacacaagcagctacctcagatgtcaacacacaaggcgttcttccaggcatggtctggcaggacagagacgtgtacctgcagggacccatctgggcaaagattccacacacggacggacattttcacccttctcctcttatgggaggatttggaccgaagcaccctcccccgcagattctcatcaagaataccccggtacctgcgaatccttctaccaccttcagcgcggcaaagtttgcttccttcaccacacagtactccacggggcaggtcagcgtggagatcgagtgggagctgcagaaagagaacagcaaacgctggaaccccgagatccagtatacctccaactacaacaagtctgttaatgtggactttactgtggacactaatggcgtgtattcagagcctcgccccattggcacaagatacctgactcgtaatctgtaa

SEQ ID NO: 12009 - DNA, 2208 bp, Artificial Sequence
  source: /note="Description of Artificial Sequence: Synthetic polynucleotide"
atggctgccgatggttatcttccagattggctcgaggacactctctctgaaggaataagacagtggtggaagctcaaacctggcccaccaccgccaaagcccgcagagcggcataaggacgacagcaggggtcttgtgcttcctgggtacaagtacctcggacccttcaacggactcgacaaaggagagccggtcaacgaggcagacgccgcggccctcgagcacgacaaggcctacgaccggcagctcgacagcggagacaacccgtacctcaagtacaaccacgccgacgcggagtttcaggagcgccttaaagaagatacgtcttttgggggcaacctcgcaagagcagtattccaggcgaaaaagagggttcttgaacctctgggcctggttgaggagcctgttaagacggctccgggaaaaaagaggccggtagagcactctcctgcggagctagattcctcctccggaactggaaagtcgggccaacagcctgcaagaaagagattgaattttggtcagactggagacgcagactccgtacctgacccccagcctctcggacagccaccagcagccccctctggtctgggaactaatacgatggcttcaggcagtggcgcaccaatggcagacaataacgagggcgccgacggagtgggtaattcctcgggaaattggcattgcgattccacatggatgggcgacagagtcatcaccaccagcacccgcacctgggctctgcccacctacaacaaccatctgtacaagcaaatttccagccagtctggggccagcaacgacaaccactactttggctacagcaccccttgggggtattttgacttcaacagattccactgccacttctccccacgtgactggcaaagactcatcaacaacaattggggattccggcccaaaagactcaacttcaagctctttaacattcaagtcaaggaggtcacgcagaatgacggtacgacgacgattgccaataaccttaccagcacggttcaggtgtttactgactcggagtaccagctcccgtacgtcctcggctcggcgcatcaaggatgcctcccgccgttcccagcagacgtcttcatggtgccacagtatggatacctcaccctgaacaacgggagtcaggcggtaggacgctcttcattttactgcctggagtactttccttctcagatgctgcgtaccggaaacaactttaccttcagctacacctttgaggacgttccttttcacagcagctacgctcacagccagagtttggaccgtctcatgaatcctctcatcgaccagtacctgtattacttgagcagaacaaacactccaagcggaaccactacgcagtccaggcttcagttttctcaagccggagcgagtgacattcgggaccagtctaggaactggcttcctggaccctgttaccgccagcagcgagtatcaaagacagctgcggacaacaacaacagtgattactcgtggactggagctaccaagtatcacctcaatggaagagactctctggtgaatccgggcacagccatggccagccacaaggacgatgaagaaaagtattttcctcggagcggggttctcatcttcggaaaacaagactcgggaaaaactaatgtggacattgaaaaggtcatgattacagacgaagaggaaatcaggaccaccaatcccgtggctacggagcagtatggttctgtatctaccaatctccagagcggcaacacacaagcagctacctcagatgtcaacacacaaggcgttcttccaggcatggtctggcaggacagagacgtgtacctgcagggacccatctgggcaaagattccacacacggacggacattttcacccttctcctcttatgggaggatttggaccgaagcaccctcccccgcagattctcatcaagaataccccggtacctgcgaatccttctaccaccttcagcgcggcaaagtttgcttccttcatcacacagtactccacggggcaggtcagcgtggagatcgagtgggagctgcagaaagagaacagcaaacgctggaaccccgagatccagtatacctccaactacaacaagtctgttaatgtggactttactgtggacactaatggcgtgtattcagagcctcgccccattggcacaagatacctgactcgtaatctgtaa

SEQ ID NO: 12010 - DNA, 2208 bp, Artificial Sequence
  source: /note="Description of Artificial Sequence: Synthetic polynucleotide"
atggctgccgatggttatcttccagattggctcgaggacactctctctgaaggaataagacagtggtggaagctcaaacctggcccaccaccgccaaagcccgcagagcggcataaggacgacagcaggggtcttgtgcttcctgggtacaagtacctcggacccttcaacggactcgacaaaggagagccggtcaacgaggcagacgccgcggccctcgagcacgacaaggcctacgaccggcagctcgacagcggagacaacccgtacctcaagtacaaccacgccgacgcggagtttcaggagcgccttaaagaagatacgtcttttgggggcaacctcgcaagagcagtattccaggcgaaaaagagggttcttgaacctctgggcctggttgaggagcctgttaagacggctccgggaaaaaagaggccggtagagcactctcctgcggagctagattcctcctccggaactggaaagtcgggccaacagcctgcaagaaagagattgaattttggtcagactggagacgcagactccgtacctgacccccagcctctcggacagccaccagcagccccctctggtctgggaactaatacgatggcttcaggcagtggcgcaccaatggcagacaataacgagggcgccgacggagtgggtaattcctcgggaaattggcattgcgattccacatggatgggcgacagagtcatcaccaccagcacccgcacctgggctctgcccacctacaacaaccatctgtacaagcaaatttccagccagtctggggccagcaacgacaaccactactttggctacagcaccccttgggggtattttgacttcaacagattccactgccacttctccccacgtgactggcaaagactcatcaacaacaattggggattccggcccaaaagactcaacttcaagctctttaacattcaagtcaaggaggtcacgcagaatgacggtacggcgacgattgccaataaccttaccagcacggttcaggtgtttactgactcggagtaccagctcccgtacgtcctcggctcggcgcatcaaggatgcctcccgccgttcccagcagacgtcttcatggtgccacagtatggatacctcaccctgaacaacgggagtcaggcggtaggacgctcttcattttactgcctggagtactttccttctcagatgctgcgtaccggaaacaactttaccttcagctacacctttgaggacgttccttttcacagcagctacgctcacagccagagtttggaccgtctcatgaatcctctcatcgaccagtacctgtattacttgagcagaacaaacactccaagcggaaccactacgcagtccaggcttcagttttctcaagccggagcgagtgacattcgggaccagtctaggaactggcttcctggaccctgttaccgccagcagcgagtatcaaagacagctgcggacaacaacaacagtgattactcgtggactggagctaccaagtatcacctcaatggaagagactctctggtgaatccgggcacagccatggccagccacaaggacgatgaagaaaagtattttcctcagagcggggttctcatcttcggaaaacaagactcgggaaaaactaatgtggacattgaaaaggtcatgattacagacgaagaggaaatcaggaccaccaatcccgtggctacggagcagtatggttctgtatctaccaatctccagagcggcaacacacaagcagctacctcagatgtcaacacacaaggcgttcttccaggcatggtctggcaggacagagacgtgtacctgcagggacccatctgggcaaagattccacacacggacggacattttcacccttctcctcttatgggaggatttggaccgaagcaccctcccccgcagattctcatcaagaataccccggtacctgcgaatccttctaccaccttcagcgcggcaaagtttgcttccttcatcacacagtactccacggggcaggtcagcgtggagatcgagtgggagctgcagaaagagaacagcaaacgctggaaccccgagatccagtatacctccaactacaacaagtctgttaatgtggactttactgtggacactaatggcgtgtattcagagcctcgccccattggcacaagatacctgactcgtaatctgtaa

SEQ ID NO: 12011 - DNA, 2208 bp, Artificial Sequence
  source: /note="Description of Artificial Sequence: Synthetic polynucleotide"
atggctgccgatggttatcttccagattggctcgaggacactctctctgaaggaataagacagtggtggaagctcaaacctggcccaccaccgccaaagcccgcagagcggcataaggacgacagcaggggtcttgtgcttcctgggtacaagtacctcggacccttcaacggactcgacaaaggagagccggtcaacgaggcagacgccgcggccctcgagcacgacaaggcctacgaccggcagcccgacagcggagacaacccgtacctcaagtacaaccacgccgacgcggagtttcaggagcgccttaaagaagatacgtcttttgggggcaacctcgcaagagcagtattccaggcgaaaaagagggttcttgaacctctgggcctggttgaggagcctgttaagacggctccgggaaaaaagaggccggtagagcactctcctgcggagctagattcctcctccggaactggaaagtcgggccaacagcctgcaagaaagagattgaattttggtcagactggagacgcagactccgtacctgacccccagcctctcggacagccaccagcagccccctctggtctgggaactaatacgatggcttcaggcagtggcgcaccaatggcagacaataacgagggcgccgacggagtgggtaattcctcgggaaattggcattgcgattccacatggatgggcgacagagtcatcaccaccagcacccgcacctgggctctgcccacctacaacaaccatctgtacaagcaaatttccagccagtctggggccagcaacgacaaccactactttggctacagcaccccttgggggtattttgacttcaacagattccactgccacttctccccacgtgactggcaaagactcatcaacaacaattggggattccggcccaaaagactcaacttcaagctctttaacattcaagtcaaggaggtcacgcagaatgacggtacgacgacgattgccaataaccttaccagcacggttcaggtgtttactgactcggagtaccagctcccgtacgtcctcggctcggcgcatcaaggatgcctcccgccgttcccagcagacgtcttcatggtgccacagtatggatacctcaccctgaacaacgggagtcaggcggtaggacgctcttcattttactgcctggagtactttccttctcagatgctgcgtaccggaaacaactttaccttcagctacacctttgaggacgttccttttcacagcagctacgctcacagccagagtttggaccgtctcatgaatcctctcatcgaccagtacctgtattacttgagcagaacaaacactccaagcggaaccactacgcagtccaggcttcagttttctcaagccggagcgagtgacattcgggaccagtctaggaactggcttcctggaccctgttaccgccagcagcgagtatcaaagacagctgcggacaacaacaacagtgattactcgtggactggagctaccaagtatcacctcaatggaagagactctctggtgaatccgggcacagccatggccagccacaaggacgatgaagaaaagtattttcctcagagcggggttctcatcttcggaaaacaagactcgggaaaaactaatgtggacattgaaaaggtcatgattacagacgaagaggaaatcaggaccaccaatcccgtggctacggagcagtatggttctgtatctaccaatctccagagcggcaacacacaagcagctacctcagatgtcaacacacaaggcgttcttccaggcatggtctggcaggacagagacgtgtacctgcagggacccatctgggcaaagattccacacacggacggacattttcacccttctcctcttatgggaggatttggaccgaagcaccctcccccgcagattctcatcaagaataccccggtacctgcgaatccttctaccaccttcagcgcggcaaagtttgcttccttcatcacacagtactccacggggcaggtcagcgtggagatcgagtgggagctgcagaaagagaacagcaaacgctggaaccccgagatccagtatacctccaactacaacaagtctgttaatgtggactttactgtggacactaatggcgtgtattcagagcctcgccccattggcacaagatacctgactcgtaatctgtaa

SEQ ID NO: 12012 - DNA, 2208 bp, Artificial Sequence
  source: /note="Description of Artificial Sequence: Synthetic polynucleotide"
atggctgccgatggttatcttccagattggctcgaggacactctctctgaaggaataagacagtggtggaagctcgaacctggcccaccaccgccaaagcccgcagagcggcataaggacgacagcaggggtcttgtgcttcctgggtacaagtacctcggacccttcaacggactcgacaaaggagagccggtcaacgaggcagacgccgcggccctcgagcacgacaaggcctacgaccggcagctcgacagcggagacaacccgtacctcaagtacaaccacgccgacgcggagtttcaggagcgccttaaagaagatacgccttttgggggcaacctcgcaagagcagtattccaggcgaaaaagagggttcttgaacctctgggcctggttgaggagcctgttaagacggctccgggaaaaaagaggccggtagagcactctcctgcggagctagattcctcctccggaactggaaagtcgggccaacagcctgcaagaaagagattgaattttggtcagactggagacgcagactccgtacctgacccccagcctctcggacagccaccagcagccccctctggtctgggaactaatacgatggcttcaggcagtggcgcaccaatggcagacaataacgagggcgccgacggagtgggtaattcctcgggaaattggcattgcgattccacatggatgggcgacagagtcatcaccaccagcacccgcacctgggctctgcccacctacaacaaccatctgtacaagcaaatttccagccagtctggggccagcaacgacaaccactactttggctacagcaccccttgggggtattttgacttcaacagattccactgccacttctccccacgtgactggcaaagactcatcaacaacaattggggattccggcccaaaagactcaacttcaagctctttaacattcaagtcaaggaggtcacgcagaatgacggtacgacgacgattgccaataaccttaccagcacggttcaggtgtttactgactcggagtaccagctcccgtacgtcctcggctcggcgcatcaaggatgcctcccgccgttcccagcagacgtcttcatggtgccacagtatggatacctcaccctgaacaacgggagtcaggcggtaggacgctcttcattttactgcctggagtactttccttctcagatgctgcgtaccggaaacaactttaccttcagctacacctttgaggacgttccttttcacagcagctacgctcacagccagagtttggaccgtctcatgaatcctctcatcgaccagtacctgtattacttgagcagaacaaacactccaagcggaaccactacgcagtccaggcttcagttttctcaagccggagcgagtgacattcgggaccagtctaggaactggcttcctggaccctgttatcgccagcagcgagtatcaaagacagctgcggacaacaacaacagtgattactcgtggactggagctaccaagtatcacctcaatggaagagactctctggtgaatccgggcacagccatggccagccacgaggacgatgaagaaaagtattttcctcagagcggggttctcatcttcggaaaacaagactcgggaaaaactaatgtggacattgaaaaggtcatgattacagacgaagaggaaatcaggaccaccaatcccgtggctacggagcagtatggttctgtatctaccaatctccagagcggcaacacacaagcagctacctcagatgtcaacacacaaggcgttcttccaggcatggtctggcaggacagagacgtgtacctgcagggacccatctgggcaaagattccacacacggacggacattttcacccttctcctcttatgggaggatttggaccgaagcaccctcccccgcagattctcatcaagaataccccggtacctgcgaatccttctaccaccttcagcgcggcaaagtttgcttccttcatcacacagtactccacggggcaggtcagcgtggagatcgagtgggagctgcagaaagagaacagcaaacgctggaaccccgagatccagtatacctccaactacaacaagtctgttaatgtggactttactgtggacactaatggcgtgtattcagagcctcgccccattggcacaagatacctgactcgtaatctgtaa

SEQ ID NO: 12013 - DNA, 2205 bp, Artificial Sequence
  source: /note="Description of Artificial Sequence: Synthetic polynucleotide"
atggctgccgatggttatcttccagattggctcgaggacactctctctgaaggaataagacagtggtggaagctcaaacctggcccaccaccgccaaagcccgcagagcggcataaggacgacagcaggggtcttgtgcttcctgggtacaagtacctcggacccttcaacggactcgacaaaggagagccggtcaacgaggcagacgccgcggccctcgagcacgacaaggcctacgaccggcagctcgacagcggagacaacccgtacctcaagtacaaccacgccgacgcggagtttcaggagcgccttaaagaagatacgtcttttgggggcaacctcgcaagagcagtattccaggcgaaaaagagggttcttgaacctctgggcctggttgaggagcctgttaagacggctccgggaaaaaagaggccggtagagcactctcctgcggagctagattcctcctccggaactggaaagtcgggccaacagcctgcaagaaagagattgaattttggtcagactggagacgcagactccgtacctgacccccagcctctcggacagccaccagcagccccctctggtctgggaactaatacgatggcttcaggcagtggcgcaccaatggcagacaataacgagggcgccgacggagtgggtaattcctcgggaaattggcattgcgattccacatggatgggcgacagagtcatcaccaccagcacccgcacctgggctctgcccacctacaacaaccatctgtacaagcaaatttccagccagtctggggccagcaacgacaaccactactttggctacagcaccccttgggggtattttgacttcaacagattccactgccacttctccccacgtgactggcaaagactcatcaacaacaattggggattccggcccaaaagactcaacttcaagctctttaacattcaagtcaaggaggtcacgcagaatgacggtacgacgacgattgccaataaccttaccagcacggttcaggtgtttactgactcggagtaccagctcccgtacgtcctcggctcggcgcatcaaggatgcctcccgccgttcccagcagacgtcttcatggtgccacagtatggatacctcaccctgaacaacgggagtcaggcggtaggacgctcttcattttactgcctggagtactttccttctcagatgctgcgtaccggaaacaactttaccttcagctacacctttgaggacgttccttttcacagcagctacgctcacagccagagtttggaccgtctcatgaatcctctcatcgaccagtacctgtattacttgagcagaacaaacactccaagcggaaccactacgcagtccaggcttcagttttctcaagccggagcgagtgacattcgggaccagtctaggaactggcttcctggaccctgttaccgccagcagcgagtatcaaagacagctgcggacaacaacagtgattactcgtggactggagctaccaagtatcacctcaatggaagagactctctggtgaatccgggcacagccatggccagccacaaggacgatgaagaaaagtattttcctcagagcggggttctcatcttcggaaaacaagactcgggaaaaactaatgtggacattgaaaaggtcatgattacagacgaagaggaaatcaggaccaccaatcccgtggctacggagcagtatggttctgtatctaccaatctccagagcggcaacacacaagcagctacctcagatgtcaacacacaaggcgttcttccaggcatggtctggcaggacagagacgtgtacctgcagggacccatctgggcaaagattccacacacggacggacattttcacccttctcctcttatgggaggatttggaccgaagcaccctcccccgcagattctcatcaagaataccccggtacctgcgaatccttctaccaccttcagcgcggcaaagtttgcttccttcatcacacagtactccacggggcaggtcagcgtggagatcgagtgggagctgcagaaagagaacagcaaacgctggaaccccgagatccagtatacctccaactacaacaagtctgttaatgtggactttactgtggacactaatggcgtgtattcagagcctcgccccattggcacaagatacctgactcgtaatctgtaa

SEQ ID NO: 12014 - DNA, 2208 bp, Artificial Sequence
  source: /note="Description of Artificial Sequence: Synthetic polynucleotide"
atggctgccgatggttatcttccagattggctcgaggacactctctctgaaggaataagacagtggtggaagctcaaacctggcccaccaccgccaaagcccgcagagcggcataaggacgacagcaggggtcttgtgcttcctgggtacaagtacctcggacccttcaacggactcgacaaaggagagccggtcaacgaggcagacgccgcggccctcgagcacgacaaggcctacgaccggcagctcgacagcggagacaacccgtacctcaagtacaaccacgccgacgcggagtttcaggagcgccttaaagaagatacgccttttgggggcaacctcgcaagagcagtattccaggcgaaaaagagggttcttgaacctctgggcctggttgaggagcctgttaagacggctccgggaaaaaagaggccggtagagcactctcctgcggagctagattcctcctccggaactggaaagtcgggccaacagcctgcaagaaagagattgaattttggtcagactggagacgcagactccgtacctgacccccagcctctcggacagccaccagcagccccctctggtctgggaactaatacgatggcttcaggcagtggcgcaccaatggcagacaataacgagggcgccgacggagtgggtaattcctcgggaaattggcattgcgattccacatggatgggcgacagagtcatcaccaccagcacccgcacctgggctctgcccacctacaacaaccatctgtacaagcaaatttccagccagtctggggccagcaacgacaaccactactttggctacagcaccccttgggggtattttgacttcaacagattccactgccacttctccccacgtgactggcaaagactcatcaacaacaattggggattccggcccaaaagactcaacttcaagctctttaacattcaagtcaaggaggtcacgcagaatggcggtacgacgacgattgccaataaccttaccagcacggttcaggtgtttactgactcggagtaccagctcccgtacgtcctcggctcggcgcatcaaggatgcctcccgccgttcccagcagacgtcttcatggtgccacagtatggatacctcaccctgaacaacgggagtcaggcggtaggacgctcttcattttactgcctggagtactttccttctcagatgctgcgtaccggaaacaactttaccttcagctacacctttgaggacgttccttttcacagcagctacgctcacagccagagtttggaccgtctcatgaatcctctcatcgaccagtacctgtattacttgagcagaacaaacactccaagcggaaccactacgcagtccaggcttcagttttctcaagccggagcgagtgacattcgggaccagtctaggaactggcttcctggaccctgttaccgccagcagcgagtatcaaagacagctgcggacaacaacaacagtgattactcgtggactggagctaccaagtatcacctcaatggaagagactctctggtgaatccgggcacagccatggccagccacaaggacgatgaagaaaagtattttcctcagagcggggttctcatcttcggaaaacaagactcgggaaaaactaatgtggacattgaaaaggtcatgattacagacgaagaggaaatcaggaccaccaatcccgtggctacggagcagtatggttctgtatctaccaatctccagagcggcaacacacaagcagctacctcagatgtcaacacacaaggcgttcttccaggcatggtctggcaggacagagacgtgtacctgcagggacccatctgggcaaagattccacacacggacggacattttcacccttctcctcttatgggaggatttggaccgaagcaccctcccccgcagattctcatcaagaataccccggtacctgcgaatccttctaccaccttcagcgcggcaaagtttgcttccttcatcacacagtactccacggggcaggtcagcgtggagatcgagtgggagctgcagaaagagaacagcaaacgctggaaccccgagatccagtatacctccaactacaacaagtctgttaatgtggactttactgtggacactaatggcgtgtattcagagcctcgccccattggcacaagatacctgactcgtaatctgtaa

SEQ ID NO: 12015 - DNA, 2208 bp, Artificial Sequence
  source: /note="Description of Artificial Sequence: Synthetic polynucleotide"
atggctgccgatggttatcttccagattggctcgaggacactctctctgaaggaataagacagtggtggaagctcaaacctggcccaccaccgccaaagcccgcagagcggcataaggacgacagcaggggtcttgtgcttcctgggtacaagtacctcggacccttcaacggactcgacaaaggagagccggtcaacgaggcagacgccgcggccctcgagcacgacaaggcctacgaccggcagctcgacagcggagacaacccgtacctcaagtacaaccacgccgacgcggagtttcaggagcgccttaaagaagatacgtcttttgggggcaacctcgcaagagcagtattccaggcgaaaaagggggttcttgaacctctgggcctggttgaggagcctgttaagacggctccgggaaaaaagaggccggtagagcactctcctgcggagctagattcctcctccggaactggaaagtcgggccaacagcctgcaagaaagagattgaattttggtcagactggagacgcagactccgtacctgacccccagcctctcggacagccaccagcagccccctctggtctgggaactaatacgatggcttcaggcagtggcgcaccaatggcagacaataacgagggcgccgacggagtgggtaattcctcgggaaattggcattgcgattccacatggatgggcgacagagtcatcaccaccagcacccgcacctgggctctgcccacctacaacaaccatctgtacaagcaaatttccagccagtctggggccagcaacgacaaccactactttggctacagcaccccttgggggtattttgacttcaacagattccactgccacttctccccacgtgactggcaaagactcatcaacaacaattggggattccggcccaaaagactcaacttcaagctctttaacattcaagtcaaggaggtcacgcagaatgacggtacgacgacgattgccaataaccttaccagcacggttcaggtgtttactgactcggagtaccagctcccgtacgtcctcggctcggcgcatcaaggatgcctcccgccgttcccagcagacgtcttcatggtgccacagtatggatacctcaccctgaacaacgggagtcaggcggtaggacgctcttcattttactgcctggagtactttccttctcagatgctgcgtaccggaaacaactttaccttcagctacacctttgaggacgttccttttcacagcagctacgctcacagccagagtttggaccgtctcatgaatcctctcatcgaccagtacctgtattacttgagcagaacaaacactccaagcggaaccactacgcagtccaggcttcagttttctcaagccggagcgagtgacattcgggaccagtctaggaactggcttcctggaccctgttaccgccagcagcgagtatcaaagacagctgcggacaacaacaacagtgattactcgtggactggagctaccaagtatcacctcaatggaagagactctctggtgaatccgggcacagccatggccagccacaaggacgatgaagaaaagtattttcctcagagcggggttctcatcttcggaaaacaagactcgggaaaaactaatgtggacattgaaaaggtcatgattacagacgaagaggaaatcaggaccaccaatcccgtggctacggagcagtatggttctgtatctaccaatctccagagcggcaacacacaagcagctacctcagatgtcaacacacaaggcgttcttccaggcatggtctggcaggacagagacgtgtacctgcagggacccatctgggcaaagattccacacacggacggacattttcacccttctcctcttatgggaggatttggaccgaagcaccctcccccgcagattctcatcaagaataccccggtacctgcgaatccttctaccaccttcagcgcggcaaagtttgcttccttcatcacacagtactccacggggcaggtcagcgtggagatcgagtgggagctgcagaaagagaacagcaaacgctggaaccccgagatccagtatacctccaactacaacaagtctgttaatgtggactttactgtggacactaatggcgtgtattcagagcctcgccccattggcacaagatacctgactcgtaatctgtaa

SEQ ID NO: 12016 - DNA, 2208 bp, Artificial Sequence
  source: /note="Description of Artificial Sequence: Synthetic polynucleotide"
atggctgccgatggttatcttccagattggctcgaggacactctctctgaaggaataagacagtggtggaagctcaaacctggcccaccaccgccaaagcccgcagagcggcataaggacgacagcaggggtcttgtgcttcctgggtacaagtacctcggacccttcaacggactcgacaaaggagagccggtcaacgaggcagacgccgcggccctcgagcacgacaaggcctacgaccggcagctcgacagcggagacaacccgtacctcaagtacaaccacgccgacgcggagtttcaggagcgccttaaagaagatacgtcttttgggggcaacctcgcaagagcagtattccaggcgaaaaagagggttcttgaacctctgggcctggttgaggagcctgttaagacggctccgggaaaaaagaggccggtagagcactctcctgcggagctagattcctcctccggaactggaaagtcgggccaacagcctgcaagaaagagattgaattttggtcagactggagacgcagactccgtacctgacccccagcctctcggacagccaccagcagccccctctggtctgggaactaatacgatggcttcaggcagtggcgcaccaatggcagacaataacgagggcgccgacggagtgggtaattcctcgggaaattggcattgcgattccacatggatgggcgacagagtcatcaccaccagcacccgcacctgggctctgcccacctacaacaaccatctgtacaagcaaatttccagccagtctggggccagcaacgacaaccactactttggctacagcaccccttgggggtattttgacttcaacagattccactgccacttctccccacgtgactggcaaagactcatcaacaacaattggggattccggcccaaaagactcaacttcaagctctttaacattcaagtcaaggaggtcacgcagaatgacggtacgacgacgattgccaataaccttaccagcacggttcaggtgtttactgactcggagtaccagctcccgtacgtcctcggctcggcgcatcaaggatgcctcccgccgttcccagcagacgtcttcatggtgccacagtatggatacctcaccctgaacaacgggagtcaggcggtaggacgctcttcattttactgcctggagtactttccttctcagatgctgcgtaccggaaacaactttaccttcagctacacctttgaggacgttccttttcacagcagctacgctcacagccagagtttggaccgtctcatgaatcctctcatcgaccagtacctgtattacttgagcagaacaaacactccaagcggaaccactacgcagtccaggcttcagttttctcaagccggagcgagtgacattcgggaccagtctaggaactggcttcctggaccctgttaccgccagcagcgagtatcaaagacagctgcggacaacaacaacagtgattactcgtggactggagctaccaagtatcacctcaatggaagagactctctggtgaatccgggcacagccatggccagccacaaggacgatgaagaaaagtattttcctcagagcggggttctcatcttcggaaaacaagactcgggaaaaactaatgtggacattgaaaaggtcatgattacagacgaagaggaaatcaggaccaccaatcccgtggctacggagcagtatggttctgtatctaccaatctccagagcggcaacacacaagcagctacctcagatgtcaacacacaaggcgttcttccaggcatggtctggcaggacagagacgtgtacctgcagggacccatctgggcaaggattccacacacggacggacattttcacccttctcctcttatgggaggatttggaccgaagcaccctcccccgcagattctcatcaagaataccccggtacctgcgaatccttctaccaccttcagcgcggcaaagtttgcttccttcatcacacagtactccacggggcaggtcagcgtggagatcgagtgggagctgcagaaagagaacagcaaacgctggaaccccgagatccagtatacctccaactacaacaagtctgttaatgtggactttactgtggacactaatggcgtgtattcagagcctcgccccattggcacaagatacctgactcgtaatctgtaa

SEQ ID NO: 12017 - DNA, 2208 bp, Artificial Sequence
  source: /note="Description of Artificial Sequence: Synthetic polynucleotide"
atggctgccgatggttatcttccagattggctcgaggacactctctctgaaggaataagacagtggtggaagctcaaacctggcccaccaccgccaaagcccgcagagcggcataaggacgacagcaggggtcttgtgcttcctgggtacaagtacctcggacccttcaacggactcgacaaaggagagccggtcaacgaggcagacgccgcggccctcgagcacgacaaggcctacgaccggcagctcgacagcggagacaacccgtacctcaagtacaaccacgccgacgcggagtttcaggagcgccttaaagaagatacgtcttttgggggcaacctcgcaagagcagtattccaggcgaaaaagagggttcttgaacctctgggcctggttgaggagcctgttaagacggctccgggaaaaaagaggccggtagggcactctcctgcggagctagattcctcctccggaactggaaagtcgggccaacagcctgcaagaaagagattgaattttggtcagactggagacgcagactccgtacctgacccccagcctctcggacagccaccagcagccccctctggtctgggaactaatacgatggcttcaggcagtggcgcaccaatggcagacaataacgagggcgccgacggagtgggtaattcctcgggaaattggcattgcgattccacatggatgggcgacagagtcatcaccaccagcacccgcacctgggctctgcccacctacaacaaccatctgtacaagcaaatttccagccagtctggggccagcaacgacaaccactactttggctacagcaccccttgggggtattttgacttcaacagattccactgccacttctccccacgtgactggcaaagactcatcaacaacaattggggattccggcccaaaagactcaacttcaagctctttaacattcaagtcaaggaggtcacgcagaatgacggtacgacgacgattgccaataaccttaccagcacggttcaggtgtttactgactcggagtaccagctcccgtacgtcctcggctcggcgcatcaaggatgcctcccgccgttcccagcagacgtcttcatggtgccacagtatggatacctcaccctgaacaacgggagtcaggcggtaggacgctcttcattttactgcctggagtactttccttctcagatgctgcgtaccggaaacaactttaccttcagctacacctttgaggacgttccttttcacagcagctacgctcacagccagagtttggaccgtctcatgaatcctctcatcgaccagtacctgtattacttgagcagaacaaacactccaagcggaaccactacgcagtccaggcttcagttttctcaagccggagcgagtgacattcgggaccagtctaggaactggcttcctggaccctgttaccgccagcagcgagtatcaaagacagctgcggacaacaacaacagtgattactcgtggactggagctaccaagtatcacctcaatggaagagactctctggtgaatccgggcacagccatggccagccacaaggacgatgaagaaaagtattttcctcagagcggggttctcatcttcggaaaacaagactcgggaaaaactaatgtggacattgaaaaggtcatgattacagacgaagaggaaatcaggaccaccaatcccgtggctacggagcagtatggttctgtatctaccaatctccagagcggcaacacacaagcagctacctcagatgtcaacacacaaggcgttcttccaggcatggtctggcaggacagagacgtgtacctgcagggacccatctgggcaaagattccacacacggacggacattttcacccttctcctcttatgggaggatttggaccgaagcaccctcccccgcagattctcatcaagaataccccggtacctgcgaatccttctaccaccttcagcgcggcaaagtttgcttccttcatcacacagtactccacggggcaggtcagcgtggagatcgagtgggagctgcagaaagagaacagcaaacgctggaaccccgagatccagtatacctccaactacaacaagtctgttaatgtggactttactgtggacactaatggcgtgtattcagagcctcgccccattggcacaagatacctgactcgtaatctgtaa

SEQ ID NO: 12018 - DNA, 2208 bp, Artificial Sequence
  source: /note="Description of Artificial Sequence: Synthetic polynucleotide"
atggctgccgatggttatcttccagattggctcgaggacactctctctgaaggaataagacagtggtggaagctcaaacctggcccaccaccgccaaagcccgcagagcggcataaggacgacagcaggggtcttgtgcttcctgggtacaagtacctcggacccttcaacggactcgacaaaggagagccggtcaacgaggcagacgccgcggccctcgagcacgacaaggcctacgaccggcagctcgacagcggagacaacccgtacctcaagtacaaccacgccgacgcggagtttcaggagcgccttaaagaagatacgtcttttgggggcaacctcgcaagagcagtattccaggcgaaaaagagggttcttgaacctctgggcctggttgaggagcctgttaagacggctccgggaaaaaagaggccggtagagcactctcctgcggagctagattcctcctccggaactggaaagtcgggccaacagcctgcaagaaagagattgaattttggtcagactggagacgcagactccgtacctgacccccagcctctcggacagccaccagcagccccctctggtctgggaactaatacgatggcttcaggcagtggcgcaccaatggcagacaataacgagggcgccgacggagtgggtaattcctcgggaaattggcattgcgattccacatggatgggcgacagagtcatcaccaccagcacccgcacctgggctctgcccacctacaacaaccatctgtacaagcaaatttccagccagtctggggccagcaacgacaaccactactttggctacagcaccccttgggggtattttgacttcaacagattccactgccacttctccccacgtgactggcaaagactcatcaacaacaattggggattccggcccaaaagactcaacttcaagctctttaacattcaagtcaaggaggtcacgcagaatgacggtacgacgacgattgccaataaccttaccagcacggttcaggtgtttactgactcggagtaccagctcccgtacgtcctcggctcggcgcatcaaggatgcctcccgccgttcccagcagacgtcttcatggtgccacagtatggatacctcaccctgaacaacgggagtcaggcggtaggacgctcttcattttactgcctggagtactttccttctcagatgctgcgtaccggaaacaactttaccttcagctacacctttgaggacgttccttttcacagcagctacgctcacagccagagtttggaccgtctcatgaatcctctcatcgaccagtacctgtattacttgagcagaacaaacactccaagcggaaccactacgcagtccaggcttcagttttctcaagccggagcgagtgacattcgggaccagtctaggaactggcttcctggaccctgttaccgccagcagcgagtatcaaagacagctgcggacaacaacaacagtgattactcgtggactggagctaccaagtatcacctcaatggaagagactctctggtgaatccgggcacagccatggccagccacaaggacgatgaagaaaagtattttcctcagagcggggttctcatcttcggaaaacaagactcgggaaaaactaatgtggacattgaaaaggtcatgattacagacgaagaggaaatcaggaccaccaatcccgtggctacggagcagtatggttctgtatctaccaatctccagagcggcaacacacaagcagctacctcagatgtcaacacacaaggcgttcttccaggcatggtctggcaggacagagacgtgtacctgcagggacccatctgggcaaagattccacacacggacggacattttcacccttctcctcttatgggaggatttggaccgaagcaccctcccccgcagattctcatcaagaataccccggtacctgcgaatccttctaccaccttcagcgcggcaaagtttgcttccttcatcacacagtactccacggggcaggtcagcgtggagatcgagtgggagctgcagaaagggaacagcaaacgctggaaccccgagatccagtatacctccaactacaacaagtctgttaatgtggactttactgtggacactaatggcgtgtattcagagcctcgccccattggcacaagatacctgactcgtaatctgtaa

SEQ ID NO: 12019 - DNA, 2208 bp, Artificial Sequence
  source: /note="Description of Artificial Sequence: Synthetic polynucleotide"
atggctgccgatggttatcttccagattggctcgaggacactctctctgaaggaataagacagtggtggaagctcaaacctggcccaccaccgccaaagcccgcagagcggcataaggacgacagcaggggtcttgtgcttcctgggtacaagtacctcggacccttcaacggactcgacaaaggagagccggtcaacgaggcagacgccgcggccctcgagcacgacaaggcctacgaccggcagctcgacagcggagacaacccgtacctcaagtacaaccacgccgacgcggagtttcaggagcgccttaaagaagatacgccttttgggggcaacctcgcaagagcagtattccaggcgaaaaagagggttcttgaacctctgggcctggttgaggagcctgttaagacggctccgggaaaaaaggggccggtagagcactctcctgcggagctagattcctcctccggaactggaaagtcgggccaacagcctgcaagaaagagattgaattttggtcagactggagacgcagactccgtacctgacccccagcctctcggacagccaccagcagccccctctggtctgggaactaatacgatggcttcaggcagtggcgcaccaatggcagacaataacgagggcgccgacggagtgggtaattcctcgggaaattggcattgcgattccacatggatgggcgacagagtcatcaccaccagcacccgcacctgggctctgcccacctacaacaaccatctgtacaagcaaatttccagccagtctggggccagcaacgacaaccactactttggctacagcaccccttgggggtattttgacttcaacagattccactgccacttctccccacgtgactggcaaagactcatcaacaacaattggggattccggcccaaaagactcaacttcaagctctttaacattcaagtcaaggaggtcacgcagaatgacggtacgacgacgattgccaataaccttaccagcacggttcaggtgtttactgactcggagtaccagctcccgtacgtcctcggctcggcgcatcaaggatgcctcccgccgttcccagcagacgtcttcatggtgccacagtatggatacctcaccctgaacaacgggagtcaggcggtaggacgctcttcattttactgcctggagtactttccttctcagatgctgcgtaccggaaacaactttaccttcagctacacctttgaggacgttccttttcacagcagctacgctcacagccagagtttggaccgtctcatgaatcctctcatcgaccagtacctgtattacttgagcagaacaaacactccaagcggaaccactacgcagtccaggcttcagttttctcaagccggagcgagtgacattcgggaccagtctaggagctggcttcctggaccctgttaccgccagcagcgagtatcaaagacagctgcggacaacaacaacagtgattactcgtggactggagctaccaagtatcacctcaatggaagagactctctggtgaatccgggcacagccatggccagccacaaggacgatgaagaaaagtattttcctcagagcggggttctcatcttcggaaaacaagactcgggaaaaactaatgtggacattgaaaaggtcatgattacagacgaagaggaaatcaggaccaccaatcccgtggctacggagcagtatggttctgtatctaccaatctccagagcggcaacacacaagcagctacctcagatgtcaacacacaaggcgttcttccaggcatggtctggcaggacagagacgtgtacctgcagggacccatctgggcaaagattccacacacggacggacattttcacccttctcctcttatgggaggatttggaccgaagcaccctcccccgcagattctcatcaagaataccccggtacctgcgaatccttctaccaccttcagcgcggcaaagtttgcttccttcatcacacagtactccacggggcaggtcagcgtggagatcgagtgggagctgcagaaagagaacagcaaacgctggaaccccgagatccagtatacctccaactacaacaagtctgttaatgtggactttactatggacactaatggcgtgtattcagagcctcgccccattggcacaagatacctgactcgtaatctgtaa

SEQ ID NO: 12020 - DNA, 2208 bp, Artificial Sequence
  source: /note="Description of Artificial Sequence: Synthetic polynucleotide"
atggctgccgatggttatcttccagattggctcgaggacactctctctgaaggaataagacagtggtggaagctcaaacctggcccaccaccgccaaagcccgcagagcggcataaggacgacagcaggggtcttgtgcttcctgggtacaagtacctcggacccttcaacggactcgacaaaggagagccggtcaacgaggcagacgccgcggccctcgagcacgacaaggcctacgaccggcagctcgacagcggagacaacccgtacctcaagtacaaccacgccgacgcggagtttcaggagcgccttaaagaagatacgtcttttgggggcaacctcgcaagagcagtattccaggcgaaaaagagggttcttgaacctctgggcctggttgaggagcctgttaagacggctccgggaaaaaagaggccggtagagcactctcctgcggagctagattcctcctccggaactggaaagtcgggccaacagcctgcaagaaagagattgaattttggtcagactggagacgcagactccgtacctgacccccagcctctcggacagccaccagcagccccctctggtctgggaactaatacgatggcttcaggcagtggcgcaccaatggcagacaataacgagggcgccgacggagtgggtaattcctcgggaaattggcattgcgattccacatggatgggcgacagagtcatcaccaccagcacccgcacctgggctctgcccacctacaacaaccatctgtacaagcaaatttccagccagtctggggccagcaacgacaaccactactttggctacagcaccccttgggggtattttgacttcaacagattccactgccacttctccccacgtgactggcaaagactcatcaacaacaattggggattccggcccaaaagactcaacttcaagctctttaacattcaagtcaaggaggtcacgcagaatgacggtacgacgacgattgccaataaccttaccagcacggttcaggtgtttactgactcggagtaccagctcccgtacgtcctcggctcggcgcatcaaggatgcctcccgccgttcccagcagacgtcttcatggtgccacagtatggatacctcaccctgaacaacgggagtcaggcggtaggacgctcttcattttactgcctggagtactttccttctcagatgctgcgtaccggaaacaactttaccttcagctacacctttgaggacgttccttttcacagcagctacgctcacagccagagtttggaccgtctcatgaatcctctcatcgaccagtacctgtattacttgagcagaacaaacactccaagcggaaccactacgcagtccaggcttcagttttctcaagccggagcgagtgacattcgggaccagtctaggaactggcttcctggaccctgttaccgccagcagcgagtatcaaagacagctgcggacaacaacaacagtgattactcgtggactggagctaccaagtatcacctcaatggaagggactctctggtgaatccgggcacagccatggccagccacaaggacgatgaagaaaagtattttcctcagagcggggttctcatcttcggaaaacaagactcgggaaaaactaatgcggacattgaaaaggtcatgattacagacgaagaggaaatcaggaccaccaatcccgtggctacggagcagtatggttctgtatctaccaatctccagagcggcaacacacaagcagctacctcagatgtcaacacacaaggcgttcttccaggcatggtctggcaggacagagacgtgtacctgcagggacccatctgggcaaagattccacacacggacggacattttcacccttctcctcttatgggaggatttggaccgaagcaccctcccccgcagattctcatcaagaataccccggtacctgcgaatccttctaccaccttcagcgcggcaaagtttgcttccttcatcacacagtactccacggggcaggtcagcgtggagatcgagtgggagctgcagaaagagaacagcaaacgctggaaccccgagatccagtatacctccaactacaacaagtctgttaatgtggactttactgtggacactaatggcgtgtattcagagcctcgccccattggcacaagatacctgactcgtaatctgtaa

SEQ ID NO: 12021 - DNA, 2208 bp, Artificial Sequence
  source: /note="Description of Artificial Sequence: Synthetic polynucleotide"
atggctgccgatggttatcttccagattggctcgaggacactctctctgaaggaataagacagtggtggaagctcaaacctggcccaccaccgccaaagcccgcagagcggcataaggacgacagcaggggtcttgtgcttcctgggtacaagtacctcggacccttcaacggactcgacaaaggagagccggtcaacgaggcagacgccgcggccctcgagcacgacaaggcctacgaccggcagctcgacagcggagacaacccgtacctcaagtacaaccacgccgacgcggagtttcaggagcgccttaaagaagatacgtcttttgggggcaacctcgcaagagcagtattccaggcgaaaaagagggttcttgaacctctgggcctggttgaggagcctgttaagacggctccgggaaaaaagaggccggtagagcactctcctgcggagctagattcctcctccggaactggaaagtcgggccaacagcctgcaagaaagagattgaattttggtcagactggagacgcagactccgtacctgacccccagcctctcggacagccaccagcagccccctctggtctgggaactaatacgatggcttcaggcagtggcgcaccaatggcagacaataacgagggcggcgacggagtgggtaattcctcgggaaattggcattgcgattccacatggatgggcgacagagtcatcaccaccagcacccgcacctgggctctgcccacctacaacaaccatctgtacaagcaaatttccagccagtctggggccagcaacgacaaccactactttggctacagcaccccttgggggtattttgacttcaacagattccactgccacttctccccacgtgactggcaaagactcatcaacaacaattggggattccggcccaaaagactcaacttcaagctctttaacattcaagtcaaggaggtcacgcagaatgacggtacgacgacgattgccaataaccttaccagcacggttcaggtgtttactgactcggagtaccagctcccgtacgtcctcggctcggcgcatcaaggatgcctcccgccgttcccagcagacgtcttcatggtgccacagtatggatacctcaccctgaacaacgggagtcaggcggtaggacgctcttcattttactgcctggagtactttccttctcagatgctgcgtaccggaaacaactttaccttcagctacacctttgaggacgttccttttcacagcagctacgctcacagccagagtttggaccgtctcatgaatcctctcatcgaccagtacctgtattacttgagcagaacaaacactccaagcggaaccactacgcagtccaggcttcagttttctcaagccggagcgagtgacattcgggaccagtctaggaactggcttcctggaccctgttaccgccagcagcgagtatcaaagacagctgcggacaacaacaacagtgattactcgtggactggagctaccaagtatcacctcaatggaagggactctctggtgaatccgggcacagccatggccagccacaaggacgatgaagaaaagtattttcctcagagcggggttctcatcttcggaaaacaagactcgggaaaaactaatgtggacattgaaaaggtcatgattacagacgaagaggaaatcaggaccaccaatcccgtggctacggagcagtatggttctgtatctaccaatctccagagcggcaacacacaagcagctacctcagatgtcaacacacaaggcgttcttccaggcatggtctggcaggacagagacgtgtacctgcagggacccatctgggcaaagattccacacacggacggacattttcacccttctcctcttatgggaggatttggaccgaagcaccctcccccgcagattctcatcaagaataccccggtacctgcgaatccttctaccaccttcagcgcggcaaagtttgcttccttcatcacacagtactccacggggcaggtcagcgtggagatcgagtgggagctgcagaaagagaacagcaaacgctggaaccccgagatccagtatacctccaactacaacaagtctgttaatgtggactttactgtggacactaatggcgtgtattcagagcctcgccccattggcacaagatacctgactcgtaatctgtaa

SEQ ID NO: 12022 - DNA, 2208 bp, Artificial Sequence
  source: /note="Description of Artificial Sequence: Synthetic polynucleotide"
atggctgccgatggttatcttccagattggctcgaggacactctctctgaaggaataagacagtggtggaagctcaaacctggcccaccaccgccaaagcccgcagagcggcataaggacgacagcaggggtcttgtgcttcctgggtacaagtacctcggacccttcaacggactcgacaaaggagagccggtcaacgaggcagacgccgcggccctcgagcacgacaaggcctacgaccggcagctcgacagcggagacaacccgtacctcaagtacaaccacgccgacgcggagtttcaggagcgccttaaagaagatacgtcttttgggggcaacctcgcaagagcagtattccaggcgaaaaagagggttcttgaacctctgggcctggttgaggagcctgttaagacggctccgggaaaaaagaggccggtagagcactctcctgcggagctagattcctcctccggaactggaaagtcgggccaacagcctgcaagaaagagattgaattttggtcagactggagacgcagactccgtacctgacccccagcctctcggacagccaccagcagccccctctggtctgggaactaatacgatggcttcaggcagtggcgcaccaatggcagacaataacgagggcgccgacggagtgggtaattcctcgggaaattggcattgcgattccacatggatgggcgacagagtcatcaccaccagcacccgcacctgggctctgcccacctacaacaaccatctgtacaagcaaatttccagccagtctggggccagcaacgacaaccactactttggctacagcaccccttgggggtattttgacttcaacagattccactgccacttccccccacgtgactggcaaagactcatcaacaacaattggggattccggcccaaaagactcaacttcaagctctttaacattcaagtcaaggaggtcacgcagaatgacggtacgacgacgattgccaataaccttaccagcacggttcaggtgtttactgactcggagtaccagctcccgtacgtcctcggctcggcgcatcaaggatgcctcccgccgttcccagcagacgtcttcatggtgccacagtatggatacctcaccctgaacaacgggagtcaggcggtaggacgctcttcattttactgcctggagtactttccttctcagatgctgcgtaccggaaacaactttaccttcagctacacctttgaggacgttccttttcacagcagctacgctcacagccagagtttggaccgtctcatgaatcctctcatcgaccagtacctgtattacttgagcagaacaaacactccaagcggaaccactacgcagtccaggcttcagttttctcaagccggagcgagtgacattcgggaccagtctaggaactggcttcctggaccctgttaccgccagcagcgagtatcaaagacagctgcggacaacaacaacagtgattactcgtggactggagctaccaagtatcacctcaatggaagagactctctggtgaatccgggcacagccatggccagccacaaggacgatgaagaaaagtattttcctcagagcggggttctcatcttcggaaaacaagactcgggaaaaactaatgtggacattgaaaaggtcatgattacagacgaagaggaaatcaggaccaccaatcccgtggctacggagcagtatggttctgtatctaccaatctccagagcggcaacacacaagcagctacctcagatgtcaacacacaaggcgttcttccaggcatggtctggcaggacagagacgtgtacctgcagggacccatctgggcaaagattccacacacggacggacattttcacccttctcctcttatgggaggatttggaccgaagcaccctcccccgcagattctcatcaagaataccccggtacctgcgaatccttctaccaccttcagcgcggcaaagtttgcttccttcatcacacagtactccacggggcaggtcagcgtggagatcgagtgggagctgcagaaagagaacagcaaacgctggaaccccgagatccagtatacctccaactacaacaagtctgttaatgtggactttactgtggacactaatggcgtgtattcagagcctcgccccattggcacaagatacctgactcgtaatctgtaa

SEQ ID NO: 12023 - DNA, 2208 bp, Artificial Sequence
  source: /note="Description of Artificial Sequence: Synthetic polynucleotide"
atggctgccgatggttatcttccagattggctcgaggacactctctctgaaggaataagacagtggtggaagctcaaacctggcccaccaccgccaaagcccgcagagcggcataaggacgacagcaggggtcttgtgcttcctgggtacaagtacctcggacccttcaacggactcgacaaaggagagccggtcaacgaggcagacgccgcggccctcgagcacgacaaggcctacgaccggcagctcgacagcggagacaacccgtacctcaagtacaaccacgccgacgcggagtttcaggagcgccttaaagaagatacgtcttttgggggcaacctcgcaagagcagtattccaggcgaaaaagagggttcttgaacctctgggcctggttgaggagcctgttaagacggctccgggaaaaaagaggccggtagagcactctcctgcggagctagattcctcctccggagctggaaagtcgggccaacagcctgcaagaaagagattgaattttggtcagactggagacgcagactccgtacctgacccccagcctctcggacagccaccagcagccccctctggtctgggaactaatacgatggcttcaggcagtggcgcaccaatggcagacaataacgagggcgccgacggagtgggtaattcctcgggaaattggcattgcgattccacatggatgggcgacagagtcatcaccaccagcacccgcacctgggctctgcccacctacaacaaccatctgtacaagcaaatttccagccagtctggggccagcaacgacaaccactaccttggctacagcaccccttgggggtattttgacttcaacagattccactgccacttctccccacgtgactggcaaagactcatcaacaacaattggggattccggcccaaaagactcaacttcaagctctttaacattcaagtcaaggaggtcacgcagaatgacggtacgacgacgattgccaataaccttaccagcacggttcaggtgtttactgactcggagtaccagctcccgtacgtcctcggctcggcgcatcaaggatgcctcccgccgttcccagcagacgtcttcatggtgccacagtatggatacctcaccctgaacaacgggagtcaggcggtaggacgctcttcattttactgcctggagtactttccttctcagatgctgcgtaccggaaacaactttaccttcagctacacctttgaggacgttccttttcacagcagctacgctcacagccagagtttggaccgtctcatgaatcctctcatcgaccagtacctgtattacttgagcagaacaaacactccaagcggaaccactacgcagtccaggcttcagttttctcaagccggagcgagtgacattcgggaccagtctaggaactggcttcctggaccctgttaccgccagcagcgagtatcaaagacagctgcggacaacaacaacagtgattactcgtggactggagctaccaagtatcacctcaatggaagagactctctggtgaatccgggcacagccatggccagccacaaggacgatgaagaaaagtattttcctcagagcggggttctcatcttcggaaaacaagactcgggaaaaactaatgtggacattgaaaaggtcatgattacagacgaagaggaaatcaggaccaccaatcccgtggctacggagcagtatggttctgtatctaccaatctccagagcggcaacacacaagcagctacctcagatgtcaacacacaaggcgttcttccaggcatggtctggcaggacagagacgtgtacctgcagggacccatctgggcaaagattccacacacggacggacattttcacccttctcctcttatgggaggatttggaccgaagcaccctcccccgcagattctcatcaagaataccccggtacctgcgaatccttctaccaccttcagcgcggcaaagtttgcttccttcatcacacagtactccacggggcaggtcagcgtggagatcgagtgggagctgcagaaagagaacagcaaacgctggaaccccgagatccagtatacctccaactacaacaagtctgttaatgtggactttactgtggacactaatggcgtgtattcagagcctcgccccattggcacaagatacctgactcgtaatctgtaa

SEQ ID NO: 12024 - DNA, 2208 bp, Artificial Sequence
  source: /note="Description of Artificial Sequence: Synthetic polynucleotide"
atggctgccgatggttatcttccagattggctcgaggacactctctctgaaggaataagacagtggtggaagctcaaacctggcccaccaccgccaaagcccgcagagcggcataaggacgacagcaggggtcttgtgcttcctgggtacaagtacctcggacccttcaacggactcgacaaaggagagccggtcaacgaggcagacgccgcggccctcgagcacgacaaggcctacgaccggcagctcgacagcggagacaacccgtacctcaagtacaaccacgccgacgcggagtttcaggagcgccttaaagaagatacgccttttgggggcaacctcgcaagagcagtattccaggcgaaaaagagggttcttgaacctctgggcctggttgaggagcctgttaagacggctccgggaaaaaagaggccggtagagcactctcctgcggagctagattcctcctccggaactggaaagtcgggccaacagcctgcaagaaagagattgaattttggtcagactggagacgcagactccgtacctgacccccagcctctcggacagccaccagcagccccctctggtctgggaactaatacgatggtttcaggcagtggcgcaccaatggcagacaataacgagggcgccgacggagtgggtaattcctcgggaaattggcattgcgattccacatggatgggcgacagagtcatcaccaccagcacccgcacctgggctctgcccacctacaacaaccatctgtacaagcaaatttccagccagtctggggccagcaacgacaaccactactttggctacagcaccccttgggggtattttgacttcaacagattccactgccacttctccccacgtgactggcaaagactcatcaacaacaattggggattccggcccaaaagactcaacttcaagctctttaacattcaagtcaaggaggtcacgcagaatgacggtacgacgacgattgccaataaccttaccagcacggttcaggtgtttactgactcggagtaccagctcccgtacgtcctcggctcggcgcatcaaggatgcctcccgccgttcccagcagacgtcttcatggtgccacagtatggatacctcaccctgaacaacgggagtcaggcggtaggacgctcttcattttactgcctggagtactttccttctcagatgctgcgtaccggaaacaactttaccttcagctacacctttgaggacgttccttttcacagcagctacgctcacagccagagtttggaccgtctcatgaatcctctcatcgaccagtacctgtattacttgagcagaacaaacactccaagcggaaccactacgcagtccaggcttcagttttctcaagccggagcgagtgacattcgggaccagtctaggaactggcttcctggaccctgttaccgccagcagcgagtatcaaagacagctgcggacaacaacaacagtgattactcgtggactggagctaccaagtatcacctcaatggaagagactctctggtgaatccgggcacagccatggccagccacaaggacgatgaagaaaagtattttcctcagagcggggttctcatcttcggaaaacaagactcgggaaaaactaatgtggacattgaaaaggtcatgattacagacgaagaggaaatcaggaccaccaatcccgtggctacggagcagtatggttctgtatctaccaatctccagagcggcaacacacaagcagctacctcagatgtcaacacacaaggcgttcttccaggcatggtctggcaggacagagacgtgtacctgcagggacccatctgggcaaagattccacacacggacggacattttcacccttctcctcttatgggaggatttggaccgaagcaccctcccccgcagattctcatcaagaataccccggtacctgcgaatccttctaccaccttcagcgcggcaaagtttgcttccttcatcacacaatactccacggggcaggtcagcgtggagatcgagtgggagctgcagaaagagaacagcaaacgctggaaccccgagatccagtatacctccaactacaacaagtctgttaatgtggactttactgtggacactaatggcgtgtattcagagcctcgccccattggcacaagatacctgactcgtaatctgtaa

SEQ ID NO: 12025 - DNA, 2208 bp, Artificial Sequence
  source: /note="Description of Artificial Sequence: Synthetic polynucleotide"
atggctgccgatggttatcttccagattggctcgaggacactctctctgaaggaataagacagtggtgggagctcaaacctggcccaccaccgccaaagcccgcagagcggcataaggacgacagcaggggtcttgtgcttcctgggtacaagtacctcggacccttcaacggactcgacaaaggagagccggtcaacgaggcagacgccgcggccctcgagcacgacaaggcctacgaccggcagctcgacagcggagacaacccgtacctcaagtacaaccacgccgacgcggagtttcaggagcgccttaaagaagatacgtcttttgggggcaacctcgcaagagcagtattccaggcgaaaaagagggttcttgaacctctgggcctggttgaggagcctgttaagacggctccgggaaaaaagaggccggtagagcactctcctgcggagctagattcctcctccggaactggaaagtcgggccaacagcctgcaagaaagagattgaattttggtcagactggagacgcagactccgtacctgacccccagcctctcgggcagccaccagcagccccctctggtctgggaactaatacgatggcttcaggcagtggcgcaccaatggcagacaataacgagggcgccgacggagtgggtaattcctcgggaaattggcattgcgattccacatggatgggcgacagagtcatcaccaccagcacccgcacctgggctctgcccacctacaacaaccatctgtacaagcaaatttccagccagtctggggccagcaacgacaaccactactttggctacagcaccccttgggggtattttgacttcaacagattccactgccacttctccccacgtgactggcaaagactcatcaacaacaattggggattccggcccaaaagactcaacttcaagctctttaacattcaagtcaaggaggtcacgcagaatgacggtacgacgacgattgccaataaccttaccagcacggttcaggtgtttactgactcggagtaccagctcccgtacgtcctcggctcggcgcatcaaggatgcctcccgccgttcccagcagacgtcttcatggtgccacagtatggatacctcaccctgaacaacgggagtcaggcggtaggacgctcttcattttactgcctggagtactttccttctcagatgctgcgtaccggaaacaactttaccttcagctacacctttgaggacgttccttttcacagcagctacgctcacagccagagtttggaccgtctcatgaatcctctcatcgaccagtacctgtattacttgagcagaacaaacactccaagcggaaccactacgcagtccaggcttcagttttctcaagccggagcgagtgacattcgggaccagtctaggaactggcttcctggaccctgttaccgccagcagcgagtatcaaagacagctgcggacaacaacaacagtgattactcgtggactggagctaccaagtatcacctcaatggaagagactctctggtgaatccgggcacagccatggccagccacaaggacgatgaagaaaagtattttcctcagagcggggttctcatcttcggaaaacaagactcgggaaaaactaatgtggacattgaaaaggtcatgattacagacgaagaggaaatcaggaccaccaatcccgtggctacggagcagtatggttctgtatctaccaatctccagagcggcaacacacaagcagctacctcagatgtcaacacacaaggcgttcttccaggcatggtctggcaggacagagacgtgtacctgcagggacccatctgggcaaagattccacacacggacggacattttcacccttctcctcttatgggaggatttggaccgaagcaccctcccccgcagattctcatcaagaataccccggtacctgcgaatccttctaccaccttcagcgcggcaaagtttgcttccttcatcacacagtactccacggggcaggtcagcgtggagatcgagtgggagctgcagaaagagaacagcaaacgctggaaccccgagatccagtatacctccaactacaacaagtctgttaatgtggactttactgtggacactaatggcgtgtattcagagcctcgccccattggcacaagatacctgactcgtaatctgtaa

SEQ ID NO: 12026 - DNA, 2208 bp, Artificial Sequence
  source: /note="Description of Artificial Sequence: Synthetic polynucleotide"
atggctgccgatggttatcttccagattggctcgaggacactctctctgaaggaataagacagtggtggaagctcaaacctggcccaccaccgccaaagcccgcagagcggcataaggacgacagcaggggtcttgtgcttcctgggtacaagtacctcggacccttcaacggactcgacaaaggagagccggtcaacgaggcagacgccgcggccctcgagcacgacaaggcctacgaccggcagctcgacagcggagacaacccgtacctcaagtacaaccacgccgacgcggagtttcaggagcgccttaaagaagatacgccttttgggggcaacctcgcaagagcagtattccaggcgaaaaagagggttcttgaacctctgggcctggttgaggagcctgttaagacggctccgggaaaaaagaggccggtagggcactctcctgcggagctagattcctcctccggaactggaaagtcgggccaacagcctgcaagaaagagattgaattttggtcagactggagacgcagactccgtacctgacccccagcctctcggacagccaccagcagccccctctggtctgggaactaatacgatggcttcaggcagtggcgcaccaatggcagacaataacgagggcgtcgacggagtgggtaattcctcgggaaattggcattgcgattccacatggatgggcgacagagtcatcaccaccagcacccgcacctgggctctgcccacctacaacaaccatctgtacaagcaaatttccagccagtctggggccagcaacgacaaccactactttggctacagcaccccttgggggtattttgacttcaacagattccactgccacttctccccacgtgactggcaaagactcatcaacaacaattggggattccggcccaaaagactcaacttcaagctctttaacattcaagtcaaggaggtcacgcagaatgacggtacgacgacgattgccaataaccttaccagcacggttcaggtgtttactgactcggagtaccagctcccgtacgtcctcggctcggcgcatcaaggatgcctcccgccgttcccagcagacgtcttcatggtgccacagtatggatacctcaccctgaacaacgggagtcaggcggtaggacgctcttcattttactgcctggagtactttccttctcagatgctgcgtaccggaaacaactttaccttcagctacacctttgaggacgttccttttcacagcagctacgctcacagccagagtttggaccgtctcatgaatcctctcatcgaccagtacctgtattacttgagcagaacaaacactccaagcggaaccactacgcagtccaggcttcagttttctcaagccggagcgagtgacattcgggaccagtctaggaactggcttcctggaccctgttaccgccagcagcgagtatcaaagacagctgcggacaacaacaacagtgattactcgtggactggagctaccaagtatcacctcaatggaagagactctctggtgaatccgggcacagccatggccagccacaaggacgatgaagaaaagtattttcctcagagcggggttctcatcttcggaaaacaagactcgggaaaaactaatgtggacattgaaaaggtcatgattacagacgaagaggaaatcaggaccaccaatcccgtggctacggagcagtatggttctgtatctaccaatctccagagcggcaacacacaagcagctacctcagatgtcaacacacaaggcgttcttccaggcatggtctggcaggacagagacgtgtacctgcagggacccatctgggcaaagattccacacacggacggacattttcacccttctcctcttatgggaggatttggaccgaagcaccctcccccgcagattctcatcaagaataccccggtacctgcgaatccttctaccaccttcagcgcggcaaagtttgcttccttcatcacacagtactccacggggcaggtcagcgtggagatcgagtgggagctgcagaaagagaacagcaaacgctggaaccccgagatccagtatacctccaactacaacaagtctgttaatgtggactttactgtggacactaatggcgtgtattcagagcctcgccccattggcacaagatacctgactcgtaatctgtaa

SEQ ID NO: 12027 - DNA, 2208 bp, Artificial Sequence
  source: /note="Description of Artificial Sequence: Synthetic polynucleotide"
atggctgccgatggttatcttccagattggctcgaggacactctctctgaaggaataagacagtggtgggagctcaaacctggcccaccaccgccaaagcccgcagagcggcataaggacgacagcaggggtcttgtgcttcctgggtacaagtacctcggacccttcaacggactcgacaaaggagagccggtcaacgaggcagacgccgcggccctcgagcacgacaaggcctacgaccggcagctcgacagcggagacaacccgtacctcaagtacaaccacgccgacgcggagtttcaggagcgccttaaagaagatacgtcttttgggggcaacctcgcaagagcagtattccaggcgaaaaagagggttcttgaacctctgggcctggttgaggagcctgttaagacggctccgggaaaaaagaggccggtagagcactctcctgcggagctagattcctcctccggaactggaaagtcgggccaacagcctgcaagaaagagattgaattttggtcagactggagacgcagactccgtacctgacccccagcctctcgggcagccaccagcagccccctctggtctgggaactaatacgatggcttcaggcagtggcgcaccaatggcagacaataacgagggcgccgacggagtgggtaattcctcgggaaattggcattgcgattccacatggatgggcgacagagtcatcaccaccagcacccgcacctgggctctgcccacctacaacaaccatctgtacaagcaaatttccagccagtctggggccagcaacgacaaccactactttggctacagcaccccttgggggtattttgacttcaacagattccactgccacttctccccacgtgactggcaaagactcatcaacaacaattggggattccggcccaaaagactcaacttcaagctctttaacattcaagtcaaggaggtcacgcagaatgacggtacgacgacgattgccaataaccttaccagcacggttcaggtgtttactgactcggagtaccagctcccgtacgtcctcggctcggcgcatcaaggatgcctcccgccgttcccagcagacgtcttcatggtgccacagtatggatacctcaccctgaacaacgggagtcaggcggtaggacgctcttcattttactgcctggagtactttccttctcagatgctgcgtaccggaaacaactttaccttcagctacacctttgaggacgttccttttcacagcagctacgctcacagccagagtttggaccgtctcatgaatcctctcatcgaccagtacctgtattactttagcagaacaaacactccaagcggaaccactacgcagtccaggcttcagttttctcaagccggagcgagtgacattcgggaccagtctaggaactggcttcctggaccctgttaccgccagcagcgagtatcaaagacagctgcggacaacaacaacagtgattactcgtggactggagctaccaagtatcacctcaatggaagagactctctggtgaatccgggcacagccatggccagccacaaggacgatgaagaaaagtattttcctcagagcggggttctcatcttcggaaaacaagactcgggaaaaactaatgtggacattgaaaaggtcatgattacagacgaagaggaaatcaggaccaccaatcccgtggctacggagcagtatggttctgtatctaccaatctccagagcggcaacacacaagcagctacctcagatgtcaacacacaaggcgttcttccaggcatggtctggcaggacagagacgtgtacctgcagggacccatctgggcaaagattccacacacggacggacattttcacccttctcctcttatgggaggatttggaccgaagcaccctcccccgcagattctcatcaagaataccccggtacctgcgaatccttctaccaccttcagcgcggcaaagtttgcttccttcatcacacagtactccacggggcaggtcagcgtggagatcgagtgggagctgcagaaagagaacagcaaacgctggaaccccgagatccagtatacctccaactacaacaagtctgttaatgtggactttactgtggacactaatggcgtgtattcagagcctcgccccattggcacaagatacctgactcgtaatctgtaa

SEQ ID NO: 12028 - DNA, 2208 bp, Artificial Sequence
  source: /note="Description of Artificial Sequence: Synthetic polynucleotide"
atggctgccgatggttatcttccagattggctcgaggacactctctctgaaggaataagacagtggtggaagctcaaacctggcccaccaccgccaaagcccgcagagcggcataaggacgacagcaggggtcttgtgcttcctgggtacaagtacctcggacccttcaacggactcgacaaaggagagccggtcaacgaggcagacgccgcggccctcgagcacgacaaggcctacgaccggcagctcgacagcggagacaacccgtacctcaagtacaaccacgccgacgcggagtttcaggagcgccttaaagaagatacgtcttttgggggcaacctcgcaagagcagtattccaggcgaaaaagagggttcttgaacctctgggcctggttgaggagcctgttaagacggctccgggaaaaaagaggccggtagagcactctcctgcggagctagattcctcctccggaactggaaagtcgggccaacagcctgcaagaaagagattgaattttggtcagactggagacgcagactccgtacctgacccccagcctctcggacagccaccagcagccccctctggtctgggaactaatacgatggcttcaggcagtggcgcaccaatggcagacaataacgagggcgccgacggagtgggtaattcctcgggaaattggcattgcgattccacatggatgggcgacagagtcatcaccaccagcacccgcacctgggctctgcccacctacaacaaccatctgtacaagcaaatttccagccagtctggggccagcaacgacaaccactactttggctacagcaccccttgggggtattttgacttcaacagattccactgccacttctccccacgtgactggcaaagactcatcaacaacaattggggattccggcccaaaagactcaacttcaagctctttaacattcaagtcaaggaggtcacgcagaatgacggtacgacgacgattgccaataaccttaccagcacggttcaggtgtttactgactcggagtaccagctcccgtacgtcctcggctcggcgcatcaaggatgcctcccgccgttcccagcagacgtcttcatggtgccacagtatggatacctcaccctgaacaacgggagtcaggcggtaggacgctcttcattttaccgcctggagtactttccttctcagatgctgcgtaccggaaacaactttaccttcagctacacctttgaggacgttccttttcacagcagctacgctcacagccagagtttggaccgtctcatgaatcctctcatcgaccagtacctgtattacttgagcagaacaaacactccaagcggaaccactacgcagtccaggcttcagttttctcaagccggagcgagtgacattcgggaccagtctaggaactggcttcctggaccctgttaccgccagcagcgagtatcaaagacagctgcggacaacaacaacagtgattactcgtggactggagctaccaagtatcacctcaatggaagagactctctggtgaatccgggcacagccatggccagccacaaggacgatgaagaaaagtattttcctcagagcggggttctcatcttcggaaaacaagactcgggaaaaactaatgtggacattgaaaaggtcatgattacagacgaagaggaaatcaggaccaccaatcccgtggctacggagcagtatggttctgtatctaccaatctccagagcggcaacacacaagcagctacctcagatgtcaacacacaaggcgttcttccaggcatggtctggcaggacagagacgtgtacctgcagggacccatctgggcaaagattccacacacggacggacattttcacccttctcctcttatgggaggatttggaccgaagcaccctcccccgcagattctcatcaagaataccccggtacctgcgaatccttctaccaccttcagcgcggcaaagtttgcttccttcatcacacagtactccacggggcaggtcagcgtggagatcgagtgggagctgcagaaagagaacagcaaacgctggaaccccgagatccagtatacctccaactacaacaagtctgttaatgtggactttactgtggacactaatggcgtgtattcagagcctcgccccattggcacaagatacctgactcgtaatctgtaa

SEQ ID NO: 12029 - DNA, 2208 bp, Artificial Sequence
  source: /note="Description of Artificial Sequence: Synthetic polynucleotide"
atggctgccgatggttatcttccagattggctcgaggacactctctctgaaggaataagacagtggtggaagctcaaacctggcccaccaccgccaaagcccgcagagcggcataaggacgacagcaggggtcttgtgcttcctgggtacaagtacctcggacccttcaacggactcgacaaaggagagccggtcaacgaggcagacgccgcggccctcgagcacgacaaggcctacgaccggcagctcgacagcggagacaacccgtacctcaagtacaaccacgccgacgcggagtttcaggagcgccttaaagaagatacgtcttttgggggcaacctcgcaagagcagtattccaggcgaaaaagagggttcttgaacctctgggcctggttgaggagcctgttaagacggctccgggaaaaaagaggccggtagagcactctcctgcggagctagattcctcctccggaactggaaagtcgggccaacagcctgcaagaaagagattgaattttggtcagactggagacgcagactccgtacctgacccccagcctctcggacagccaccagcagccccctctggtctgggaactaatacgatggcttcaggcagtggcgcaccaatggcagacaataacgagggcgccgacggagtgggtaattcctcgggaaattggcattgcgattccacatggatgggcgacagagtcatcaccaccagcacccgcacctgggctctgcccacctacaacaaccatctgtacaagcaaatttccagccagtctggggccagcaacgacaaccactaccttggctacagcaccccttgggggtattttgacttcaacagattccactgccacttctccccacgtgactggcaaagactcatcaacaacaattggggattccggcccaaaagactcaacttcaagctctttaacattcaagtcaaggaggtcacgcagaatgacggtacgacgacgattgccaataaccttaccagcacggttcaggtgtttactgactcggagtaccagctcccgtacgtcctcggctcggcgcatcaaggatgcctcccgccgttcccagcagacgtcttcatggtgccacagtatggatacctcaccctgaacaacgggagtcaggcggtaggacgctcttcattttactgcctggagtactttccttctcagatgctgcgtaccggaaacaactttaccttcagctacacctttgaggacgttccttttcacagcagctacgctcacagccagagtttggaccgtctcatgaatcctctcatcgaccagtacctgtattacttgagcagaacaaacactccaagcggaaccactacgcagtccaggcttcagttttctcaagccggagcgagtgacattcgggaccagtctaggaactggcttcctggaccctgttaccgccagcagcgagtatcaaagacagctgcggacaacaacaacagtgattactcgtggactggagctaccaagtatcacctcaatggaagagactctctggtgaatccgggcacagccatggccagccacaaggacgatgaagaaaagtattttcctcagagcggggttctcatcttcggaaaacaagactcgggaaaaactaatgtggacattgaaaaggtcatgattacagacgaagaggaaatcaggaccaccaatcccgtggctacggagcagtatggttctgtatctaccaatctccagagcggcaacacacaagcagctacctcagatgtcaacacacaaggcgttcttccaggcatggtctggcaggacggagacgtgtacctgcagggacccatctgggcaaagattccacacacggacggacattttcacccttctcctcttatgggaggatttggaccgaagcaccctcccccgcagattctcatcaagaataccccggtacctgcgaatccttctaccaccttcagcgcggcaaagtttgcttccttcatcacacagtactccacggggcaggtcagcgtggagatcgagtgggagctgcagaaagagaacagcaaacgctggaaccccgagatccagtatacctccaactacaacaagtctgttaatgtggactttactgtggacactaatggcgtgtattcagagcctcgccccattggcacaagatacctgactcgtaatctgtaa

SEQ ID NO: 12030 - DNA, 2208 bp, Artificial Sequence
  source: /note="Description of Artificial Sequence: Synthetic polynucleotide"
atggctgccgatggttatcttccagattggctcgaggacactctctctgaaggaataagacagtggtggaagctcaaacctggcccaccaccgccaaagcccgcagagcggcataaggacgacagcaggggtcttgtgcttcctgggtacaagtacctcggacccttcaacggactcgacaaaggagagccggtcaacgaggcagacgccgcggccctcgagcacgacaaggcctacgaccggcagctcgacagcggagacaacccgtacctcaagtacaaccacgccgacgcggagtttcaggagcgccttaaagaagatacgtcttttgggggcaacctcgcaagagcagtattccaggcgaaaaagagggttcttgaacctctgggcctggttgaggagcctgttaagacggctccgggaaaaaagaggccggtagagcactctcctgcggagctagattcctcctccggaactggaaagtcgggccaacagcctgcaagaaagagattgaattttggtcagactggagacgcagactccgtacctgacccccagcctctcggacagccaccagcagccccctctggtctgggaactaatacgatggcttcaggcagtggcgcaccaatggcagacaataacgagggcgccgacggagtgggtaattcctcgggaaattggcattgcgattccacatggatgggcgacagagtcatcaccaccagcacccgcacctgggctctgcccacctacaacaaccatctgtacaagcaaatttccagccagtctggggccagcaacgacaaccactactttggctacagcaccccttgggggtattttgacttcaacagattccactgccacttctccccacgtgactggcaaagactcatcaacaacaattggggattccggcccaaaagactcaacttcaagctctttaacattcaagtcaaggaggtcacgcagaatgacggtacgacgacgattgccaataaccttaccagcacggttcaggtgtttactgactcggagtaccagctcccgtacgtcctcggctcggcgcatcaaggatgcctcccgccgttcccagcagacgtcttcatggtgccacagtatggatacctcaccctgaacaacgggagtcaggcggtaggacgctcttcattttactgcctggagtactttcctcctcagatgctgcgtaccggaaacaactttaccttcagctacacctttgaggacgttccttttcacagcagctacgctcacagccagagtttggaccgtctcatgaatcctctcatcgaccagtacctgtattacttgagcagaacaaacactccaagcggaaccactacgcagtccaggcttcagttttctcaagccggagcgagtgacattcgggaccagtctaggaactggcttcctggaccctgttaccgccagcagcgagtatcaaagacagctgcggacaacaacaacagtgattactcgtggactggagctaccaagtatcacctcaatggaagagactctctggtgaatccgggcacagccatggccagccacaaggacgatgaagaaaagtattttcctcagagcggggttctcatcttcggaaaacaagactcgggaaaaactaatgtggacattgaaaaggtcatgattacagacgaagaggaaatcaggaccaccaatcccgtggctacggagcagtatggttctgtatctaccaatctccagagcggcaacacacaagcagctacctcagatgtcaacacacaaggcgttcttccaggcatggtctggcaggacagagacgtgtacctgcagggacccatctgggcaaagattccacacacggacggacattttcacccttctcctcttatgggaggatttggaccgaagcaccctcccccgcagattctcatcaagaataccccggtacctgcgaatccttctaccaccttcagcgcggcaaagtttgcttccttcatcacacagtactccacggggcaggtcagcgtggagatcgagtgggagctgcagaaagagaacagcaaacgctggaaccccgagatccagtatacctccaactacaacaagtctgttaatgtggactttactgtggacactaatggcgtgtattcagagcctcgccccattggcacaagatacctgactcgtaatctgtaa

SEQ ID NO: 12031 - DNA, 2208 bp, Artificial Sequence
  source: /note="Description of Artificial Sequence: Synthetic polynucleotide"
atggctgccgatggttatcttccagattggctcgaggacactctctctgaaggaataagacagtggtggaagctcaaacctggcccaccaccgccaaagcccgcagagcggcataaggacgacagcaggggtcttgtgcttcctgggtacaagtacctcggacccttcaacggactcgacaaaggagagccggtcaacgaggcagacgccgcggccctcgagcacgacaaggcctacgaccggcagctcgacagcggagacaacccgtacctcaagtacaaccacgccgacgcggagtttcaggagcgccttaaagaagatacgtcttttgggggcaacctcgcaagagcagtattccaggcgaaaaagagggttcttgaacctctgggcctggttgaggagcctgttaagacggctccgggaaaaaagaggccggtagagcactctcctgcggagctagattcctcctccggaactggaaagtcgggccaacagcctgcaagaaagagattgaattttggtcagactggagacgcagactccgtacctgacccccagcctctcggacagccaccagcagccccctctggtctgggaactaatacgatggcttcaggcagtggcgcaccaatggcagacaataacgagggcgccgacggggtgggtaattcctcgggaaattggcattgcgattccacatggatgggcgacagagtcatcaccaccagcacccgcgcctgggctctgcccacctacaacaaccatctgtacaagcaaatttccagccagtctggggccagcaacgacaaccactaccttggctacagcaccccttgggggtattttgacttcaacagattccactgccacttctccccacgtgactggcaaagactcatcaacaacaattggggattccggcccaaaagactcaacttcaagctctttaacattcaagtcaaggaggtcacgcagaatgacggtacgacgacgattgccaataaccttaccagcacggttcaggtgtttactgactcggagtaccagctcccgtacgtcctcggctcggcgcatcaaggatgccccccgccgttcccagcagacgtcttcatggtgccacagtatggatacctcaccctgaacaacgggagtcaggcggtaggacgctcttcattttactgcctggagtactttccttctcagatgctgcgtaccggaaacaactttaccttcagctacacctttgaggacgttccttttcacagcagctacgctcacagccagagtttggaccgtctcatgaatcctctcatcgaccagtacctgtattacttgagcagaacaaacactccaagcggaaccactacgcagtccaggcttcagttttctcaagccggagcgagtgacattcgggaccagtctaggaactggcttcctggaccctgttaccgccagcagcgagtatcaaagacagctgcggacaacaacaacagtgattactcgtggactggagctaccaagtatcacctcaatggaagagactctctggtgaatccgggcacagccatggccagccacaaggacgatgaagaaaagtattttcctcagagcggggttctcatcttcggaaaacaagactcgggaaaaactaatgtggacattgaaaaggtcatgattacagacgaagaggaaatcaggaccaccaatcccgtggctacggagcagtatggttctgtatctaccaatctccagagcggcaacacacaagcagctacctcagatgtcaacacacaaggcgttcttccaggcatggtctggcaggacagagacgtgtacctgcagggacccatctgggcaaagattccacacacggacggacattttcacccttctcctcttatgggaggatttggaccgaagcaccctcccccgcagattctcatcaagaataccccggtacctgcgaatccttctaccaccttcagcgcggcaaagtttgcttccttcatcacacagtactccacggggcaggtcagcgtggagatcgagtgggagctgcagaaagagaacagcaaacgctggaaccccgagatccagtatacctccaactacaacaagtctgttaatgtggactttactgtggacactaatggcgtgtattcagagcctcgccccattggcacaagatacctgactcgtaatctgtaa

SEQ ID NO: 12032 - DNA, 2208 bp, Artificial Sequence
  source: /note="Description of Artificial Sequence: Synthetic polynucleotide"
atggctgccgatggttatcttccagattggctcgaggacactctctctgaaggaataagacagtggtggaagctcaaacctggcccaccaccgccaaagcccgcagagcggcataaggacgacagcaggggtcttgtgcttcctgggtacaagtacctcggacccttcaacggactcgacaaaggagagccggtcaacgaggcagacgccgcggccctcgagcacgacaaggcctacgaccggcagctcgacagcggagacaacccgtacctcaagtacaaccacgccgacgcggagtttcaggagcgccttaaagaagatacgtcttttgggggcaacctcgcaagagcagtattccaggcgaaaaagagggttcttgaacctctgggcctggttgaggagcctgttaagacggctccgggaaaaaagaggccggtagagcactctcctgcggagctagattcctcctccggaactggaaagtcgggccaacagcctgcaagaaagagattgaattttggtcagactggagacgcagactccgtacctgacccccagcctctcggacagccaccagcagccccctctggtctgggaactaatacgatggcttcaggcagtggcgcaccaatggcagacaataacgagggcgccgacggagtgggtaattcctcgggaaattggcattgcgattccacatggatgggcgacagagtcatcaccaccagcacccgcacctgggctctgcccacctacaacaaccatctgtacaagcaaatttccagccagtctggggccagcaacgacaaccactactttggctacagcaccccttgggggtattttgacttcaacagattccactgccacttctccccacgtgactggcaaagactcatcaacaacaattggggattccggcccaaaagactcaacttcaagctctttaacattcaagtcaaggaggtcacgcagaatgacggtacgacgacgattgccaataaccttaccagcacggttcaggtgtttactgactcggagtaccagctcccgtacgtcctcggctcggcgcatcaaggatgcctcccgccgttcccagcagacgtcttcatggtgccacagtatggatacctcaccctgaacaacgggagtcaggcggtaggacgctcttcattttactgcctggagtactttccttctcagatgctgcgtaccggaaacaactttaccttcagctacacctttgaggacgttccttttcacagcagctacgctcacagccagagtttggaccgtctcatgaatcctctcatcgaccagtacctgtattacttgagcagaacaaacactccaagcggaaccactacgcagtccaggcttcagttttctcaagccggagcgagtgacattcgggaccagtctaggaactggcttcctggaccctgttaccgccagcagcgagtatcaaagacagctgcggacaacaacaacagtgattactcgtggactggagctaccaagtatcacctcaatggaagagactctctggtgaatccgggcacagccatggccagccacaaggacgatgaagaaaagtattttcctcagagcggggttctcatcttcggaaaacaagactcgggaaaaactaatgtggacattgaaaaggtcatgattacagacgaagaggaaatcaggaccaccaatcccgtggctacggagcagtatggttctgtatctaccaatctccagagcggcaacacacaagcagctacctcagatgtcaacacacaaggcgttcttccaggcatggtctggcaggacagagacgtgtacctgcagggacccatctgggcaaagattccacacacggacggacattttcacccttctcctcttatgggaggatttggaccgaagcaccctcccccgcagattctcatcaagaataccccggtacctgcgaatccttctaccaccttcagcgcggcaaagtttgctttcttcatcacacagtactccacggggcaggtcagcgtggagatcgagtgggagctgcagaaagagaacagcaaacgctggaaccccgagatccagtatacctccaactacaacaagtctgttaatgtggactttactgtggacactaatggcgtgtattcagagcctcgccccattggcacaagatacctgactcgtaatctgtaa

SEQ ID NO: 12033 - DNA, 2208 bp, Artificial Sequence
  source: /note="Description of Artificial Sequence: Synthetic polynucleotide"
atggctgccgatggttatcttccagattggctcgaggacactctctctgaaggaataagacagtggtggaagctcaaacctggcccaccaccgccaaagcccgcagagcggcataaggacgacagcaggggtcttgtgcttcctgggtacaagtacctcggacccttcaacggactcgacaaaggagagccggtcaacgaggcagacgccgcggccctcgagcacgacaaggcctacgaccggcagctcgacagcggagacaacccgtacctcaagtacaaccacgccgacgcggagtttcaggagcgccttaaagaagatacgtcttttgggggcaacctcgcaagagcagtattccaggcgaaaaagagggttcttgaacctctgggcctggttgaggagcctgttaagacggctccgggaaaaaagaggccggtagagcactctcctgcggagctagattcctcctccggaactggaaagtcgggccaacagcctgcaagaaagagattgaattttggtcagactggagacgcagactccgtacctgacccccagcctctcggacagccaccagcagccccctctggtctgggaactaatacgatggcttcaggcagtggcgcaccaatggcagacaataacgagggcgccgacggagtgggtaattcctcgggaaattggcattgcgattccacatggatgggcgacagagtcatcaccaccagcacccgcacctgggctctgcccacctacaacaaccatctgtacaagcaaatttccagccagtctggggccagcaacgacaaccactaccttggctacagcaccccttgggggtattttgacttcaacagattccactgccacttctccccacgtgactggcaaagactcatcaacaacaattggggattccggcccaaaagactcaacttcaagctctttaacattcaagtcaaggaggtcacgcagaatgacggtacgacgacgattgccaataaccttaccagcacggttcaggtgtttactgactcggagtaccagctcccgtacgtcctcggctcggcgcatcaaggatgcctcccgccgttcccagcagacgtcttcatggtgccacagtatggatacctcaccctgaacaacgggagtcaggcggtaggacgctcttcattttaccgcctggagtactttccttctcagatgctgcgtaccggaaacaactttaccttcagctacacctttgaggacgttccttttcacagcagctacgctcacagccagagtttggaccgtctcatgaatcctctcatcgaccagtacctgtattacttgagcagaacaaacactccaagcggaaccactacgcagtccaggcttcagttttctcaagccggagcgagtgacattcgggaccagtctaggaactggcttcctggaccctgttaccgccagcagcgagtatcaaagacagctgcggacaacaacaacagtgattactcgtggactggagctaccaagtatcacctcaatggaagagactctctggtgaatccgggcacagccatggccagccacaaggacgatgaagaaaagtattttcctcagagcggggttctcatcttcggaaaacaagactcgggaaaaactaatgtggacattgaaaaggtcatgattacagacgaagaggaaatcaggaccaccaatcccgtggctacggagcagtatggttctgtatctaccaatctccagagcggcaacacacaagcagctacctcagatgtcaacacacaaggcgttcttccaggcatggtctggcaggacagagacgtgtacctgcagggacccatctgggcaaagattccacacacggacggacattttcacccttctcctcttatgggaggatttggaccgaagcaccctcccccgcagattctcatcaagaataccccggtacctgcgaatccttctaccaccttcagcgcggcaaagtttgcttccttcatcacacagtactccacggggcaggtcagcgtggagatcgagtgggagctgcagaaagagaacagcaaacgctggaaccccgagatccagtatacctccaactacaacaagtctgttaatgtggactttactgtggacactaatggcgtgtattcagagcctcgccccattggcacaagatacctgactcgtaatctgtaa

SEQ ID NO: 12034 - DNA, 2205 bp, Artificial Sequence
  source: /note="Description of Artificial Sequence: Synthetic polynucleotide"
atggctgccgatggttatcttccagattggctcgaggacactctctctgaaggaataagacagtggtggaagctcaaacctggcccaccaccgccaaagcccgcagagcggcataaggacgacagcaggggtcttgtgcttcctgggtacaagtacctcggacccttcaacggactcgacaaaggagagccggtcaacgaggcagacgccgcggccctcgagcacgacaaggcctacgaccggcagctcgacagcggagacaacccgtacctcaagtacaaccacgccgacgcggagtttcaggagcgccttaaagaagatacgtcttttgggggcaacctcgcaagagcagtattccaggcgaaaaagagggttcttgaacctctgggcctggttgaggagcctgttaagacggctccgggaaaaaagaggccggtagagcactctcctgcggagctagattcctcctccggaactggaaagtcgggccaacagcctgcaagaaagagattgaattttggtcagactggagacgcagactccgtacctgacccccagcctctcggacagccaccagcagccccctctggtctgggaactaatacgatggcttcaggcagtggcgcaccaatggcagacaataacgagggcgccgacggggtgggtaattcctcgggaaattggcattgcgattccacatggatgggcgacagagtcatcaccaccagcacccgcacctgggctctgcccacctacaacaaccatctgtacaagcaaatttccagccagtctggggccagcaacgacaaccactaccttggctacagcaccccttgggggtattttgacttcaacagattccactgccacttctccccacgtgactggcaaagactcatcaacaacaattggggattccggcccaaaagactcaacttcaagctctttaacattcaagtcaaggaggtcacgcagaatgacggtacgacgacgattgccaataaccttaccagcacggttcaggtgtttactgactcggagtaccagctcccgtacgtcctcggctcggcgcatcaaggatgcctcccgccgttcccagcagacgtcttcatggtgccacagtatggatacctcaccctgaacaacgggagtcaggcggtaggacgctcttcattttactgcctggagtactttccttctcagatgctgcgtaccggaaacaactttaccttcagctacacctttgaggacgttccttttcacagcagctacgctcacagccagagtttggaccgtctcatgaatcctctcatcgaccagtacctgtattacttgagcagaacaaacactccaagcggaaccactacgcagtccaggcttcagttttctcaagccggagcgagtgacattcgggaccagtctaggaactggcttcctggaccctgttaccgccagcagcgagtatcaaagacagctgcggacaacaacagtgattactcgtggactggagctaccaagtatcacctcaatggaagagactctctggtgaatccgggcacagccatggccagccacaaggacgatgaagaaaagtattttcctcagagcggggttctcatcttcggaaaacaagactcgggaaaaactaatgtggacattgaaaaggtcatgattacagacgaagaggaaatcaggaccaccaatcccgtggctacggagcagtatggttctgtatctaccaatctccagagcggcaacacacaagcagctacctcagatgtcaacacacaaggcgttcttccaggcatggtctggcaggacagagacgtgtacctgcagggacccatctgggcaaagattccacacacggacggacattttcacccttctcctcttatgggaggatttggaccgaagcaccctcccccgcagattctcatcaagaataccccggtacctgcgaatccttctaccaccttcagcgcggcaaagtttgcttccttcatcacacagtactccacggggcaggtcagcgtggagatcgagtgggagctgcagaaagagaacagcaaacgctggaaccccgagatccagtatacctccaactacaacaagtctgttaatgtggactttactgtggacactaatggcgtgtattcagagcctcgccccattggcacaagatacctgactcgtaatctgtaa

SEQ ID NO: 12035 - DNA, 2205 bp, Artificial Sequence
  source: /note="Description of Artificial Sequence: Synthetic polynucleotide"
atggctgccgatggttatcttccagattggctcgaggacactctctctgaaggaataagacagtggtggaagctcaaacctggcccaccaccgccaaagcccgcagagcggcataaggacgacagcaggggtcttgtgcttcctgggtacaagtacctcggacccttcaacggactcgacaaaggagagccggtcaacgaggcagacgccgcggccctcgagcacgacaaggcctacgaccggcagctcgacagcggagacaacccgtacctcaagtacaaccacgccgacgcggagtttcaggagcgccttaaagaagatacgtctttgggcaacctcgcaagagcagtattccaggcgaaaaagagggttcttgaacctctgggcctggttgaggagcctgttaagacggctccgggaaaaaagaggccggtagagcactctcctgcggagctagattcctcctccggaactggaaagtcgggccaacagcctgcaagaaagagattgaattttggtcagactggagacgcagactccgtacctgacccccagcctctcggacagccaccagcagccccctctggtctgggaactaatacgatggcttcaggcagtggcgcaccaatggcagacaataacgagggcgccgacggagtgggtaattcctcgggaaattggcattgcgattccacatggatgggcgacagagtcatcaccaccagcacccgcacctgggctctgcccacctacaacaaccatctgtacaagcaaatttccagccagtctggggccagcaacgacaaccactactttggctacagcaccccttgggggtattttgacttcaacagattccactgccacttctccccacgtgactggcaaagactcatcaacaacaattggggattccggcccaaaagactcaacttcaagctctttaacattcaagtcaaggaggtcacgcagaatgacggtacgacgacgattgccaataaccttaccagcacggttcaggtgtttactgactcggagtaccagctcccgtacgtcctcggctcggcgcatcaaggatgcctcccgccgttcccagcagacgtcttcatggtgccacagtatggatacctcaccctgaacaacgggagtcaggcggtaggacgctcttcattttactgcctggagtactttccttctcagatgctgcgtaccggaaacaactttaccttcagctacacctttgaggacgttccttttcacagcagctacgctcacagccagagtttggaccgtctcatgaatcctctcatcgaccagtacctgtattacttgagcagaacaaacactccaagcggaaccactacgcagtccaggcttcagttttctcaagccggagcgagtgacattcgggaccagtctaggaactggcttcctggaccctgttaccgccagcagcgagtatcaaagacagctgcggacaacaacaacagtgattactcgtggactggagctaccaagtatcacctcaatggaagagactctctggtgaatccgggcacagccatggccagccacaaggacgatgaagaaaagtattttcctcagagcggggttctcatcttcggaaaacaagactcgggaaaaactaatgtggacattgaaaaggtcatgattacagacgaagaggaaatcaggaccaccaatcccgtggctacggagcagtatggttctgtatctaccaatctccagagcggcaacacacaagcagctacctcagatgtcaacacacaaggcgttcttccaggcatggtctggcaggacagagacgtgtacctgcagggacccatctgggcaaagattccacacacggacggacattttcacccttctcctcttatgggaggatttggaccgaagcaccctcccccgcagattctcatcaagaataccccggtacctgcgaatccttctaccaccttcagcgcggcaaagtttgcttccttcatcacacagtactccacggggcaggtcagcgtggagatcgagtgggagctgcagaaagagaacagcaaacgctggaaccccgagatccagtatacctccaactacaacaagtctgttaatgtggactttactgtggacactaatggcgtgtattcagagcctcgccccattggcacaagatacctgactcgtaatctgtaa

SEQ ID NO: 12036 - DNA, 2208 bp, Artificial Sequence
  source: /note="Description of Artificial Sequence: Synthetic polynucleotide"
atggctgccgatggttatcttccagattggctcgaggacactctctctgaaggaataagacagtggtggaagctcaaacctggcccaccaccgccaaagcccgcagagcggcataaggacgacagcaggggtcttgtgcttcctgggtacaagtacctcggacccttcaacggactcgacaaaggagagccggtcaacgaggcagacgccgcggccctcgagcacgacaaggcctacgaccggcagctcgacagcggagacaacccgtacctcaagtacaaccacgccgacgcggagtttcaggagcgccttaaagaagatacgtcttttgggggcaacctcgcaagagcagtattccaggcgaaaaagagggttcttgaacctctgggcctggttgaggagcctgttaagacggctccgggaaaaaagaggccggtagagcactctcctgcggagctagattcctcctccggaactggaaagtcgggccaacagcctgcaagaaagagattgaattttggtcagactggagacgcagactccgtacctgacccccagcctctcggacagccaccagcagccccctctggtctgggaactaatacgatggcttcaggcagtggcgcaccaatggcagacaataacgagggcgccgacggagtgggtaattcctcgggaaattggcattgcgattccacatggatgggcgacagagtcatcaccaccagcacccgcacctgggctctgcccacctacaacaaccatctgtacaagcaaatttccagccagtctggggccagcaacgacaaccactactttggctacagcaccccttgggggtattttgacttcaacagattccactgccacttctccccacgtgactggcaaagactcatcaacaacaattggggattccggcccaaaagactcaacttcaagctctttaacattcaagtcaaggaggtcacgcagaatgacggtacgacgacgattgccaataaccttaccagcacggttcaggtgtttactgactcggagtaccagctcccgtacgtcctcggctcggcgcatcaaggatgcctcccgccgttcccagcagacgtcttcatggtgccacagtatggatacctcaccctgaacaacgggagtcaggcggtaggacgctcttcattttactgcctggagtactttccttctcagatgctgcgtaccggaaacaactttaccttcagctacacctttgaggacgttccttttcacagcagctacgctcacagccagagtttggaccgtctcatgaatcctctcatcgaccagtacctgtattacttgagcagaacaaacactccaagcggaaccactacgcagtccaggcttcagttttctcaagccggagcgagtgacattcgggaccagtctaggaactggcttcctggaccctgttaccgccagcagcgagtatcaaagacagctgcggacaacaacaacagtgattactcgtggactggagctaccaagtatcacctcaatggaagagactctctggtgaatccgggcacagccatggccagccacaaggacgatgaagaaaagtattttcctcagagcggggttctcatcttcggaaaacaagactcgggaaaaactaatgtggacattgaaaaggtcatgattacagacgaagaggaaatcaggaccaccaatcccgtggctacggagcagtatggttctgtatctaccaatctccagagcggcaacacacaagcagctacctcagatgtcaacacacaaggcgttcttccaggcatggtctggcaggacagagacgtgtacctgcagggacccatctgggcaaagattccacacacggacggacattttcacccttctcctcttatgggaggatttggaccgaagcaccctcccccgcagattctcatcaagaataccccggtacctgcgaatccttctaccaccttcagcgcggcaaagtttgcttccttcatcacacagtactccacggggcaggtcggcgtggagatcgagtgggagctgcagaaagagaacagcaaacgctggaaccccgagatccagtatacctccaactacaacaagtctgttaatgtggactttactgtggacactaatggcgtgtattcagagcctcgccccattggcacaagatacctgactcgtaatctgtaa

SEQ ID NO: 12037 - DNA, 2208 bp, Artificial Sequence
  source: /note="Description of Artificial Sequence: Synthetic polynucleotide"
atggctgccgatggttatcttccagattggctcgaggacactctctctgaaggaataagacagtggtggaagctcaaacctggcccaccaccgccaaagcccgcagagcggcataaggacgacagcaggggtcttgtgcttcctgggtacaagtacctcggacccttcaacggactcgacaaaggagagccggtcaacgaggcagacgccgcggccctcgagcacgacaaggcctacgaccggcagctcgacagcggagacaacccgtacctcaagtacaaccacgccgacgcggagtttcaggagcgccttaaagaagatacgtcttttgggggcaacctcgcaagagcagtattccaggcgaaaaagagggttcttgaacctctgggcctggttgaggagcctgttaagacggctccgggaaaaaagaggccggtagagcactctcctgcggagctagattcctcctccggaactggaaagtcgggccaacagcctgcaagaaagagattgaattttggtcagactggagacgcagactccgtacctgacccccagcctctcggacagccaccagcagccccctctggtctgggaactaatacgatggcttcaggcagtggcgcaccaatggcagacaataacgagggcgccgacggagtgggtaattcctcgggaaattggcattgcgattccacatggatgggcgacagagtcatcaccaccagcacccgcacctgggctctgcccacctacaacaaccatctgtacaagcaaatttccagccagtctggggccagcaacgacaaccactactttggctacagcaccccttgggggtattttgacttcaacagattccactgccacttctccccacgtgactggcaaagactcatcaacaacaattggggattccggcccaaaagactcaacttcaagctctttaacattcaagtcaaggaggtcacgcagaatgacagtacgacgacgattgccaataaccttaccagcacggttcaggtgtttactgactcggagtaccagctcccgtacgtcctcggctcggcgcatcaaggatgcctcccgccgttcccagcagacgtcttcatggtgccacagtatggatacctcaccctgaacaacgggagtcaggcggtaggacgctcttcattttactgcctggagtactttccttctcagatgctgcgtaccggaaacaactttaccttcagctacacctttgaggacgttccttttcacagcagctacgctcacagccagagtttggaccgtctcatgaatcctctcatcgaccagtacctgtattacttgagcagaacaaacactccaagcggaaccactacgcagtccaggcttcagttttctcaagccggagcgagtgacattcgggaccagtctaggaactggcttcctggaccctgttaccgccagcagcgagtatcaaagacagctgcggacaacaacaacagtgattactcgtggactggagctaccaagtatcacctcaatggaagagactctctggtgaatccgggcacagccatggccagccacaaggacgatgaagaaaagtattttcctcagagcggggttctcatcttcggaaaacaagactcgggaaaaactaatgtggacattgaaaaggtcatgattacagacgaagaggaaatcaggaccaccaatcccgtggctacggagcagtatggttctgtatctaccaatctccagagcggcaacacacaagcagctacctcagatgtcaacacacaaggcgttcttccaggcatggtctggcaggacagagacgtgtacctgcagggacccatctgggcaaagattccacacacggacggacattttcacccttctcctcttatgggaggatttggaccgaagcaccctcccccgcagattctcatcaagaataccccggtacctgcgaatccttctaccaccttcagcgcggcaaagtttgcttccttcatcacacagtactccacggggcaggtcagcgtggagatcgagtgggagctgcagaaagagaacagcaaacgctggaaccccgagatccagtatacctccaactacaacaagtctgttaatgtggactttactgtggacactaatggcgtgtattcagagcctcgccccattggcacaagatacctgactcgtaatctgtaa

SEQ ID NO: 12038 - DNA, 2208 bp, Artificial Sequence
  source: /note="Description of Artificial Sequence: Synthetic polynucleotide"
atggctgccgatggttatcttccagattggctcgaggacactctctctgaaggaataagacagtggtggaagctcaaacctggcccaccaccgccaaagcccgcagagcggcataaggacgacagcaggggtcttgtgcttcctgggtacaagtacctcggacccttcaacggactcgacaaaggagagccggtcaacgaggcagacgccgcggccctcgagcacgacaaggcctacgaccggcagctcgacagcggagacaacccgtacctcaagtacaaccacgccgacgcggagtttcaggagcgccttaaagaagatacgtcttttgggggcaacctcgcaagagcagtattccaggcgaaaaagagggttcttgaacctctgggcctggttgaggagcctgttaagacggctccgggaaaaaagaggccggtagagcactctcctgcggagctagattcctcctccggaactggaaagtcgggccaacagcctgcaagaaagagattgaattttggtcagactggagacgcagactccgtacctgacccccagcctctcggacagccaccagcagccccctctggtctgggaactaatacgatggcttcaggcagtggcgcaccaatggcagacaataacgagggcgccgacggagtgggtaattcctcgggaaattggcattgcgattccacatggatgggcgacagagtcatcaccaccagcacccgcacctgggctctgcccacctacaacaaccatctgtacaagcaaatttccagccagtctggggccagcaacgacaaccactactttggctacagcaccccttgggggtattttgacttcaacagattccactgccacttctccccacgtgactggcaaagactcatcaacaacaattggggattccggcccaaaagactcaacttcaagctctttaacattcaagtcaaggaggtcacgcagaatgacggtacgacgacgattgccaataaccttaccagcacggttcaggtgtttactgactcggagtaccagctcccgtacgtcctcggctcggcgcatcaaggatgcctcccgccgttcccagcagacgtcttcatggtgccacagtatggatacctcaccctgaacaacgggagtcaggcggtaggacgctcttcattttactgcctggagtactttccttctcagatgctgcgtaccggaaacaactttaccttcagctacacctttgaggacgttccttttcacagcagctacgctcacagccagagtttggaccgtctcatgaatcctctcatcgaccagtacctgtattacttgagcagaacaaacactccaagcggaaccactacgcagtccaggcttcagttttctcaagccggagcgagtgacattcgggaccagtctaggaactggcttcctggaccctgttaccgccagcagcgagtatcaaagacagctgcggacaacaacaacagtgattactcgtggactggagctaccaagtatcacctcaatggaagagactctctggtgaatccgggcacagccatggccagccacaaggacgatgaagaaaagtattttcctcagagcggggttctcatcttccggaaacaagactcgggaaaaactaatgtggacattgaaaaggtcatgattacagacgaagaggaaatcaggaccaccaatcccgtggctacggagcagtatggttctgtatctaccaatctccagagcggcaacacacaagcagctacctcagatgtcaacacacaaggcgttcttccaggcatggtctggcaggacagagacgtgtacctgcagggacccatctgggcaaagattccacacacggacggacattttcacccttctcctcttatgggaggatttggaccgaagcaccctcccccgcagattctcatcaagaataccccggtacctgcgaatccttctaccaccttcagcgcggcaaagtttgcttacttcatcacacagtactccacggggcaggtcagcgtggagatcgagtgggagctgcagaaagagaacagcaaacgctggaaccccgagatccagtatacctccaactacaacaagtctgttaatgtggactttactgtggacactaatggcgtgtattcagagcctcgccccattggcacaagatacctgactcgtaatctgtaa

SEQ ID NO: 12039 - DNA, 2208 bp, Artificial Sequence
  source: /note="Description of Artificial Sequence: Synthetic polynucleotide"
atggctgccgatggttatcttccagattggctcgaggacactctctctgaaggaataagacagtggtggaagctcaaacctggcccaccaccgccaaagcccgcagagcggcataaggacgacagcaggggtcttgtgcttcctgggtacaagtacctcggacccttcaacggactcgacaaaggagagccggtcaacgaggcagacgccgcggccctcgagcacgacaaggcctacgaccggcagctcgacagcggagacaacccgtacctcaagtacaaccacgccgacgcggagtttcaggagcgccttaaagaagatacgtcttttgggggcaacctcgcaagagcagtattccaggcgaaaaagagggttcttgaacctctgggcctggttgaggagcctgttaagacggctccgggaaaaaagaggccggtagagcactctcctgcggagctagattcctcctccggaactggaaagtcgggccaacagcctgcaagaaagagattgaattttggtcagactggagacgcagactccgtacctgacccccagcctctcggacagccaccagcagccccctctggtctgggaactaatacgatggcttcaggcagtggcgcaccaatggcagacaataacgagggcgccgacggagtgggtaattcctcgggaaattggcattgcgactccacatggatgggcgacagagtcatcaccaccagcacccgcacctgggctctgcccacctacaacaaccatctgtacaagcaaatttccagccagtctggggccagcaacgacaaccactactttggctacagcaccccttgggggtattttgacttcaacagattccactgccacttctccccacgtgactggcaaagactcatcaacaacaattggggattccggcccaaaagactcgacttcaagctctttaacattcaagtcaaggaggtcacgcagaatgacggtacgacgacgattgccaataaccttaccagcacggttcaggtgtttactgactcggagtaccagctcccgtacgtcctcggctcggcgcatcaaggatgcctcccgccgttcccagcagacgtcttcatggtgccacagtatggatacctcaccctgaacaacgggagtcaggcggtaggacgctcttcattttactgcctggagtactttccttctcagatgctgcgtaccggaaacaactttaccttcagctacacctttgaggacgttccttttcacagcagctacgctcacagccagagtttggaccgtctcatgaatcctctcatcgaccagtacctgtattacttgagcagaacaaacactccaagcggaaccactacgcagtccaggcttcagttttctcaagccggagcgagtgacattcgggaccagtctaggaactggcttcctggaccctgttaccgccagcagcgagtatcaaagacagctgcggacaacaacaacagtgattactcgtggactggagctaccaagtatcacctcaatggaagagactctctggtgaatccgggcacagccatggccagccacaaggacgatgaagaaaagtattttcctcagagcggggttctcatcttcggaaaacaagactcgggaaaaactaatgtggacattgaaaaggtcatgattacagacgaagaggaaatcaggaccaccaatcccgtggctacggagcagtatggttctgtatctaccaatctccagagcggcaacacacaagcagctacctcagatgtcaacacacaaggcgttcttccaggcatggtctggcaggacagagacgtgtacctgcagggacccatctgggcaaagattccacacacggacggacattttcacccttctcctcttatgggaggatttggaccgaagcaccctcccccgcagattctcatcaagaataccccggtacctgcgaatccttctaccaccttcagcgcggcaaagtttgcttccttcatcacacagtactccacggggcaggtcagcgtggagatcgagtgggagctgcagaaagagaacagcaaacgctggaaccccgagatccagtatacctccaactacaacaagtctgttaatgtggactttactgtggacactaatggcgtgtattcagagcctcgccccattggcacaagatacctgactcgtaatctgtaa

SEQ ID NO: 12040 - DNA, 2208 bp, Artificial Sequence
  source: /note="Description of Artificial Sequence: Synthetic polynucleotide"
atggctgccgatggttatcttccagattggctcgaggacactctctctgaaggaataagacagtggtggaagctcaaacctggcccaccaccgccaaagcccgcagagcggcataaggacgacagcaggggtcttgtgcttcctgggtacaagtacctcggacccttcaacggactcgacaaaggagagccggtcaacgaggcagacgccgcggccctcgagcacgacaaggcctacgaccggcagctcgacagcggagacaacccgtacctcaagtacaaccacgccgacgcggagtttcaggagcgccttaaagaagatacgtcttttgggggcaacctcgcaagagcagtattccaggcgaaaaagagggttcttgaacctctgggcctggttgaggagcctgttaagacggctccgggaaaaaagaggccggtagagcactctcctgcggagctagattcctcctccggaactggaaagtcgggccaacagcctgcaagaaagagattgaattttggtcagactggaggcgcagactccgtacctgacccccagcctctcggacagccaccagcagccccctctggtctgggaactaatacgatggcttcaggcagtggcgcaccaatggcagacaataacgagggcgccgacggagtgggtaattcctcgggaaattggcattgcgattccacatggatgggcgacagagtcatcaccaccagcacccgcacctgggctctgcccacctacaacaaccatctgtacaagcaaatttccagccagtctggggccagcaacgacaaccactactttggctacagcaccccttgggggtattttgacttcaacagattccactgccacttctccccacgtgactggcaaagactcatcaacaacaattggggattccggcccaaaagactcaacttcaagctctttaacattcaagtcaaggaggtcacgcagaatgacggtacgacgacgattgccaataaccttaccagcacggttcaggtgtttactgactcggagtaccagctcccgtacgtcctcggctcggcgcatcaaggatgcctcccgccgttcccagcagacgtcttcatggtgccacagtatggatacctcaccctgaacaacgggagtcaggcggtaggacgctcttcattttactgcctggagtactttccttctcagatgctgcgtaccggaaacaactttaccttcagctacacctttgaggacgttccttttcacagcagctacgctcacagccagagtttggaccgtctcatgaatcctctcatcgaccagtacctgtattacttgagcagaacaaacactccaagcggaaccactacgcagtccaggcttcagttttctcaagccggagcgagtgacattcgggaccagtctaggaactggcttcctggaccctgttaccgccagcagcgagtatcaaagacagctgcggacaacaacaacagtgattactcgtggactggagctaccaagtatcacctcaatggaagagactctctggtgaatccgggcacagccatggccagccacaaggacgatgaagaaaagtattttcctcagagcggggttctcatcttcggaaaacaagactcgggaaaaactaatgtggacattgaaaaggtcatgattacagacgaagaggaaatcaggaccaccaatcccgtggctacggagcagtatggttctgtatctaccaatctccagagcggcaacacacaagcagctacctcagatgtcaacacacaaggcgttcttccaggcatggtctggcaggacagagacgtgtacctgcagggacccatctgggcaaagattccacacacggacggacattttcacccttctcctcttatgggaggatttggaccgaagcaccctcccccgcagattctcatcaagaataccccggtacctgcgaatccttctaccaccttcagcgcggcaaagtttgcttccttcatcacacagtactccacggggcaggtcagcgtggagatcgagtgggagctgcagaaagagaacagcaaacgctggaaccccgagatccagtatacctccaactacaacaagtctgttaatgtggactttactgtggacactaatggcgtgtattcagagcctcgccccattggcacaagatacctgactcgtaatctgtaa

SEQ ID NO: 12041 - DNA, 2208 bp, Artificial Sequence
  source: /note="Description of Artificial Sequence: Synthetic polynucleotide"
atggctgccgatggttatcttccagattggctcgaggacactctctctgaaggaataagacagtggtggaagctcaaacctggcccaccaccgccaaagcccgcagagcggcataaggacgacagcaggggtcttgtgcttcctgggtacaagtacctcggacccttcaacggactcgacaaaggagagccggtcaacgaggcagacgccgcggccctcgagcacgacaaggcctacgaccggcagctcgacagcggagacaacccgtacctcaagtacaaccacgccgacgcggagtttcaggagcgccttaaagaagatacgtcttttgggggcaacctcgcaagagcagtattccaggcgaaaaagagggttcttgaacctctgggcctggttgaggagcctgttaagacggctccgggaaaaaagaggccggtagagcactctcctgcggagctagattcctcctccggaactggaaagtcgggccaacagcctgcaagaaagagattgaattttggtcagactggagacgcagactccgtacctgacccccagcctctcggacagccaccagcagccccctctggtctgggaactaatacgatggcttcaggcagtggcgcaccaatggcagacaataacgagggcgccgacggagtgggtaattcctcgggaaattggcattgcgattccacatggatgggcgacagagtcatcaccaccagcacccgcacctgggctctgcccacctacaacaaccatctgtacaagcaaatttccagccagtctggggccagcaacgacaaccactactttggctacagcaccccttgggggtattttgacttcaacagattccactgccacttctccccacgtgactggcaaagactcatcaacaacaattggggattccggcccaaaagactcaacttcaagctctttaacattcaagtcaaggaggtcacgcagaatgacggtacgacgacgattgccaataaccttaccagcacggttcaggtgtttactgactcggagtaccagctcccgtacgtcctcggctcggcgcatcaaggatgcctcccgccgttcccagcagacgtcttcatggtgccacagtatggatacctcaccctgaacaacgggagtcaggcggtaggacgctcttcattttactgcctggagtactttccttctcagatgctgcgtaccggaaacaaccttaccttcagctacacctttgaggacgttccttttcacagcagctacgctcacagccagagtttggaccgtctcatgaatcctctcatcgaccagtacctgtattacttgagcagaacaaacactccaagcggaaccactacgcagtccaggcttcagttttctcaagccggagcgagtgacattcgggaccagtctaggaactggcttcctggaccctgttaccgccagcagcgagtatcaaagacagctgcggacaacaacaacagtgattactcgtggactggagctaccaagtatcacctcaatggaagagactctctggtgaatccgggcacagccatggccagccacaaggacgatgaagaaaagtattttcctcagagcggggttctcatcttcggaaaacaagactcgggaaaaactaatgtggacattgaaaaggtcatgattacagacgaagaggaaatcaggaccaccaatcccgtggctacggagcagtatggttctgtatctaccaatctccagagcggcaacacacaagcagctacctcagatgtcaacacacaaggcgttcttccaggcatggtctggcaggacagagacgtgtacctgcagggacccatctgggcaaagattccacacacggacggacattttcacccttctcctcttatgggaggatttggaccgaagcaccctcccccgcagattctcatcaagaataccccggtacctgcgaatccttctaccaccttcagcgcggcaaagtttgcttccttcatcacacagtactccacggggcaggtcagcgtggagatcgagtgggagctgcagaaagagaacagcaaacgctggaaccccgagatccagtatacctccaactacaacaagtctgttaatgtggactttactgtggacactaatggcgtgtattcagagcctcgccccattggcacaagatacctgactcgtaatctgtaa

SEQ ID NO: 12042 - DNA, 2208 bp, Artificial Sequence
  source: /note="Description of Artificial Sequence: Synthetic polynucleotide"
atggctgccgatggttatcttccagattggctcgaggacactctctctgaaggaataagacagtggtggaagctcaaacctggcccaccaccgccaaagcccgcagagcggcataaggacgacagcaggggtcttgtgcttcctgggtacaagtacctcggacccttcaacggactcgacaaaggagagccggtcaacgaggcagacgccgcggccctcgagcacgacaaggcctacgaccggcagctcgacagcggagacaacccgtacctcaagtacaaccacgccgacgcggagtttcaggagcgccttaaagaagatacgtcttttgggggcaacctcgcaagagcagtattccaggcgaaaaagagggttcttgaacctctgggcctggttgaggagcctgttaagacggctccgggaaaaaagaggccggtagagcactctcctgcggagctagattcctcctccggaactggaaagtcgggccaacagcctgcaagaaagagattgaattttggtcagactggagacgcagactccgtacctgacccccagcctctcggacagccaccagcagccccctctggtctgggaactaatacgatggcttcaggcagtggcgcaccaatggcagacaataacgagggcgccgacggagtgggtaattcctcgggaaattggcattgcgattccacatggatgggcgacagagtcatcaccaccagcacccgcacctgggctctgcccacctacaacaaccatctgtacaagcaaatttccagccagtctggggccagcaacgacaaccactactttggctacagcaccccttgggggtattttgacttcaacagattccactgccacttctccccacgtgactggcaaagactcatcaacaacaattggggattccggcccaaaagactcaacttcaagctctttaacattcaagtcaaggaggtcacgcagaatgacggtacgacgacgattgccaataaccttaccagcacggttcaggtgtttactgactcggagtaccagctcccgtacgtcctcggctcggcgcatcaaggatgcctcccgccgttcccagcagacgtcttcatggtgccacagtatggataccacaccctgaacaacgggagtcaggcggtaggacgctcttcattttactgcctggagtactttccttctcagatgctgcgtaccggaaacaactttaccttcagctacacctttgaggacgttccttttcacagcagctacgctcacagccagagtttggaccgtctcatgaatcctctcatcgaccagtacctgtattacttgagcagaacaaacactccaagcggaaccactacgcagtccaggcttcagttttctcaagccggagcgagtgacattcgggaccagtctaggaactggcttcctggaccctgttaccgccagcagcgagtatcaaagacagctgcggacaacaacaacagtgattactcgtggactggagctaccaagtatcacctcaatggaagagactctctggtgaatccgggcacagccatggccagccacaaggacgatgaagaaaagtattttcctcagagcggggttctcatcttcggaaaacaagactcgggaaaaactaatgtggacattgaaaaggtcatgattacagacgaagaggaaatcaggaccaccaatcccgtggctacggagcagtatggttctgtatctaccaatctccagagcggcaacacacaagcagctacctcagatgtcaacacacaaggcgttcttccaggcatggtctggcaggacagagacgtgtacctgcagggacccatctgggcaaagattccacacacggacggacattttcacccttctcctcttatgggaggatttggaccgaagcaccctcccccgcagattctcatcaagaataccccggtacctgcgaatccttctaccaccttcagcgcggcaaagtttgcttccttcatcacacagtactccacggggcaggtcagcgtggagatcgagtgggagctgcagaaagagaacagcaaacgctggaaccccgagatccagtatacctccaactacaacaagtctgttaatgtggactttactgtggacactaatggcgtgtattcagagcctcgccccattggcacaagatacctgactcgtaatctgtaa

SEQ ID NO: 12043 - DNA, 2208 bp, Artificial Sequence
  source: /note="Description of Artificial Sequence: Synthetic polynucleotide"
atggctgccgatggttatcttccagattggctcgaggacactctctctgaaggaataagacagtggtggaagctcaaacctggcccaccaccgccaaagcccgcagagcggcataaggacgacagcaggggtcttgtgcttcctgggtacaagtacctcggacccttcaacggactcgacaaaggagagccggtcaacgaggcagacgccgcggccctcgagcacgacaaggcctacgaccggcagctcgacagcggagacaacccgtacctcaagtacaaccacgccgacgcggagtttcaggagcgccttaaagaagatacgtcttttgggggcaacctcgcaagagcagtattccaggcgaaaaagagggttcttgaacctctgggcctggttgaggagcctgttaagacggctccgggaaaaaagaggccggtagagcactctcctgcggagctagattcctcctccggaactggaaagtcgggccaacagcctgcaagaaagagattgaattttggtcagactggagacgcagactccgtacctgacccccagcctctcggacagccaccagcagccccctctggtctgggaactaatacgatggcttcaggcagtggcgcaccaatggcagacaataacgagggcgccgacggagtgggtaattcctcgggaaattggcattgcgattccacatggatgggcgacagagtcatcaccaccagcacccgcacctgggctctgcccacctacaacaaccatctgtacaagcaaatttccagccagtctggggccagcaacgacaaccactactttggctacagcaccccttgggggtattttgacttcaacagattccactgccacttctccccacgtgactggcaaagactcatcaacaacaattggggattccggcccaaaagactcaacttcaagctctttaacattcaagtcaaggaggtcacgcagaatgacggtacgacgacgattgccaataaccttaccagcacggttcaggtgtttactgactcggagtaccagctcccgtacgtcctcggctcggcgcatcaaggatgcctcccgccgttcccagcagacgtcttcatggtgccacagtatggatacctcaccctgaacaacgggagtcaggcggtaggacgctcttcattttactgcctggagtactttccttctcagatgctgcgtaccggaaacaactttaccttcagctacacctttgaggacgttccttttcacagcagctacgctcacagccagagtttggaccgtctcatgaatcctctcatcgaccagtacccgtattacttgagcagaacaaacactccaagcggaaccactacgcagtccaggcttcagttttctcaagccggagcgagtgacattcgggaccagtctaggaactggcttcctggaccctgttaccgccagcagcgagtatcaaagacagctgcggacaacaacaacagtgattactcgtggactggagctaccaagtatcacctcaatggaagagactctctggtgaatccgggcacagccatggccagccacaaggacgatgaagaaaagtattttcctcagagcggggttctcatcttcggaaaacaagactcgggaaaaactaatgtggacattgaaaaggtcatgattacagacgaagaggaaatcaggaccaccaatcccgtggctacggagcagtatggttctgtatctaccaatctccagagcggcaacacacaagcagctacctcagatgtcaacacacaaggcgttcttccaggcatggtctggcaggacagagacgtgtacctgcagggacccatctgggcaaagattccacacacggacggacattttcacccttctcctcttatgggaggatttggaccgaagcaccctcccccgcagattctcatcaagaataccccggtacctgcgaatccttctaccaccttcagcgcggcaaagtttgcttccttcatcacacagtactccacggggcaggtcagcgtggagatcgagtgggagctgcagaaagagaacagcaaacgctggaaccccgagatccagtatacctccaactacaacaagtctgttaatgtggactttactgtggacactaatggcgtgtattcagagcctcgccccattggcacaagatacctgactcgtaatctgtaa

SEQ ID NO: 12044 - DNA, 2208 bp, Artificial Sequence
  source: /note="Description of Artificial Sequence: Synthetic polynucleotide"
atggctgccgatggttatcttccagattggctcgaggacactctctctgaaggaataagacagtggtggaagctcaaacctggcccaccaccgccaaagcccgcagagcggcataaggacgacagcaggggtcttgtgcttcctgggtacaagtacctcggacccttcaacggactcgacaaaggagagccggtcaacgaggcagacgccgcggccctcgagcacgacaaggcctacgaccggcagctcgacagcggagacaacccgtacctcaagtacaaccacgccgacgcggagtttcaggagcgccttaaagaagatacgtcttttgggggcaacctcgcaagagcagtattccaggcgaaaaagagggttcttgaacctctgggcctggttgaggagcctgttaagacggctccgggaaaaaagaggccggtagagcactctcctgcggagctagattcctcctccggaactggaaagtcgggccaacagcctgcaagaaagagattgaattttggtcagactggagacgcagactccgtacctgacccccagcctctcggacagccaccagcagccccctctggtctgggaactaatacgatggcttcaggcagtggcgcaccaatggcagacaataacgagggcgccgacggagtgggtaattcctcgggaaattggcattgcgattccacatggatgggcgacagagtcatcaccaccagcacccgcacctgggctctgcccacctacaacaaccatctgtacaagcaaatttccagccagtctggggccagcaacgacaaccactactttggctacagcaccccttgggggtattttgacttcaacagattccactgccacttctccccacgtgactggcaaagactcatcaacaacaattggggattccggcccaaaagactcaacttcaagctctttaacattcaagtcaaggaggtcacgcagaatgacggtacgacgacgattgccaataaccttaccagcacggttcaggtgtttactgactcggagtaccagctcccgtacgtcctcggctcggcgcatcaaggatgcctcccgccgttcccagcagacgtcttcatggtgccacagtatggatacctcaccctgaacaacgggagtcaggcggtaggacgctcttcattttactgcctggagtactttccttctcagatgctgcgtaccggaaacaactttaccttcagctacacctttgaggacgttccttttcacagcagctacgctcacagccagagtttggaccgtctcatgaatcctctcatcgaccagtacctgtattacttgagcagaacaaacactccaagcggaaccactacgcagtccaggcttcagttttctcaagccggagcgagtgacattcgggaccagtctaggaactggcttcctggaccctgttaccgccagcagcgagtatcaaagacagctgcggacaacaacaacagtgattactcgtggactggagctaccaagtatcacctcaatggaagagactctctggtgaatccgggcacagccatggccagccacaaggacgatgaagaaaagtattttcctcagagcggggttctcatcttcggaaaacaagactcgggaaaaactaatgtggacattgaaaaggtcatgattacagacgaagaggaaatcaggaccaccaatcccgtggctacggagcagtatggttctgtatctaccaatctccagagcggcaacacacaagcagctacctcagatgtcaacacacaaggcgttcttccaggcatggtctggcaggacagagacgtgtacctgcagggacccatctgggcaaagattccacacacggacggacattttcacccttctcctcttatgggaggatttggaccgaagcaccctcccccgcagattctcatcaagaataccccggtacctgcgaatcctcctaccaccttcagcgcggcaaagtttgcttccttcatcacacagtactccacggggcaggtcagcgtggagatcgagtgggagctgcagaaagagaacagcaaacgctggaaccccgagatccagtatacctccaactacaacaagtctgttaatgtggactttactgtggacactaatggcgtgtattcagagcctcgccccattggcacaagatacctgactcgtaatctgtaa

SEQ ID NO: 12045 - DNA, 2208 bp, Artificial Sequence
  source: /note="Description of Artificial Sequence: Synthetic polynucleotide"
atggctgccgatggttatcttccagattggctcgaggacactctctctgaaggaataagacagtggtggaagctcaaacctggcccaccaccgccaaagcccgcagagcggcataaggacgacagcaggggtcttgtgcttcctgggtacaagtacctcggacccttcaacggactcgacaaaggagagccggtcaacgaggcagacgccgcggccctcgagcacgacaaggcctacgaccggcagctcgacagcggagacaacccgtacctcaagtacaaccacgccgacgcggagtttcaggagcgccttaaagaagatacgtcttttgggggcaacctcgcaagagcagtattccaggcgaaaaagagggttcttgaacctctgggcctggttgaggagcctgttaagacggctccgggaaaaaagaggccggtagagcactctcctgcggagctagattcctcctccggaactggaaagtcgggccaacagcctgcaagaaagagattgaattttggtcagactggagacgcagactccgtacctgacccccagcctctcggacagccaccagcagccccctctggtctgggaactaatacgatggcttcaggcagtggcgcaccaatggcagacaataacgagggcgccgacggagtgggtaattcctcgggaaattggcattgcgattccacatggatgggcgacagagtcatcaccaccagcacccgcacctgggctctgcccacctacaacaaccatctgtacaagcaaatttccagccagtctggggccagcaacgacaaccactactttggctacagcaccccttgggggtattttgacttcaacagattccactgccacttctccccacgtgactggcaaagactcatcaacaacaattggggattccggcccaaaagactcaacttcaagctctttaacattcaagtcaaggaggtcacgcagaatgacggtacgacgacgattgccaataaccttaccagcacggttcaggtgtttactgactcggagtaccagctcccgtacgtcctcggctcggcgcatcaaggatgcctcccgccgttcccagcagacgtcttcatggtgccacagtatggatacctcaccctgaacaacgggagtcaggcggtaggacgctcttcattttactgcctggagtactttccttctcagatgctgcgtaccggaaacaactttaccttcagctacacctttgaggacgttccttttcacagcagctacgctcacagccagagtttggaccgtctcatgaatcctctcatcgaccagtacctgtattacttgagcagaacaaacactccaagcggaaccactacgcagtccaggcttcagttttctcaagccggagcgagtgacattcgggaccagtctaggaactggcttcctggaccctgttaccgccagcagcgagtaccaaagacagctgcggacaacaacaacagtgattactcgtggactggagctaccaagtatcacctcaatggaagagactctctggtgaatccgggcacagccatggccagccacaaggacgatgaagaaaagtattttcctcagagcggggttctcatcttcggaaaacaagactcgggaaaaactaatgtggacattgaaaaggtcatgattacagacgaagaggaaatcaggaccaccaatcccgtggctacggagcagtatggttctgtatctaccaatctccagagcggcaacacacaagcagctacctcagatgtcaacacacaaggcgttcttccaggcatggtctggcaggacagagacgtgtacctgcagggacccatctgggcaaagattccacacacggacggacattttcacccttctcctcttatgggaggatttggaccgaagcaccctcccccgcagattctcatcaagaataccccggtacctgcgaatccttctaccaccttcagcgcggcaaagtttgcttccttcatcacacagtactccacggggcaggtcagcgtggagatcgagtgggagctgcagaaagagaacagcaaacgctggaaccccgagatccagtatacctccaactacaacaagtctgttaatgtggactttactgtggacactaatggcgtgtattcagagcctcgccccattggcacaagatacctgactcgtaatctgtaa

SEQ ID NO: 12046 - DNA, 2208 bp, Artificial Sequence
  source: /note="Description of Artificial Sequence: Synthetic polynucleotide"
atggctgccgatggttatcttccagattggctcgaggacactctctctgaaggaataagacagtggtggaagctcaaacctggcccaccaccgccaaagcccgcagagcggcataaggacgacagcaggggtcttgtgcttcctgggtacaagtacctcggacccttcaacggactcgacaaaggagagccggtcaacgaggcagacgccgcggccctcgagcacgacaaggcctacgaccggcagctcgacagcggagacaacccgtacctcaagtacaaccacgccgacgcggagtttcaggagcgccttaaagaagatacgtcttttgggggcaacctcgcaagagcagtattccaggcgaaaaagagggttcttgaacctctgggcctggttgaggagcctgttaagacggctccgggaaaaaagaggccggtagagcactctcctgcggagctagattcctcctccggaactggaaagtcgggccaacagcctgcaagaaagagattgaattttggtcagactggagacgcagactccgtacctgacccccagcctctcggacagccaccagcagccccctctggtctgggaactaatacgatggcttcaggcagtggcgcaccaatggcagacaataacgagggcgccgacggagtgggtaattcctcgggaaattggcattgcgattccacatggatgggcgacagagtcatcaccaccagcacccgcacctgggctctgcccacctacaacaaccatctgtacaagcaaatttccagccagtctggggccagcaacgacaaccactactttggctacagcaccccttgggggtattttgacttcaacagattccactgccacttctccccacgtgactggcaaagactcatcaacaacaattggggattccggcccaaaagactcaacttcaagctctttaacattcaagtcaaggaggtcacgcagaatgacggtacgacgacgattgccaataaccttaccagcacggttcaggtgtttactgactcggagtaccagctcccgtacgtcctcggctcggcgcatcaaggatgcctcccgccgttcccagcagacgtcttcatggtgccacagtatggatacctcaccctgaacaacgggagtcaggcggtaggacgctcttcattttactgcctggagtactttccttctcagatgctgcgtaccggaaacaactttaccttcagctacacctttgaggacgttccttttcacagcagctacgctcacagccagagtttggaccgtctcatgaatcctctcatcgaccagtacctgtattacttgagcagaacaaacactccaagcggaaccactacgcagtccaggcttcagttttctcaagccggagcgagtgacattcgggaccagtctaggaactggcttcctggaccctgttaccgccagcagcgagtatcaaagacagctgcggacaacaacaacagtgattactcgtggactggagctaccaagtatcacctcaatggaagagactctctggtgaatccgggcacagccatggccagccacaaggacgatgaagaaaagtattttcctcagagcggggttctcatcttcggaaaacaagactcgggaaaaactaatgtggacattgaaaaggtcatgattacagacgaagaggaaatcaggaccaccaatcccgtggctacggagcagtatggttctgtatctaccaatctccagagcggcaacacacaagcagctacctcagatgtcaacacacaaggcgttcttccaggcatggtctggcaggacagagacgtgtacctgcagggacccatctgggcaaagattccacacacggacggacattttcacccttctcctcttatgggaggatttggaccgaagcaccctcccccgcagattctcatcaagaataccccggtacctgcgaatccttctaccaccttcagcgcggcaaagtttgcttccttcatcacacagtactccacggggcaggtcagcgtggagatcgagtgggagctgcagaaagagaacagcaaacgctggaaccccgagatccagtatacctccaactacaacaagtctgttaatgtggactttactgtggacactaatggcgtgtattcagagcctcgccccattggcacaagatacctgactcgtaatctgtaa

SEQ ID NO: 12047 - DNA, 2208 bp, Artificial Sequence
  source: /note="Description of Artificial Sequence: Synthetic polynucleotide"
atggctgccgatggttatcttccagattggctcgaggacactctctctgaaggaataagacagtggtggaagctcaaacctggcccaccaccgccaaagcccgcagagcggcataaggacgacagcaggggtcttgtgcttcctgggtacaagtacctcggacccttcaacggactcgacaaaggagagccggtcaacgaggcagacgccgcggccctcgagcacgacaaggcctacgaccggcagctcgacagcggagacaacccgtacctcaagtacaaccacgccgacgcggagtttcaggagcgccttaaagaagatacgccttttgggggcaacctcgcaagagcagtattccaggcgaaaaagagggttcttgaacctctgggcctggttgaggagcctgttaagacggctccgggaaaaaagaggccggtagagcactctcctgcggagctagattcctcctccggaactggaaagtcgggccaacagcctgcaagaaagagattgaattttggtcagactggagacgcagactccgtacctgacccccagcctctcggacagccaccagcagccccctctggtctgggaactaatacgatggcttcaggcagtggcgcaccaatggcagacaataacgagggcgccgacggagtgggtaattcctcgggaaattggcattgcgattccacatggatgggcgacagagtcatcaccaccagcacccgcacctgggctctgcccacctacaacaaccatctgtacaagcaaatttccagccagtctggggccagcaacgacaaccactactttggctacagcaccccttgggggtattttgacttcaacagattccactgccacttctccccacgtgactggcaaagactcatcaacaacaattggggattccggcccaaaagactcaacttcaagctctttaacattcaagtcaaggaggtcacgcagaatgacggtacgacgacgattgccaataaccttaccagcacggttcaggtgtttactgactcggagtaccagctcccgtacgtcctcggctcggcgcatcaaggatgcctcccgccgttcccagcagacgtcttcatggtgccacagtatggatacctcaccctgaacaacgggagtcaggcggtaggacgctcttcattttactgcctggagtactttccttctcagatgctgcgtaccggaaacaactttaccttcagctacacctttgaggacgttccttttcacagcagctacgctcacagccagagtttggaccgtctcatgaatcctctcatcgaccagtacctgtattacttgagcagaacaaacactccaagcggaaccactacgcagtccaggcttcagttttctcaagccggagcgagtgacattcgggaccagtctaggaactggcttcctggaccctgttaccgccagcagcgagtatcaaagacagctgcggacaacaacaacagtgattactcgtggactggagctaccaagtatcacctcaatggaagagactctctggtgaatccgggcacagccatggccagccacaaggacgatgaagaaaagtattttcctcagagcggggttctcatcttcggaaaacaagactcgggaaaaactaatgtggacattgaaaaggtcatgattacagacgaagaggaaatcaggaccaccaatcccgtggctacggagcagtatggttctgtatctaccaatctccagagcggcaacacacaagcagctacctcagatgtcaacacacaaggcgttcttccaggcatggtctggcaggacagagacgtgtacctgcagggacccatctgggcaaagattccacacacggacggacattttcacccttctcctcttatgggaggatttggaccgaagcaccctcccccgcagattctcatcaagaataccccggtacctgcgaatccttctaccaccttcagcgcggcaaagtttgcttccttcatcacacagtactccacggggcaggtcagcgtggagatcgagtgggagctgcagaaagagaacagcaaacgctggaaccccgagatccagtatacctccaactacaacaagtctgttaatgtggactttactgtggacactaatggcgtgtattcagagcctcgccccattggcacaagatacctgactcgtaatctgtaa

SEQ ID NO: 12048 - DNA, 2208 bp, Artificial Sequence
  source: /note="Description of Artificial Sequence: Synthetic polynucleotide"
atggctgccgatggttatcttccagattggctcgaggacactctctctgaaggaataagacagtggtggaagctcaaacctggcccaccaccgccaaagcccgcagagcggcataaggacgacagcaggggtcttgtgcttcctgggtacaagtacctcggacccttcaacggactcgacaaaggagagccggtcaacgaggcagacgccgcggccctcgagcacgacaaggcctacgaccggcagctcgacagcggagacaacccgtacctcaagtacaaccacgccgacgcggagtttcaggagcgccttaaagaagatacgtcttttgggggcaacctcgcaagagcagtattccaggcgaaaaagagggttcttgaacctctgggcctggttgaggagcctgttaagacggctccgggaaaaaagaggccggtagagcactctcctgcggagctagattcctcctccggaactggaaagtcgggccaacagcctgcaagaaagagattgaattttggtcagactggagacgcagactccgtacctgacccccagcctctcggacagccaccagcagccccctctggtctgggaactaatacgatggcttcaggcagtggcgcaccaatggcagacaataacgagggcgccgacggagtgggtaattcctcgggaaattggcattgcgattccacatggatgggcgacagagtcatcaccaccagcacccgcacctgggctctgcccacctacaacaaccatctgtacaagcaaatttccagccagtctggggccagcaacgacaaccactactttggctacagcaccccttgggggtattttgacttcaacagattccactgccacttctccccacgtgactggcaaagactcatcaacaacaattggggattccggcccaaaagactcaactccaagctctttaacattcaagtcaaggaggtcacgcagaatgacggtacgacgacgattgccaataaccttaccagcacggttcaggtgtttactgactcggagtaccagctcccgtacgtcctcggctcggcgcatcaaggatgcctcccgccgttcccagcagacgtcttcatggtgccacagtatggatacctcaccctgaacaacgggagtcaggcggtaggacgctcttcattttactgcctggagtactttccttctcagatgctgcgtaccggaaacaactttaccttcagctacacctttgaggacgttccttttcacagcagctacgctcacagccagagtttggaccgtctcatgaatcctctcatcgaccagtacctgtattacttgagcagaacaaacactccaagcggaaccactacgcagtccaggcttcagttttctcaagccggagcgagtgacattcgggaccagtctaggaactggcttcctggaccctgttaccgccagcagcgagtatcaaagacagctgcggacaacaacaacagtgattactcgtggactggagctaccaagtatcacctcaatggaagagactctctggtgaatccgggcacagccatggccagccacaaggacgatgaagaaaagtattttcctcagagcggggttctcatcttcggaaaacaagactcgggaaaaactaatgtggacattgaaaaggtcatgattacagacgaagaggaaatcaggaccaccaatcccgtggctacggagcagtatggttctgtatctaccaatctccagagcggcaacacacaagcagctacctcagatgtcaacacacaaggcgttcttccaggcatggtctggcaggacagagacgtgtacctgcagggacccatctgggcaaagattccacacacggacggacattttcacccttctcctcttatgggaggatttggaccgaagcaccctcccccgcagattctcatcaagaataccccggtacctgcgaatccttctaccaccttcagcgcggcaaagtttgcttccttcatcacacagtactccacggggcaggtcagcgtggagatcgagtgggagctgcagaaagagaacagcaaacgctggaaccccgagatccagtatacctccaactacaacaagtctgttaatgtggactttactgtggacactaatggcgtgtattcagagcctcgccccattggcacaagatacctgactcgtaatctgtaa

SEQ ID NO: 12049 - DNA, 2208 bp, Artificial Sequence
  source: /note="Description of Artificial Sequence: Synthetic polynucleotide"
atggctgccgatggttatcttccagattggctcgaggacactctctctgaaggaataagacagtggtggaagctcaaacctggcccaccaccgccaaagcccgcagagcggcataaggacgacagcaggggtcttgtgcttcctgggtacaagtacctcggacccttcaacggactcgacaaaggagagccggtcaacgaggcagacgccgcggccctcgagcacgacaaggcctacgaccggcagctcgacagcggagacaacccgtacctcaagtacaaccacgccgacgcggagtttcaggagcgccttaaagaagatacgtcttttgggggcaacctcgcaagagcagtattccaggcgaaaaagagggttcttgaacctctgggcctggttgaggagcctgttaagacggctccgggaaaaaagaggccggtagagcactctcctgcggagctagattcctcctccggaactggaaagtcgggccaacagcctgcaagaaagagattgaattttggtcagactggagacgcagactccgtacctgacccccagcctctcggacagccaccagcagccccctctggtctgggaactaatacgatggcttcaggcagtggcgcaccaatggcagacaataacgagggcgccgacggagtgggtaattcctcgggaaattggcattgcgattccacatggatgggcgacagagtcatcaccaccagcacccgcacctgggctctgcccacctacaacaaccatctgtacaagcaaatttccagccagtctggggccagcaacgacaaccactactttggctacagcaccccttgggggtattttgacttcaacagattccactgccacttctccccacgtgactggcaaagactcatcaacaacaattggggattccggcccaaaagactcaacttcaagctctttaacattcaagtcaaggaggtcacgcagaatgacggtacgacgacgattgccaataaccttaccagcacggttcaggtgtttactgactcggagtaccagctcccgtacgtcctcggctcggcgcatcaaggatgcctcccgccgttcccagcagacgtcttcatggtgccacagtatggatacctcaccctgaacaacgggagtcaggcggtaggacgctcttcattttactgcctggagtactttccttctcagatgctgcgtaccggaaacaactttaccttcagctacacctttgaggacgttccttttcacagcagctacgctcacagccagggtttggaccgtctcatgaatcctctcatcgaccagtacctgtattacttgagcagaacaaacactccaagcggaaccactacgcagtccaggcttcagttttctcaagccggagcgagtgacattcgggaccagtctaggaactggcttcctggaccctgttaccgccagcagcgagtatcaaagacagctgcggacaacaacaacagtgattactcgtggactggagctaccaagtatcacctcaatggaagagactctctggtgaatccgggcacagccatggccagccacaaggacgatgaagaaaagtattttcctcagagcggggttctcatcttcggaaaacaagactcgggaaaaactaatgtggacattgaaaaggtcatgattacagacgaagaggaaatcaggaccaccaatcccgtggctacggagcagtatggttctgtatctaccaatctccagagcggcaacacacaagcagctacctcagatgtcaacacacaaggcgttcttccaggcatggtctggcaggacagagacgtgtacctgcagggacccatctgggcaaagattccacacacggacggacattttcacccttctcctcttatgggaggatttggaccgaagcaccctcccccgcagattctcatcaagaataccccggtacctgcgaatccttctaccaccttcagcgcggcaaagtttgcttccttcatcacacagtactccacggggcaggtcagcgtggagatcgagtgggagctgcagaaagagaacagcaaacgctggaaccccgagatccagtatacctccaactacaacaagtctgttaatgtggactttactgtggacactaatggcgtgtattcagagcctcgccccattggcacaagatacctgactcgtaatctgtaa

SEQ ID NO: 12050 - DNA, 2208 bp, Artificial Sequence
  source: /note="Description of Artificial Sequence: Synthetic polynucleotide"
atggctgccgatggttatcttccagattggctcgaggacactctctctgaaggaataagacagtggtggaagctcaaacctggcccaccaccgccaaagcccgcagagcggcataaggacgacagcaggggtcttgtgcttcctgggtacaagtacctcggacccttcaacggactcgacaaaggagagccggtcaacgaggcagacgccgcggccctcgagcacgacaaggcctacgaccggcagctcgacagcggagacaacccgtacctcaagtacaaccacgccgacgcggagtttcaggagcgccttaaagaagatacgtcttttgggggcaacctcgcaagagcagtattccaggcgaaaaagagggttcttgaacctctgggcctggttgaggagcctgttaagacggctccgggaaaaaagaggccggtagagcactctcctgcggagctagattcctcctccggaactggaaagtcgggccaacagcctgcaagaaagagattgaattttggtcagactggagacgcagactccgtacctgacccccagcctctcggacagccaccagcagccccctctggtctgggaactaatacgatggcttcaggcagtggcgcaccaatggcagacaataacgagggcgccgacggagtgggtaattcctcgggaaattggcattgcgattccacatggatgggcgacagagtcatcaccaccagcacccgcacctgggctctgcccacctacaacaaccatctgtacaagcaaatttccagccagtctggggccagcaacgacaaccactactttggctacagcaccccttgggggtattttgacttcaacagattccactgccacttctccccacgtgactggcaaagactcatcaacaacaattggggattccggcccaaaagactcaacttcaagctctttaacattcaagtcaaggaggtcacgcagaatgacggtacgacgacgattgccaataaccttaccagcacggttcaggtgtttactgactcggagtaccagctcccgtacgtcctcggctcggcgcatcaaggatgcctcccgccgctcccagcagacgtcttcatggtgccacagtatggatacctcaccctgaacaacgggagtcaggcggtaggacgctcttcattttactgcctggagtactttccttctcagatgctgcgtaccggaaacaactttaccttcagctacacctttgaggacgttccttttcacagcagctacgctcacagccagagtttggaccgtctcatgaatcctctcatcgaccagtacctgtattacttgagcagaacaaacactccaagcggaaccactacgcagtccaggcttcagttttctcaagccggagcgagtgacattcgggaccagtctaggaactggcttcctggaccctgttaccgccagcagcgagtatcaaagacagctgcggacaacaacaacagtgattactcgtggactggagctaccaagtatcacctcaatggaagagactctctggtgaatccgggcacagccatggccagccacaaggacgatgaagaaaagtattttcctcagagcggggttctcatcttcggaaaacaagactcgggaaaaactaatgtggacattgaaaaggtcatgattacagacgaagaggaaatcaggaccaccaatcccgtggctacggagcagtatggttctgtatctaccaatctccagagcggcaacacacaagcagctacctcagatgtcaacacacaaggcgttcttccaggcatggtctggcaggacagagacgtgtacctgcagggacccatctgggcaaagattccacacacggacggacattttcacccttctcctcttatgggaggatttggaccgaagcaccctcccccgcagattctcatcaagaataccccggtacctgcgaatccttctaccaccttcagcgcggcaaagtttgcttccttcatcacacagtactccacggggcaggtcagcgtggagatcgagtgggagctgcagaaagagaacagcaaacgctggaaccccgagatccagtatacctccaactacaacaagtctgttaatgtggactttactgtggacactaatggcgtgtattcagagcctcgccccattggcacaagatacctgactcgtaatctgtaa

SEQ ID NO: 12051 - DNA, 2208 bp, Artificial Sequence
  source: /note="Description of Artificial Sequence: Synthetic polynucleotide"
atggctgccgatggttatcttccagattggctcgaggacactctctctgaaggaataagacagtggtggaagctcaaacctggcccaccaccgccaaagcccgcagagcggcataaggacgacagcaggggtcttgtgcttcctgggtacaagtacctcggacccttcaacggactcgacaaaggagagccggtcaacgaggcagacgccgcggccctcgagcacgacaaggcctacgaccggcagctcgacagcggagacaacccgtacctcaagtacaaccacgccgacgcggagtttcaggagcgccttaaagaagatacgtcttttgggggcaacctcgcaagagcagtattccaggcgaaaaagagggttcttgaacctctgggcctggttgaggagcctgttaagacggctccgggaaaaaagaggccggtagagcactctcctgcggagctagattcctcctccggaactggaaagtcgggccaacagcctgcaagaaagagattgaattttggtcagactggagacgcagactccgtacctgacccccagcctctcggacagccaccagcagccccctctggtctgggaactaatacgatggcttcaggcagtggcgcaccaatggcagacaataacgagggcgccgacggagtgggtaattcctcgggaaattggcattgcgattccacatggatgggcgacagagtcatcaccaccagcacccgcacctgggctctgcccacctacaacaaccatctgtacaagcaaatttccagccagtctggggccagcaacgacaaccactactttggctacagcaccccttgggggtattttgacttcaacagattccactgccacttctccccacgtgactggcaaagacccatcaacaacaattggggattccggcccaaaagactcaacttcaagctctttaacattcaagtcaaggaggtcacgcagaatgacggtacgacgacgattgccaataaccttaccagcacggttcaggtgtttactgactcggagtaccagctcccgtacgtcctcggctcggcgcatcaaggatgcctcccgccgttcccagcagacgtcttcatggtgccacagtatggatacctcaccctgaacaacgggagtcaggcggtaggacgctcttcattttactgcctggagtactttccttctcagatgctgcgtaccggaaacaactttaccttcagctacacctttgaggacgttccttttcacagcagctacgctcacagccagagtttggaccgtctcatgaatcctctcatcgaccagtacctgtattacttgagcagaacaaacactccaagcggaaccactacgcagtccaggcttcagttttctcaagccggagcgagtgacattcgggaccagtctaggaactggcttcctggaccctgttaccgccagcagcgagtatcaaagacagctgcggacaacaacaacagtgattactcgtggactggagctaccaagtatcacctcaatggaagagactctctggtgaatccgggcacagccatggccagccacaaggacgatgaagaaaagtattttcctcagagcggggttctcatcttcggaaaacaagactcgggaaaaactaatgtggacattgaaaaggtcatgattacagacgaagaggaaatcaggaccaccaatcccgtggctacggagcagtatggttctgtatctaccaatctccagagcggcaacacacaagcagctacctcagatgtcaacacacaaggcgttcttccaggcatggtctggcaggacagagacgtgtacctgcagggacccatctgggcaaagattccacacacggacggacattttcacccttctcctcttatgggaggatttggaccgaagcaccctcccccgcagattctcatcaagaataccccggtacctgcgaatccttctaccaccttcagcgcggcaaagtttgcttccttcatcacacagtactccacggggcaggtcagcgtggagatcgagtgggagctgcagaaagagaacagcaaacgctggaaccccgagatccagtatacctccaactacaacaagtctgttaatgtggactttactgtggacactaatggcgtgtattcagagcctcgccccattggcacaagatacctgactcgtaatctgtaa

SEQ ID NO: 12052 - DNA, 2208 bp, Artificial Sequence
  source: /note="Description of Artificial Sequence: Synthetic polynucleotide"
atggctgccgatggttatcttccagattggctcgaggacactctctctgaaggaataagacagtggtggaagctcaaacctggcccaccaccgccaaagcccgcagagcggcataaggacgacagcaggggtcttgtgcttcctgggtacaagtacctcggacccttcaacggactcgacaaaggagagccggtcaacgaggcagacgccgcggccctcgagcacgacgaggcctacgaccggcagctcgacagcggagacaacccgtacctcaagtacaaccacgccgacgcggagtttcaggagcgccttaaagaagatacgtcttttgggggcaacctcgcaagagcagtattccaggcgaaaaagagggttcttgaacctctgggcctggttgaggagcctgttaagacggctccgggaaaaaagaggccggtagagcactctcctgcggagctagattcctcctccggaactggaaagtcgggccaacagcctgcaagaaagagattgaattttggtcagactggagacgcagactccgtacctgacccccagcctctcggacagccaccagcagccccctctggtctgggaactaatacgatggcttcaggcagtggcgcaccaatggcagacaataacgagggcgccgacggagtgggtaattcctcgggaaattggcattgcgattccacatggatgggcgacagagtcatcaccaccagcacccgcacctgggctctgcccacctacaacaaccatctgtacaagcaaatttccagccagtctggggccagcaacgacaaccactactttggctacagcaccccttgggggtattttgacttcaacagattccactgccacttctccccacgtgactggcaaagactcatcaacaacaattggggattccggcccaaaagactcaacttcaagctctttaacattcaagtcaaggaggtcacgcagaatgacggtacgacgacgattgtcaataaccttaccagcacggttcaggtgtttactgactcggagtaccagctcccgtacgtcctcggctcggcgcatcaaggatgcctcccgccgttcccagcagacgtcttcatggtgccacagtatggatacctcaccctgaacaacgggagtcaggcggtaggacgctcttcattttactgcctggagtactttccttctcagatgctgcgtaccggaaacaactttaccttcagctacacctttgaggacgttccttttcacagcagctacgctcacagccagagtttggaccgtctcatgaatcctctcatcgaccagtacctgtattacttgagcagaacaaacactccaagcggaaccactacgcagtccaggcttcagttttctcaagccggagcgagtgacattcgggaccagtctaggaactggcttcctggaccctgttaccgccagcagcgagtatcaaagacagctgcggacaacaacaacagtgattactcgtggactggagctaccaagtatcacctcaatggaagagactctctggtgaatccgggcacagccatggccagccacaaggacgatgaagaaaagtattttcctcagagcggggttctcatcttcggaaaacaagactcgggaaaaactaatgtggacattgaaaaggtcatgattacagacgaagaggaaatcaggaccaccaatcccgtggctacggagcagtatggttctgtatctaccaatctccagagcggcaacacacaagcagctacctcagatgtcaacacacaaggcgttcttccaggcatggtctggcaggacagagacgtgtacctgcagggacccatctgggcaaagattccacacacggacggacattttcacccttctcctcttatgggaggatttggaccgaagcaccctcccccgcagattctcatcaagaataccccggtacctgcgaatccttctaccaccttcagcgcggcaaagtttgcttacttcatcacacagtactccacggggcaggtcagcgtggagatcgagtgggagctgcagaaagggaacagcaaacgctggaaccccgagatccagtatacctccaactacaacaagtctgttaatgtggactttactgtggacactaatggcgtgtattcagagcctcgccccattggcacaagatacctgactcgtaatctgtaa

SEQ ID NO: 12053 - DNA, 2208 bp, Artificial Sequence
  source: /note="Description of Artificial Sequence: Synthetic polynucleotide"
atggctgccgatggttatcttccagattggctcgaggacactctctctgaaggaataagacagtggtggaagctcaaacctggcccaccaccgccaaagcccgcagagcggcataaggacgacagcaggggtcttgtgcttcctgggtacaagtacctcggacccttcaacggactcgacaaaggagagccggtcaacgaggcagacgccgcggccctcgagcacgacaaggcctacgaccggcagctcgacagcggagacaacccgtacctcaagtacaaccacgccgacgcggagtttcaggagcgccttaaagaagatacgtcttttgggggcaacctcgcaagagcagtattccaggcgaaaaagagggttcttgaacctctgggcctggttgaggagcctgttaagacggctccgggaaaaaagaggccggtagagcactctcctgcggagctagattcctcctccggaactggaaagtcgggccaacagcctgcaagaaagagattgaattttggtcagactggagacgcagactccgtacctgacccccagcctctcggacagccaccagcagccccctctggtctgggaactaatacgatggcttcaggcagtggcgcaccaatggcagacaataacgagggcgccgacggagtgggtaattcctcgggaaattggcattgcgattccacatggatgggcgacagagtcatcaccaccagcacccgcacctgggctctgcccacctacaacaaccatctgtacaagcaaatttccagccagtctggggccagcaacgacaaccactactttggctacagcaccccttgggggtattttgacttcaacagattccactgccacttctccccacgtgactggcaaagactcatcaacaacaattggggattccggcccaaaagactcaacttcaagctctttaacattcaagtcaaggaggtcacgcagaatgacggtacgacgacgattgccaataaccttaccagcacggttcaggtgtttactgactcggagtaccagctcccgtacgtcctcggctcggcgcatcaaggatgcctcccgccgttcccagcagacgtcttcatggtgccacagtatggatacctcaccctgaacaacgggagtcaggcggtaggacgctcttcattttactgcctggagtactttccttctcagatgctgcgtaccggaaacaactgtaccttcagctacacctttgaggacgttccttttcacagcagctacgctcacagccagagtttggaccgtctcatgaatcctctcatcgaccagtacctgtattacttgagcagaacaaacactccaagcggaaccactacgcagtccaggcttcagttttctcaagccggagcgagtgacattcgggaccagtctaggaactggcttcctggaccctgttaccgccagcagcgagtatcaaagacagctgcggacaacaacaacagtgattactcgtggactggagctaccaagtatcacctcaatggaagagactctctggtgaatccgggcacagccatggccagccacaaggacgatgaagaaaagtattttcctcagagcggggttctcatcttcggaaaacaagactcgggaaaaactaatgtggacattgaaaaggtcatgattacagacgaagaggaaatcaggaccaccaatcccgtggctacggagcagtatggttctgtatctaccaatctccagagcggcaacacacaagcagctacctcagatgtcaacacacaaggcgttcttccaggcatggtctggcaggacagagacgtgtacctgcagggacccatctgggcaaagattccacacacggacggacattttcacccttctcctcttatgggaggatttggaccgaagcaccctcccccgcagattctcatcaagaataccccggtacctgcgaatccttctaccaccttcagcgcggcaaagtttgcttccttcatcacacagtactccacggggcaggtcagcgtggagatcgagtgggagctgcagaaagagaacagcaaacgctggaaccccgagatccagtatacctccaactacaacaagtctgttaatgtggactttactgtggacactaatggcgtgtattcagagcctcgccccattggcacaagatacctgactcgtaatctgtaa

SEQ ID NO: 12054 - DNA, 2208 bp, Artificial Sequence
  source: /note="Description of Artificial Sequence: Synthetic polynucleotide"
atggctgccgatggttatcttccagattggctcgaggacactctctctgaaggaataagacagtggtggaagctcaaacctggcccaccaccgccaaagcccgcagagcggcataaggacgacagcaggggtcttgtgcttcctgggtacaagtacctcggacccttcaacggactcgacaaaggagagccggtcaacgaggcagacgccgcggccctcgagcacgacaaggcctacgaccggcagctcgacagcggagacaacccgtacctcaagtacaaccacgccgacgcggagtttcaggagcgccttaaagaagatacgtcttttgggggcaacctcgcaagagcagtattccaggcgaaaaagagggttcttgaacctctgggcctggttgaggagcctgttaagacggctccgggaaaaaagaggccggtagagcactctcctgcggagctagattcctcctccggaactggaaagtcgggccaacagcctgcaagaaagagattgaattttggtcagactggagacgcagactccgtacctgacccccagcctctcggacagccaccagcagccccctctggtctgggaactaatacgatggcttcaggcagtggcgcaccaatggcagacaataacgagggcgccgacggagtgggtaattcctcgggaaattggcattgcgattccacatggatgggcgacagagtcatcaccaccagcacccgcacctgggctctgcccacctacaacaaccatctgtacaagcaaatttccagccagtctggggccagcaacgacaaccactactttggctacagcaccccttgggggtattttgacttcaacagattccactgccacttctccccacgtgactggcaaagactcatcaacaacaattggggattccggcccaaaagacccaacttcaagctctttaacattcaagtcaaggaggtcacgcagaatgacggtacgacgacgattgccaataaccttaccagcacggttcaggtgtttactgactcggagtaccagctcccgtacgtcctcggctcggcgcatcaaggatgcctcccgccgttcccagcagacgtcttcatggtgccacagtatggatacctcaccctgaacaacgggagtcaggcggtaggacgctcttcattttactgcctggagtactttccttctcagatgctgcgtaccggaaacaactttaccttcagctacacctttgaggacgttccttttcacagcagctacgctcacagccagagtttggaccgtctcatgaatcctctcatcgaccagtacctgtattacttgagcagaacaaacactccaagcggaaccactacgcagtccaggcttcagttttctcaagccggagcgagtgacattcgggaccagtctaggaactggcttcctggaccctgttaccgccagcagcgagtatcaaagacagctgcggacaacaacaacagtgattactcgtggactggagctaccaagtatcacctcaatggaagagactctctggtgaatccgggcacagccatggccagccacaaggacgatgaagaaaagtattttcctcagagcggggttctcatcttcggaaaacaagactcgggaaaaactaatgtggacattgaaaaggtcatgattacagacgaagaggaaatcaggaccaccaatcccgtggctacggagcagtatggttctgtatctaccaatctccagagcggcaacacacaagcagctacctcagatgtcaacacacaaggcgttcttccaggcatggtctggcaggacagagacgtgtacctgcagggacccatctgggcaaagattccacacacggacggacattttcacccttctcctcttatgggaggatttggaccgaagcaccctcccccgcagattctcatcaagaataccccggtacctgcgaatccttctaccaccttcagcgcggcaaagtttgcttccttcatcacacagtactccacggggcaggtcagcgtggagatcgagtgggagctgcagaaagagaacagcaaacgctggaaccccgagatccagtatacctccaactacaacaagtctgttaatgtggactttactgtggacactaatggcgtgtattcagagcctcgccccattggcacaagatacctgactcgtaatctgtaa

SEQ ID NO: 12055 - DNA, 2208 bp, Artificial Sequence
  source: /note="Description of Artificial Sequence: Synthetic polynucleotide"
atggctgccgatggttatcttccagattggctcgaggacactctctctgaaggaataagacagtggtggaagctcaaacctggcccaccaccgccaaagcccgcagagcggcataaggacgacagcaggggtcttgtgcttcctgggtacaagtacctcggacccttcaacggactcgacaaaggagagccggtcaacgaggcagacgccgcggccctcgagcacgacaaggcctacgaccggcagctcgacagcggagacaacccgtacctcaagtacaaccacgccgacgcggagtttcaggagcgccttaaagaagatacgtcttttgggggcaacctcgcaagagcagtattccaggcgaaaaagagggttcttgaacctctgggcctggttgaggagcctgttaagacggctccgggaaaaaagaggccggtagagcactctcctgcggagctagattcctcctccggaactggaaagtcgggccaacagcctgcaagaaagagattgaattttggtcagactggagacgcagactccgtacctgacccccagcctctcggacagccaccagcagccccctctggtctgggaactaatacgatggcttcaggcagtggcgcaccaatggcaggcaataacgagggcgccgacggagtgggtaattcctcgggaaattggcattgcgattccacatggatgggcgacagagtcatcaccaccagcacccgcacctgggctctgcccacctacaacaaccatctgtacaagcaaatttccagccagtctggggccagcaacgacaaccactactttggctacagcaccccttgggggtattttgacttcaacagattccactgccacttctccccacgtgactggcaaagactcatcaacaacaattggggattccggcccaaaagactcaacttcaagctctttaacattcaagtcaaggaggtcacgcagaatgacggtacgacgacgattgccaataaccttaccagcacggttcaggtgtttactgactcggagtaccagctcccgtacgtcctcggctcggcgcatcaaggatgcctcccgccgttcccagcagacgtcttcatggtgccacagtatggatacctcaccctgaacaacgggagtcaggcggtaggacgctcttcattttactgcctggagtactttccttctcagatgctgcgtaccggaaacaactttaccttcagctacacctttgaggacgttccttttcacagcagctacgctcacagccagagtttggaccgtctcatgaatcctctcatcgaccagtacctgtattacttgagcagaacaaacactccaagcggaaccactacgcagtccaggcttcagttttctcaagccggagcgagtgacattcgggaccagtctaggaactggcttcctggaccctgttaccgccagcagcgagtatcaaagacagctgcggacaacaacaacagtgattactcgtggactggagctaccaagtatcacctcaatggaagagactctctggtgaatccgggcacagccatggccagccacaaggacgatgaagaaaagtattttcctcagagcggggttctcatcttcggaaaacaagactcgggaaaaactaatgtggacattgaaaaggtcatgattacagacgaagaggaaatcaggaccaccaatcccgtggctacggagcagtatggttctgtatctaccaatctccagagcggcaacacacaagcagctacctcagatgtcaacacacaaggcgttcttccaggcatggtctggcaggacagagacgtgtacctgcagggacccatctgggcaaagattccacacacggacggacattttcacccttctcctcttatgggaggatttggaccgaagcaccctcccccgcagattctcatcaagaataccccggtacctgcgaatccttctaccaccttcagcgcggcaaagtttgcttccttcatcacacagtactccacggggcaggtcagcgtggagatcgagtgggagctgcagaaagagaacagcaaacgctggaaccccgagatccagtatacctccaactacaacaagtctgttaatgtggactttactgtggacactaatggcgtgtattcagagcctcgccccattggcacaagatacctgactcgtaatctgtaa

SEQ ID NO: 12056 - DNA, 2208 bp, Artificial Sequence
  source: /note="Description of Artificial Sequence: Synthetic polynucleotide"
atggctgccgatggttatcttccagattggctcgaggacactctctctgaaggaataagacagtggtggaagctcaaacctggcccaccaccgccaaagcccgcagagcggcataaggacgacagcaggggtcttgtgcttcctgggtacaagtacctcggacccttcaacggactcgacaaaggagagccggtcaacgaggcagacgccgcggccctcgagcacgacaaggcctacgaccggcagctcgacagcggagacaacccgtacctcaagtacaaccacgccgacgcggagtttcaggagcgccttaaagaagatacgccttttgggggcaacctcgcaagagcagtattccaggcgaaaaagagggttcttgaacctctgggcctggttgaggagcctgttaagacggctccgggaaaaaagaggccggtagagcactctcctgcggagctagattcctcctccggaactggaaagtcgggccaacagcctgcaagaaagagattgaattttggtcagactggagacgcagactccgtacctgacccccagcctctcggacagccaccagcagccccctctggtctgggaactaatacgatggcttcaggcagtggcgcaccaatggcagacaataacgagggcgccgacggagtgggtaattcctcgggaaattggcattgcgattccacatggatgggcgacagagtcatcaccaccagcacccgcacctgggctctgcccacctacaacaaccatctgtacaagcaaatttccagccagtctggggccagcaacgacaaccactactttggctacagcaccccttgggggtattttgacttcaacagattccactgccacttctccccacgtgactggcaaagactcatcaacaacaattggggattccggcccaaaagactcaacttcaagctctttaacattcaagtcaaggaggtcacgcagaatgacggtacgacgacgattgccaataaccttaccagcacggttcaggtgtttactgactcggagtaccagctcccgtacgtcctcggctcggcgcatcaaggatgcctcccgccgttcccagcagacgtcttcatggtgccacagtatggatacctcaccctgaacaacgggagtcaggcggtaggacgctcttcattttactgcctggagtactttccttctcagatgctgcgtaccggaaacaactttaccttcagctacacctttgaggacgttccttttcacagcagctacgctcacagccagagtttggaccgtctcatgaatcctctcatcgaccagtacctgtattacttgagcagaacaaacactccaagcggaaccactacgcagtccaggcttcagttttctcaagccggagcgagtgacattcgggaccagtctaggaactggcttcctggaccctgttaccgccagcagcgagtatcaaagacagctgcggacaacaacaacagtgattactcgtggactggagctaccaagtatcacctcaatggaagagactctctggtgaatccgggcacagccatggccagccacaaggacgatgaagaaaagtattttcctcagagcggggttctcatcttcggaaaacaagactcgggaaaaactaatgtggacattgaaaaggtcatgattacagacgaagaggaaatcaggaccaccaatcccgtggctacggagcagtatggttctgtatctaccaatctccagagcggcaacacacaagcagctacctcagatgtcaacacacaaggcgttcttccaggcatggtctggcaggacagagacgtgtacctgcagggacccatctgggcaaagattccacacacggacggacattttcacccttctcctcttatgggaggatttggaccgaagcaccctcccccgcagattctcatcaagaataccccggtacctgcgaatccttctaccaccttcagcgcggcaaagtttgcttccttcatcacacagtactccacggggcaggtcagcgtggagatcgagtgggagctgcagaaagagaacagcaaacgctggaaccccgagatccagtatacctccaactacaacaagtctgttaatgtggactttactatggacactaatggcgtgtattcagagcctcgccccattggcacaagatacctgactcgtaatctgtaa

SEQ ID NO: 12057 - DNA, 2208 bp, Artificial Sequence
  source: /note="Description of Artificial Sequence: Synthetic polynucleotide"
atggctgccgatggttatcttccagattggctcgaggacactctctctgaaggaataagacagtggtggaagctcaaacctggcccaccaccgccaaagcccgcagagcggcataaggacgacagcaggggtcttgtgcttcctgggtacaagtacctcggacccttcaacggactcgacaaaggagagccggtcaacgaggcagacgccgcggccctcgagcacgacaaggcctacgaccggcagctcgacagcggagacaacccgtacctcaagtacaaccacgccgacgcggagtttcaggagcgccttaaagaagatacgtcttttgggggcaacctcgcaagagcagtattccaggcgaaaaagagggttcttgaacctctgggcctggttgaggagcctgttaagacggctccgggaaaaaagaggccggtagagcactctcctgcggagctagattcctcctccggaactggaaagtcgggccaacagcctgcaagaaagagattgaattttggtcagactggagacgcagactccgtacctgacccccagcctctcggacagccaccagcagccccctctggtctgggaactaatacgatggcttcaggcagtggcgcaccaatggcagacaataacgagggcgccgacggagtgggtaattcctcgggaaattggcattgcgattccacatggatgggcgacagagtcatcaccaccagcacccgcacctgggctctgcccacctacaacaaccatctgtacaagcaaatttccagccagtctggggccagcaacgacaaccactactttggctacagcaccccttgggggtattttgacttcaacagattccactgccacttctccccacgtgactggcaaagactcatcaacaacaattggggattccggcccaaaagactcaacttcaagctctttaacattcaagtcaaggaggtcacgcagaatgacggtacgacgacgattgccaataaccttaccagcacggttcaggtgtttactgactcggagtaccagctcccgtacgtcctcggctcggcgcatcaaggatgcctcccgccgttcccagcagacgtcttcatggtgccacagtatggatacctcaccctgaacaacgggagtcaggcggtaggacgctcttcattttactgcctggagtactttccttctcagatgctgcgtaccggaaacaactttaccttcagctacacctttgaggacgttccttttcacagcagctacgctcacagccagagtttggaccgtctcatgaatcctctcatcgaccagtacctgtattacttgagcagaacaaacactccaagcggaaccactacgcagcccaggcttcagttttctcaagccggagcgagtgacattcgggaccagtctaggaactggcttcctggaccctgttaccgccagcagcgagtatcaaagacagctgcggacaacaacaacagtgattactcgtggactggagctaccaagtatcacctcaatggaagagactctctggtgaatccgggcacagccatggccagccacaaggacgatgaagaaaagtattttcctcagagcggggttctcatcttcggaaaacaagactcgggaaaaactaatgtggacattgaaaaggtcatgattacagacgaagaggaaatcaggaccaccaatcccgtggctacggagcagtatggttctgtatctaccaatctccagagcggcaacacacaagcagctacctcagatgtcaacacacaaggcgttcttccaggcatggtctggcaggacagagacgtgtacctgcagggacccatctgggcaaagattccacacacggacggacattttcacccttctcctcttatgggaggatttggaccgaagcaccctcccccgcagattctcatcaagaataccccggtacctgcgaatccttctaccaccttcagcgcggcaaagtttgcttccttcatcacacagtactccacggggcaggtcagcgtggagatcgagtgggagctgcagaaagagaacagcaaacgctggaaccccgagatccagtatacctccaactacaacaagtctgttaatgtggactttactgtggacactaatggcgtgtattcagagcctcgccccattggcacaagatacctgactcgtaatctgtaa

SEQ ID NO: 12058 - DNA, 2208 bp, Artificial Sequence
  source: /note="Description of Artificial Sequence: Synthetic polynucleotide"
atggctgccgatggttatcttccagattggctcgaggacactctctctgaaggaataagacagtggtggaagctcaaacctggcccaccaccgccaaagcccgcagagcggcataaggacgacagcaggggtcttgtgcttcctgggtacaagtacctcggacccttcaacggactcgacaaaggagagccggtcaacgaggcagacgccgcggccctcgagcacgacaaggcctacgaccggcagctcgacagcggagacaacccgtacctcaagtacaaccacgccgacgcggagtttcaggagcgccttaaagaagatacgtcttttgggggcaacctcgcaagagcagtattccaggcgaaaaagagggttcttgaacctctgggcctggttgaggagcctgttaagacggctccgggaaaaaagaggccggtagagcactctcctgcggagctagattcctcctccggaactggaaagtcgggccaacagcctgcaagaaagagattgaattttggtcagactggagacgcagactccgtacctgacccccagcctctcggacagccaccagcagccccctctggtctgggaactaatacgatggcttcaggcagtggcgcaccaatggcagacaataacgagggcgccgacggagtgggtaattcctcgggaaattggcattgcgattccacatggatgggcgacagagtcatcaccaccagcacccgcacctgggctctgcccacctacaacaaccatctgtacaagcaaatttccagccagtctggggccagcaacgacaaccactactttggctacagcaccccttgggggtattttgacttcaacagattccactgccacttctccccacgtgactggcaaagactcatcaacaacaattggggattccggcccaaaagactcaacttcaagctctttaacattcaagtcaaggaggtcacgcagaatgacggtacgacgacgattgccaataaccttaccagcacggttcaggtgtttactgactcggagtaccagctcccgtacgtcctcggctcggcgcatcaaggatgcctcccgccgttcccagcagacgtcttcatggtgccacagtatggatacctcaccctgaacaacgggagtcaggcggtaggacgctcttcattttactgcctggagtactttccttctcagatgctgcgtaccggaaacaactttaccttcagctacacctttgaggacgttccttttcacagcagctacgctcacagccagagtttggaccgtctcatgaatcctctcatcgaccagtacctgtattacttgagcagaacaaacactccaagcggaaccactacgcagtccaggcttcagttttctcaagccggagcgagtgacattcgggaccagtctaggaactggcttcctggaccctgttaccgccagcagcgagtatcaaagacagctgcggacaacaacaacagtgattactcgtggactggagctaccaagcatcacctcaatggaagagactctctggtgaatccgggcacagccatggccagccacaaggacgatgaagaaaagtattttcctcagagcggggttctcatcttcggaaaacaagactcgggaaaaactaatgtggacattgaaaaggtcatgattacagacgaagaggaaatcaggaccaccaatcccgtggctacggagcagtatggttctgtatctaccaatctccagagcggcaacacacaagcagctacctcagatgtcaacacacaaggcgttcttccaggcatggtctggcaggacagagacgtgtacctgcagggacccatctgggcaaagattccacacacggacggacatttccacccttctcctcttatgggaggatttggaccgaagcaccctcccccgcagattctcatcaagaataccccggtacctgcgaatccttctaccaccttcagcgcggcaaagtttgcttccttcatcacacagtactccacggggcaggtcagcgtggagatcgagtgggagctgcagaaagagaacagcaaacgctggaaccccgagatccagtatacctccaactacaacaagtctgttaatgtggactttactgtggacactaatggcgtgtattcagagcctcgccccattggcacaagatacctgactcgtaatctgtaa

SEQ ID NO: 12059 - DNA, 2208 bp, Artificial Sequence
  source: /note="Description of Artificial Sequence: Synthetic polynucleotide"
atggctgccgatggttatcttccagattggctcgaggacactctctctgaaggaataagacagtggtggaagctcaaacctggcccaccaccgccaaagcccgcagagcggcataaggacgacagcaggggtcttgtgcttcctgggtacaagtacctcggacccttcaacggactcgacaaaggagagccggtcaacgaggcagacgccgcggccctcgagcacgacaaggcctacgaccggcagctcgacagcggagacaacccgtacctcaagtacaaccacgccgacgcggagtttcaggagcgccttaaagaagatacgtcttttgggggcaacctcgcaagagcagtattccaggcgaaaaagagggttcttgaacctctgggcctggttgaggagcctgttaagacggctccgggaaaaaagaggccggtagagcactctcctgcggagctagattcctcctccggaactggaaagtcgggccaacagcctgcaagaaagagattgaattttggtcagactggagacgcagactccgtacctgacccccagcctctcggacagccaccagcagccccctctggtctgggaactaatacgatggcttcaggcagtggcgcaccaatggcagacaataacgagggcgccgacggagtgggtaattcctcgggaaattggcattgcgattccacatggatgggcgacagagtcatcaccaccagcacccgcacctgggctctgcccacctacaacaaccatctgtacaagcaaatttccagccagtctggggccagcaacgacaaccactactttggctacagcaccccttgggggtattttgacctcaacagattccactgccacttctccccacgtgactggcaaagactcatcaacaacaattggggattccggcccaaaagactcaacttcaagctctttaacattcaagtcaaggaggtcacgcagaatgacggtacgacgacgattgccaataaccttaccagcacggttcaggtgtttactgactcggagtaccagctcccgtacgtcctcggctcggcgcatcaaggatgcctcccgccgttcccagcagacgtcttcatggtgccacagtatggatacctcaccctgaacaacgggagtcaggcggtaggacgctcttcattttactgcctggagtactttccttctcagatgctgcgtaccggaaacaactttaccttcagctacacctttgaggacgttccttttcacagcagctacgctcacagccagagtttggaccgtctcatgaatcctctcatcgaccagtacctgtattacttgagcagaacaaacactccaagcggaaccactacgcagtccaggcttcagttttctcaagccggagcgagtgacattcgggaccagtctaggaactggcttcctggaccctgttaccgccagcagcgagtatcaaagacagctgcggacaacaacaacagtgattactcgtggactggagctaccaagtatcacctcaatggaagagactctctggtgaatccgggcacagccatggccagccacaaggacgatgaagaaaagtattttcctcagagcggggttctcatcttcggaaaacaagactcgggaaaaactaatgtggacattgaaaaggtcatgattacagacgaagaggaaatcaggaccaccaatcccgtggctacggagcagtatggttctgtatctaccaatctccagagcggcaacacacaagcagctacctcagatgtcaacacacaaggcgttcttccaggcatggtctggcaggacagagacgtgtacctgcagggacccatctgggcaaagattccacacacggacggacattttcacccttctcctcttatgggaggatttggaccgaagcaccctcccccgcagattctcatcaagaataccccggtacctgcgaatccttctaccaccttcagcgcggcaaagtttgcttccttcatcacacagtactccacggggcaggtcagcgtggagatcgagtgggagctgcagaaagagaacagcaaacgctggaaccccgagatccagtatacctccaactacaacaagtctgttaatgtggactttactgtggacactaatggcgtgtattcagagcctcgccccattggcacaagatacctgactcgtaatctgtaa

SEQ ID NO: 12060 - DNA, 2208 bp, Artificial Sequence
  source: /note="Description of Artificial Sequence: Synthetic polynucleotide"
atggctgccgatggttatcttccagattggctcgaggacactctctctgaaggaataagacagtggtggaagctcaaacctggcccaccaccgccaaagcccgcagagcggcataaggacgacagcaggggtcttgtgcttcctgggtacaagtacctcggacccctcaacggactcgacaaaggagagccggtcaacgaggcagacgccgcggccctcgagcacgacaaggcctacgaccggcagctcgacagcggagacaacccgtacctcaagtacaaccacgccgacgcggagtttcaggagcgccttaaagaagatacgtcttttgggggcaacctcgcaagagcagtattccaggcgaaaaagagggttcttgaacctctgggcctggttgaggagcctgttaagacggctccgggaaaaaagaggccggtagagcactctcctgcggagctagattcctcctccggaactggaaagtcgggccaacagcctgcaagaaagagattgaattttggtcagactggagacgcagactccgtacctgacccccagcctctcggacagccaccagcagccccctctggtctgggaactaatacgatggcttcaggcagtggcgcaccaatggcagacaataacgagggcgccgacggagtgggtaattcctcgggaaattggcattgcgattccacatggatgggcgacagagtcatcaccaccagcacccgcacctgggctctgcccacctacaacaaccatctgtacaagcaaatttccagccagtctggggccagcaacgacaaccactactttggctacagcaccccttgggggtattttgacttcaacagattccactgccacttctccccacgtgactggcaaagactcatcaacaacaattggggattccggcccaaaagactcaacttcaagctctttaacattcaagtcaaggaggtcacgcagaatgacggtacgacgacgattgccaataaccttaccagcacggttcaggtgtttactgactcggagtaccagctcccgtacgtcctcggctcggcgcatcaaggatgcctcccgccgttcccagcagacgtcttcatggtgccacagtatggatacctcaccctgaacaacgggagtcaggcggtaggacgctcttcattttactgcctggagtactttccttctcagatgctgcgtaccggaaacaactttaccttcagctacacctttgaggacgttccttttcacagcagctacgctcacagccagagtttggaccgtctcatgaatcctctcatcgaccagtacctgtattacttgagcagaacaaacactccaagcggaaccactacgcagtccaggcttcagttttctcaagccggagcgagtgacattcgggaccagtctaggaactggcttcctggaccctgttaccgccagcagcgagtatcaaagacagctgcggacaacaacaacagtgattactcgtggactggagctaccaagtatcacctcaatggaagagactctctggtgaatccgggcacagccatggccagccacaaggacgatgaagaaaagtattttcctcagagcggggttctcatcttcggaaaacaagactcgggaaaaactaatgtggacattgaaaaggtcatgattacagacgaagaggaaatcaggaccaccaatcccgtggctacggagcagtatggttctgtatctaccaatctccagagcggcaacacacaagcagctacctcagatgtcaacacacaaggcgttcttccaggcatggtctggcaggacagagacgtgtacctgcagggacccatctgggcaaagattccacacacggacggacattttcacccttctcctcttatgggaggatttggaccgaagcaccctcccccgcagattctcatcaagaataccccggtacctgcgaatccttctaccaccttcagcgcggcaaagtttgcttccttcatcacacagtactccacggggcaggtcagcgtggagatcgagtgggagctgcagaaagagaacagcaaacgctggaaccccgagatccagtatacctccaactacaacaagtctgttaatgtggactttactgtggacactaatggcgtgtattcagagcctcgccccattggcacaagatacctgactcgtaatctgtaa

SEQ ID NO: 12061 - DNA, 2208 bp, Artificial Sequence
  source: /note="Description of Artificial Sequence: Synthetic polynucleotide"
atggctgccgatggttatcttccagattggctcgaggacactctctctgaaggaataagacagtggtggaagctcaaacctggcccaccaccgccaaagcccgcagagcggcataaggacgacagcaggggtcttgtgcttcctgggtacaagtacctcggacccttcaacggactcgacaaaggagagccggtcaacgaggcagacgccgcggccctcgagcacgacaaggcctacgaccggcagctcgacagcggagacaacccgtacctcaagtacaaccacgccgacgcggagtttcaggagcgccttaaagaagatacgtcttttgggggcaacctcgcaagagcagtattccaggcgaaaaagagggttcttgaacctctgggcctggttgaggagcctgttaagacggctccgggaaaaaagaggccggtagagcactctcctgcggagctagattcctcctccggaactggaaagtcgggccaacagcctgcaagaaagagattgaattttggtcagactggagacgcagactccgtacctgacccccagcctctcggacagccaccagcagccccctctggtctgggaactaatacgatggcttcaggcagtggcgcaccaatggcagacaataacgagggcgccgacggagtgggtaattcctcgggaaattggcattgcgattccacatggatgggcgacagagtcatcaccaccagcacccgcacctgggctctgcccacctacaacaaccatctgtacaagcaaatttccagccagtctggggccagcaacgacaaccactactttggctacagcaccccttgggggtattttgacttcaacagattccactgccacttctccccacgtgactggcaaagactcatcaacaacaattggggattccggcccaaaagactcaacttcaagctctttaacattcaagtcaaggaggtcacgcagaatgacggtacgacgacgattgccaataaccttaccagcacggttcaggtgtttactgactcggagtaccagctcccgtacgtcctcggctcggcgcatcaaggatgcctcccgccgttcccagcagacgtcttcatggtgccacagtatggatacctcaccctgaacaacgggagtcaggcggtaggacgctcttcattttactgcctggagtactttccttctcagatgctgcgtaccggaaacaactttaccttcagctacacctttgaggacgttccttttcacagcagctacgctcacagccagagtttggaccgtctcatgaatcctctcatcgaccagtacctgtattacttgagcagaacaaacactccaagcggaaccactacgcagtccaggcttcagttttctcaagccggagcgagtgacattcgggaccagtctaggaactggcttcctggaccctgttaccgccagcagcgagtatcaaagacagctgcggacaacaacaacagtgattactcgtggactggagctaccaagtatcacctcaatggaagagactctctggtgaatccgggcacagccatggccagccacaaggacgatgaagaaaagtattttcctcagagcggggttctcatcttcggaaaacaagactcgggaaaaactaatgtggacattgaaaaggtcatgattacagacgaagaggaaatcaggaccaccaatcccgtggctacggagcagtatggttctgtatctaccaatctccagagcggcaacacacaagcagctacctcagatgtcaacacacaaggcgttcttccaggcatggtctggcaggacagagacgtgtacctgcagggacccatctgggcaaagattccacacacggacggacattttcacccttctcctcttatgggaggatttggaccgaagcaccctcccccgcagattctcatcaagaataccccggtacctgcgaatccttctaccaccttcagcgcggcaaagtttgcttccttcatcacacagtactccacggggcaggtcagcgtggagatcgagtgggagctgcagaaagagaacagcaaacgctggaaccccgagatccagtatacctccaactacaacaagtctgttaatgtggactttactgtggacactaatggcgtgtattcagagcctcgccccattggcacaagatacctggctcgtaatctgtaa

SEQ ID NO: 12062 - DNA, 2208 bp, Artificial Sequence
  source: /note="Description of Artificial Sequence: Synthetic polynucleotide"
atggctgccgatggttatcttccagattggctcgaggacactctctctgaaggaataagacagtggtggaagctcaaacctggcccaccaccgccaaagcccgcagagcggcataaggacgacagcaggggtcttgtgcttcctgggtacaagtacctcggacccttcaacggactcgacaaaggagagccggtcaacgaggcagacgccgcggccctcgagcacgacaaggcctacgaccggcagctcgacagcggagacaacccgtacctcaagtacaaccacgccgacgcggagtttcaggagcgccttaaagaagatacgtcttttgggggcaacctcgcaagagcagtattccaggcgaaaaagagggttcttgaacctctgggcctggttgaggagcctgttaagacggctccgggaaaaaagaggccggtagagcactctcctgcggagctagattcctcctccggaactggaaagtcgggccaacagcctgcaagaaagagattgaattttggtcagactggagacgcagactccgtacctgacccccagcctctcggacagccaccagcagccccctctggtctgggaactaatacgatggcttcaggcagtggcgcaccaatggcagacaataacgagggcgccgacggagtgggtaattcctcgggaaattggcattgcgattccacatggatgggcgacagagtcatcaccaccagcacccgcacctgggctctgcccacctacaacaaccatctgtacaagcaaatttccagccagtctggggccagcaacgacaaccactactttggctacagcaccccttgggggtattttgacttcaacagattccactgccacttctccccacgtgactggcaaagactcatcaacaacaattggggattccggcccaaaagactcaacttcaagctctttaacattcaagtcaaggaggtcacgcagaatgacggtacgacgacgattgccaataaccttaccagcacggttcaggtgtttactgactcggagtaccagctcccgtacgtcctcggctcggcgcatcaaggatgcctcccgccgttcccagcagacgtcttcatggtgccacagtatggatacctcaccctgaacaacgggagtcaggcggtaggacgctcttcattttactgcctggagtactttccttctcagatgctgcgtaccggaaacaactttaccctcagctacacctttgaggacgttccttttcacagcagctacgctcacagccagagtttggaccgtctcatgaatcctctcatcgaccagtacctgtattacttgagcagaacaaacactccaagcggaaccactacgcagtccaggcttcagttttctcaagccggagcgagtgacattcgggaccagtctaggaactggcttcctggaccctgttaccgccagcagcgagtatcaaagacagctgcggacaacaacaacagtgattactcgtggactggagctaccaagtatcacctcaatggaagagactctctggtgaatccgggcacagccatggccagccacaaggacgatgaagaaaagtattttcctcagagcggggttctcatcttcggaaaacaagactcgggaaaaactaatgtggacattgaaaaggtcatgattacagacgaagaggaaatcaggaccaccaatcccgtggctacggagcagtatggttctgtatctaccaatctccagagcggcaacacacaagcagctacctcagatgtcaacacacaaggcgttcttccaggcatggtctggcaggacagagacgtgtacctgcagggacccatctgggcaaagattccacacacggacggacattttcacccttctcctcttatgggaggatttggaccgaagcaccctcccccgcagattctcatcaagaataccccggtacctgcgaatccttctaccaccttcagcgcggcaaagtttgcttccttcatcacacagtactccacggggcaggtcagcgtggagatcgagtgggagctgcagaaagagaacagcaaacgctggaaccccgagatccagtatacctccaactacaacaagtctgttaatgtggactttactgtggacactaatggcgtgtattcagagcctcgccccattggcacaagatacctgactcgtaatctgtaa

SEQ ID NO: 12063 - DNA, 2208 bp, Artificial Sequence
  source: /note="Description of Artificial Sequence: Synthetic polynucleotide"
atggctgccgatggttatcttccagattggctcgaggacactctctctgaaggaataagacagtggtggaagctcaaacctggcccaccaccgccaaagcccgcagagcggcataaggacgacagcaggggtcttgtgcttcctgggtacaagtacctcggacccttcaacggactcgacaaaggagagccggtcaacgaggcagacgccgcggccctcgagcacgacaaggcctacgaccggcagctcgacagcggagacaacccgtacctcaagtacaaccacgccgacgcggagtttcaggagcgccttaaagaagatacgtcttttgggggcaacctcgcaagagcagtattccaggcgaaaaagagggttcttgaacctctgggcctggttgaggagcctgttaagacggctccgggaaaaaagaggccggtagagcactctcctgcggagctagattcctcctccggaactggaaagtcgggccaacagcctgcaagaaagagattgaattttggtcagactggagacgcagactccgtacctgacccccagcctctcggacagccaccagcagccccctctggtctgggaactaatacgatggcttcaggcagtggcgcaccaatggcagacaataacgagggcgccgacggagtgggtaattcctcgggaaattggcattgcgattccacatggatgggcgacagagtcatcaccaccagcacccgcacctgggctctgcccacctacaacaaccatctgtacaagcaaatttccagccagtctggggccagcaacgacaaccactactttggctacagcaccccttgggggtattttgacttcaacagattccactgccacttctccccacgtgactggcaaagactcatcaacaacaattggggattccggcccaaaagactcaacttcaagctctttaacattcaagtcaaggaggtcacgcagaatgacggtacgacgacgattgccaataaccttaccagcacggttcaggtgtttactgactcggagtaccagctcccgtacgtcctcggctcggcgcatcaaggatgcctcccgccgttcccagcagacgtcttcatggtgccacagtatggatacctcaccctgaacaacgggagtcaggcggtaggacgctcttcattttactgcctggagtactttccttctcagatgctgcgtaccggaaacaactttaccttcagctacacctttgaggacgttccttttcacagcagctacgctcacagccagagtttggaccgtctcatgaatcctctcatcgaccagtacctgtattacttgagcagaacaaacactccaagcggaaccactacgcagtccaggcttcagttttctcaagccggagcgagtgacattcgggaccagtctaggaactggcttcctggaccctgttaccgccagcagcgagtatcaaagacagctgcggacaacaacaacagtgattactcgtggactggagctaccaagtatcacctcaatggaagagactctctggtgaatccgggcacagccatggccagccacaaggacgatgaagaaaagtattttcctcagagcggggttctcatcttccggaaacaagactcgggaaaaactaatgtggacattgaaaaggtcatgattacagacgaagaggaaatcaggaccaccaatcccgtggctacggagcagtatggttctgtatctaccaatctccagagcggcaacacacaagcagctacctcagatgtcaacacacaaggcgttcttccaggcatggtctggcaggacagagacgtgtacctgcagggacccatctgggcaaagattccacacacggacggacattttcacccttctcctcttatgggaggatttggaccgaagcaccctcccccgcagattctcatcaagaataccccggtacctgcgaatccttctaccaccttcagcgcggcaaagtttgcttccttcatcacacagtactccacggggcaggtcagcgtggagatcgagtgggagctgcagaaagagaacagcaaacgctggaaccccgagatccagtatacctccaactacaacaagtctgttaatgtggactttactgtggacactaatggcgtgtattcagagcctcgccccattggcacaagatacctgactcgtaatctgtaa

SEQ ID NO: 12064 - DNA, 2208 bp, Artificial Sequence
  source: /note="Description of Artificial Sequence: Synthetic polynucleotide"
atggctgccgatggttatcttccagattggctcgaggacactctctctgaaggaataagacagtggtggaagctcaaacctggcccaccaccgccaaagcccgcagagcggcataaggacgacagcaggggtcttgtgcttcctgggtacaagtacctcggacccttcaacggactcgacaaaggagagccggtcaacgaggcagacgccgcggccctcgagcacgacaaggcctacgaccggcagctcgacagcggagacaacccgtacctcaagtacaaccacgccgacgcggagtttcaggagcgccttaaagaagatacgtcttttgggggcaacctcgcaagagcagtattccaggcgaaaaagagggttcttgaacctctgggcctggttgaggagcctgttaagacggctccgggaaaaaagaggccggtagagcactctcctgcggagctagattcctcctccggaactggaaagtcgggccaacagcctgcaagaaagagattgaattttggtcagactggagacgcagactccgtacctgacccccagcctctcggacagccaccagcagccccctctggtctgggaactaatacgatggcttcaggcagtggcgcaccaatggcagacaataacgagggcgccgacggagtgggtaattcctcgggaaattggcattgcgattccacatggatgggcgacagagtcatcaccaccagcacccgcacctgggctctgcccacctacaacaaccatctgtacaagcaaatttccagccagtctggggccagcaacgacaaccactactttggctacagcaccccttgggggtattttgacttcaacagattccactgccacttctccccacgtgactggcaaagactcatcaacaacaattggggattccggcccaaaagactcaacttcaagctctttaacattcaagtcaaggaggtcacgcagaatgacggtacgacgacgattgccaataaccttaccagcacggttcaggtgtttactgactcggagtaccagctcccgtacgtcctcggctcggcgcatcaaggatgcctcccgccgttcccagcagacgtcttcatggtgccacagtatggatacctcaccctgaacaacgggagtcaggcggtaggacgctcttcattttactgcctggagtactttccttctcagatgctgcgtaccggaaacaactttaccttcagctacacctttgaggacgttccttttcacagcagctacgctcacagccagagtttggaccgtctcatgaatcctctcatcgaccagtacctgtattacttgagcagaacaaacactccaagcggaaccactacgcagtccaggcttcagttttctcaagccggagcgagtgacattcgggaccagtctaggaactggcttcctggaccctgttaccgccagcagcgagtatcaaagacagctgcggacaacaacaacagtgattactcgtggactggagctaccaagtatcacctcaatggaagagactctctggtgaatccgggcacagccatggccagccacaaggacgatgaagaaaagtattttcctcagagcggggttctcatcttcggaaaacgagactcgggaaaaactaatgtggacattgaaaaggtcatgattacagacgaagaggaaatcaggaccaccaatcccgtggctacggagcagtatggttctgtatctaccaatctccagagcggcaacacacaagcagctacctcagatgtcaacacacaaggcgttcttccaggcatggtctggcaggacagagacgtgtacctgcagggacccatctgggcaaagattccacacacggacggacattttcacccttctcctcttatgggaggatttggaccgaagcaccctcccccgcagattctcatcaagaataccccggtacctgcgaatccttctaccaccttcagcgcggcaaagtttgcttccttcatcacacagtactccacggggcaggtcagcgtggagatcgagtgggagctgcagaaagagaacagcaaacgctggaaccccgagatccagtatacctccaactacaacaagtctgttaatgtggactttactgtggacactaatggcgtgtattcagagcctcgccccattggcacaagatacctgactcgtaatctgtaa

SEQ ID NO: 12065 - DNA, 2208 bp, Artificial Sequence
  source: /note="Description of Artificial Sequence: Synthetic polynucleotide"
atggctgccgatggttatcttccagattggctcgaggacactctctctgaaggaataagacagtggtggaagctcaaacctggcccaccaccgccaaagcccgcagagcggcataaggacgacagcaggggtcttgtgcttcctgggtacaagtacctcggacccttcaacggactcgacaaaggagagccggtcaacgaggcagacgccgcggccctcgagcacgacaaggcctacgaccggcagctcgacagcggagacaacccgtacctcaagtacaaccacgccgacgcggagtttcaggagcgccttaaagaagatacgtcttttgggggcaacctcgcaagagcagtattccaggcgaaaaagagggttcttgaacctctgggcctggttgaggagcctgttaagacggctccgggaaaaaagaggccggtagagcactctcctgcggagctagattcctcctccggaactggaaagtcgggccaacagcctgcaagaaagagattgaattttggtcagactggagacgcagactccgtacctgacccccagcctctcggacagccaccagcagccccctctggtctgggaactaatacgatggcttcaggcagtggcgcaccaatggcagacaataacgagggcgccgacggagtgggtaattcctcgggaaattggcattgcgattccacatggatgggcgacagagccatcaccaccagcacccgcacctgggctctgcccacctacaacaaccatctgtacaagcaaatttccagccagtctggggccagcaacgacaaccactactttggctacagcaccccttgggggtattttgacttcaacagattccactgccacttctccccacgtgactggcaaagactcatcaacaacaattggggattccggcccaaaagactcaacttcaagctctttaacattcaagtcaaggaggtcacgcagaatgacggtacgacgacgattgccaataaccttaccagcacggttcaggtgtttactgactcggagtaccagctcccgtacgtcctcggctcggcgcatcaaggatgcctcccgccgttcccagcagacgtcttcatggtgccacagtatggatacctcaccctgaacaacgggagtcaggcggtaggacgctcttcattttactgcctggagtactttccttctcagatgctgcgtaccggaaacaactttaccttcagctacacctttgaggacgttccttttcacagcagctacgctcacagccagagtttggaccgtctcatgaatcctctcatcgaccagtacctgtattacttgagcagaacaaacactccaagcggaaccactacgcagtccaggcttcagttttctcaagccggagcgagtgacattcgggaccagtctaggaactggcttcctggaccctgttaccgccagcagcgagtatcaaagacagctgcggacaacaacaacagtgattactcgtggactggagctaccaagtatcacctcaatggaagagactctctggtgaatccgggcacagccatggccagccacaaggacgatgaagaaaagtattttcctcagagcggggttctcatcttcggaaaacaagactcgggaaaaactaatgtggacattgaaaaggtcatgattacagacgaagaggaaatcaggaccaccaatcccgtggctacggagcagtatggttctgtatctaccaatctccagagcggcaacacacaagcagctacctcagatgtcaacacacaaggcgttcttccaggcatggtctggcaggacagagacgtgtacctgcagggacccatctgggcaaagattccacacacggacggacattttcacccttctcctcttatgggaggatttggaccgaagcaccctcccccgcagattctcatcaagaataccccggtacctgcgaatccttctaccaccttcagcgcggcaaagtttgcttccttcatcacacagtactccacggggcaggtcagcgtggagatcgagtgggagctgcagaaagagaacagcaaacgctggaaccccgagatccagtatacctccaactacaacaagtctgttaatgtggactttactgtggacactaatggcgtgtattcagagcctcgccccattggcacaagatacctgactcgtaatctgtaa

SEQ ID NO: 12066 - DNA, 2208 bp, Artificial Sequence
  source: /note="Description of Artificial Sequence: Synthetic polynucleotide"
atggctgccgatggttatcttccagattggctcgaggacactctctctgaaggaataagacagtggtggaagctcaaacctggcccaccaccgccaaagcccgcagagcggcataaggacgacagcaggggtcttgtgcttcctgggtacaagtacctcggacccttcaacggactcgacaaaggagagccggtcaacgaggcagacgccgcggccctcgagcacgacaaggcctacgaccggcagctcgacagcggagacaacccgtacctcaagtacaaccacgccgacgcggagtttcaggagcgccttaaagaagatacgtcttttgggggcaacctcgcaagagcagtattccaggcgaaaaagagggttcttgaacctctgggcctggttgaggagcctgttaagacggctccgggaaaaaagaggccggtagagcactctcctgcggagctagattcctcctccggaactggaaagtcgggccaacagcctgcaagaaagagattgaattttggtcagactggagacgcagactccgtacctgacccccagcctctcggacagccaccagcagccccctctggtctgggaactaatacgatggcttcaggcagtggcgcaccaatggcagacaataacgagggcgccgacggagtgggtaattcctcgggaaattggcattgcgattccacatggatgggcgacagagtcatcaccaccagcacccgcacctgggctctgcccacctacaacaaccatctgtacaagcaaatttccagccagtctggggccagcaacgacaaccactactttggctacagcaccccttgggggtattttgacttcaacagattccactgccacttctccccacgtgactggcaaagactcatcaacaacaattggggattccggcccaaaagactcaacttcaagctctttaacattcaagtcaaggaggtcacgcagaatgacggtacgacgacgattgccaataaccttaccagcacggttcaggtgtttactgactcggagtaccagctcccgtacgtcctcggctcggcgcatcaaggatgcctcccgccgttcccagcagacgtcttcatggtgccacagtatggatacctcaccctgaacaacgggagtcaggcggtaggacgctcttcattttactgcctggagtactttccttctcagatgctgcgtaccggaaacaactttaccttcagctacacctttgaggacgttccttttcacagcagctacgctcacagccagagtttggaccgtctcatgaatcctctcatcgaccagtacctgtattacttgagcagaacaaacactccaagcggaaccactacgcagtccaggcttcagttttctcaagccggagcgagtgacattcgggaccagtctaggaactggcttcctggaccctgttaccgccagcagcgagtatcaaagacagctgcggacaacaacaacagtgattactcgtggactggagctaccaagtatcacctcaatggaagagactctctggtgaatccgggcacagccatggccagccacaaggacgatgaagaaaagtattttcctcagagcggggttctcatcttcggaaaacaagactcgggaaaaactaatgtggacattgaaaaggtcatgattacagacgaagaggaaatcaggaccaccaatcccgtggctacggagcagtatggttctgtatctaccaatctccagagcggcaacacacaagcagctacctcagatgtcaacacacaaggcgttcttccaggcatggtctggcaggacagagacgtgtacctgcagggacccatctgggcaaagattccacacacggacggacattttcacccttctcctcttatgggaggatttggaccgaagcaccctcccccgcagattctcatcaagaataccccggtacctgcgaatccttctaccaccttcagcgcggcaaagtttgcttacttcatcacacagtactccacggggcaggtcagcgtggagatcgagtgggagctgcagaaagagaacagcaaacgctggaaccccgagatccagtatacctccaactacaacaagtctgttaatgtggactttactgtggacactaatggcgtgtattcagagcctcgccccattggcacaagatacctgactcgtaatctgtaa

SEQ ID NO: 12067 - DNA, 2208 bp, Artificial Sequence
  source: /note="Description of Artificial Sequence: Synthetic polynucleotide"
atggctgccgatggttatcttccagattggctcgaggacactctctctgaaggaataagacagtggtggaagctcaaacctggcccaccaccgccaaagcccgcagagcggcataaggacgacagcaggggtcttgtgcttcctgggtacaagtacctcggacccttcaacggactcgacaaaggagagccggtcaacgaggcagacgccgcggccctcgagcacgacaaggcctacgaccggcagctcgacagcggagacaacccgtacctcaagtacaaccacgccgacgcggagtttcaggagcgccttaaagaagatacgtcttttgggggcaacctcgcaagagcagtattccaggcgaaaaagagggttcttgaacctctgggcctggttgaggagcctgttaagacggctccgggaaaaaagaggccggtagagcactctcctgcggagctagattcctcctccggaactggaaagtcgggccaacagcctgcaagaaagagattgaattttggtcagactggagacgcagactccgtacctgacccccagcctctcggacagccaccagcagccccctctggtctgggaactaatacgatggcttcaggcagtggcgcaccaatggcagacaataacgagggcgccgacggagtgggtaattcctcgggaaattggcattgcgattccacatggatgggcgacagagtcatcaccaccagcacccgcacctgggctctgcccacctacaacaaccatctgtacaagcaaatttccagccagtctggggccagcaacgacaaccactactttggctacagcaccccttgggggtattttggcttcaacagattccactgccacttctccccacgtgactggcaaagactcatcaacaacaattggggattccggcccaaaagactcaacttcaagctctttaacattcaagtcaaggaggtcacgcagaatgacggtacgacgacgattgccaataaccttaccagcacggttcaggtgtttactgactcggagtaccagctcccgtacgtcctcggctcggcgcatcaaggatgcctcccgccgttcccagcagacgtcttcatggtgccacagtatggatacctcaccctgaacaacgggagtcaggcggtaggacgctcttcattttactgcctggagtactttccttctcagatgctgcgtaccggaaacaactttaccttcagctacacctttgaggacgttccttttcacagcagctacgctcacagccagagtttggaccgtctcatgaatcctctcatcgaccagtacctgtattacttgagcagaacaaacactccaagcggaaccactacgcagtccaggcttcagttttctcaagccggagcgagtgacattcgggaccagtctaggaactggcttcctggaccctgttaccgccagcagcgagtatcaaagacagctgcggacaacaacaacagtgattactcgtggactggagctaccaagtatcacctcaatggaagagactctctggtgaatccgggcacagccatggccagccacaaggacgatgaagaaaagtattttcctcagagcggggttctcatcttcggaaaacaagactcgggaaaaactaatgtggacattgaaaaggtcatgattacagacgaagaggaaatcaggaccaccaatcccgtggctacggagcagtatggttctgtatctaccaatctccagagcggcaacacacaagcagctacctcagatgtcaacacacaaggcgttcttccaggcatggtctggcaggacagagacgtgtacctgcagggacccatctgggcaaagattccacacacggacggacattttcacccttctcctcttatgggaggatttggaccgaagcaccctcccccgcagattctcatcaagaataccccggtacctgcgaatccttctaccaccttcagcgcggcaaagtttgcttacttcatcacacagtactccacggggcaggtcagcgtggagatcgagtgggagctgcagaaagagaacagcaaacgctggaaccccgagatccagtatacctccaactacaacaagtctgttaatgtggactttactgtggacactaatggcgtgtattcagagcctcgccccattggcacaagatacctgactcgtaatctgtaa

SEQ ID NO: 12068 - DNA, 2208 bp, Artificial Sequence
  source: /note="Description of Artificial Sequence: Synthetic polynucleotide"
atggctgccgatggttatcttccagattggctcgaggacactctctctgaaggaataagacagtggtggaagctcaaacctggcccaccaccgccaaagcccgcagagcggcataaggacgacagcaggggtcttgtgcttcctgggtacaagtacctcggacccttcaacggactcgacaaaggagagccggtcaacgaggcagacgccgcggccctcgagcacgacaaggcctacgaccggcagctcgacagcggagacaacccgtacctcaagtacaaccacgccgacgcggagtttcaggagcgccttaaagaagatacgtcttttgggggcaacctcgcaagagcagtattccaggcgaaaaagagggttcttgaacctctgggcctggttgaggagcctgttaagacggctccgggaaaaaagaggccggtagagcactctcctgcggagctagattcctcctccggaactggaaagtcgggccaacagcctgcaagaaagagattgaattttggtcagactggagacgcagactccgtacctgacccccagcctctcggacagccaccagcagccccctctggtctgggaactaatacgatggcttcaggcagtggcgcaccaatggcagacaataacgagggcgccgacggagtgggtaattcctcgggaaattggcattgcgattccacatggatgggcgacagagtcatcaccaccagcacccgcacctgggctctgcccacctacaacaaccatctgtacaagcaaatttccagccagtctggggccagcaacgacaaccgctactttggctacagcaccccttgggggtattttgacttcaacagattccactgccacttctccccacgtgactggcaaagactcatcaacaacaattggggattccggcccaaaagactcaacttcaagctctttaacattcaagtcaaggaggtcacgcagaatgacggtacgacgacgattgccaataaccttaccagcacggttcaggtgtttactgactcggagtaccagctcccgtacgtcctcggctcggcgcatcaaggatgcctcccgccgttcccagcagacgtcttcatggtgccacagtatggatacctcaccctgaacaacgggagtcaggcggtaggacgctcttcattttactgcctggagtactttccttctcagatgctgcgtaccggaaacaactttaccttcagctacacctttgaggacgttccttttcacagcagctacgctcacagccagagtttggaccgtctcatgaatcctctcatcgaccagtacctgtattacttgagcagaacaaacactccaagcggaaccactacgcagtccaggcttcagttttctcaagccggagcgagtgacattcgggaccagtctaggaactggcttcctggaccctgttaccgccagcagcgagtatcaaagacagctgcggacaacaacaacagtgattactcgtggactggagctaccaagtatcacctcaatggaagagactctctggtgaatccgggcacagccatggccagccacaaggacgatgaagaaaagtattttcctcagagcggggttctcatcttcggaaaacaagactcgggaaaaactaatgtggacattgaaaaggtcatgattacagacgaagaggaaatcaggaccaccaatcccgtggctacggagcagtatggttctgtatctaccaatctccagagcggcaacacacaagcagctacctcagatgtcaacacacaaggcgttcttccaggcatggtctggcaggacagagacgtgtacctgcagggacccatctgggcaaagattccacacacggacggacattttcacccttctcctcttatgggaggatttggaccgaagcaccctcccccgcagattctcatcaagaataccccggtacctgcgaatccttctaccaccttcagcgcggcaaagtttgcttccttcatcacacagtactccacggggcaggtcagcgtggagatcgagtgggagctgcagaaagagaacagcaaacgctggaaccccgagatccagtatacctccaactacaacaagtctgttaatgtggactttactgtggacactaatggcgtgtattcagagcctcgccccattggcacaagatacctgactcgtaatctgtaa

SEQ ID NO: 12069 - DNA, 2208 bp, Artificial Sequence
  source: /note="Description of Artificial Sequence: Synthetic polynucleotide"
atggctgccgatggttatcttccagattggctcgaggacactctctctgaaggaataagacagtggtggaagctcaaacctggcccaccaccgccaaagcccgcagagcggcataaggacgacagcaggggtcttgtgcttcctgggtacaagtacctcggacccttcaacggactcgacaaaggagagccggtcaacgaggcagacgccgcggccctcgagcacgacaaggcctacgaccggcagctcgacagcggagacaacccgtacctcaagtacaaccacgccgacgcggagtttcaggagcgccttaaagaagatacgccttttgggggcaacctcgcaagagcagtattccaggcgaaaaagagggttcttgaacctctgggcctggttgaggagcctgttaagacggctccgggaaaaaagaggccggtagagcactctcctgcggagctagattcctcctccggaactggaaagtcgggccaacagcctgcaagaaagagattgaattttggtcagactggagacgcagactccgtacctgacccccagcctctcggacagccaccagcagccccctctggtctgggaactaatacgatggcttcaggcagtggcgcaccaatggcagacaataacgagggcgccgacggagtgggtaattcctcgggaaattggcattgcgattccacatggatgggcgacagagtcatcaccaccagcacccgcacctgggctctgcccacctacaacaaccatctgtacaagcaaatttccagccagtctggggccagcaacgacaaccactactttggctacagcaccccttgggggtattttgacttcaacagattccactgccacttctccccacgtgactggcaaagactcatcaacaacaattggggattccggcccaaaagactcaacttcaagctctttaacattcaagtcaaggaggtcacgcagaatgacggtacgacgacgattgccaataaccttaccagcacggttcaggtgtttactgactcggagtaccagctcccgtacgtcctcggctcggcgcatcaaggatgcctcccgccgttcccagcagacgtcttcatggtgccacagtatggatacctcaccctgaacaacgggagtcaggcggtaggacgctcttcattttactgcctggagtactttccttctcagatgctgcgtaccggaaacaactttaccttcagctacacctttgaggacgttccttttcacagcagctacgctcacagccggagtttggaccgtctcatgaatcctctcatcgaccagtacctgtattacttgagcagaacaaacactccaagcggaaccactacgcagtccaggcttcagttttctcaagccggagcgagtgacattcgggaccagtctaggaactggcttcctggaccctgttaccgccagcagcgagtatcaaagacagctgcggacaacaacaacagtgattactcgtggactggagctaccaagtatcacctcaatggaagagactctctggtgaatccgggcacagccatggccagccacaaggacgatgaagaaaagtattttcctcagagcggggttctcatcttcggaaaacaagactcgggaaaaactaatgtggacattgaaaaggtcatgattacagacgaagaggaaatcaggaccaccaatcccgtggctacggagcagtatggttctgtatctaccaatctccagagcggcaacacacaagcagctacctcagatgtcaacacacaaggcgttcttccaggcatggtctggcaggacagagacgtgtacctgcagggacccatctgggcaaagattccacacacggacggacattttcacccttctcctcttatgggaggatttggaccgaagcaccctcccccgcagattctcatcaagaataccccggtacctgcgaatccttctaccaccttcagcgcggcaaagtttgcttccttcatcacacagtactccacggggcaggtcagcgtggagatcgagtgggagctgcagaaagagaacagcaaacgctggaaccccgagatccagtatacctccaactacaacaagtctgttaatgtggactttactgtggacactaatggcgtgtattcagagcctcgccccattggcacaagatacctgactcgtaatctgtaa

SEQ ID NO: 12070 - DNA, 2208 bp, Artificial Sequence
  source: /note="Description of Artificial Sequence: Synthetic polynucleotide"
atggctgccgatggttatcttccagattggctcgaggacactctctctgaaggaataagacagtggtggaagctcaaacctggcccaccaccgccaaagcccgcagagcggcataaggacggcagcaggggtcttgtgcttcctgggtacaagtacctcggacccttcaacggactcgacaaaggagagccggtcaacgaggcagacgccgcggccctcgagcacgacaaggcctacgaccggcagctcgacagcggagacaacccgtacctcaagtacaaccacgccgacgcggagtttcaggagcgccttaaagaagatacgtcttttgggggcaacctcgcaagagcagtattccaggcgaaaaagagggttcttgaacctctgggcctggttgaggagcctgttaagacggctccgggaaaaaagaggccggtagagcactctcctgcggagctagattcctcctccggaactggaaagtcgggccaacagcctgcaagaaagagattgaattttggtcagactggagacgcagactccgtacctgacccccagcctctcggacagccaccagcagccccctctggtctgggaactaatacgatggcttcaggcagtggcgcaccaatggcagacaataacgagggcgccgacggagtgggtaattcctcgggaaattggcattgcgattccacatggatgggcgacagagtcatcaccaccagcacccgcacctgggctctgcccacctacaacaaccatctgtacaagcaaatttccagccagtctggggccagcaacgacaaccactactttggctacagcaccccttgggggtattttgacttcaacagattccactgccacttctccccacgtgactggcaaagactcatcaacaacaattggggattccggcccaaaagactcaacttcaagctctttaacattcaagtcaaggaggtcacgcagaatgacggtacgacgacgattgccaataaccttaccagcacggttcaggtgtttactgactcggagtaccagctcccgtacgtcctcggctcggcgcatcaaggatgcctcccgccgttcccagcagacgtcttcatggtgccacagtatggatacctcaccctgaacaacgggagtcaggcggtaggacgctcttcattttactgcctggagtactttccttctcagatgctgcgtaccggaaacaactttaccttcagctacacctttgaggacgttccttttcacagcagctacgctcacagccagagtttggaccgtctcatgaatcctctcatcgaccagtacctgtattacttgagcagaacaaacactccaagcggaaccactacgcagtccaggcttcagttttctcaagccggagcgagtgacattcgggaccagtctaggaactggcttcctggaccctgttaccgccagcagcgagtatcaaagacagctgcggacaacaacaacagtgattactcgtggactggagctaccaagtatcacctcaatggaagagactctctggtgaatccgggcacagccatggccagccacaaggacgatgaagaaaagtattttcctcagagcggggttctcatcttcggaaaacaagactcgggaaaaactaatgtggacattgaaaaggtcatgattacagacgaagaggaaatcaggaccaccaatcccgtggctacggagcagtatggttctgtatctaccaatctccagagcggcaacacacaagcagctacctcagatgtcaacacacaaggcgttcttccaggcatggtctggcaggacagagacgtgtacctgcagggacccatctgggcaaagattccacacacggacggacattttcacccttctcctcttatgggaggatttggaccgaagcaccctcccccgcagattctcatcaagaataccccggtacctgcgaatccttctaccaccttcagcgcggcaaagtttgcttccttcatcacacagtactccacggggcaggtcagcgtggagatcgagtgggagctgcagaaagagaacagcaaacgctggaaccccgagatccagtatacctccaactacaacaagtctgttaatgtggactttactgtggacactaatggcgtgtattcagagcctcgccccattggcacaagatacctgactcgtaatctgtaa

SEQ ID NO: 12071 - DNA, 2208 bp, Artificial Sequence
  source: /note="Description of Artificial Sequence: Synthetic polynucleotide"
atggctgccgatggttatcttccagattggctcgaggacactctctctgaaggaataagacagtggtggaagctcaaacctggcccaccaccgccaaagcccgcagagcggcataaggacgacagcaggggtcttgtgcttcctgggtacaagtacctcggacccttcaacggactcgacaaaggagagccggtcaacgaggcagacgccgcggccctcgagcacgacaaggcctacgaccggcagctcgacagcggagacaacccgtacctcaagtacaaccacgccgacgcggggtttcaggagcgccttaaagaagatacgtcttttgggggcaacctcgcaagagcagtattccaggcgaaaaagagggttcttgaacctctgggcctggttgaggagcctgttaagacggctccgggaaaaaagaggccggtagagcactctcctgcggagctagattcctcctccggaactggaaagtcgggccaacagcctgcaagaaagagattgaattttggtcagactggagacgcagactccgtacctgacccccagcctctcggacagccaccagcagccccctctggtctgggaactaatacgatggcttcaggcagtggcgcaccaatggcagacaataacgagggcgccgacggagtgggtaattcctcgggaaattggcattgcgattccacatggatgggcgacagagtcatcaccaccagcacccgcacctgggctctgcccacctacaacaaccatctgtacaagcaaatttccagccagtctggggccagcaacgacaaccactactttggctacagcaccccttgggggtattttgacttcaacagattccactgccacttctccccacgtgactggcaaagactcatcaacaacaattggggattccggcccaaaagactcaacttcaagctctttaacattcaagtcaaggaggtcacgcagaatgacggtacgacgacgattgccaataaccttaccagcacggttcaggtgtttactgactcggagtaccagctcccgtacgtcctcggctcggcgcatcaaggatgcctcccgccgttcccagcagacgtcttcatggtgccacagtatggatacctcaccctgaacaacgggagtcaggcggtaggacgctcttcattttactgcctggagtactttccttctcagatgctgcgtaccggaaacaactttaccttcagctacacctttgaggacgttccttttcacagcagctacgctcacagccagagtttggaccgtctcatgaatcctctcatcgaccagtacctgtattacttgagcagaacaaacactccaagcggaaccactacgcagtccaggcttcagttttctcaagccggagcgagtgacattcgggaccagtctaggaactggcttcctggaccctgttaccgccagcagcgagtatcaaagacagctgcggacaacaacaacagtgattactcgtggactggagctaccaagtatcacctcaatggaagagactctctggtgaatccgggcacagccatggccagccacaaggacgatgaagaaaagtattttcctcagagcggggttctcatcttcggaaaacaagactcgggaaaaactaatgtggacattgaaaaggtcatgattacagacgaagaggaaatcaggaccaccaatcccgtggctacggagcagtatggttctgtatctaccaatctccagagcggcaacacacaagcagctacctcagatgtcaacacacaaggcgttcttccaggcatggtctggcaggacagagacgtgtacctgcagggacccatctgggcaaagattccacacacggacggacattttcacccttctcctcttatgggaggatttggaccgaagcaccctcccccgcagattctcatcaagaataccccggtacctgcgaatccttctaccaccttcagcgcggcaaagtttgcttccttcatcacacagtactccacggggcaggtcagcgtggagatcgagtgggagctgcagaaagagaacagcaaacgctggaaccccgagatccagtatacctccaactacaacaagtctgttaatgtggactttactgtggacactaatggcgtgtattcagagcctcgccccattggcacaagatacctgactcgtaatctgtaa

SEQ ID NO: 12072 - DNA, 2208 bp, Artificial Sequence
  source: /note="Description of Artificial Sequence: Synthetic polynucleotide"
atggctgccgatggttatcttccagattggctcgaggacactctctctgaaggaataagacagtggtggaagctcaaacctggcccaccaccgccaaagcccgcagagcggcataaggacgacagcaggggtcttgtgcttcctgggtacaagtacctcggacccttcaacggactcgacaaaggagagccggtcaacgaggcagacgccgcggccctcgagcacgacaaggcctacgaccggcagctcgacagcggagacaacccgtacctcaagtacaaccacgccgacgcggagtttcaggagcgccttaaagaagatacgtcttttgggggcaacctcgcaagagcagtattccaggcgaaaaagagggttcttgaacctctgggcctggttgaggagcctgttaagacggctccgggaaaaaagaggccggtagagcactctcctgcggagctagattcctcctccggaactggaaagtcgggccaacagcctgcaagaaagagattgaattttggtcagactggagacgcagactccgtacctgacccccagcctctcggacagccaccagcagccccctctggtctgggaactaatacgatggcttcaggcagtggcgcaccaatggcagacaataacgagggcgccgacggagtgggtaattcctcgggaaattggcattgcgattccacatggatgggcgacagagtcatcaccaccagcacccgcacctgggctctgcccacctacaacaaccatctgtacaagcaaatttccagccagtctggggccagcaacgacaaccactaccttggctacagcaccccttgggggtattttgacttcaacagattccactgccacttctccccacgtgactggcaaagactcatcaacaacaattggggattccggcccaaaagactcaacttcaagctctttaacattcaagtcaaggaggtcacgcagaatgacggtacgacgacgattgccaataaccttaccagcacggttcaggtgtttactgactcggagtaccagctcccgtacgtcctcggctcggcgcatcaaggatgcctcccgccgttcccagcagacgtcttcatggtgccacagtatggatacctcaccctgaacaacgggagtcaggcggtaggacgctcttcattttactgcctggagtactttccttctcagatgctgcgtaccggaaacaactttaccttcagctacacctttgaggacgttccttttcacagcagctacgctcacagccagagtttggaccgtctcatgaatcctctcatcgaccagtacctgtattacttgagcagaacaaacactccaagcggaaccactacgcagtccaggcttcagttttctcaagccggagcgagtgacattcgggaccagtctaggaactggcttcctggaccctgttaccgccagcagcgagtatcaaagacagctgcggacaacaacaacagtgattactcgtggactggagctaccaagtatcacctcaatggaagagactctctggtgaatccgggcacagccatggccagccacaaggacgatgaagaaaagtattttcctcagagcggggttctcatcttcggaaaacaagactcgggaaaaactaatgtggacattgaaaaggtcatgattacagacgaagaggaaatcaggaccaccaatcccgtggctacggagcagtatggttctgtatctaccaatctccagagcggcaacacacaagcagctacctcagatgtcaacacacaaggcgttcttccaggcatggtctggcaggacagagacgtgtacctgcagggacccatctgggcaaagattccacacacggacggacattttcacccttctcctcttatgggaggatttggaccgaagcaccctcccccgcagattctcatcaagaataccccggtacctgcgaatccttctaccaccttcagcgcggcaaagtttgcttccttcatcacacagtactccacggggcaggtcagcgtggagatcgagcgggagctgcagaaagagaacagcaaacgctggaaccccgagatccagtatacctccaactacaacaagtctgttaatgtggactttactgtggacactaatggcgtgtattcagagcctcgccccattggcacaagatacctgactcgtaatctgtaa

SEQ ID NO: 12073 - DNA, 2208 bp, Artificial Sequence
  source: /note="Description of Artificial Sequence: Synthetic polynucleotide"
atggctgccgatggttatcttccagattggctcgaggacactctctctgaaggaataagacagtggtggaagctcaaacctggcccaccaccgccaaagcccgcagagcggcataaggacgacagcaggggtcttgtgcttcctgggtacaagtacctcggacccttcaacggactcgacaaaggagagccggtcaacgaggcagacgccgcggccctcgagcacgacaaggcctacgaccggcagctcgacagcggagacaacccgtacctcaagtacaaccacgccgacgcggagtttcaggagcgccttaaagaagatacgtcttttgggggcaacctcgcaagagcagtattccaggcgaaaaagagggttcttgaacctctgggcctggttgaggagcctgttaagacggctccgggaaaaaagaggccggtagagcactctcctgcggagctagattcctcctccggaactggaaagtcgggccaacagcctgcaagaaagagattgaattttggtcagactggagacgcagactccgtacctgacccccagcctctcggacagccaccagcagccccctctggtctgggaactaatacgatggcttcaggcagtggcgcaccaatggcagacaataacgagggcgccgacggagtgggtaattcctcgggaaattggcattgcgattccacatggatgggcgacagagtcatcaccaccagcacccgcacctgggctctgcccacctacaacaaccatctgtacaagcaaatttccagccagtctggggccagcaacgacaaccactactttggctacagcaccccttgggggtattttgacttcaacagattccactgccacttctccccacgtgactggcaaagactcatcaacaacaattggggattccggcccaaaagactcaacttcaagctctttaacattcaagtcaaggaggtcacgcagaatgacggtacgacgacgattgccaataaccttaccagcacggttcaggtgtttactgactcggagtaccagctcccgtacgtcctcggctcggcgcatcaaggatgcctcccgccgttcccagcagacgtcttcatggtgccacagtatggatacctcaccctgaacaacgggagtcaggcggtaggacgctcttcattttactgcctggagtactttccttctcagatgctgcgtaccggaaacaactttaccttcagctacacctttgaggacgttccttttcacagcagctacgctcacagccagagtttggaccgtctcatgaatcctctcatcgaccagtacctgtattacttgagcagaacaaacactccaagcggaaccactacgcagtccaggcttcagttttctcaagccggagcgagtgacattcgggaccagtctaggaactggcttcctggaccctgttaccgccagcagcgagtatcaaagacagctgcggacaacaacaacagtgattactcgtggactggagctaccaagtatcacctcaatggaagagactctctggtgaatccgggcacagccatggccagccacaaggacgatgaagaaaagtattttcctcagagcggggttctcatcttcggaaaacaagactcgggaaaagctaatgtggacattgaaaaggtcatgattacagacgaagaggaaatcaggaccaccaatcccgtggctacggagcagtatggttctgtatctaccaatctccagagcggcaacacacaagcagctacctcagatgtcaacacacaaggcgttcttccaggcatggtctggcaggacagagacgtgtacctgcagggacccatctgggcaaagattccacacacggacggacattttcacccttctcctcttatgggaggatttggaccgaagcaccctcccccgcagattctcatcaagaataccccggtacctgcgaatccttctaccaccttcagcgcggcaaagtttgcttccttcatcacacagtactccacggggcaggtcagcgtggagatcgagtgggagctgcagaaagagaacagcaaacgctggaaccccgagatccagtatacctccaactacaacaagtctgttaatgtggactttactgtggacactaatggcgtgtattcagagcctcgccccattggcacaagatacctgactcgtaatctgtaa

SEQ ID NO: 12074 - DNA, 2208 bp, Artificial Sequence
  source: /note="Description of Artificial Sequence: Synthetic polynucleotide"
atggctgccgatggttatcttccagattggctcgaggacactctctctgaaggaataagacagtggtggaagctcaaacctggcccaccaccgccaaagcccgcagagcggcataaggacgacagcaggggtcttgtgcttcctgggtacaagtacctcggacccttcaacggactcgacaaaggagagccggtcaacgaggcagacgccgcggccctcgagcacgacaaggcctacgaccggcagctcgacagcggagacaacccgtacctcaagtacaaccacgccgacgcggagtttcaggagcgccttaaagaagatacgtcttttgggggcaacctcgcaagagcagtattccaggcgaaaaagagggttcttgaacctctgggcctggttgaggagcctgttaagacggctccgggaaaaaagaggccggtagagcactctcctgcggagctagattcctcctccggaactggaaagtcgggccaacagcctgcaagaaagagattgaattttggtcagactggagacgcagactccgtacctgacccccagcctctcggacagccaccagcagccccctctggtctgggaactaatacgatggcttcaggcagtggcgcaccaatggcagacaataacgagggcgccgacggagtgggtaattcctcgggaaattggcattgcgattccacatggatgggcgacagagtcatcaccaccagcacccgcacctgggctctgcccacctacaacaaccatctgtacaagcaaatttccagccagtctggggccagcaacgacaaccactactttggctacagcaccccttgggggtattttgacttcaacagattccactgccacttctccccacgtgactggcaaagactcaccaacaacaattggggattccggcccaaaagactcaacttcaagctctttaacattcaagtcaaggaggtcacgcagaatgacggtacgacgacgattgccaataaccttaccagcacggttcaggtgtttactgactcggagtaccagctcccgtacgtcctcggctcggcgcatcaaggatgcctcccgccgttcccagcagacgtcttcatggtgccacagtatggatacctcaccctgaacaacgggagtcaggcggtaggacgctcttcattttactgcctggagtactttccttctcagatgctgcgtaccggaaacaactttaccttcagctacacctttgaggacgttccttttcacagcagctacgctcacagccagagtttggaccgtctcatgaatcctctcatcgaccagtacctgtattacttgagcagaacaaacactccaagcggaaccactacgcagtccaggcttcagttttctcaagccggagcgagtgacattcgggaccagtctaggaactggcttcctggaccctgttaccgccagcagcgagtatcaaagacagctgcggacaacaacaacagtgattactcgtggactggagctaccaagtatcacctcaatggaagagactctctggtgaatccgggcacagccatggccagccacaaggacgatgaagaaaagtattttcctcagagcggggttctcatcttcggaaaacaagactcgggaaaaactaatgtggacattgaaaaggtcatgattacagacgaagaggaaatcaggaccaccaatcccgtggctacggagcagtatggttctgtatctaccaatctccagagcggcaacacacaagcagctacctcagatgtcaacacacaaggcgttcttccaggcatggtctggcaggacagagacgtgtacctgcagggacccatctgggcaaagattccacacacggacggacattttcacccttctcctcttatgggaggatttggaccgaagcaccctcccccgcagattctcatcaagaataccccggtacctgcgaatccttctaccaccttcagcgcggcaaagtttgcttccttcatcacacagtactccacggggcaggtcagcgtggagatcgagtgggagctgcagaaagagaacagcaaacgctggaaccccgagatccagtatacctccaactacaacaagtctgttaatgtggactttactgtggacactaatggcgtgtattcagagcctcgccccattggcacaagatacctgactcgtaatctgtaa

SEQ ID NO: 12075 - DNA, 2208 bp, Artificial Sequence
  source: /note="Description of Artificial Sequence: Synthetic polynucleotide"
atggctgccgatggttatcttccagattggctcgaggacactctctctgaaggaataagacagtggtggaagctcaaacctggcccaccaccgccaaagcccgcagagcggcataaggacgacagcaggggtcttgtgcttcctgggtacaagtacctcggacccttcaacggactcgacaaaggagagccggtcaacgaggcagacgccgcggccctcgagcacgacaaggcctacgaccggcagctcgacagcggagacaacccgtacctcaagtacaaccacgccgacgcggagtttcaggagcgccttaaagaagatacgtcttttgggggcaacctcgcaagagcagtattccaggcgaaaaagagggttcttgaacctctgggcctggttgaggagcctgttaagacggctccgggaaaaaagaggccggtagagcactctcctgcggagctagattcctcctccggaactggaaagtcgggccaacagcctgcaagaaagagattgaattttggtcagactggagacgcagactccgtacctgacccccagcctctcggacagccaccagcagccccctctggtctgggaactaatacgatggcttcaggcagtggcgcaccaatggcagacaataacgagggcgccgacggagtgggtaattcctcgggaaattggcattgcgattccacatggatgggcgacagagtcatcaccaccagcacccgcacctgggctctgcccacctacaacaaccatctgtacaagcaaatttccagccagtctggggccagcaacgacaaccactactttggctacagcaccccttgggggtattttgacttcaacagattccactgccacttctccccacgtgactggcaaagactcatcaacaacaattggggattccggcccaaaagactcaacttcaagctctttaacattcaagtcaaggaggtcacgcagaatgacggtacgacgacgattgccaataaccttaccagcacggttcgggtgtttactgactcggagtaccagctcccgtacgtcctcggctcggcgcatcaaggatgcctcccgccgttcccagcagacgtcttcatggtgccacagtatggatacctcaccctgaacaacgggagtcaggcggtaggacgctcttcattttactgcctggagtactttccttctcagatgctgcgtaccggaaacaactttaccttcagctacacctttgaggacgttccttttcacagcagctacgctcacagccagagtttggaccgtctcatgaatcctctcatcgaccagtacctgtattacttgagcagaacaaacactccaagcggaaccactacgcagtccaggcttcagttttctcaagccggagcgagtgacattcgggaccagtctaggaactggcttcctggaccctgttaccgccagcagcgagtatcaaagacagctgcggacaacaacaacagtgattactcgtggactggagctaccaagtatcacctcaatggaagagactctctggtgaatccgggcacagccatggccagccacaaggacgatgaagaaaagtattttcctcagagcggggttctcatcttcggaaaacaagactcgggaaaaactaatgtggacattgaaaaggtcatgattacagacgaagaggaaatcaggaccaccaatcccgtggctacggagcagtatggttctgtatctaccaatctccagagcggcaacacacaagcagctacctcagatgtcaacacacaaggcgttcttccaggcatggtctggcaggacagagacgtgtacctgcagggacccatctgggcaaagattccacacacggacggacattttcacccttctcctcttatgggaggatttggaccgaagcaccctcccccgcagattctcatcaagaataccccggtacctgcgaatccttctaccaccttcagcgcggcaaagtttgcttccttcatcacacagtactccacggggcaggtcagcgtggagatcgagtgggagctgcagaaagagaacagcaaacgctggaaccccgagatccagtatacctccaactacaacaagtctgttaatgtggactttactgtggacactaatggcgtgtattcagagcctcgccccattggcacaagatacctgactcgtaatctgtaa

SEQ ID NO: 12076 - DNA, 2208 bp, Artificial Sequence
  source: /note="Description of Artificial Sequence: Synthetic polynucleotide"
atggctgccgatggttatcttccagattggctcgaggacactctctctgaaggaataagacagtggtggaagctcaaacctggcccaccaccgccaaagcccgcagagcggcataaggacgacagcaggggtcttgtgcttcctgggtacaagtacctcggacccttcaacggactcgacaaaggagagccggtcaacgaggcagacgccgcggccctcgagcacgacaaggcctacgaccggcagctcgacagcggagacaacccgtacctcaagtacaaccacgccgacgcggagtttcaggagcgccttaaagaagatacgtcttttgggggcaacctcgcaagagcagtattccaggcgaaaaagagggttcttgaacctctgggcctggttggggagcctgttaagacggctccgggaaaaaagaggccggtagagcactctcctgcggagctagattcctcctccggaactggaaagtcgggccaacagcctgcaagaaagagattgaattttggtcagactggagacgcagactccgtacctgacccccagcctctcggacagccaccagcagccccctctggtctgggaactaatacgatggcttcaggcagtggcgcaccaatggcagacaataacgagggcgccgacggagtgggtaattcctcgggaaattggcattgcgattccacatggatgggcgacagagtcatcaccaccagcacccgcacctgggctctgcccacctacaacaaccatctgtacaagcaaatttccagccagtctggggccagcaacgacaaccactactttggctacagcaccccttgggggtattttgacttcaacagattccactgccacttctccccacgtgactggcaaagactcatcaacaacaattggggattccggcccaaaagactcaacttcaagctctttaacattcaagtcaaggaggtcacgcagaatgacggtacgacgacgattgccaataaccttaccagcacggttcaggtgtttactgactcggagtaccagctcccgtacgtcctcggctcggcgcatcaaggatgcctcccgccgttcccagcagacgtcttcatggtgccacagtatggatacctcaccctgaacaacgggagtcaggcggtaggacgctcttcattttactgcctggagtactttccttctcagatgctgcgtaccggaaacaactttaccttcagctacacctttgaggacgttccttttcacagcagctacgctcacagccagagtttggaccgtctcatgaatcctctcatcgaccagtacctgtattacttgagcagaacaaacactccaagcggaaccactacgcagtccaggcttcagttttctcaagccggagcgagtgacattcgggaccagtctaggaactggcttcctggaccctgttaccgccagcagcgagtatcaaagacagctgcggacaacaacaacagtgattactcgtggactggagctaccaagtatcacctcaatggaagagactctctggtgaatccgggcacagccatggccagccacaaggacgatgaagaaaagtattttcctcagagcggggttctcatcttcggaaaacaagactcgggaaaaactaatgtggacattgaaaaggtcatgattacagacgaagaggaaatcaggaccaccaatcccgtggctacggagcagtatggttctgtatctaccaatctccagagcggcaacacacaagcagctacctcagatgtcaacacacaaggcgttcttccaggcatggtctggcaggacagagacgtgtacctgcagggacccatctgggcaaagattccacacacggacggacattttcacccttctcctcttatgggaggatttggaccgaagcaccctcccccgcagattctcatcaagaataccccggtacctgcgaatccttctaccaccttcagcgcggcaaagtttgcttccttcatcacacagtactccacggggcaggtcagcgtggagatcgagtgggagctgcagaaagagaacagcaaacgctggaaccccgagatccagtatacctccaactacaacaagtctgttaatgtggactttactgtggacactaatggcgtgtattcagagcctcgccccattggcacaagatacctgactcgtaatctgtaa

SEQ ID NO: 12077 - DNA, 2208 bp, Artificial Sequence
  source: /note="Description of Artificial Sequence: Synthetic polynucleotide"
atggctgccgatggttatcttccagattggctcgaggacactctctctgaaggaataagacagtggtggaagctcaaacctggcccaccaccgccaaagcccgcagagcggcataaggacgacagcaggggtcttgtgcttcctgggtacaagtacctcggacccttcaacggactcgacaaaggagagccggtcaacgaggcagacgccgcggccctcgagcacgacaaggcctacgaccggcagctcgacagcggagacaacccgtacctcaagtacaaccacgccgacgcggagtttcaggagcgccttaaagaagatacgtcttttgggggcaacctcgcaagagcagtattccaggcgaaaaagagggttcttgaacctctgggcctggttgaggagcctgttaagacggctccgggaaaaaagaggccggtagagcactctcctgcggagctagattcctcctccggaactggaaagtcgggccaacagcctgcaagaaagagattgaattttggtcagactggagacgcagactccgtacctggcccccagcctctcggacagccaccagcagccccctctggtccgggaactaatacgatggcttcaggcagtggcgcaccaatggcagacaataacgagggcgccgacggagtgggtaattcctcgggaaattggcattgcgattccacatggatgggcgacagagtcgtcaccaccagcacccgcacctgggctctgcccacctacaacaaccatctgtacaagcaaatttccagccagtctggggccagcaacgacaaccactactttggctacagcaccccttgggggtattttgacttcaacagattccactgccacttctccccacgtgactggcaaagactcatcaacaacaattggggattccggcccaaaagactcaacttcaagctctttaacattcaagtcaaggaggtcacgcagaatgacggtacgacgacgattgccaataaccttaccagcacggttcaggtgtttactgactcggagtaccagctcccgtacgtcctcggctcggcgcatcaaggatgcctcccgccgttcccagcagacgtcttcatggtgccacagtatggatacctcaccctgaacaacgggagtcaggcggtaggacgctcttcattttactgcctggagtactttccttctcagatgctgcgtaccggaaacaactttaccttcagctacacctttgaggacgttccttttcacagcagctacgctcacagccagagtttggaccgtctcatgaatcctctcatcgaccagtacctgtattacttgagcagaacaaacactccaagcggaaccactacgcagtccaggcttcagttttctcaagccggagcgagtgacattcgggaccagtctaggaactggcttcctggaccctgttaccgccagcagcgagtaccaaagacagctgcggacaacaacaacagtgattactcgtggactggagctaccaagtatcacctcaatggaagagactctctggtgaatccgggcacagccatggccagccacaaggacgatgaagaaaagtattttcctcagagcggggttctcatcttcggaaaacaagactcgggaaaaactaatgtggacattgaaaaggtcatgattacagacgaagaggaaatcaggaccaccaatcccgtggctacggagcagtatggttctgtatctaccaatctccagagcggcaacacacaagcagctacctcagatgtcaacacacaaggcgttcttccaggcatggtctggcaggacagagacgtgtacctgcagggacccatctgggcaaagattccacacacggacggacattttcacccttctcctcttatgggaggatttggaccgaagcaccctcccccgcagattctcatcaagaataccccggtacctgcgaatccttctaccaccttcagcgcggcaaagtttgcttccttcatcacacagtactccacggggcaggtcagcgtggagatcgagtgggagctgcagaaagagaacagcaaacgctggaaccccgagatccagtatacctccaactacaacaagtctgttaatgtggactttactgtggacactaatggcgtgtattcagagcctcgccccattggcacaagatacctgactcgtaatctgtaa

SEQ ID NO: 12078 - DNA, 2208 bp, Artificial Sequence
  source: /note="Description of Artificial Sequence: Synthetic polynucleotide"
atggctgccgatggttatcttccagattggctcgaggacactctctctgaaggaataagacagtggtggaagctcaaacctggcccaccaccgccaaagcccgcagagcggcataaggacgacagcaggggtcttgtgcttcctgggtacaagtacctcggacccttcaacggactcgacaaaggagagccggtcaacgaggcagacgccgcggccctcgagcacgacaaggcctacgaccggcagctcgacagcggagacaacccgtacctcaagtacaaccacgccgacgcggagtttcaggagcgccttaaagaagatacgtcttttgggggcaacctcgcaagagcagtattccaggcgaaaaagagggttcttgaacctctgggcctggttgaggggcctgttaagacggctccgggaaaaaagaggccggtagagcactctcctgcggagctagattcctcctccggaactggaaagtcgggccaacagcctgcaagaaagagattgaattttggtcagactggagacgcagactccgtacctgacccccagcctctcggacagccaccagcagccccctctggtctgggaactaatacgatggcttcaggcagtggcgcaccaatggcagacaataacgagggcgccgacggagtgggtaattcctcgggaaattggcattgcgattccacatggatgggcgacagagtcatcaccaccagcacccgcacctgggctctgcccacctacaacaaccatctgtacaagcaaatttccagccagtctggggccagcaacgacaaccactactttggctacagcaccccttgggggtattttgacttcaacagattccactgccacttctccccacgtgactggcaaagactcatcaacaacaattggggattccggcccaaaagactcaacttcaagctctttaacattcaagtcaaggaggtcacgcagaatgacggtacgacgacgattgccaataaccttaccagcacggttcaggtgtttactgactcggagtaccagctcccgtacgtcctcggctcggcgcatcaaggatgcctcccgccgttcccagcagacgtcttcatggtgccacagtatggatacctcaccctgaacaacgggagtcaggcggtaggacgctcttcattttactgcctggagtactttccttctcagatgctgcgtaccggaaacaactttaccttcagctacacctttgaggacgttccttttcacagcagctacgctcacagccagagtttggaccgtctcatgaatcctctcatcgaccagtacctgtattacttgagcagaacaaacactccaagcggaaccactacgcagtccaggcttcagttttctcaagccggagcgagtgacattcgggaccagtctaggaactggcttcctggaccctgttaccgccagcagcgagtatcaaagacagctgcggacaacaacaacagtgattactcgtggactggagctaccaagtatcacctcaatggaagagactctctggtgaatccgggcacagccatggccagccacaaggacgatgaagaaaagtattttcctcagagcggggttctcatcttcggaaaacaagactcgggaaaaactaatgtggacattgaaaaggtcatgattacagacgaagaggaaatcaggaccaccaatcccgtggctacggagcagtatggttctgtatctaccaatctccagagcggcaacacacaagcagctacctcagatgtcaacacacaaggcgttcttccaggcatggtctggcaggacagagacgtgtacctgcagggacccatctgggcaaagattccacacacggacggacattttcacccttctcctcttatgggaggatttggaccgaagcaccctcccccgcagattctcatcaagaataccccggtacctgcgaatccttctaccaccttcagcgcggcaaagtttgcttccttcatcacacagtactccacggggcaggtcagcgtggagatcgagtgggagctgcagaaagagaacagcaaacgctggaaccccgagatccagtatacctccaactacaacaagtctgttaatgtggactttactgtggacactaatggcgtgtattcagagcctcgccccattggcacaagatacctgactcgtaatctgtaa

SEQ ID NO: 12079 - DNA, 2208 bp, Artificial Sequence
  source: /note="Description of Artificial Sequence: Synthetic polynucleotide"
atggctgccgatggttatcttccagattggctcgaggacactctctctgaaggaataagacagtggtggaagctcaaacctggcccaccaccgccaaagcccgcagagcggcataaggacgacagcaggggtcttgtgcttcctgggtacaagtacctcggacccttcaacggactcgacaaaggagagccggtcaacgaggcagacgccgcggccctcgagcacgacaaggcctacgaccggcagctcgacagcggagacaacccgtacctcaagtacaaccacgccgacgcggagtttcaggagcgccttaaagaagatacgtcttttgggggcaacctcgcaagagcagtattccaggcgaaaaagagggttcttgaacctctgggcctggttgaggagcctgttaagacggctccgggaaaaaagaggccggtagagcactctcctgcggagctagattcctcctccggaactggaaagtcgggccaacagcctgcaagaaagagattgaattttggtcagactggagacgcagactccgtacctgacccccagcctctcggacagccaccagcagccccctctggtctgggaactaatacgatggcttcaggcagtggcgcaccaatggcagacaataacgagggcgccgacggggtgggtaattcctcgggaaattggcattgcgattccacatggatgggcgacagagtcatcaccaccagcacccgcacctgggctctgcccacctacaacaaccatctgtacaagcaaatttccagccagtctggggccagcaacgacaaccactaccttggctacagcaccccttgggggtattttgacttcaacagattccactgccacttctccccacgtgactggcaaagactcatcaacaacaattggggattccggcccaaaagactcaacttcaagctctttaacattcaagtcaaggaggtcacgcagaatgacggtacgacgacgattgccaataaccttaccagcacggttcaggtgtttactgactcggagtaccagctcccgtacgtcctcggctcggcgcatcaaggatgcctcccgccgttcccagcagacgtcttcatggtgccacagtatggatacctcaccctgaacaacgggagtcaggcggtaggacgctcttcattttactgcctggagtactttccttctcagatgctgcgtaccggaaacaactttaccttcagctacacctttgaggacgttccttttcacagcagctacgctcacagccagagtttggaccgtctcatgaatcctctcatcgaccagtacctgtattacttgagcagaacaaacactccaagcggaaccactacgcagtccaggcttcagttttctcaagccggagcgagtgacattcgggaccagtctaggaactggcttcctggaccctgttaccgccagcagcgagtatcaaagacagctgcggacaacaacaacagtgattactcgtggactggagctaccaagtatcacctcaatggaagagactctctggtgaatccgggcacagccatggccagccacaaggacgatgaagaaaagtattttcctcagagcggggttctcatcttcggaaaacaagactcgggaaaaactaatgtggacattgaaaaggtcatgattacagacgaagaggaaatcaggaccaccaatcccgtggctacggagcagtatggttctgtatctaccaatctccagagcggcaacacacaagcagctacctcagatgtcaacacacaaggcgttcttccaggcatggtctggcaggacagagacgtgtacctgcagggacccatctgggcaaagattccacacacggacggacattttcacccttctcctcttatgggaggatttggaccgaagcaccctcccccgcagattctcatcaagaataccccggtacctgcgaatccttctaccaccttcagcgcggcaaagtttgcttccttcatcacacagtactccacggggcaggtcagcgtggagatcgagtgggagctgcagaaagagaacagcaaacgctggaaccccgagatccagtatacctccaactacaacaagtctgttaatgtggactttactgtggacactaatggcgtgtattcagagcctcgccccattggcacaagatacctgactcgtaatctgtaa

SEQ ID NO: 12080 - DNA, 2208 bp, Artificial Sequence
  source: /note="Description of Artificial Sequence: Synthetic polynucleotide"
atggctgccgatggttatcttccagattggctcgaggacactctctctgaaggaataagacagtggtggaagctcaaacctggcccaccaccgccaaagcccgcagagcggcataaggacgacagcaggggtcttgtgcttcctgggtacaagtacctcggacccttcaacggactcgacaaaggagagccggtcaacgaggcagacgccgcggccctcgagcacgacaaggcctacgaccggcagctcgacagcggagacaacccgtacctcaagtacaaccacgccgacgcggagtttcaggagcgccttaaagaagatacgtcttttgggggcaacctcgcaagagcagtattccaggcgaaaaagagggttcttgaacctctgggcctggttgaggagcctgttaagacggctccgggaaaaaaggggccggtagagcactctcctgcggagctagattcctcctccggaactggaaagtcgggccaacagcctgcaagaaagagattgaattttggtcagactggagacgcagactccgtacctgacccccagcctctcggacagccaccagcagccccctctggtctgggaactaatacgatggcttcaggcagtggcgcaccaatggcagacaataacgagggcgccgacggagtgggtaattcctcgggaaattggcattgcgattccacatggatgggcgacagagtcatcaccaccagcacccgcacctgggctctgcccacctacaacaaccatctgtacaagcaaatttccagccagtctggggccagcaacgacaaccactactttggctacagcaccccttgggggtattttgacttcaacagattccactgccacttctccccacgtgactggcaaagactcatcaacaacaattggggattccggcccaaaagactcaacttcaagctctttaacattcaagtcaaggaggtcacgcagaatgacggtacgacgacgattgccaataaccttaccagcacggttcaggtgtttactgactcggagtaccagctcccgtacgtcctcggctcggcgcatcaaggatgcctcccgccgttcccagcagacgtcttcatggtgccacagtatggatacctcaccctgaacaacgggagtcaggcggtaggacgctcttcattttactgcctggagtactttccttctcagatgctgcgtaccggaaacaactttaccttcagctacacctttgaggacgttccttttcacagcagctacgctcacagccagagtttggaccgtctcatgaatcctctcatcgaccagtacctgtattacttgagcagaacaaacactccaagcggaaccactacgcagtccaggcttcagttttctcaagccggagcgagtgacattcgggaccagtctaggaactggcttcctggaccctgttaccgccagcagcgagtatcaaagacagctgcggacaacaacaacagtgattactcgtggactggagctaccaagtatcacctcaatggaagagactctctggtgaatccgggcacagccatggccagccacaaggacgatgaagaaaagtattttcctcagagcggggttctcatcttcggaaaacaagactcgggaaaaactaatgtggacattgaaaaggtcatgattacagacgaagaggaaatcaggaccaccaatcccgtggctacggagcagtatggttctgtatctaccaatctccagagcggcaacacacaagcagctacctcagatgtcaacacacaaggcgttcttccaggcatggtctggcaggacagagacgtgtacctgcagggacccatctgggcaaagattccacacacggacggacattttcacccttctcctcttatgggaggatttggaccgaagcaccctcccccgcagattctcatcaagaataccccggtacctgcgaatccttctaccaccttcagcgcggcaaagtttgcttccttcatcacacagtactccacggggcaggtcagcgtggagatcgagtgggagctgcagaaagagaacagcaaacgctggaaccccgagatccagtatacctccaactacaacaagtctgttaatgtggactttactgtggacactaatggcgtgtattcagagcctcgccccattggcacaagatacctgactcgtaatctgtaa

SEQ ID NO: 12081 - DNA, 2208 bp, Artificial Sequence
  source: /note="Description of Artificial Sequence: Synthetic polynucleotide"
atggctgccgatggttatcttccagattggctcgaggacactctctctgaaggaataagacagtggtggaagctcaaacctggcccaccaccgccaaagcccgcagagcggcataaggacgacagcaggggtcttgtgcttcctgggtacaagtacctcggacccttcaacggactcgacaaaggagagccggtcaacgaggcagacgccgcggccctcgagcacgacaaggcctacgaccggcagctcgacagcggagacaacccgtacctcaagtacaaccacgccgacgcggagtttcaggagcgccttaaagaagatacgccttttgggggcaacctcgcaagagcagtattccaggcgaaaaagagggttcttgaacctctgggcctggttgaggagcctgttaagacggctccgggaaaaaagaggccggtagagcactctcctgcggagctagattcctcctccggaactggaaagtcgggccaacagcctgcaagaaagagattgaattttggtcagactggagacgcagactccgtacctgacccccagcctctcggacagccaccagcagccccctctggtctgggaactaatacgatggcttcaggcagtggcgcaccaatggcagacaataacgagggcgccgacggagtgggtaattcctcgggaaattggcattgcgattccacatggatgggcgacagagtcatcaccaccagcacccgcacctgggctctgcccacctacaacaaccatctgtacaagcaaatttccagccagtctggggccagcaacgacaaccactactttggctacagcaccccttgggggtattttgacttcaacagattccactgccacttctccccacgtgactggcaaagactcatcaacaacaattggggattccggcccaaaagactcaacttcaagctctttaacattcaagtcaaggaggtcacgcagaatgacggtacgacgacgattgccaataaccttaccagcacggttcaggtgtttactgactcggagtaccagctcccgtacgtcctcggctcggcgcatcaaggatgcctcccgccgttcccagcagacgtcttcatggtgccacagtatggatacctcaccctgaacaacgggagtcaggcggtaggacgctcttcattttactgcctggagtactttccttctcagatgctgcgtaccggaaacaactttaccttcagctacacctttgaggacgttccttttcacagcagctacgctcacagccagagtttggaccgtctcatgaatcctctcatcgaccagtacctgtattacttgagcagagcaaacactccaagcggaaccactacgcagtccaggcttcagttttctcaagccggagcgagtgacattcgggaccagtctaggaactggcttcctggaccctgttaccgccagcagcgagtatcaaagacagctgcggacaacaacaacagtgattactcgtggactggagctaccaagtatcacctcaatggaagagactctctggtgaatccgggcacagccatggccagccacaaggacgatgaagaaaagtattttcctcagagcggggttctcatcttcggaaaacaagactcgggaaaaactaatgtggacattgaaaaggtcatgattacagacgaagaggaaatcaggaccaccaatcccgtggctacggagcagtatggttctgtatctaccaatctccagagcggcaacacacaagcagctacctcagatgtcaacacacaaggcgttcttccaggcatggtctggcaggacagagacgtgtacctgcagggacccatctgggcaaagattccacacacggacggacattttcacccttctcctcttatgggaggatttggaccgaagcaccctcccccgcagattctcatcaagaataccccggtacctgcgaatccttctaccaccttcagcgcggcaaagtttgcttccttcatcacacagtactccacggggcaggtcagcgtggagatcgagtgggagctgcagaaagagaacagcaaacgctggaaccccgagatccagtatacctccaactacaacaagtctgttaatgtggactttactgtggacactaatggcgtgtattcagagcctcgccccattggcacaagatacctgactcgtaatctgtaa

SEQ ID NO: 12082 - DNA, 2208 bp, Artificial Sequence
  source: /note="Description of Artificial Sequence: Synthetic polynucleotide"
atggctgccgatggttatcttccagattggctcgaggacactctctctgaaggaataagacagtggtggaagctcaaacctggcccaccaccgccaaagcccgcagagcggcataaggacgacagcaggggtcttgtgcttcctgggtacaagtacctcggacccttcaacggactcgacaaaggagagccggtcaacgaggcagacgccgcggccctcgagcacgacaaggcctacgaccggcagctcgacagcggagacaacccgtacctcaagtacaaccacgccgacgcggagtttcaggagcgccttaaagaagatacgtcttttgggggcaacctcgcaagagcagtattccaggcgaaaaagagggttcttgaacctctgggcctggttgaggagcctgttaagacggctccgggaaaaaagaggccggtagagcactctcctgcggagctagattcctcctccggaactggaaagtcgggccaacagcctgcaagaaagagattgaattttggtcagactggagacgcagactccgtacctgacccccagcctctcggacagccaccagcagccccctctggtctgggaactaatacgatggcttcaggcagtggcgcaccaatggcagacaataacgagggcgccgacggagtgggtaattcctcgggaaattggcattgcgattccacatggatgggcgacagagtcatcaccaccagcacccgcacctgggctctgcccacctacaacaaccatctgtacaagcaaatttccagccagtctggggccagcaacgacaaccactactttggctacagcgccccttgggggtattttgacttcaacagattccactgccacttctccccacgtgactggcaaagactcatcaacaacaattggggattccggcccaaaagactcaacttcaagctctttaacattcaagtcaaggaggtcacgcagaatgacggtacgacgacgattgccaataaccttaccagcacggttcaggtgtttactgactcggagtaccagctcccgtacgtcctcggctcggcgcatcaaggatgcctcccgccgttcccagcagacgtcttcatggtgccacagtatggatacctcaccctgaacaacgggagtcaggcggtaggacgctcttcattttactgcctggagtactttccttctcagatgctgcgtaccggaaacaactttaccttcagctacacctttgaggacgttccttttcacagcagctacgctcacagccagagtttggaccgtctcatgaatcctctcatcgaccagtacctgtattacttgagcagaacaaacactccaagcggaaccactacgcagtccaggcttcagttttctcaagccggagcgagtgacattcgggaccagtctaggaactggcttcctggaccctgttaccgccagcagcgagtatcaaagacagctgcggacaacaacaacagtgattactcgtggactggagctaccaagtatcacctcaatggaagagactctctggtgaatccgggcacagccatggccagccacaaggacgatgaagaaaagtattttcctcagagcggggttctcatcttcggaaaacaagactcgggaaaaactaatgtggacattgaaaaggtcatgattacagacgaagaggaaatcaggaccaccaatcccgtggctacggagcagtatggttctgtatctaccaatctccagagcggcaacacacaagcagctacctcagatgtcaacacacaaggcgttcttccaggcatggtctggcaggacagagacgtgtacctgcagggacccatctgggcaaagattccacacacggacggacattttcacccttctcctcttatgggaggatttggaccgaagcaccctcccccgcagattctcatcaagaataccccggtacctgcgaatccttctaccaccttcagcgcggcaaagtttgcttccttcatcacacagtactccacggggcaggtcagcgtggagatcgagtgggagctgcagaaagagaacagcaaacgctggaaccccgagatccagtatacctccaactacaacaagtctgttaatgtggactttactgtggacactaatggcgtgtattcagagcctcgccccattggcacaagatacctgactcgtaatctgtaa

SEQ ID NO: 12083 - DNA, 2208 bp, Artificial Sequence
  source: /note="Description of Artificial Sequence: Synthetic polynucleotide"
atggctgccgatggttatcttccagattggctcgaggacactctctctgaaggaataagacagtggtggaagctcaaacctggcccaccaccgccaaagcccgcagagcggcataaggacgacagcaggggtcttgtgcttcctgggtacaagtacctcggacccttcaacggactcgacaaaggagagccggtcaacgaggcagacgccgcggccctcgagcacgacaaggcctacgaccggcagctcgacagcggagacaacccgtacctcaagtacaaccacgccgacgcggagtttcaggagcgccttaaagaagatacgtcttttgggggcaacctcgcaagagcagtattccaggcgaaaaagagggttcttgaacctctgggcctggttgaggagcctgttaagacggctccgggaaaaaagaggccggtagagcactctcctgcggagctagattcctcctccggaactggaaagtcgggccaacagcctgcaagaaagagattgaattttggtcagactggagacgcagactccgtacctgacccccagcctctcggacagccaccagcagccccctctggtctgggaactaatacgatggcttcaggcagtggcgcaccaatggcagacaataacgagggcgccgacggagtgggtaattcctcgggaaattggcattgcgattccacatggatgggcgacagagtcatcaccaccagcacccgcacctgggctctgcccacctacaacaaccatctgtacaagcaaatttccagccagtctggggccagcaacgacaaccactactttggctacagcaccccttgggggtattttgacttcaacagattccactgccacttctccccacgtgactggcaaagactcatcaacaacaattggggattccggcccaaaagactcaacttcaagctctttaacattcaagtcaaggaggtcacgcagaatgacggtacgacgacgattgccaataaccttaccagcacggttcaggtgtttactgactcggagtaccagctcccgtacgtcctcggctcggcgcatcaaggatgcctcccgccgttcccagcagacgtcttcatggtgccacagtatggatacctcaccctgaacaacgggagtcaggcggtaggacgctcttcattttactgcctggagtactttccttctcagatgctgcgtaccggaaacaactttaccttcagctacacctttgaggacgttccttttcacagcagctacgctcacagccagagtttggaccgtctcatgaatcctctcatcgaccagtacctgtattacttgagcagaacaaacactccaagcggaaccactacgcagtccaggcttcagttttctcaagccggagcgagtgacattcgggaccagtctaggaactggcttcctggaccctgttaccgccagcagcgagtatcaaagacagctgcggacaacaacaacagtgattactcgtggactggagctaccaagtatcacctcaatggaagagactctctggtgaatccgggcacagccatggccagccacaaggacgatgaagaaaagtattttcctcagagcggggttctcatcttcggaaaacaagactcgggaaaaactaatgtggacattgaaaaggtcatgattacagacgaagaggaaatcaggaccaccaatcccgtggctacggagcagtatggttctgtatctaccaatctccagagcggcaacacacaagcagctacctcagatgtcaacacacaaggcgttcttccaggcatggtctggcaggacagagacgtgtacctgcagggacccatctgggcaaagattccacacacggacggacattttcacccttctcctcttatgggaggatttggaccgaagcaccctcccccgcagattctcatcaagaataccccggtacctgcgaatccttctaccaccttcagcgcggcaaagtttgcttccctcatcacacagtactccacggggcaggtcagcgtggagatcgagtgggagctgcagaaagagaacagcaaacgctggaaccccgagatccagtatacctccaactacaacaagtctgttaatgtggactttactgtggacactaatggcgtgtattcagagcctcgccccattggcacaagatacctgactcgtaatctgtaa

SEQ ID NO: 12084 - DNA, 2208 bp, Artificial Sequence
  source: /note="Description of Artificial Sequence: Synthetic polynucleotide"
atggctgccgatggttatcttccagattggctcgaggacactctctctgaaggaataagacagtggtggaagctcaaacctggcccaccaccgccaaagcccgcagagcggcataaggacgacagcaggggtcttgtgcttcctgggtacaagtacctcggacccttcaacggactcgacaaaggagagccggtcaacgaggcagacgccgcggccctcgagcacgacaaggcctacgaccggcagctcgacagcggagacaacccgtacctcaagtacaaccacgccgacgcggagtttcaggagcgccttaaagaagatacgtcttttgggggcaacctcgcaagagcagtattccaggcgaaaaagagggttcttgaacctctgggcctggttgaggagcctgttaagacggctccgggaaaaaagaggccggtagagcactctcctgcggagctagattcctcctccggaactggaaagtcgggccaacagcctgcaagaaagggattgaattttggtcagactggagacgcagactccgtacctgacccccagcctctcggacagccaccagcagccccctctggtctgggaactaatacgatggcttcaggcagtggcgcaccaatggcagacaataacgagggcgccgacggagtgggtaattcctcgggaaattggcattgcgattccacatggatgggcgacagagtcatcaccaccagcacccgcacctgggctctgcccacctacaacaaccatctgtacaagcaaatttccagccagtctggggccagcaacgacaaccactactttggctacagcaccccttgggggtattttgacttcaacagattccactgccacttctccccacgtgactggcaaagactcatcaacaacaattggggattccggcccaaaagactcaacttcaagctctttaacattcaagtcaaggaggtcacgcagaatgacggtacgacgacgattgccaataaccttaccagcacggttcaggtgtttactgactcggagtaccagctcccgtacgtcctcggctcggcgcatcaaggatgcctcccgccgttcccagcagacgtcttcatggtgccacagtatggatacctcaccctgaacaacgggagtcaggcggtaggacgctcttcattttactgcctggagtactttccttctcagatgctgcgtaccggaaacaactttaccttcagctacacctttgaggacgttccttttcacagcagctacgctcacagccagagtttggaccgtctcatgaatcctctcatcgaccagtacctgtattacttgagcagaacaaacactccaagcggaaccactacgcagtccaggcttcagttttctcaagccggagcgagtgacattcgggaccagtctaggaactggcttcctggaccctgttaccgccagcagcgagtatcaaagacagctgcggacaacaacaacagtgattactcgtggactggagctaccaagtatcacctcaatggaagagactctctggtgaatccgggcacagccatggccagccacaaggacgatgaagaaaagtattttcctcagagcggggttctcatcttcggaaaacaagactcgggaaaaactaatgtggacattgaaaaggtcatgattacagacgaagaggaaatcaggaccaccaatcccgtggctacggagcagtatggttctgtatctaccaatctccagagcggcaacacacaagcagctacctcagatgtcaacacacaaggcgttcttccaggcatggtctggcaggacagagacgtgtacctgcagggacccatctgggcaaagattccacacacggacggacattttcacccttctcctcttatgggaggatttggaccgaagcaccctcccccgcagattctcatcaagaataccccggtacctgcgaatccttctaccaccttcagcgcggcaaagtttgcttccttcatcacacagtactccacggggcaggtcagcgtggagatcgagtgggagctgcagaaagagaacagcaaacgctggaaccccgagatccagtatacctccaactacaacaagtctgttaatgtggactttactgtggacactaatggcgtgtattcagagcctcgccccattggcacaagatacctgactcgtaatctgtaa

SEQ ID NO: 12085 - DNA, 2208 bp, Artificial Sequence
  source: /note="Description of Artificial Sequence: Synthetic polynucleotide"
atggctgccgatggttatcttccagattggctcgaggacactctctctgaaggaataagacagtggtggaagctcaaacctggcccaccaccgccaaagcccgcagagcggcataaggacgacagcaggggtcttgtgcttcctgggtacaagtacctcggacccttcaacggactcgacaaaggagagccggtcaacgaggcagacgccgcggccctcgagcacgacgaggcctacgaccggcagctcgacagcggagacaacccgtacctcaagtacaaccacgccgacgcggagtttcaggagcgccttaaagaagatacgtcttttgggggcaacctcgcaagagcagtattccaggcgaaaaagagggttcttgaacctctgggcctggttgaggagcctgttaagacggctccgggaaaaaagaggccggtagagcactctcctgcggagctagattcctcctccggaactggaaagtcgggccaacagcctgcaagaaagagattgaattttggtcagactggagacgcagactccgtacctgacccccagcctctcggacagccaccagcagccccctctggtctgggaactaatacgatggcttcaggcagtggcgcaccaatggcagacaataacgagggcgccgacggagtgggtaattcctcgggaaattggcattgcgattccacatggatgggcgacagagtcatcaccaccagcacccgcacctgggctctgcccacctacaacaaccatctgtacaagcaaatttccagccagtctggggccagcaacgacaaccactactttggctacagcaccccttgggggtattttgacttcaacagattccactgccacttctccccacgtgactggcaaagactcatcaacaacaattggggattccggcccaaaagactcaacttcaagctctttaacattcaagtcaaggaggtcacgcagaatgacggtacgacgacgattgtcaataaccttaccagcacggttcaggtgtttactgactcggagtaccagctcccgtacgtcctcggctcggcgcatcaaggatgcctcccgccgttcccagcagacgtcttcatggtgccacagtatggatacctcaccctgaacaacgggagtcaggcggtaggacgctcttcattttactgcctggagtactttccttctcagatgctgcgtaccggaaacaactttaccttcagctacacctttgaggacgttccttttcacagcagctacgctcacagccagagtttggaccgtctcatgaatcctctcatcgaccagtacctgtattacttgagcagaacaaacactccaagcggaaccactacgcagtccaggcttcagttttctcaagccggagcgagtgacattcgggaccagtctaggaactggcttcctggaccctgttaccgccagcagcgagtatcaaagacagctgcggacaacaacaacagtgattactcgtggactggagctaccaagtatcacctcaatggaagagactctctggtgaatccgggcacagccatggccagccacaaggacgatgaagaaaagtattttcctcagagcggggttctcatcttcggaaaacaagactcgggaaaaactaatgtggacattgaaaaggtcatgattacagacgaagaggaaatcaggaccaccaatcccgtggctacggagcagtatggttctgtatctaccaatctccagagcggcaacacacaagcagctacctcagatgtcaacacacaaggcgttcttccaggcatggtctggcaggacagagacgtgtacctgcagggacccatctgggcaaagattccacacacggacggacattttcacccttctcctcttatgggaggatttggaccgaagcaccctcccccgcagattctcatcaagaataccccggtacctgcgaatccttctaccaccttcagcgcggcaaagtttgcttacttcatcacacagtactccacggggcaggtcagcgtggagatcgagtgggagctgcagaaagagaacagcaaacgctggaaccccgagatccagtatacctccaactacaacaagtctgttaatgtggactttactgtggacactaatggcgtgtattcagagcctcgccccattggcacaagatacctgactcgtaatctgtaa

SEQ ID NO: 12086 - DNA, 2208 bp, Artificial Sequence
  source: /note="Description of Artificial Sequence: Synthetic polynucleotide"
atggctgccgatggttatcttccagattggctcgaggacactctctctgaaggaataagacagtggtggaagctcaaacctggcccaccaccgccaaagcccgcagagcggcataaggacgacagcaggggtcttgtgcttcctgggtacaagtacctcggacccttcaacggactcgacaaaggagagccggtcaacgaggcagacgccgcggccctcgagcacgacaaggcctacgaccggcagctcgacagcggagacaacccgtacctcaagtacaaccacgccgacgcggagtttcaggagcgccttaaagaagatacgtcttttgggggcaacctcgcaagagcagtattccaggcgaaaaagagggttcttgaacctctgggcctggttgaggagcctgttaagacggctccgggaaaaaagaggccggtagagcactctcctgcggagctagattcctcctccggaactggaaagtcgggccaacagcctgcaagaaagagattgaattttggtcagactggagacgcagactccgtacctgacccccagcctctcggacagccaccagcagccccctctggtctgggaactaatacgatggcttcaggcagtggcgcaccaatggcagacaataacgagggcgccgacggagtgggtaattcctcgggaaattggcattgcgattccacatggatgggcgacagagtcatcaccaccagcacccgcacctgggctctgcccacctacaacaaccatctgtacaagcaaatttccagccagtctggggccagcaacgacaaccactactttggctacagcaccccttgggggtattttgacttcaacagattccactgccacttctccccacgtgactggcaaagactcatcaacaacaattggggattccggcccaaaagactcaacttcaagctctttaacattcaagtcaaggaggtcacgcagaatgacggtacgacgacgattgccaataaccttaccagcacggttcaggtgtttactgactcggagtaccagctcccgtacgtcctcggctcggcgcatcaaggatgcctcccgccgttcccagcagacgtcttcatggtgccacagtatggatacctcaccctgaacaacgggagtcaggcggtaggacgctcttcattttactgcctggagtactttccttctcagatgctgcgtaccggaaacaactttaccttcagctacacctttgaggacgttccttttcacagcagctacgctcacagccagagtttggaccgtctcatgaatcctctcatcgaccagtacctgtattacttgagcagaacaaacactccaagcggaaccactacgcagtccaggcttcagttttctcaagccggagcgagtggcattcgggaccagtctaggaactggcttcctggaccctgttaccgccagcagcgagtatcaaagacagctgcggacaacaacaacagtgattactcgtggactggagctaccaagtatcacctcaatggaagggactctctggtgaatccgggcacagccatggccagccacaaggacgatgaagaaaagtattttcctcagagcggggttctcatcttcggaaaacaagactcgggaaaaactaatgtggacattgaaaaggtcatgattacagacgaagaggaaatcaggaccaccaatcccgtggctacggagcagtatggttctgtatctaccaatctccagagcggcaacacacaagcagctacctcagatgtcaacacacaaggcgttcttccaggcatggtctggcaggacagagacgtgtacctgcagggacccatctgggcaaagattccacacacggacggacattttcacccttctcctcttatgggaggatttggaccgaagcaccctcccccgcagattctcatcaagaataccccggtacctgcgaatccttctaccaccttcagcgcggcaaagtttgcttccttcatcacacagtactccacggggcaggtcagcgtggagatcgagtgggagctgcagaaagagaacagcaaacgctggaaccccgagatccagtatacctccaactacaacaagtctgttaatgtggactttactgtggacactaatggcgtgtattcagagcctcgccccattggcacaagatacctgactcgtaatctgtaa

SEQ ID NO: 12087 - DNA, 2208 bp, Artificial Sequence
  source: /note="Description of Artificial Sequence: Synthetic polynucleotide"
atggctgccgatggttatcttccagattggctcgaggacactctctctgaaggaataagacagtggtggaagctcaaacctggcccaccaccgccaaagcccgcagagcggcataaggacgacagcaggggtcttgtgcttcctgggtacaagtacctcggacccttcaacggactcgacaaaggagagccggtcaacgaggcagacgccgcggccctcgagcacgacaaggcctacgaccggcagctcgacagcggagacaacccgtacctcaagtacaaccacgccgacgcggagtttcaggagcgccttaaagaagatacgtcttttgggggcaacctcgcaagagcagtattccaggcgaaaaagagggttcttgaacctctgggcctggttgaggagcctgttaagacggctccgggaaaaaagaggccggtagagcactctcctgcggagctagattcctcctccggaactggaaagtcgggccaacagcctgcaagaaagagattgaattttggtcagactggagacgcagactccgtacctgacccccagcctctcggacagccaccagcagccccctctggtctgggaactaatacgatggcttcaggcagtggcgcaccaatggcagacaataacgagggcgccgacggagtgggtaattcctcgggaaattggcattgcgattccacatggatgggcgacagagtcatcaccaccagcacccgcacctgggctctgcccacctacaacaaccatctgtacaagcaaatttccagccagtctggggccagcaacgacaaccactactttggctacagcaccccttgggggtattttgacttcaacagattccactgccacttctccccacgtgactggcaaagactcatcaacaacaattggggattccggcccaaaagactcaacttcaagctctttaacattcaagtcaaggaggtcacgcagaatgacggtacgacgacgattgccaataaccttaccagcacggttcaggtgtttactgactcggagtaccagctcccgtacgtcctcggctcggcgcatcaaggatgcctcccgccgttcccagcagacgtcttcatggtgccacagtatggatacctcaccctgaacaacgggagtcaggcggtaggacgctcttcattttactgcctggagtactttccttctcagatgctgcgtaccggaaacaactttaccttcagctacacctttgaggacgttccttttcacagcagctacgctcacagccagagtttggaccgtctcatgaatcctctcatcgaccagtacctgtattacttgagcagaacaaacactccaagcggaaccactacgcagtccaggcttcagttttctcaagccggagcgagtgacattcgggaccagtctaggaactggcttcctggaccctgttaccgccagcagcgagtatcaaagacagctgcggacaacaacaacagtgattactcgtggactggagctaccaagtatcacctcaatggaagagactctctggtgaatccgggcacagccatggccagccacaaggacgatgaagaaaagtattttcctcagagcggggttctcatcttcggaaaacaagactcgggaaaaactaatgtggacattgaaaaggtcgtgattacagacgaagaggaaatcaggaccaccaatcccgtggctacggagcagtatggttctgtatctaccaatctccagagcggcaacacacaagcagctacctcagatgtcaacacacaaggcgttcttccaggcatggtctggcaggacagagacgtgtacctgcagggacccatctgggcaaagattccacacacggacggacattttcacccttctcctcttatgggaggatttggaccgaagcaccctcccccgcagattctcatcaagaataccccggtacctgcgaatccttctaccaccttcagcgcggcaaagtttgcttccttcatcacacagtactccacggggcaggtcagcgtggagatcgagtgggagctgcagaaagagaacagcaaacgctggaaccccgagatccagtatacctccaactacaacaagtctgttaatgtggactttactgtggacactaatggcgtgtattcagagcctcgccccattggcacaagatacctgactcgtaatctgtaa

SEQ ID NO: 12088 - DNA, 2208 bp, Artificial Sequence
  source: /note="Description of Artificial Sequence: Synthetic polynucleotide"
atggctgccgatggttatcttccagattggctcgaggacactctctctgaaggaataagacagtggtggaagctcaaacctggcccaccaccgccaaagcccgcagagcggcataaggacgacagcaggggtcttgtgcttcctgggtacaagtacctcggacccttcaacggactcgacaaaggagagccggtcaacgaggcagacgccgcggccctcgagcacgacaaggcctacgaccggcagctcgacagcggagacaacccgtacctcaagtacaaccacgccgacgcggagtttcaggagcgccttaaagaagatacgtcttttgggggcaacctcgcaagagcagtattccaggcgaaaaagagggttcttgaacctctgggcctggttgaggagcctgttaagacggctccgggaaaaaagaggccggtagagcactctcctgcggagctagattcctcctccggaactggaaagtcgggccaacagcctgcaagaaagagattgaattttggtcagactggagacgcagactccgtacctgacccccagcctctcggacagccaccagcagccccctctggtctgggaactaatacgatggcttcaggcagtggcgcaccaatggcagacaataacgagggcgccgacggagtgggtaattcctcgggaaattggcattgcgattccacatggatgggcgacagagtcatcaccaccagcacccgcacctgggctctgcccacctacaacaaccatctgtacaagcaaatttccagccagtctggggccagcaacgacaaccactactttggctacagcaccccttgggggtattttgacttcaacagattccactgccacttctccccacgtgactggcaaagactcatcaacaacaattggggattccggcccaaaagactcaacttcaagctctttaacattcaagtcaaggaggtcacgcagaatgacggtacgacgacgattgccaataaccttaccagcacggttcaggtgtttactgactcggagtaccagctcccgtacgtcctcggctcggcgcatcaaggatgcctcccgccgttcccagcagacgtcttcatggtgccacagtatggatacctcaccctgaacaacgggagtcaggcggtaggacgctcttcattttactgcctggagtactttccttctcagatgctgcgtaccggaaacaactttaccttcagctacacctttgaggacgttccttttcacagcagctacgctcacagccagagtttggaccgtctcatgaatcctctcatcgaccagtacctgtattacttgagcagaacaaacactccaagcggaaccactacgcagtccaggcttcagttttctcaagccggagcgagtgacattcgggaccagtctaggaactggcttcctggaccctgttaccgccagcagcgagtatcaaagacagctgcggacaacaacaacagtgattactcgtggactggagctaccaagtatcacctcaatggaagagactctctggtgaatccgggcacagccatggccagccacaaggacgatgaagaaaagtattttcctcagagcggggttctcatcttcggaaaacaagactcgggaaaaactaatgtggacattgaaaaggtcatgattacagacgaagaggaaatcaggaccaccaatcccgtggctacggagcagtatggttctgtatctaccaatctccagagcggcgacacacaagcagctacctcagatgtcaacacacaaggcgttcttccaggcatggtctggcaggacagagacgtgtacctgcagggacccatctgggcaaagattccacacacggacggacattttcacccttctcctcttatgggaggatttggaccgaagcaccctcccccgcagattctcatcaagaataccccggtacctgcgaatccttctaccaccttcagcgcggcaaagtttgcttccttcatcacacagtactccacggggcaggtcagcgtggagatcgagtgggagctgcagaaagagaacagcaaacgctggaaccccgagatccagtatacctccaactacaacaagtctgttaatgtggactttactgtggacactaatggcgtgtattcagagcctcgccccattggcacaagatacctgactcgtaatctgtaa

SEQ ID NO: 12089 - DNA, 2208 bp, Artificial Sequence
  source: /note="Description of Artificial Sequence: Synthetic polynucleotide"
atggctgccgatggttatcttccagattggctcgaggacactctctctgaaggaataagacagtggtggaagctcaaacctggcccaccaccgccaaagcccgcagagcggcataaggacgacagcaggggtcttgtgcttcctgggtacaagtacctcggacccttcaacggactcgacaaaggagagccggtcaacgaggcagacgccgcggccctcgagcacgacaaggcctacgaccggcagctcgacagcggagacaacccgtacctcaagtacaaccacgccgacgcggagtttcaggagcgccttaaagaagatacgtcttttgggggcaacctcgcaagagcagtattccaggcgaaaaagagggttcttgaacctctgggcctggttgaggagcctgttaagacggctccgggaaaaaagaggccggtagagcactctcctgcggagctagattcctcctccggaactggaaagtcgggccaacagcctgcaagaaagagattgaattttggtcagactggagacgcagactccgtacctgacccccagcctctcggacagccaccagcagccccctctggtctgggaactaatacgatggcttcaggcagtggcgcaccaatggcagacaataacgagggcgccgacggagtgggtaattcctcgggaaattggcattgcgattccacatggatgggcgacagagtcatcaccaccagcacccgcacctgggctctgcccacctacaacaaccatctgtacaagcaaatttccagccagtctggggccagcaacgacaaccactactttggctacagcaccccttgggggtattttgacttcaacagattccactgccacttctccccacgtgactggcaaagactcatcaacaacaattggggattccggcccaaaagactcaacttcaggctctttaacattcaagtcaaggaggtcacgcagaatgacggtacgacgacgattgccaataaccttaccagcacggttcaggtgtttactgactcggagtaccagctcccgtacgtcctcggctcggcgcatcaaggatgcctcccgccgttcccagcagacgtcttcatggtgccacagtatggatacctcaccctgaacaacgggagtcaggcggtaggacgctcttcattttactgcctggagtactttccttctcagatgctgcgtaccggaaacaactttaccttcagctacacctttgaggacgttccttttcacagcagctacgctcacagccagagtttggaccgtctcatgaatcctctcatcgaccagtacctgtattacttgagcagaacaaacactccaagcggaaccactacgcagtccaggcttcagttttctcaagccggagcgagtgacattcgggaccagtctaggaactggcttcctggaccctgttaccgccagcagcgagtatcaaagacagctgcggacaacaacaacagtgattactcgtggactggagctaccaagtatcacctcaatggaagagactctctggtgaatccgggcacagccatggccagccacaaggacgatgaagaaaagtattttcctcagagcggggttctcatcttcggaaaacaagactcgggaaaaactaatgtggacattgaaaaggtcatgattacagacgaagaggaaatcaggaccaccaatcccgtggctacggagcagtatggttctgtatctaccaatctccagagcggcaacacacaagcagctacctcagatgtcaacacacaaggcgttcttccaggcatggtctggcaggacagagacgtgtacctgcagggacccatctgggcaaagattccacacacggacggacattttcacccttctcctcttatgggaggatttggaccgaagcaccctcccccgcagattctcatcaagaataccccggtacctgcgaatccttctaccaccttcagcgcggcaaagtttgcttccttcatcacacagtactccacggggcaggtcagcgtggagatcgagtgggagctgcagaaagagaacagcaaacgctggaaccccgagatccagtatacctccaactacaacaagtctgttaatgtggactttactgtggacactaatggcgtgtattcagagcctcgccccattggcacaagatacctgactcgtaatctgtaa

SEQ ID NO: 12090 - DNA, 2208 bp, Artificial Sequence
  source: /note="Description of Artificial Sequence: Synthetic polynucleotide"
atggctgccgatggttatcttccagattggctcgaggacactctctctgaaggaataagacagtggtggaagctcaaacctggcccaccaccgccaaagcccgcagagcggcataaggacgacagcaggggtcttgtgcttcctgggtacaagtacctcggacccttcaacggactcgacaaaggagagccggtcaacgaggcagacgccgcggccctcgagcacggcaaggcctacgaccggcagctcgacagcggagacaacccgtacctcaagtacaaccacgccgacgcggagtttcaggagcgccttaaagaagatacgtcttttgggggcaacctcgcaagagcagtattccaggcgaaaaagagggttcttgaacctctgggcctggttgaggagcctgttaagacggctccgggaaaaaagaggccggtagagcactctcctgcggagctagattcctcctccggaactggaaagtcgggccaacagcctgcaagaaagagattgaattttggtcagactggagacgcagactccgtacctgacccccagcctctcggacagccaccagcagccccctctggtctgggaactaatacgatggcttcaggcagtggcgcaccaatggcagacaataacgagggcgccgacggagtgggtaattcctcgggaaattggcattgcgattccacatggatgggcgacagagtcatcaccaccagcacccgcacctgggctctgcccacctacaacaaccatctgtacaagcaaatttccagccagtctggggccagcaacgacaaccactactttggctacagcaccccttgggggtattttgacttcaacagattccactgccacttctccccacgtgactggcaaagactcatcaacaacaattggggattccggcccaaaagactcaacttcaagctctttaacattcaagtcaaggaggtcacgcagaatgacggtacgacgacgattgccaataaccttaccagcacggttcaggtgtttactgactcggagtaccagctcccgtacgtcctcggctcggcgcatcaaggatgcctcccgccgttcccagcagacgtcttcatggtgccacagtatggatacctcaccctgaacaacgggagtcaggcggtaggacgctcttcattttactgcctggagtactttccttctcagatgctgcgtaccggaaacaactttaccttcagctacacctttgaggacgttccttttcacagcagctacgctcacagccagagtttggaccgtctcatgaatcctctcatcgaccagtacctgtattacttgagcagaacaaacactccaagcggaaccactacgcagtccaggcttcagttttctcaagccggagcgagtgacattcgggaccagtctaggaactggcttcctggaccctgttaccgccagcagcgagtatcaaagacagctgcggacaacaacaacagtgattactcgtggactggagctaccaagtatcacctcaatggaagagactctctggtgaatccgggcacagccatggccagccacaaggacgatgaagaaaagtattttcctcagagcggggttctcatcttcggaaaacaagactcgggaaaaactaatgtggacattgaaaaggtcatgattacagacgaagaggaaatcaggaccaccaatcccgtggctacggagcagtatggttctgtatctaccaatctccagagcggcaacacacaagcagctacctcagatgtcaacacacaaggcgttcttccaggcatggtctggcaggacagagacgtgtacctgcagggacccatctgggcaaagattccacacacggacggacattttcacccttctcctcttatgggaggatttggaccgaagcaccctcccccgcagattctcatcaagaataccccggtacctgcgaatccttctaccaccttcagcgcggcaaagtttgcttccttcatcacacagtactccacggggcaggtcagcgtggagatcgagtgggagctgcagaaagagaacagcaaacgctggaaccccgagatccagtatacctccaactacaacaagtctgttaatgtggactttactgtggacactaatggcgtgtattcagagcctcgccccattggcacaagatacctgactcgtaatctgtaa

SEQ ID NO: 12091 - DNA, 2208 bp, Artificial Sequence
  source: /note="Description of Artificial Sequence: Synthetic polynucleotide"
atggctgccgatggttatcttccagattggctcgaggacactctctctgaaggaataagacagtggtggaagctcaaacctggcccaccaccgccaaagcccgcagagcggcataaggacgacagcaggggtcttgtgcttcctgggtacaagtacctcggacccttcaacggactcgacaaaggagagccggtcaacgaggcagacgccgcggccctcgagcacgacaaggcctacgaccggcagctcgacagcggagacaacccgtacctcaagtacaaccacgccgacgcggagtttcaggagcgccttaaagaagatacgtcttttgggggcaacctcgcaagagcagtattccaggcgaaaaagagggttcttgaacctctgggcctggttgaggagcctgttaagacggctccgggaaaaaagaggccggtagagcactctcctgcggagctagattcctcctccggaactggaaagtcgggccaacagcctgcaagaaagagattgaattttggtcagactggagacgcagactccgtacctgacccccagcctctcggacagccaccagcagccccctctggtccgggaactaatacgatggcttcaggcagtggcgcaccaatggcagacaataacgagggcgccgacggagtgggtaattcctcgggaaattggcattgcgattccacatggatgggcgacagagtcatcaccaccagcacccgcacctgggctctgcccacctacaacaaccatctgtacaagcaaatttccagccagtctggggccagcaacgacaaccactactttggctacagcaccccttgggggtattttgacttcaacagattccactgccacttctccccacgtgactggcaaagactcatcaacaacaattggggattccggcccaaaagactcaacttcaagctctttaacattcaagtcaaggaggtcacgcagaatgacggtacgacgacgattgccaataaccttaccagcacggttcaggtgtttactgactcggagtaccagctcccgtacgtcctcggctcggcgcatcaaggatgcctcccgccgttcccagcagacgtcttcatggtgccacagtatggatacctcaccctgaacaacgggagtcaggcggtaggacgctcttcattttactgcctggagtactttccttctcagatgctgcgtaccggaaacaactttaccttcagctacacctttgaggacgttccttttcacagcagctacgctcacagccagagtttggaccgtctcatgaatcctctcatcgaccagtacctgtattacttgagcagaacaaacactccaagcggaaccactacgcagtccaggcttcagttttctcaagccggagcgagtgacattcgggaccagtctaggaactggcttcctggaccctgttaccgccagcagcgagtatcaaagacagctgcggacaacaacaacagtgattactcgtggactggagctaccaagtatcacctcaatggaagagactctctggtgaatccgggcacagccatggccagccacaaggacgatgaagaaaagtattttcctcagagcggggttctcatcttcggaaaacaagactcgggaaaaactaatgtggacattgaaaaggtcatgattacagacgaagaggaaatcaggaccaccaatcccgtggctacggagcagtatggttctgtatctaccaatctccagagcggcaacacacaagcagctacctcagatgtcaacacacaaggcgttcttccaggcatggtctggcaggacagagacgtgtacctgcagggacccatctgggcaaagattccacacacggacggacattttcacccttctcctcttatgggaggatttggaccgaagcaccctcccccgcagattctcatcaagaataccccggtacctgcgaatccttctaccaccttcagcgcggcaaagtttgcttccttcatcacacagtactccacggggcaggtcagcgtggagatcgagtgggagctgcagaaagagaacagcaaacgctggaaccccgagatccagtatacctccaactacaacaagtctgttaatgtggactttactgtggacaccaatggcgtgtattcagagcctcgccccattggcacaagatacctgactcgtaatctgtaa

SEQ ID NO: 12092 - DNA, 2208 bp, Artificial Sequence
  source: /note="Description of Artificial Sequence: Synthetic polynucleotide"
atggctgccgatggttatcttccagattggctcgaggacactctctctgaaggaataagacagtggtggaagctcaaacctggcccaccaccgccaaagcccgcagagcggcataaggacgacagcaggggtcttgtgcttcctgggtacaagtacctcggacccttcaacggactcgacaaaggagagccggtcaacgaggcagacgccgcggccctcgagcacgacaaggcctacgaccggcagctcgacagcggagacaacccgtacctcaagtacaaccacgccgacgcggagtttcaggagcgccttaaagaagatacgtcttttgggggcaacctcgcaagagcagtattccaggcgaaaaagagggttcttgaacctctgggcctggttgaggagcctgttaagacggctccgggaaaaaagaggccggtagagcactctcctgcggggccagattcctcctccggaactggaaagtcgggccaacagcctgcaagaaagagattgaattttggtcagactggagacgcagactccgtacctgacccccagcctctcggacagccaccagcagccccctctggtctgggaactaatacgatggcttcaggcagtggcgcaccaatggcagacaataacgagggcgccgacggagtgggtaattcctcgggaaattggcattgcgattccacatggatgggcgacagagtcatcaccaccagcacccgcacctgggctctgcccacctacaacaaccatctgtacaagcaaatttccagccagtctggagccagcaacgacaaccactactttggctacagcaccccttgggggtattttgacttcaacagattccactgccacttctccccacgtgactggcaaagactcatcaacaacaattggggattccggcccaaaagactcaacttcgagctctttaacattcaagtcaaggaggtcacgcagaatgacggtacgacgacgattgccaataaccttaccagcacggttcaggtgtttactgactcggagtaccagctcccgtacgtcctcggctcggcgcatcaaggatgcctcccgccgttcccagcagacgtcttcatggtgccacagtatggatacctcaccctgaacaacgggagtcaggcggtaggacgctcttcattttactgcctggagtactttccttctcagatgctgcgtaccggaaacaactttaccttcagctacacctttgaggacgttccttttcacagcagctacgctcacagccagagtttggaccgtctcatgaatcctctcatcgaccagtacctgtattacttgagcagaacaaacactccaagcggaaccactacgcagtccaggcttcagttttctcaagccggagcgagtgacattcgggaccagtctaggaactggcttcctggaccctgttaccgccagcagcgagtatcaaagacagctgcggacaacaacaacagtgattactcgtggactggagctaccaagtatcacctcaatggaagagactctctggtgaatccgggcacagccatggccagccacaaggacgatgaagaaaagtattttcctcagagcggggttctcatcttcggaaaacaagactcggaaaaaactaatgtggacattgaaaaggtcatgattacagacgaagaggaaatcaggaccaccaatcccgtggctacggagcagtatggttctgtatctaccaatctccagagcggcaacacacaagcagctacctcagatgtcaacacacaaggcgttcttccaggcatggtctggcaggacagagacgtgtacctgcagggacccatctgggcaaagattccacacacggacggacactttcacccttctcctcttatgggaggatttggactgaagcaccctcccccgcagattctcatcaagagtaccccggtacctgcgaatccttctaccaccttcagcgcggcaaagtttgcttccttcatcacacagtactccacggggcaggtcagcgtggagatcgagtgggagctgcagaaagagaacagcaaacgctggaaccccgagatccagtatacctccaactacaacaagtctgttaatgtggactttactgtggacactaatggcgtgtattcagagcctcgccccattggcacaagatacctgactcgtaatctgtaa

SEQ ID NO: 12093 - DNA, 2208 bp, Artificial Sequence
  source: /note="Description of Artificial Sequence: Synthetic polynucleotide"
atggctgccgatggttatcttccagattggctcgaggacactctctctgaaggaataagacagtggtggaagctcaaacctggcccaccaccgccaaagcccgcagagcggcataaggacgacagcaggggtcttgtgcttcctgggtacaagtacctcggacccttcaacggactcgacaaaggagagccggtcaacgaggcagacgccgcggccctcgagcacgacaaggcctacgaccggcagctcgacagcggagacaacccgtacctcaagtacaaccacgccgacgcggagtttcaggagcgccttaaagaagatacgtcttttgggggcaacctcgcaagagcagtattccaggcgaaaaagagggttcttgaacctctgggcctggttgaggagcctgttaagacggctccgggaaaaaagaggccggtagagcactctcctgcggggccagattcctcctccggaactggaaagtcgggccaacagcctgcaagaaagagattgaattttggtcagactggagacgcagactccgtacctgacccccagcctctcggacagccaccagcagccccctctggtctgggaactaatacgatggcttcaggcagtggcgcaccaatggcagacaataacgagggcgccgacggagtgggtaattcctcgggaaattggcattgcgattccacatggatgggcgacagagtcatcaccaccagcacccgcacctgggctctgcccacctacaacaaccatctgtacaagcaaatttccagccagtctggagccagcaacgacaaccactactttggctacagcaccccttgggggtattttgacttcaacagattccactgccacttctccccacgtgactggcaaagactcatcaacaacaattggggattccggcccaaaagactcaacttcgagctctttaacattcaagtcaaggaggtcacgcagaatgacggtacgacgacgattgccaataaccttaccagcacggttcaggtgtttactgactcggagtaccagctcccgtacgtcctcggctcggcgcatcaaggatgcctcccgccgttcccagcagacgtcttcatggtgccacagtatggatacctcaccctgaacaacgggagtcaggcggtaggacgctcttcattttactgcctggagtactttccttctcagatgctgcgtaccggaaacaactttaccttcagctacacctttgaggacgttccttttcacagcagctacgctcacagccagagtttggaccgtctcatgaatcctctcatcgaccagtacctgtattacttgagcagaacaaacactccaagcggaaccactacgcagtccaggcttcagttttctcaagccggagcgagtgacattcgggaccagtctaggaactggcttcctggaccctgttaccgccagcagcgagtatcaaagacagctgcggacaacaacaacagtgattactcgtggactggagctaccaagtatcacctcaatggaagagactctctggtgaatccgggcacagccatggccagccacaaggacgatgaagaaaagtattttcctcagagcggggttctcatcttcggaaaacaagactcgggaaaaactaatgtggacattgaaaaggtcatgattacagacgaagaggaaatcaggaccaccaatcccgtggctacggagcagtatggttctgtatctaccaatctccagagcggcaacacacaagcagctacctcagatgtcaacacacaaggcgttcttccaggcatggtctggcaggacagagacgtgtacctgcagggacccatctgggcaaagattccacacacggacggacactttcacccttctcctcttatgggaggatttggactgaagcaccctcccccgcagattctcatcaagagtaccccggtacctgcgaatccttctaccaccctcagcgcggcaaagtttgcttccttcatcacacagtactccacggggcaggtcagcgtggagatcgagtgggagctgcagaaagagaacagcaaacgctggaaccccgagatccagtatacctccaactacaacaagtctgttaatgtggactttactgtggacactaatggcgtgtattcagagcctcgccccattggcacaagatacctgactcgtaatctgtaa

SEQ ID NO: 12094 - DNA, 2205 bp, Artificial Sequence
  source: /note="Description of Artificial Sequence: Synthetic polynucleotide"
atggctgccgatggttatcttccagattggctcgaggacactctctctgaaggaataagacagtggtggaagctcaaacctggcccaccaccgccaaagcccgcagagcggcataaggacgacagcaggggtcttgtgcttcctgggtacaagtacctcggacccttcaacggactcgacaaaggagagccggtcaacgaggcagacgccgcggccctcgagcacgacaaggcctacgaccggcagctcgacagcggagacaacccgtacctcaagtacaaccacgccgacgcggagtttcaggagcgccttaaagaagatacgtcttttgggggcaacctcgcaagagcagtattccaggcgaaaaagagggttcttgaacctctgggcctggttgaggagcctgttaagacggctccgggaaaaaagaggccggtagagcactctcctgcggggccagattcctcctccggaactggaaagtcgggccaacagcctgcaagaaagagattgaattttggtcagactggagacgcagactccgtacctgacccccagcctctcggacagccaccagcagccccctctggtctgggaactaatacgatggcttcaggcagtggcgcaccaatggcagacaataacgagggcgccgacggagtgggtaattcctcgggaaattggcattgcgattccacatggatgggcgacagagtcatcaccaccagcacccgcacctgggctctgcccacctacaacaaccatctgtacaagcaaatttccagccagtctggagccagcaacgacaaccactactttggctacagcaccccttgggggtattttgacttcaacagattccactgccacttctccccacgtgactggcaaagactcatcaacaacaattggggattccggcccaaaagactcaacttcgagctctttaacattcaagtcaaggaggtcacgcagaatgacggtacgacgacgattgccaataaccttaccagcacggttcaggtgtttactgactcggagtaccagctcccgtacgtcctcggctcggcgcatcaaggatgcctcccgccgttcccagcagacgtcttcatggtgccacagtatggatacctcaccctgaacaacgggagtcaggcggtaggacgctcttcattttactgcctggagtactttccttctcagatgctgcgtaccggaaacaactttaccttcagctacacctttgaggacgttccttttcacagcagctacgctcacagccagagtttggaccgtctcatgaatcctctcatcgaccagtacctgtattacttgagcagaacaaacactccaagcggaaccactacgcagtccaggcttcagttttctcaagccggagcgagtgacattcgggaccagtctaggaactggcttcctggaccctgttaccgccagcagcgagtatcaaagacagctgcggacaacaacagtgattactcgtggactggagctaccaagtatcacctcaatggaagagactctctggtgaatccgggcacagccatggccagccacaaggacgatgaagaaaagtattttcctcagagcggggttctcatcttcggaaaacaagactcgggaaaaactaatgtggacattgaaaaggtcatgattacagacgaagaggaaatcaggaccaccaatcccgtggctacggagcagtatggttctgtatctaccaatctccagagcggcaacacacaagcagctacctcagatgtcaacacacaaggcgttcttccaggcatggtctggcaggacagagacgtgtacctgcagggacccatctgggcaaagattccacacacggacggacactttcacccttctcctcttatgggaggatttggactgaagcaccctcccccgcagattctcatcaagagtaccccggtacctgcgaatccttctaccaccttcagcgcggcaaagtttgcttccttcatcacacagtactccacggggcaggtcagcgtggagatcgagtgggagctgcagaaagagaacagcaaacgctggaaccccgagatccagtatacctccaactacaacaagtctgttaatgtggactttactgtggacactaatggcgtgtattcagagcctcgccccattggcacaagatacctgactcgtaatctgtaa

SEQ ID NO: 12095 - DNA, 2208 bp, Artificial Sequence
  source: /note="Description of Artificial Sequence: Synthetic polynucleotide"
atggctgccgatggttatcttccagattggctcgaggacactctctctgaaggaataagacagtggtggaagctcaaacctggcccaccaccgccaaagcccgcagagcggcataaggacgacagcaggggtcttgtgcttcctgggtacaagtacctcggacccttcaacggactcgacaagggggagccggtcaacgaggcagacgccgcggccctcgagcacgacaaggcctacgaccggcagctcgacagcggagacaacccgtacctcaagtacaaccacgccgacgcggagtttcaggagcgtcttaaagaagatacgtcttttgggggcaacctcggacgaacagtcttccaggcgaaaaagagggttcttgaacctctgggcctggttgaggaacctgttaagacggctccgggaaaaaagaggccggtagagcactctcctgtggagccagactcctcctcgggaaccggaaaggcgggccagcagcctgcaagaaaaagattgaatttcggtcagactggagacgcagactccgtacctgacccccagcctctcggacagccaccagcagccccctctggtctgggaactaatacgatggctacaggcagtggcgcaccaatggcagacaataacgagggcgccgacggagtgggtaattcctcgggaaattggcattgcgattccacatggatgggcgacagagtcatcaccaccagcacccgcacctgggctctgcccacctacaacaaccatctgtacaagcaaatttccagccaatcaggagcatcgaacgacaaccactactttggctacagcaccccctgggggtattttgacttcaacagattccactgccacttttcgccacgtgactggcaaagactcatcaacaacaactggggattccggcccaagagactcagcttcaagctctttaacattcaagtcaaggaggtcacgcagaatgacggtacgacgacgattgccaataaccttaccagcacggttcaggtctttactgactcggagtaccagctcccgtacgtcctcggctcggcgcatcaaggatgcctcccgccgttcccagcagacgtcttcatggtgccacagtatggatacctcaccctgaacaacgggagtcaggcggtaggacgctcttcattttactgcctggagtacttcccttctcagatgcttcgcacgggaaacaactttaccttcagctacacctttgaggacgtgccttttcacagcagctacgctcacagccaaagtctggaccgtctcatgaatcctctcatcgaccaatacctgtattacttgagcaaaacaaacgctccaagcggaaccaccacgatgtccaggcttcagttttctcaggccggagcgagtgacattcgggaccagtctagaaactggcttcctggaccctgttaccgccagcagcgagtatcaaagacagctgcggacaacaacaacagtgattactcgtggactggagctaccaagtaccacctcaatggaagagactctctggtgaacccgggcccagctatggccagccacaaggatgatgaagaaaaatattttcctcagagcggggttctcatcttcgggaaacaaggctcaaataaaactaatgtggacattgaaaaggttatgattacagacgaagaggaaatcaggaccaccaatcccgtggctacggagcagtatggttctgtatctaccaaccttcaaagcggcaacacacaagcagctacctcagatgtcaacacacaaggcgttcttcctggcatggtctggcaggacagagatgtgtacctgcaggggcccatctgggcaaagattcctcacacggacggacactttcacccttctcccctcatgggcggatttggattgaagcaccctcccccacagattctcatcaagaataccccggtacctgcgaatccttcgaccaccttcagtgcggcaaagtttgcttccttcatcacacagtattccacgggacaggtcagcgtggagatagagtgggagctgcagaaggagaacagcaaacgctggaaccccgagatccagtatacttccaactacaacaaatctgttaatgtggactttactgtggacactaatggtgtgtattcagagcctcgccccattggcaccagatacctgactcgtaatctgtaa

SEQ ID NO: 12096 - DNA, 2208 bp, Artificial Sequence
  source: /note="Description of Artificial Sequence: Synthetic polynucleotide"
atggctgccgatggttatcttccagattggctcgaggacactctctctgaaggaataagacagtggtggaagctcaaacctggcccaccaccgccaaagcccgcagagcggcataaggacgacagcaggggtcttgtgcttcctgggtacaagtacctcggacccttcaacggactcgacaagggggagccggtcaacgaggcagacgccgcggccctcgagcacgacaaggcctacgaccggcagctcgacagcggagacaacccgtacctcaagtacaaccacgccgacgcggagtttcaggagcgtcttaaagaagatacgtcttttgggggcaacctcggacgagcagtcttccaggcgaaaaagagggttcttgaacctctgggcctggttgaggaacctgttaagacggctccgggaaaaaagaggccggtagagcactctcctgtggagccagactcctcctcgggaaccggaaaggcgggccagcagcctgcaagaaaaagattgaatttcggtcagactggagacgcagactccgtacctgacccccagcctctcggacagccaccagcagccccctctggtctgggaactaatacgatggctacaggcagtggcgcaccaatggcagacaataacgagggcgccgacggagtgggtaattcctcgggaaattggcattgcgattccacatggatgggcgacagagtcatcaccaccagcacccgcacctgggctctgcccacctacaacaaccatctgtacaagcaaatttccagccaatcaggagcatcgaacgacaaccactactttggctacagcaccccctgggggtattttgacttcaacagattccactgccacttttcgccacgtgactggcaaagactcatcaacaacaactggggattccggcccaagagactcagcttcaagctctttaacattcaagtcaaggaggtcacgcagaatgacggtacgacgacgattgccaataaccttaccagcacggttcaggtctttactgactcggagtaccagctcccgtacgtcctcggctcggcgcatcaaggatgcctcccgccgttcccagcagacgtcttcatggtgccacagtatggatacctcaccctgaacaacgggagtcaggcggtaggacgctcttcattttactgcctggagtacttcccttctcagatgcttcgcacgggaaacaactttaccttcagctacacctttgaggacgtgccttttcacagcagctacgctcacagccaaagtctggaccgtctcatgaatcctctcatcgaccaatacctgtattacttgagcaaaacaaacgctccaagcggaaccaccacgatgtccaggcttcagttttctcaggccggagcgagtgacattcgggaccagtctagaaactggcttcctggaccctgttaccgccagcagcgagtatcaaagacagctgcggacaacaacaacagtgattactcgtggactggagctaccaagtaccacctcaatggaagagactctctggtgaacccgggcccagctatggccaaccacaaggatgatgaagaaaaatattttcctcagagcggggttctcatcttcgggaaacaaggctcaaataaaactaatgtggacattgaaaaggttatgattacagacgaagaggaaatcaggaccaccaatcccgtggctacggagcagtatggttctgtatctaccaaccttcaaagcggcaacacacaagcagctacctcagatgtcaacacacaaggcgttcttcctggcatggtctggcaggacagagatgtgtacctgcaggggcccatctgggcaaagattcctcacacggacggacactttcacccttctcccctcatgggcggatttggattgaagcaccctcccccacagattctcatcaagaataccccggtacctgcgaatccttcgaccaccttcagtgcggcaaagtttgcttccttcatcacacagtattccacgggacaggtcagcgtggagatagagtgggagctgcagaaggagaacagcaaacgctggaaccccgagatccagtatacttccaactacaacaaatctgttaatgtggactttactgtggacactaatggtgtgtattcagagcctcgccccattggcaccagatacctgactcgtaatctgtaa

SEQ ID NO: 12097 - DNA, 2208 bp, Artificial Sequence
  source: /note="Description of Artificial Sequence: Synthetic polynucleotide"
atggctgccgatggttatcttccagattggctcgaggacactctctctgaaggaataagacagtggtggaagctcaaacctggcccaccaccgccaaagcccgcagagcggcataaggacgacagcaggggtcttgtgcttcctgggtacaagtacctcggacccttcaacggactcgacaagggggagccggtcaacgaggcagacgccgcggccctcgagcacgacaaggcctacgaccggcagctcgacagcggagacaacccgtacctcaagtacaaccacgccgacgcggagtttcaggagcgtcttaaagaagatacgtcttttgggggcaacctcggacgagcagtcttccaggcgaaaaagagggttcttgaacctctgggcctggttgaggaacctgttaagacggctccgggaaaaaagaggccggtagagcactctcctgtggagccagactcctcctcgggaaccggaaaggcgggccagcagcctgcaagaaaaagattgaatttcggtcagactggagacgcagactccgtacctgacccccagcctctcggacagccaccagcagccccctctggtctgggaactaatacgatggctacaggcagtggcgcaccaatggcagacaataacgagggcgccgacggagtgggtaattcctcgggaaattggcattgcgattccacatggatgggcgacagagtcatcaccaccagcacccgcacctgggctctgcccacctacaacaaccatctgtacaagcaaatttccagccaatcaggagcatcgaacgacaaccactactttggctacagcaccccctgggggtattttgacttcaacagattccactgccacttttcgccacgtgactggcaaagactcatcaacaacaactggggattccggcccaagagactcagcttcaagctctttaacattcaagtcaaggaggtcacgcagaatgacggtacgacgacgattgccaataaccttaccagcacggttcaggtctttactgactcggagtaccagctcccgtacgtcctcggctcggcgcatcaaggatgcctcccgccgttcccagcagacgtcttcatggtgccacagtatggatacctcaccctgaacaacgggagtcaggcggtaggacgctcttcattttactgcctggagtacttcccttctcagatgcttcgcacgggaaacaactttaccttcagctacacctttgaggacgtgccttttcacagcagctacgctcacagccaaagtctggaccgtctcatgaatcctctcatcgaccaatacctgtattacttgagcaaaacaaacgctccaagcggaaccaccacgatgtccaggcttcagttttctcaggccggagcgagtgacattcgggaccagtctagaaactggcttcctggaccctgttaccgccagcagcgagtatcaaagacagctgcggacaacaacaacagtgattactcgtggactggagctaccaagtaccacctcaatggaagagactctctggtgaacccgggcccagctatggccagccacaaggatgatgaagaaaaatattttcctcagagcggggttctcatcttcgggaaacaaggctcaaataaaactaatgtggacattgaaaaggttatgattacagacgaagaggaaatcaggaccaccaatcccgtggctacggagcagtatggttctgtatctaccaaccttcaaagcggcaacacacaagcagctacctcagatgtcaacacacaaggcgttcttcctggcatggtctggcaggacagagatgtgtacctgcaggggcccatctgggcaaagattcctcacacggacggacactttcacccttctcccctcatgggcggatttggattgaagcaccctcccccacagattctcatcaagaataccccggtacctgcgaatccttcgaccaccttcagtgcggcaaagtttgcttccttcatcacacagtattccacgggacaggtcagcgtggagatagagtgggagctgcagaaggagaacagcaaacgctggaaccccgagatccagtatacttccaactacaacaaatctgttaatgtggactttactgtggacactaatggtgtgtattcagagcctcgccccattggcaccagatacccgactcgtaatctgtaa

SEQ ID NO: 12098 - DNA, 2208 bp, Artificial Sequence
  source: /note="Description of Artificial Sequence: Synthetic polynucleotide"
atggctgccgatggttatcttccagattggctcgaggacactctctctgaaggaataagacagtggtggaagctcaaacctggcccaccaccgccaaagcccgcagagcggcataaggacgacagcaggggtcttgtgcttcctgggtacaagtacctcggacccttcaacggactcgacaagggggagccggtcaacgaggcagacgccgcggccctcgagcacgacaaggcctacgaccggcagctcgacagcggagacaacccgtacctcaagtacaaccacgccgacgcggagtttcaggagcgtcttaaagaagatacgtcttttgggggcaacctcggacgagcagtcttccaggcgaaaaagagggttcttgaacctctgggcctggttgaggaacctgttaagacggctccgggaaaaaagaggccggtagagcactctcctgtggagccagactcctcctcgggaaccggaaaggcgggccagcagcctgcaagaaaaagattgaatttcggtcagactggagacgcagactccgtacctgacccccagcctctcggacagccaccagcagccccctctggtctgggaactaatacgatggctacaggcagtggcgcaccaatggcagacaataacgagggcgccgacggagtgggtaattcctcgggaaattggcattgcgattccacatggatgggcgacagagtcatcaccaccagcacccgcacctgggctctgcccacctacaacaaccatctgtacaagcaaatttccagccaatcaggagcatcgaacgacaaccactactttggctacagcaccccctgggggtattttgacttcaacagattccactgccacttttcgccacgtgactggcaaagactcatcaacaacaactggggattccggcccaagagactcagcttcaagctctttaacattcaagtcaaggaggtcacgcagaatgacggtacgacgacgattgccaataaccttaccagcacggttcaggtctttactgactcggagtaccagctcccgtacgtcctcggctcggcgcatcaaggatgcctcccgccgttcccagcagacgtcttcatggtgccacagtatggatacctcaccctgaacaacgggagtcaggcggtaggacgctcttcattttactgcctggagtacttcccttctcagatgcttcgcacgggaaacaactttaccttcagctacacctttgaggacgtgccttttcacagcagctacgctcacagccaaagtctggaccgtctcatgaatcctctcatcgaccaatacctgtattacttgagcaaaacaaacgctccaagcggaaccaccacgatgtccaggcttcagttttctcaggccggagcgagtgacattcgggaccagtctagaaactggcttcctggaccctgttaccgccagcagcgagtatcaaagacagctgcggacaacaacaacagtgattactcgtggactggagctaccaagtaccacctcaatggaagagactctctggtgaacccgggcccagctatggccagccacaaggatgatgaagaaaaatattttcctcagagcggggttctcatcttcgggaaacaaggctcaaataaaactaatgtggacattgaaaaggttatgattacagacgaagaggaaatcaggaccaccaatcccgtggctacggagcagtatggttctgtatctaccaaccttcaaagcggcaacacacaagcagctacctcagatgtcaacacacaaggcgttcttcctggcatggtctggcaggacagagatgtgtacctgcaggggcccatctgggcaaagattcctcacacggacggacactttcacccttctcccctcatgggcggatttggattgaagcaccctcccccacagattctcatcaagaataccccggtacctgcgaatccttcgaccaccttcagtgcggcaaagtttgcttccttcatcacacagtattccacgggacaggtcagcgtggagatagagtgggagctgcagaaggagaacagcaaacgctggaaccccgagatccagtatacttccaactacaacaaatctgttaatgtggactttactgtgggcactaatggtgtgtattcagagcctcgccccattggcaccagatacctgactcgtaatctgtaa

SEQ ID NO: 12099 - DNA, 2208 bp, Artificial Sequence
  source: /note="Description of Artificial Sequence: Synthetic polynucleotide"
atggctgccgatggttatcttccagattggctcgaggacactctctctgaaggaataagacagtggtggaagctcaaacctggcccaccaccgccaaagcccgcagagcggcataaggacgacagcaggggtcttgtgcttcctgggtacaagtacctcggacccttcaacggactcgacaagggggagccggtcaacgaggcagacgccgcggccctcgagcacgacaaggcctacgaccggcagctcgacagcggagacaacccgtacctcaagtacaaccacgccgacgcggagtttcaggagcgtcttaaagaagatacgtcttttgggggcaacctcggacgagcagtcttccaggcgaaaaagagggttcttgaacctctgggcctggttgaggaacctgttaagacggctccgggaaaaaagaggccggtagagcactctcctgtggagccagactcctcctcgggaaccggaaaggcgggccagcagcctgcaagaaaaagattgaatttcggtcagactggagacgcagactccgtacctgacccccagcctctcggacagccaccagcagccccctctggtctgggaactaatacgatggctacaggcagtggcgcaccaatggcagacaataacgagggcgccgacggagtgggtaattcctcgggaaattggcattgcgattccacatggatgggcgacagagtcatcaccaccagcacccgcacctgggctctgcccacctacaacaaccatctgtacaagcaaatttccagccaatcaggagcatcgaacgacaaccactactttggctacagcaccccctgggggtattttgacttcaacagattccactgccacttttcgccacgtgactggcaaagactcatcaacaacaactggggattccggcccaagagactcagcttcaagctctttaacattcaagtcaaggaggtcacgcagaatgacggtacgacgacgattgccaataaccttaccagcacggttcaggtctttactgactcggagtaccagctcccgtacgtcctcggctcggcgcatcaaggatgcctcccgccgttcccagcagacgtcttcatggtgccacagtatggatacctcaccctgaacaacgggagtcaggcggtaggacgctcttcattttactgcctggagtacttcccttctcagatgcttcgcacgggaaacaactttaccttcagctacacctttgaggacgtgccttttcacagcagctacgctcacagccaaagtctggaccgtctcatgaatcctctcatcgaccaatacctgtattacttgagcaaaacaaacgctccaagcggaaccaccacgatgtccaggcttcagttttctcaggccggagcgagtgacattcgggaccagtctagaaactggcttcctggaccctgttaccgccagcagcgagtatcaaagacagctgcggacaacaacaacagtgattactcgtggactggagctaccaagtaccacctcaatggaagagactctctggtgaacccgggcccagctatggccagccacaaggatgatgaagaaaaatattttcctcagagcggggttctcatcttcgggaaacaaggctcaaataaaactaatgtggacattgaaaaggttatgattacagacgaagaggaaatcaggaccaccaatcccgtggctacggagcagtatggttctgtatctaccaaccttcaaagcggcaacacacaagcagctacctcagatgtcaacacacaaggcgttcttcctggcatggtctggcaggacagagatgtgtacctgcaggggcccatctgggcaaagattcctcacacggacggacactttcacccttctcccctcatgggcggatttggattgaagtaccctcccccacagattctcatcaagaataccccggtacctgcgaatccttcgaccaccttcagtgcggcaaagtttgcttccttcatcacacagtattccacgggacaggtcagcgtggagatagagtgggagctgcagaaggagaacagcaaacgctggaaccccgagatccagtatacttccaactacaacaaatctgttaatgtggactttactgtggacactaatggtgtgtattcagagcctcgccccattggcaccagatacctgactcgtaatctgtaa

SEQ ID NO: 12100 - DNA, 2208 bp, Artificial Sequence
  source: /note="Description of Artificial Sequence: Synthetic polynucleotide"
atggctgccgatggttatcttccagattggctcgaggacactctctctgaaggaataagacagtggtggaagctcaaacctggcccaccaccgccaaagcccgcagagcggcataaggacgacagcaggggtcttgtgcttcctgggtacaagtacctcggacccttcaacggactcgacaagggggagccggtcaacgaggcagacgccgcggccctcgagcacgacaaggcctacgaccggcagctcgacagcggagacaacccgtacctcaagtacaaccacgccgacgcggagtttcaggagcgtcttaaagaagatacgtcttttgggggcaacctcggacgagcagtcttccaggcgaaaaagagggttcttgaacctctgggcctggttgaggaacctgttaagacggctccgggaaaaaagaggccggtagagcactctcctgtggagccagactcctcctcgggaaccggaaaggcgggccagcagcctgcaagaaaaagattgaatttcggtcagactggagacgcagactccgtacctgacccccagcctctcggacagccaccagcagccccctctggtctgggaactaatacgatggctacaggcagtggcgcaccaatggcagacaataacgagggcgccgacggagtgggtaattcctcgggaaattggcattgcgattccacatggatgggcgacagagtcatcaccaccagcacccgcacctgggctctgcccacctacaacaaccatctgtacaagcaaatttccggccaatcaggagcatcgaacgacaaccactactttggctacagcaccccctgggggtattttgacttcaacagattccactgccacttttcgccacgtgactggcaaagactcatcaacaacaactggggattccggcccaagagactcagcttcaagctctttaacattcaagtcaaggaggtcacgcagaatgacggtacgacgacgattgccaataaccttaccagcacggttcaggtctttactgactcggagtaccagctcccgtacgtcctcggctcggcgcatcaaggatgcctcccgccgttcccagcagacgtcttcatggtgccacagtatggatacctcaccctgaacaacgggagtcaggcggtaggacgctcttcattttactgcctggagtacttcccttctcagatgcttcgcacgggaaacaactttaccttcagctacacctttgaggacgtgccttttcacagcagctacgctcacagccaaagtctggaccgtctcatgaatcctctcatcgaccaatacctgtattacttgagcaaaacaaacgctccaagcggaaccaccacgatgtccaggcttcagttttctcaggccggagcgagtgacattcgggaccagtctagaaactggcttcctggaccctgttaccgccagcagcgagtatcaaagacagctgcggacaacaacaacagtgattactcgtggactggagctaccaagtaccacctcaatggaagagactctctggtgaacccgggcccagctatggccagccacaaggatgatgaagaaaaatattttcctcagagcggggttctcatcttcgggaaacaaggctcaaataaaactaatgtggacattgaaaaggttatgattacagacgaagaggaaatcaggaccaccaatcccgtggctacggagcagtatggttctgtatctaccaaccttcaaagcggcaacacacaagcagctacctcagatgtcaacacacaaggcgttcttcctggcatggtctggcaggacagagatgtgtacctgcaggggcccatctgggcaaagattcctcacacggacggacactttcacccttctcccctcatgggcggatttggattgaagcaccctcccccacagattctcatcaagaataccccggtacctgcgaatccttcgaccaccttcagtgcggcaaagtttgcttccttcatcacacagtattccacgggacaggtcagcgtggagatagagtgggagctgcagaaggagaacagcaaacgctggaaccccgagatccagtatacttccaactacaacaaatctgttaatgtggactttactgtggacactaatggtgtgtattcagagcctcgccccattggcaccagatacctgactcgtaatctgtaa

SEQ ID NO: 12101 - DNA, 2208 bp, Artificial Sequence
  source: /note="Description of Artificial Sequence: Synthetic polynucleotide"
atggctgccgatggttatcttccagattggctcgaggacactctctctgaaggaataagacagtggtggaagctcaaacctggcccaccaccgccaaagcccgcagagcggcataaggacgacagcaggggtcttgtgcttcctgggtacaagtacctcggacccttcaacggactcgacaagggggagccggtcaacgaggcagacgccgcggccctcgagcacgacaaggcctacgaccggcagctcgacagcggagacaacccgtacctcaagtacaaccacgccgacgcggagtttcaggagcgtcttaaagaagatacgtcttttgggggcaacctcggacgagcagtcttccaggcgaaaaagagggttcttgaacctctgggcctggttgaggaacctgttaagacggctccgggaaaaaagaggccggtagagcactctcctgtggagccagactcctcctcgggaaccggaaaggcgggccagcagcctgcaagaaaaagattgaatttcggtcagactggagacgcagactccgtacctgacccccagcctctcggacagccaccagcagccccctctggtctgggaactaatacgatggctacaggcagtggcgcaccaatggcagacaataacgagggcgccgacggagtgggtaattcctcgggaaattggcattgcgattccacatggatgggcgacagagtcatcaccaccagcacccgcacctgggctctgcccacctacaacaaccatctgtacaagcaaatttccagccaatcaggagcatcgaacgacaaccactactttggctacagcaccccctgggggtattttgacttcaacagattccactgccacttttcgccacgtgactggcaaagactcatcaacaacaactggggattccggcccaagagactcagcttcaagctctttaacattcaagtcaaggaggtcacgcagaatgacggtacgacgacgattgccaataaccttaccagcacggttcaggtctttactgactcggagtaccggctcccgtacgtcctcggctcggcgcatcaaggatgcctcccgccgttcccagcagacgtcttcatggtgccacagtatggatacctcaccctgaacaacgggagtcaggcggtaggacgctcttcattttactgcctggagtacttcccttctcagatgcttcgcacgggaaacaactttaccttcagctacacctttgaggacgtgccttttcacagcagctacgctcacagccaaagtctggaccgtctcatgaatcctctcatcgaccaatacctgtattacttgagcaaaacaaacgctccaagcggaaccaccacgatgtccaggcttcagttttctcaggccggagcgagtgacattcgggaccagtctagaaactggcttcctggaccctgttaccgccagcagcgagtatcaaagacagctgcggacaacaacaacagtgattactcgtggactggagctaccaagtaccacctcaatggaagagactctctggtgaacccgggcccagctatggccagccacaaggatgatgaagaaaaatattttcctcagagcggggttctcatcttcgggaaacaaggctcaaataaaactaatgtggacattgaaaaggttatgattacagacgaagaggaaatcaggaccaccaatcccgtggctacggagcagtatggttctgtatctaccaaccttcaaagcggcaacacacaagcagctacctcagatgtcaacacacaaggcgttcttcctggcatggtctggcaggacagagatgtgtacctgcaggggcccatctgggcaaagattcctcacacggacggacactttcacccttctcccctcatgggcggatttggattgaagcaccctcccccacagattctcatcaagaataccccggtacctgcgaatccttcgaccaccttcagtgcggcaaagtttgcttccttcatcacacagtattccacgggacaggtcagcgtggagatagagtgggagctgcagaaggagaacagcaaacgctggaaccccgagatccagtatacttccaactacaacaaatctgttaatgtggactttactgtggacactaatggtgtgtattcagagcctcgccccattggcaccagatacctgactcgtaatctgtaa

SEQ ID NO: 12102 - DNA, 2208 bp, Artificial Sequence
  source: /note="Description of Artificial Sequence: Synthetic polynucleotide"
atggctgccgatggttatcttccagattggctcgaggacactctctctgaaggaataagacagtggtggaagctcaaacctggcccaccaccgccaaagcccgcagagcggcataaggacgacagcaggggtcttgtgcttcctgggtacaagtacctcggacccttcaacggactcgacaagggggagccggtcaacgaggcagacgccgcggccctcgagcacgacaaggcctacgaccggcagctcgacagcggagacaacccgtacctcaagtacaaccacgccgacgcggagtttcaggagcgtcttaaagaagatacgtcttttgggggcaacctcggacgagcagtcttccaggcgaaaaagagggttcttgaacctctgggcctggttgaggaacctgttaagacggctccgggaaaaaagaggccggtagagcactctcctgtggagccagactcctcctcgggaaccggaaaggcgggccagcagcctgcaagaaaaagattgaatttcggtcagactggagacgcagactccgtacctgacccccagcctctcggacagccaccagcagccccctctggtctgggaactaatacgatggctacaggcagtggcgcaccaatggcagacaataacgagggcgccgacggagtgggtaattcctcgggaaattggcattgcgattccacatggatgggcgacagagtcatcaccaccagcacccgcacctgggctctgcccacctacaacaaccatctgtacaagcaaatttccagccaatcaggagcatcgaacgacaaccactactttggctacagcaccccctgggggtattttgacttcaacagattccactgccacttttcgccacgtgactggcaaagactcatcaacaacaactggggattccggcccaagagactcagcttcaagctctttaacattcaagtcaaggaggtcacgcagaatgacggtacgacgacgattgccaataaccttaccagcacggttcaggtctttactgactcggagtaccagctcccgtacgtcctcggctcggcgcatcgaggatgcctcccgccgttcccagcagacgtcttcatggtgccacagtatggatacctcaccctgaacaacgggagtcaggcggtaggacgctcttcattttactgcctggagtacttcccttctcagatgcttcgcacgggaaacaactttaccttcagctacacctttgaggacgtgccttttcacagcagctacgctcacagccaaagtctggaccgtctcatgaatcctctcatcgaccaatacctgtattacttgagcaaaacaaacgctccaagcggaaccaccacgatgtccaggcttcagttttctcaggccggagcgagtgacattcgggaccagtctagaaactggcttcctggaccctgttaccgccagcagcgagtatcaaagacagctgcggacaacaacaacagtgattactcgtggactggagctaccaagtaccacctcaatggaagagactctctggtgaacccgggcccagctatggccagccacaaggatgatgaagaaaaatattttcctcagagcggggttctcatcttcgggaaacaaggctcaaataaaactaatgtggacattgaaaaggttatgattacagacgaagaggaaatcaggaccaccaatcccgtggctacggagcagtatggttctgtatctaccaaccttcaaagcggcaacacacaagcagctacctcagatgtcaacacacaaggcgttcttcctggcatggtctggcaggacagagatgtgtacctgcaggggcccatctgggcaaagattcctcacacggacggacactttcacccttctcccctcatgggcggatttggattgaagcaccctcccccacagattctcatcaagaataccccggtacctgcgaatccttcgaccaccttcagtgcggcaaagtttgcttccttcatcacacagtattccacgggacaggtcagcgtggagatagagtgggagctgcagaaggagaacagcaaacgctggaaccccgagatccagtatacttccaactacaacaaatctgttaatgtggactttactgtggacactaatggtgtgtattcagagcctcgccccattggcaccagatacctgactcgtaatctgtaa

SEQ ID NO: 12103 - DNA, 2208 bp, Artificial Sequence
  source: /note="Description of Artificial Sequence: Synthetic polynucleotide"
atggctgccgatggttatcttccagattggctcgaggacactctctctgaaggaataagacagtggtggaagctcaaacctggcccaccaccgccaaagcccgcagagcggcataaggacgacagcaggggtcttgtgcttcctgggtacaagtacctcggacccttcaacggactcgacaagggggagccggtcaacgaggcagacgccgcggccctcgagcacgacaaggcctacgaccggcagctcgacagcggagacaacccgtacctcaagtacaaccacgccgacgcggagtttcaggagcgtcttaaagaagatacgtcttttgggggcaacctcggacgagcagtcttccaggcgaaaaagagggttcttgaacctctgggcctggttgaggaacctgttaagacggctccgggaaaaaagaggccggtagagcactctcctgtggagccagactcctcctcgggaaccggaaaggcgggccagcagcctgcaagaaaaagattgaatttcggtcagactggagacgcagactccgtacctgacccccagcctctcggacagccaccagcagccccctctggtctgggaactaatacgatggctacaggcagtggcgcaccaatggcagacaataacgagggcgccgacggagtgggtaattcctcgggaaattggcattgcgattccacatggatgggcgacagagtcatcaccaccagcacccgcacctgggctctgcccacctacaacaaccatctgtacaagcaaatttccagccaatcaggagcatcgaacgacaaccactactttggctacagcaccccctgggggtattttgacttcaacagattccactgccacttttcgccacgtgactggcaaagactcatcaacaacaactggggattccggcccaagagactcagcttcaagctctttaacattcaagtcaaggaggtcacgcagaatgacggtacgacgacgattgccaataaccttaccagcacggttcaggtctttactgactcggagtaccagctcccgtacgtcctcggctcggcgcatcaaggatgcctcccgccgttcccagcagacgtcttcatggtgccacagtatggatacctcaccctgaacaacgggagtcaggcggtaggacgctcttcattttactgcctggagtacttcccttctcagatgcttcgcgcgggaaacaactttaccttcagctacacctttgaggacgtgccttttcacagcagctacgctcacagccaaagtctggaccgtctcatgaatcctctcatcgaccaatacctgtattacttgagcaaaacaaacgctccaagcggaaccaccacgatgtccaggcttcagttttctcaggccggagcgagtgacattcgggaccagtctagaaactggcttcctggaccctgttaccgccagcagcgagtatcaaagacagctgcggacaacaacaacagtgattactcgtggactggagctaccaagtaccacctcaatggaagagactctctggtgaacccgggcccagctatggccagccacaaggatgatgaagaaaaatattttcctcagagcggggttctcatcttcgggaaacaaggctcaaataaaactaatgtggacattgaaaaggttatgattacagacgaagaggaaatcaggaccaccaatcccgtggctacggagcagtatggttctgtatctaccaaccttcaaagcrgcaacacacaagcagctacctcagatgtcaacacacaaggcgttcttcctggcatggtctggcaggacagagatgtgtacctgcaggggcccatctgggcaaagattcctcacacggacggacactttcacccttctcccctcatgggcggatttggattgaagcaccctcccccacagattctcatcaagaataccccggtacctgcgaatccttcgaccaccttcagtgcggcaaagtttgcttccttcatcacacagtattccacgggacaggtcagcgtggagatagagtgggagctgcagaaggagaacagcaaacgctggaaccccgagatccagtatacttccaactacaacaaatctgttaatgtggactttactgtggacactaatggtgtgtattcagagcctcgccccattggcaccagatacctgactcgtaatctgtaa

SEQ ID NO: 12104 - DNA, 2208 bp, Artificial Sequence
  source: /note="Description of Artificial Sequence: Synthetic polynucleotide"
atggctgccgatggttatcttccagattggctcgaggacactctctctgaaggaataagacagtggtggaagctcaaacctggcccaccaccgccaaagcccgcagagcggcataaggacgacagcaggggtcttgtgcttcctgggtacaagtacctcggacccttcaacggactcgacaagggggagccggtcaacgaggcagacgccgcggccctcgagcacgacaaggcctacgaccggcagctcgacagcggagacaacccgtacctcaagtacaaccacgccgacgcggagtttcaggagcgtcttaaagaagatacgtcttttgggggcaacctcggacgagcagtcttccaggcgaaaaagagggttcttgaacctctgggcctggttgaggaacctgttaagacggctccgggaaaaaagaggccggtagagcactctcctgtggagccagactcctcctcgggaaccggaaaggcgggccagcagcctgcaagaaaaagattgaatttcggtcagactggagacgcagactccgtacctgacccccagcctctcggacagccaccagcagccccctctggtctgggaactaatacgatggctacaggcagtggcgcaccaatggcagacaataacgagggcgccgacggagtgggtaattcctcgggaaattggcattgcgattccacatggatgggcgacagagtcatcaccaccagcacccgcacctgggctctgcccacctacaacaaccatctgtacaagcaaatttccagccaatcaggagcatcgaacgacaaccactactttggctacagcaccccctgggggtattttgacttcaacagattccactgccacttttcgccacgtgactggcaaagactcatcaacaacaactggggattccggcccaagagactcggcttcaagctctttaacattcaagtcaaggaggtcacgcagaatgacggtacgacgacgattgccaataaccttaccagcacggttcaggtctttactgactcggagtaccagctcccgtacgtcctcggctcggcgcatcaaggatgcctcccgccgttcccagcagacgtcttcatggtgccacagtatggatacctcaccctgaacaacgggagtcaggcggtaggacgctcttcattttactgcctggagtacttcccttctcagatgcttcgcacgggaaacaactttaccttcagctacacctttgaggacgtgccttttcacagcagctacgctcacagccaaagtctggaccgtctcatgaatcctctcatcgaccaatacctgtattacttgagcaaaacaaacgctccaagcggaaccaccacgatgtccaggcttcagttttctcaggccggagcgagtgacattcgggaccagtctagaaactggcttcctggaccctgttaccgccagcagcgagtatcaaagacagctgcggacaacaacaacagtgattactcgtggactggagctaccaagtaccacctcaatggaagagactctctggtgaacccgggcccagctatggccagccacaaggatgatgaagaaaaatattttcctcagagcggggttctcatcttcgggaaacaaggctcaaataaaactaatgtggacattgaaaaggttatgattacagacgaagaggaaatcaggaccaccaatcccgtggctacggagcagtatggttctgtatctaccaaccttcaaagcggcaacacacaagcagctacctcagatgtcaacacacaaggcgttcttcctggcatggtctggcaggacagagatgtgtacctgcaggggcccatctgggcaaagattcctcacacggacggacactttcacccttctcccctcatgggcggatttggattgaagcaccctcccccacagattctcatcaagaataccccggtacctgcgaatccttcgaccaccttcagtgcggcaaagtttgcttccttcatcacacagtattccacgggacaggtcagcgtggagatagagtgggagctgcagaaggagaacagcaaacgctggaaccccgagatccagtatacttccaactacaacaaatctgttaatgtggactttactgtggacactaatggtgtgtattcagagcctcgccccattggcaccagatacctgactcgtaatctgtaa

SEQ ID NO: 12105 - DNA, 2208 bp, Artificial Sequence
  source: /note="Description of Artificial Sequence: Synthetic polynucleotide"
atggctgccgatggttatcttccagattggctcgaggacactctctctgaaggaataagacagtggtggaagctcaaacctggcccaccaccgccaaagcccgcagagcggcataaggacgacagcaggggtcttgtgcttcctgggtacaagtacctcggacccttcaacggactcgacaagggggagccggtcaacgaggcagacgccgcggccctcgagcacgacaaggcctacgaccggcagctcgacagcggagacaacccgtacctcaagtacaaccacgccgacgcggagtttcaggagcgtcttaaagaagatacgtcttttgggggcaacctcggacgagcagtcttccaggcgaaaaagagggttcttgaacctctgggcctggttgaggaacctgttaagacggctccgggaaaaaagaggccggtagagcactctcctgtggagccagactcctcctcgggaaccggaaaggcgggccagcagcctgcaagaaaaagattgaatttcggtcagactggagacgcagactccgtacctgacccccagcctctcggacagccaccagcagccccctctggtctgggaactaatacgatggctacaggcagtggcgcaccaatggcagacaataacgagggcgccgacggagtgggtaattcctcgggaaattggcattgcgattccacatggatgggcgacagagtcatcaccaccagcacccgcacctgggctctgcccacctacaacaaccatctgtacaagcaaatttccagccaatcaggagtatcgaacgacaaccactactttggctacagcaccccctgggggtattttgacttcaacagattccactgccacttttcgccacgtgactggcaaagactcatcaacaacaactggggattccggcccaagagactcagcttcaagctctttaacattcaagtcaaggaggtcacgcagaatgacggtacgacgacgattgccaataaccttaccagcacggttcaggtctttactgactcggagtaccagctcccgtacgtcctcggctcggcgcatcaaggatgcctcccgccgttcccagcagacgtcttcatggtgccacagtatggatacctcaccctgaacaacgggagtcaggcggtaggacgctcttcattttactgcctggagtacttcccttctcagatgcttcgcacgggaaacaactttaccttcagctacacctttgaggacgtgccttttcacagcagctacgctcacagccaaagtctggaccgtctcatgaatcctctcatcgaccaatacctgtattacttgagcaaaacaaacgctccaagcggaaccaccacgatgtccaggcttcagttttctcaggccggagcgagtgacattcgggaccagtctagaaactggcttcctggaccctgttaccgccagcagcgagtatcaaagacagctgcggacaacaacaacagtgattactcgtggactggagctaccaagtaccacctcaatggaagagactctctggtgaacccgggcccagctatggccagccacaaggatgatgaagaaaaatattttcctcagagcggggttctcatcttcgggaaacaaggctcaaataaaactaatgtggacattgaaaaggttatgattacagacgaagaggaaatcaggaccaccaatcccgtggctacggagcagtatggttctgtatctaccaaccttcaaagcggcaacacacaagcagctacctcagatgtcaacacacaaggcgttcttcctggcatggtctggcaggacagagatgtgtacctgcaggggcccatctgggcaaagattcctcacacggacggacactttcacccttctcccctcatgggcggatttggattgaagcaccctcccccacagattctcatcaagaataccccggtacctgcgaatccttcgaccaccttcagtgcggcaaagtttgcttccttcatcacacagtattccacgggacaggtcagcgtggagatagagtgggagctgcagaaggagaacagcaaacgctggaaccccgagatccagtatacttccaactacaacaaatctgttaatgtggactttactgtggacactaatggtgtgtattcagagcctcgccccattggcaccagatacctgactcgtaatctgtaa

SEQ ID NO: 12106 - DNA, 2208 bp, Artificial Sequence
  source: /note="Description of Artificial Sequence: Synthetic polynucleotide"
atggctgccgatggttatcttccagattggctcgaggacactctctctgaaggaataagacagtggtggaagctcaaacctggcccaccaccgccaaagcccgcagagcggcataaggacgacagcaggggtcttgtgcttcctgggtacaagtacctcggacccttcaacggactcgacaagggggagccggtcaacgaggcagacgccgcggccctcgagcacgacaaggcctacgaccggcagctcgacagcggagacaacccgtacctcaagtacaaccacgccgacgcggagtttcaggagcgtcttaaagaagatacgtcttttgggggcaacctcggacgagcagtcttccaggcgaaaaagagggttcttgaacctctgggcctggttgaggaacctgttaagacggctccgggaaaaaagaggccggtagagcactctcctgtggagccagactcctcctcgggaaccggaaaggcgggccagcagcctgcaagaaaaagattgaatttcggtcagactggagacgcagactccgtacctgacccccagcctctcggacagccaccagcagccccctctggtctgggaactaatacgatggctacaggcagtggcgcaccaatggcagacaataacgagggcgccgacggagtgggtaattcctcgggaaattggcattgcgattccacatggatgggcgacagagtcatcaccaccagcacccgcacctgggctctgcccacctacaacaaccatctgtacaagcaaatttccagccaatcaggagcatcgaacgacaaccactactttggctacagcaccccctgggggtattttgacttcaacagattccactgccacttttcgccacgtgactggcaaagactcatcaacaacaactggggattccggcccaagagactcagcttcaagctctttaacattcaagtcaaggaggtcacgcagaatgacggtacgacgacgattgccaataaccttaccagcacggttcaggtctttactgactcggagtaccagctcccgtacgtcctcggctcggcgcatcaaggatgcctcccgccgttcccagcagacgtcttcatggtgccacagtatggatacctcaccctgaacaacgggagtcaggcggtaggacgctcttcattttactgcctggagtacttcccttctcagatgcttcgcacgggaaacaactttaccttcagctacacctttgaggacgtgccttttcacagcagctacgctcacagccaaagtctggaccgtctcatgaatcctctcatcgaccaatacctgtattacttgagcaaaacaaacgctccaagcggaaccaccacgatgtccaggcttcagttttctcaggccggagcgagtgacattcgggaccagtctagaaactggcttcctggaccctgttaccgccagcagcgagtatcaaagacagctgcggacaacaacaacagtgattactcgtggactggagctaccaagtaccacctcaatggaagagactctctggtgaacccgggcccagctatggccagccacaaggatgatgaagaaaaatattttcctcagagcggggttctcatcttcgggaaacaaggctcaaataaaactaatgtggacattgaaaaggttatgattacagacgaagaggaaatcaggaccaccaatcccatggctacggagcagtatggttctgtatctaccaaccttcaaagcggcaacacacaagcagctacctcagatgtcaacacacaaggcgttcttcctggcatggtctggcaggacagagatgtgtacctgcaggggcccatctgggcaaagattcctcacacggacggacactttcacccttctcccctcatgggcggatttggattgaagcaccctcccccacagattctcatcaagaataccccggtacctgcgaatccttcgaccaccttcagtgcggcaaagtttgcttccttcatcacacagtattccacgggacaggtcagcgtggagatagagtgggagctgcagaaggagaacagcaaacgctggaaccccgagatccagtatacttccaactacaacaaatctgttaatgtggactttactgtggacactaatggtgtgtattcagagcctcgccccattggcaccagatacctgactcgtaatctgtaa

SEQ ID NO: 12107 - DNA, 2208 bp, Artificial Sequence
  source: /note="Description of Artificial Sequence: Synthetic polynucleotide"
atggctgccgatggttatcttccagattggctcgaggacactctctctgaaggaataagacagtggtggaagctcaaacctggcccaccaccgccaaagcccgcagagcggcataaggacgacagcaggggtcttgtgcttcctgggtacaagtacctcggacccttcaacggactcgacaagggggagccggtcaacgaggcagacgccgcggccctcgagcacgacaaggcctacgaccggcagctcgacagcggagacaacccgtacctcaagtacaaccacgccgacgcggagtttcaggagcgtcttaaagaagatacgtcttttgggggcaacctcggacgagcagtcttccaggcgaaaaagagggttcttgaacctctgggcctggttgaggaacctgttaagacggctccgggaaaaaagaggccgatagagcactctcctgtggagccagactcctcctcgggaaccggaaaggcgggccagcagcctgcaagaaaaagattgaatttcggtcagactggagacgcagactccgtacctgacccccagcctctcggacagccaccagcagccccctctggtctgggaactaatacgatggctacaggcagtggcgcaccaatggcagacaataacgagggcgccgacggagtgggtaattcctcgggaaattggcattgcgattccacatggatgggcgacagagtcatcaccaccagcacccgcacctgggctctgcccacctacaacaaccatctgtacaagcaaatttccagccaatcaggagcatcgaacgacaaccactactttggctacagcaccccctgggggtattttgacttcaacagattccactgccacttttcgccacgtgactggcaaagactcatcaacaacaactggggattccggcccaagagactcagcttcaagctctttaacattcaagtcaaggaggtcacgcagaatgacggtacgacgacgattgccaataaccttaccagcacggttcaggtctttactgactcggagtaccagctcccgtacgtcctcggctcggcgcatcaaggatgcctcccgccgttcccagtagacgtcttcatggtgccacagtatggatacctcaccctgaacaacgggagtcaggcggtaggacgctcttcattttactgcctggagtacttcccttctcagatgcttcgcacgggaaacaactttaccttcagctacacctttgaggacgtgccttttcacagcagctacgctcacagccaaagtctggaccgtctcatgaatcctctcatcgaccaatacctgtattacttgagcaaaacaaacgctccaagcggaaccaccacgatgtccaggcttcagttttctcaggccggagcgagtgacattcgggaccagtctagaaactggcttcctggaccctgttaccgccagcagcgagtatcaaagacagctgcggacaacaacaacagtgattactcgtggactggagctaccaagtaccacctcaatggaagagactctctggtgaacccgggcccagctatggccagccacaaggatgatgaagaaaaatattttcctcagagcggggttctcatcttcgggaaacaaggctcaaataaaactaatgtggacattgaaaaggttatgattacagacgaagaggaaatcaggaccaccaatcccgtggctacggagcagtatggttctgtatctaccaaccttcaaagcggcaacacacaagcagctacctcagatgtcaacacacaaggcgttcttcctggcatggtctggcaggacagagatgtgtacctgcaggggcccatctgggcaaagattcctcacacggacggacactttcacccttctcccctcatgggcggatttggattgaagcaccctcccccacagattctcatcaagaataccccggtacctgcgaatccttcgaccaccttcagtgcggcaaagtttgcttccttcatcacacagtattccacgggacaggtcagcgtggagatagagtgggagctgcagaaggagaacagcaaacgctggaaccccgagatccagtatacttccaactacaacaaatctgttaatgtggactttactgtggacactaatggtgtgtattcagagcctcgccccattggcaccagatacctgactcgtaatctgtaa

SEQ ID NO: 12108 - DNA, 2208 bp, Artificial Sequence
  source: /note="Description of Artificial Sequence: Synthetic polynucleotide"
atggctgccgatggttatcttccagattggctcgaggacactctctctgaaggaataagacagtggtggaagctcaaacctggcccaccaccgccaaagcccgcagagcggcataaggacgacagcaggggtcttgtgcttcctgggtacaagtacctcggacccttcaacggactcgacaagggggagccggtcaacgaggcagacgccgcggccctcgagcacgacaaggcctacgaccggcagctcgacagcggagacaacccgtacctcaagtacaaccacgccgacgcggagtttcaggagcgtcttaaagaagatacgtcttttgggggcaacctcggacgagcagtcttccaggcgaaaaagagggttcttgaacctctgggcctggttgaggaacctgttaagacggctccgggaaaaaagaggccggtagagcactctcctgtggagccagactcctcctcgggaaccggaaaggcgggccagcagcctgcaagaaaaagattgaatttcggtcagactggagacgcagactccgtacctgacccccagcctctcggacagccaccagcagccccctctggtctgggaactaatacgatgactacaggcagtggcgcaccaatggcagacaataacgagggcgccgacggagtgggtaattcctcgggaaattggcattgcgattccacatggatgggcgacagagtcatcaccaccagcacccgcacctgggctctgcccacctacaacaaccatctgtacaagcaaatttccagccaatcaggagcatcgaacgacaaccactactttggctacagcaccccctgggggtattttgacttcaacagattccactgccacttttcgccacgtgactggcaaagactcatcaacaacaactggggattccggcccaagagactcagcttcaagctctttaacattcaagtcaaggaggtcacgcagaatgacggtacgacgacgattgccaataaccttaccagcacggttcaggtctttactgactcggagtaccagctcccgtacgtcctcggctcggcgcatcaaggatgcctcccgccgttcccagcagacgtcttcatggtgccacagtatggatacctcaccctgaacaacgggagtcaggcggtaggacgctcttcattttactgcctggagtacttcccttctcagatgcttcgcacgggaaacaactttaccttcagctacacctttgaggacgtgccttttcacagcagctacgctcacagccaaagtctggaccgtctcatgaatcctctcatcgaccaatacctgtattacttgagcaaaacaaacgctccaagcggaaccaccacgatgtccaggcttcagttttctcaggccggagcgagtgacattcgggaccagtctagaaactggcttcctggaccctgttaccgccagcagcgagtatcaaagacagctgcggacaacaacaacagtgattactcgtggactggagctaccaagtaccacctcaatggaagagactctctggtgaacccgggcccagctatggccagccacaaggatgatgaagaaaaatattttcctcagagcggggttctcatcttcgggaaacaaggctcaaataaaactaatgtggacattgaaaaggttatgattacagacgaagaggaaatcaggaccaccaatcccgtggctacggagcagtatggttctgtatctaccaaccttcaaagcggcaacacacaagcagctacctcagatgtcaacacacaaggcgttcttcctggcatggtctggcaggacagagatgtgtacctgcaggggcccatctgggcaaagattcctcacacggacggacactttcacccttctcccctcatgggcggatttggattgaagcaccctcccccacagattctcatcaagaataccccggtacctgcgaatccttcgaccaccttcagtgcggcaaagtttgcttccttcatcacacagtattccacgggacaggtcagcgtggagatagagtgggagctgcagaaggagaacagcaaacgctggaaccccgagatccagtatacttccaactacaacaaatctgttaatgtggactttactgtggacactaatggtgtgtattcagagcctcgccccattggcaccagatacctgactcgtaatctgtaa

SEQ ID NO: 12109 - DNA, 2208 bp, Artificial Sequence
  source: /note="Description of Artificial Sequence: Synthetic polynucleotide"
atggctgccgatggttatcttccagattggctcgaggacactctctctgaaggaataagacagtggtggaagctcaaacctggcccaccaccgccaaagcccgcagagcggcataaggacgacagcaggggtcttgtgcttcctgggtacaagtacctcggacccttcaacggactcgacaagggggagccggtcaacgaggcagacgccgcggccctcgagcacgacaaggcctacgaccggcagctcgacagcggagacaacccgtacctcaagtacaaccacgccgacgcggagtttcaggagcgtcttaaagaagatacgtcttttgggggcaacctcggacgagcagtcttccaggcgaaaaagagggttcttgaacctctgggcctggttgaggaacctgttaagacggctccgggaaaaaagaggtcggtagagcactctcctgtggagccagactcctcctcgggaaccggaaaggcgggccagcagcctgcaagaaaaagattgaatttcggtcagactggagacgcagactccgtacctgacccccagcctctcggacagccaccagcagccccctctggtctgggaactaatacgatggctacaggcagtggcgcaccaatggcagacaataacgagggcgccgacggagtgggtaattcctcgggaaattggcattgcgattccacatggatgggcgacagagtcatcaccaccagcacccgcacctgggctctgcccacctacaacaaccatctgtacaagcaaatttccagccaatcaggagcatcgaacgacaaccactactttggctacagcaccccctgggggtattttgacttcaacagattccactgccacttttcgccacgtgactggcaaagactcatcaacaacaactggggattccggcccaagagactcagcttcaagctctttaacattcaagtcaaggaggtcacgcagaatgacggtacgacgacgattgccaataaccttaccagcacggttcaggtctttactgactcggagtaccagctcccgtacgtcctcggctcggcgcatcaaggatgcctcccgccgttcccagcagacgtcttcatggtgccacagtatggatacctcaccctgaacaacgggagtcaggcggtaggacgctcttcattttactgcctggagtacttcccttctcagatgcttcgcacgggaaacaactttaccttcagctacacctttgaggacgtgccttttcacagcagctacgctcacagccaaagtctggaccgtctcatgaatcctctcatcgaccaatacctgtattacttgagcaaaacaaacgctccaagcggaaccaccacgatgtccaggcttcagttttctcaggccggagcgagtgacattcgggaccagtctagaaactggcttcctggaccctgttaccgccagcagcgagtatcaaagacagctgcggacaacaacaacagtgattactcgtggactggagctaccaagtaccacctcaatggaagagactctctggtgaacccgggcccagctatggccagccacaaggatgatgaagaaaaatattttcctcagagcggggttctcatcttcgggaaacaaggctcaaataaaactaatgtggacattgaaaaggttatgattacagacgaagaggaaatcaggaccaccaatcccgtggctacggagcagtatggttctgtatctaccaaccttcaaagcggcaacacacaagcagctacctcagatgtcaacacacaaggcgttcttcctggcatggtctggcaggacagagatgtgtacctgcaggggcccatctgggcaaagattcctcacacggacggacactttcacccttctcccctcatgggcggatttggattgaagcaccctcccccacagattctcatcaagaataccccggtacctgcgaatccttcgaccaccttcagtgcggcaaagtttgcttccttcatcacacagtattccacgggacaggtcagcgtggagatagagtgggagctgcagaaggagaacagcaaacgctggaaccccgagatccagtatacttccaactacaacaaatctgttaatgtggactttactgtggacactaatggtgtgtattcagagcctcgccccattggcaccagatacctgactcgtaatctgtaa

SEQ ID NO: 12110 - DNA, 2208 bp, Artificial Sequence
  source: /note="Description of Artificial Sequence: Synthetic polynucleotide"
atggctgccgatggttatcttccagattggctcgaggacactctctctgaaggaataagacagtggtggaagctcaaacctggcccaccaccgccaaagcccgcagagcggcataaggacgacagcaggggtcttgtgcttcctgggtacaagtacctcggacccttcaacggactcgacaagggggagccggtcaacgaggcagacgccgcggccctcgagcacgacaaggcctacgaccggcagctcgacagcggagacaacccgtacctcaagtacaaccacgccgacgcggagtttcaggagcgtcttaaagaagatacgtcttttgggggcaacctcggacgagcagtcttccaggcgaaaaagagggttcttgaacctctgggcctggttgaggaacctgttaagacggctccgggaaaaaagaggccggtagagcactctcctgtggagccagactcctcctcgggaaccggaaaggcgggccagcagcctgcaagaaaaagattgaatttcggtcagactggagacgcagactccgtacctgacccccagcctctcggacagccaccagcagccccctctggtctgggaactaatacgatggctacaggcagtggcgcaccaatggcagacaataacgagggcgccgacggagtgggtaattcctcgggaaattggcattgcgattccacatggatgggcgacagagtcatcaccaccagcacccgcacctgggctctgcccacctacaacaaccatctgtacaagcaaatttccagccaatcaggagcatcgaacgacaaccactactttggctacagcaccccctgggggtattttgacttcaacagattccactgccacttttcgccacgtgactggcaaagactcatcaacaacaactggggattccggcccaagagactcagcttcaagctctttaacattcaagtcaaggaggtcacgcagaatgacggtacgacgacgattgccaataaccttaccagcacggttcaggtctttactgactcggagtaccagctcccgtacgtcctcggctcggcgcatcaaggatgcctcccgccgttcccagcagacgtcttcgtggtgccacagtatggatacctcaccctgaacaacgggagtcaggcggtaggacgctcttcattttactgcctggagtacttcccttctcagatgcttcgcacgggaaacaactttaccttcagctacacctttgaggacgtgccttttcacagcagctacgctcacagccaaagtctggaccgtctcatgaatcctctcatcgaccaatacctgtattacttgagcaaaacaaacgctccaagcggaaccaccacgatgtccaggcttcagttttctcaggccggagcgagtgacattcgggaccagtctagaaactggcttcctggaccctgttaccgccagcagcgagtatcaaagacagctgcggacaacaacaacagtgattactcgtggactggagctaccaagtaccacctcaatggaagagactctctggtgaacccgggcccagctatggccagccacaaggatgatgaagaaaaatattttcctcagagcggggttctcatcttcgggaaacaaggctcaaataaaactaatgtggacattgaaaaggttatgattacagacgaagaggaaatcaggaccaccaatcccgtggctacggagcagtatggttctgtatctaccaaccttcaaagcggcaacacacaagcagctacctcagatgtcaacacacaaggcgttcttcctggcatggtctggcaggacagagatgtgtacctgcaggggcccatctgggcaaagattcctcacacggacggacactttcacccttctcccctcatgggcggatttggattgaagcaccctcccccacagattctcatcaagaataccccggtacctgcgaatccttcgaccaccttcagtgcggcaaagtttgcttccttcatcacacagtattccacgggacaggtcggcgtggagatagagtgggagctgcagaaggagaacagcaaacgctggaaccccgagatccagtatacttccaactacaacaaatctgttaatgtggactttactgtggacactaatggtgtgtattcagagcctcgccccattggcaccagatacctgactcgtaatctgtaa

SEQ ID NO: 12111 - DNA, 2208 bp, Artificial Sequence
  source: /note="Description of Artificial Sequence: Synthetic polynucleotide"
atggctgccgatggttatcttccagattggctcgaggacactctctctgaaggaataagacagtggtggaagctcaaacctggcccaccaccgccaaagcccgcagagcggcataaggacgacagcaggggtcttgtgcttcctgggtacaagtacctcggacccttcaacggactcgacaagggggagccggtcaacgaggcagacgccgcggccctcgagcacgacaaggcctacgaccggcagctcgacagcggagacaacccgtacctcaagtacaaccacgccgacgcggagtttcaggagcgtcttaaagaagatacgtcttttgggggcaacctcggacgagcagtcttccaggcgaaaaagagggttcttgaacctctgggcctggttgaggaacctgttaagacggctccgggaaaaaagaggccggtagagcactctcctgtggagccagactcctcctcgggaaccggaaaggcgggccagcagcctgcaagaaaaagattgaatttcggtcagactggagacgcagactccgtacctgacccccagcctctcggacagccaccagcagccccctctggtctgggaactaatacgatggctacaggcagtggcgcaccaatggcagacaataacgagggcgccgacggagtgggtaattcctcgggaaattggcattgcgattccacatggatgggcgacagagtcatcaccaccagcacccgcacctgggctctgcccacctacaacaaccatctgtacaagcaaatttccagccaatcaggagcatcgaacgacaaccactactttggctacagcaccccctgggggtattttgacttcaacagattccactgccacttttcgccacgtgactggcaaagactcatcaacaacaactggggattccggcccaagagactcagcttcaagctctttaacattcaagtcaaggaggtcacgcagaatgacggtacgacgacgattgccaataaccttaccagcacggttcaggtctttactgactcggagtaccagctcccgtacgtcctcggctcggcgcatcaaggatgcctcccgccgttcccagcagacgtcttcatggtgccacagtatggatacctcaccctgaacaacgggagtcaggcggtaggacgctcttcattttactgcctggagtacttcccttctcagatgcttcgcacgggaaacaactttaccttcagctacacctttgaggacgtgccttttcacagcagctacgctcacagccaaagtctggaccgtctcatgaatcctctcatcgaccaatacctgtattacttgagcaaaacaaacgctccaagcggaaccaccgcgatgtccaggcttcagttttctcaggccggagcgagtgacattcgggaccagtctagaaactggcttcctggaccctgttaccgccagcagcgagtatcaaagacagctgcggacaacaacaacagtgattactcgtggactggagctaccaagtaccacctcaatggaagagactctctggtgaacccgggcccagctatggccagccacaaggatgatgaagaaaaatattttcctcagagcggggttctcatcttcgggaaacaaggctcaaataaaactaatgtggacattgaaaaggttatgattacagacgaagaggaaatcaggaccaccaatcccgtggctacggagcagtatggttctgtatctaccaaccttcaaagcggcaacacacaagcagctacctcagatgtcaacacacaaggcgttcttcctggcatggtctggcaggacagagatgtgtacctgcaggggcccatctgggcaaagattcctcacacggacggacactttcacccttctcccctcatgggcggatttggattgaagcaccctcccccacagattctcatcaagaataccccggtacctgcgaatccttcgaccaccttcagtgcggcaaagtttgcttccttcatcacacagtattccacgggacaggtcagcgtggagatagagtgggagctgcagaaggagaacagcaaacgctggaaccccgagatccagtatacttccaactacaacaaatctgttaatgtggactttactgtggacactaatggtgtgtattcagagcctcgccccattggcaccagatacctgactcgtaatctgtaa

SEQ ID NO: 12112 - DNA, 2208 bp, Artificial Sequence
  source: /note="Description of Artificial Sequence: Synthetic polynucleotide"
atggctgccgatggttatcttccagattggctcgaggacactctctctgaaggaataagacagtggtggaagctcaaacctggcccaccaccgccaaagcccgcagagcggcataaggacgacagcaggggtcttgtgcttcctgggtacaagtacctcggacccttcaacggactcgacaagggggagccggtcaacgaggcagacgccgcggccctcgagcacgacaaggcctacgaccggcagctcgacagcggagacaacccgtacctcaagtacaaccacgccgacgcggagtttcaggagcgtcttaaagaagatacgtcttttgggggcaacctcggacgagcagtcttccaggcgaaaaagagggttcttgaacctctgggcctggttgaggaacctgttaagacggctccgggaaaaaagaggccggtagagcactctcctgtggagccagactcctcctcgggaaccggaaaggcgggccagcagcctgcaagaaaaagattgaatttcggtcagactggagacgcagactccgtacctgacccccagcctctcggacagccaccagcagccccctctggtctgggaactaatacgatggctacaggcagtggcgcaccaatggcagacaataacgagggcgccgacggagtgggtaattcctcgggaaattggcattgcgattccacatggatgggcgacagagtcatcaccaccagcacccgcacctgggctctgcccacctacaacaaccatctgtacaagcaaatttccagccaatcaggagcatcgaacgacaaccactactttggctacagcaccccctgggggtattttgacttcaacagattccactgccacttttcgccacgtgactggcaaagactcatcaacaacaactggggattccggcccaagagactcagcttcaagctctttaacattcaagtcaaggaggtcacgcagaatgacggtacgacgacgattgccaataaccttaccagcacggttcaggtctttactgactcggagtaccagctcccgtacgtcctcggctcggcgcatcaaggatgcctcccgccgttcccagcagacgtcttcatggtgccacagtatggatacctcaccctgaacaacgggagtcaggcggtaggacgctcttcattttactgcctggagtacttcccttctcagatgcttcgcacgggaaacaactttaccttcagctacacctttgaggacgtgccttttcacagcagctacgctcacagccaaagtctggaccgtctcatgaatcctcccatcgaccaatacctgtattacttgagcaaaacaaacgctccaagcggaaccaccacgatgtccaggcttcagttttctcaggccggagcgagtgacattcgggaccagtctagaaactggcttcctggaccctgttaccgccagcagcgagtatcaaagacagctgcggacaacaacaacagtgattactcgtggactggagctaccaagtaccacctcaatggaagagactctctggtgaacccgggcccagctatggccagccacaaggatgatgaagaaaaatattttcctcagagcggggttctcatcttcgggaaacaaggctcaaataaaactaatgtggacattgaaaaggttatgattacagacgaagaggaaatcaggaccaccaatcccgtggctacggagcagtatggttctgtatctaccaaccttcaaagcggcaacacacaagcagctacctcagatgtcaacacacaaggcgttcttcctggcatggtctggcaggacagagatgtgtacctgcaggggcccatctgggcaaagattcctcacacggacggacactttcacccttctcccctcatgggcggatttggattgaagcaccctcccccacagattctcatcaagaataccccggtacctgcgaatccttcgaccaccttcagtgcggcaaagtttgcttccttcatcacacagtattccacgggacaggtcagcgtggagatagagtgggagctgcagaaggagaacagcaaacgctggaaccccgagatccagtatacttccaactacaacaaatctgttaatgtggactttactgtggacactaatggtgtgtattcagagcctcgccccattggcaccagatacctgactcgtaatctgtaa

SEQ ID NO: 12113 - DNA, 2208 bp, Artificial Sequence
  source: /note="Description of Artificial Sequence: Synthetic polynucleotide"
atggctgccgatggttatcttccagattggctcgaggacactctctctgaaggaataagacagtggtggaagctcaaacctggcccaccaccgccaaagcccgcagagcggcataaggacgacagcaggggtcttgtgcttcctgggtacaagtacctcggacccttcaacggactcgacaagggggagccggtcaacgaggcagacgccgcggccctcgagcacgacaaggcctacgaccggcagctcgacagcggagacaacccgtacctcaagtacaaccacgccgacgcggagtttcaggagcgtcttaaagaagatacgtcttttgggggcaacctcggacgagcagtcttccaggcgaaaaagagggttcttgaacctctgggcctggttgaggaacctgttaagacggctccgggaaaaaagaggccggtagagcactctcctgtggagccagactcctcctcgggaaccggaaaggcgggccagcagcctgcaagaaaaagattgaatttcggtcagactggagacgcagactccgtacctgacccccagcctctcggacagccaccagcagccccctctggtctgggaactaatacgatggctacaggcagtggcgcaccaatggcagacaataacgagggcgccgacggagtgggtaattcctcgggaaattggcattgcgattccacatggatgggcgacagagtcatcaccaccagcacccgcacctgggctctgcccacctacaacaaccatctgtacaagcaaatttccagccaatcaggagcatcgaacgacaaccactactttggctacagcaccccctgggggtattttgacttcaacagattccactgccacttttcgccacgtgactggcaaagactcatcaacaacaactggggattccggcccaagagactcagcttcaagctctttaacattcaagtcaaggaggtcacgcagaatgacggtacgacgacgattgccaataaccttaccagcacggttcaggtctttactgactcggagtaccagctcccgtacgtcctcggctcggcgcatcaaggatgcctcccgccgttcccagcagacgtcttcatggtgccacagtatggatacctcaccctgaacaacgggagtcaggcggtaggacgctcttcattttactgcctggagtacttcccttctcagatgcttcgcacgggaaacaactttaccttcagctacacctttgaggacgtgccttttcacagcagctacgctcacggccaaagtctggaccgtctcatgaatcctctcatcgaccaatacctgtattacttgagcaaaacaaacgctccaagcggaaccaccacgatgtccaggcttcagttttctcaggccggagcgagtgacattcgggaccagtctagaaactggcttcctggaccctgttaccgccagcagcgagtatcaaagacagctgcggacaacaacaacagtgattactcgtggactggagctaccaagtaccacctcaatggaagagactctctggtgaacccgggcccagctatggccagccacaaggatgatgaagaaaaatattttcctcagagcggggttctcatcttcgggaaacaaggctcaaataaaactaatgtggacattgaaaaggttatgattacagacgaagaggaaatcaggaccaccaatcccgtggctacggagcagtatggttctgtatctaccaaccttcaaagcggcaacacacaagcagctacctcagatgtcaacacacaaggcgttcttcctggcatggtctggcaggacagagatgtgtacctgcaggggcccatctgggcaaagattcctcacacggacggacactttcacccttctcccctcatgggcggatttggattgaagcaccctcccccacagattctcatcaagaataccccggtacctgcgaatccttcgaccaccttcagtgcggcaaagtttgcttccttcatcacacagtattccacgggacaggtcagcgtggagatagagtgggagctgcagaaggagaacagcaaacgctggaaccccgagatccagtatacttccaactacaacaaatctgttaatgtggactttactgtggacactaatggtgtgtattcagagcctcgccccattggcaccagatacctgactcgtaatctgtaa

SEQ ID NO: 12114 - DNA, 2208 bp, Artificial Sequence
  source: /note="Description of Artificial Sequence: Synthetic polynucleotide"
atggctgccgatggttatcttccagattggctcgaggacactctctctgaaggaataagacagtggtggaagctcaaacctggcccaccaccgccaaagcccgcagagcggcataaggacgacagcaggggtcttgtgcttcctgggtacaagtacctcggacccttcaacggactcgacaagggggagccggtcaacgaggcagacgccgcggccctcgagcacgacaaggcctacgaccggcagctcgacagcggagacaacccgtacctcaagtacaaccacgccgacgcggagtttcaggagcgtcttaaagaagatacgtcttttgggggcaacctcggacgagcagtcttccaggcgaaaaagagggttcttgaacctctgggcctggttgaggaacctgttaagacggctccgggaaaaaagaggccggtagagcactctcctgtggagccagactcctcctcgggaaccggaaaggcgggccagcagcctgcaagaaaaagattgaatttcggtcagactggagacgcagactccgtacctgacccccagcctctcggacagccaccagcagccccctctggtctgggaactaatacgatggctacaggcagtggcgcaccaatggcagacaataacgagggcgccgacggagtgggtaattcctcgggaaattggcattgcgattccacatggatgggcgacagagtcatcaccaccagcacccgcacctgggctctgcccacctacaacaaccatctgtacaagcaaatttccagccaatcaggagcatcgaacgacaaccactactttggctacagcaccccctgggggtattttgacttcaacagattccactgccacttttcgccacgtgactggcaaagactcatcaacaacaactggggattccggcccaagagactcagcttcaagctctttaacattcaagtcaaggaggtcacgcagaatgacggtacgacgacgattgccaataaccttaccagcacggttcaggtctttactgactcggagtaccagctcccgtacgtcctcggctcggcgcatcaaggatgcctcccgccgttcccagcagacgtcttcatggtgccacagtatggatacctcaccctgaacaacgggagtcaggcggtaggacgctcttcattttactgcctggagtacttcccttctcagatgcttcgcacgggaaacaactttaccttcagctacacctttgaggacgtgccttttcacagcagctacgctcacagccaaagtctggaccgtctcatgaatcctctcatcgaccaatacctgtattacttgagcaaaacaaacgctccaagcggaaccaccacgatgtccaggcctcagttttctcaggccggagcgagtgacattcgggaccagtctagaaactggcttcctggaccctgttaccgccagcagcgagtatcaaagacagctgcggacaacaacaacagtgattactcgtggactggagctaccaagtaccacctcaatggaagagactctctggtgaacccgggcccagctatggccagccacaaggatgatgaagaaaaatattttcctcagagcggggttctcatcttcgggaaacaaggctcaaataaaactaatgtggacattgaaaaggttatgattacagacgaagaggaaatcaggaccaccaatcccgtggctacggagcagtatggttctgtatctaccaaccttcaaagcggcaacacacaagcagctacctcagatgtcaacacacaaggcgttcttcctggcatggtctggcaggacagagatgtgtacctgcaggggcccatctgggcaaagattcctcacacggacggacactttcacccttctcccctcatgggcggatttggattgaagcaccctcccccacagattctcatcaagaataccccggtacctgcgaatccttcgaccaccttcagtgcggcaaagtttgcttccttcatcacacagtattccacgggacaggtcagcgtggagatagagtgggagctgcagaaggagaacagcaaacgctggaaccccgagatccagtatacttccaactacaacaaatctgttaatgtggactttactgtggacactaatggtgtgtattcagagcctcgccccattggcaccagatacctgactcgtaatctgtaa

SEQ ID NO: 12115 - DNA, 2208 bp, Artificial Sequence
  source: /note="Description of Artificial Sequence: Synthetic polynucleotide"
atggctgccgatggttatcttccagattggctcgaggacactctctctgaaggaataagacagtggtggaagctcaaacctggcccaccaccgccaaagcccgcagagcggcataaggacgacagcaggggtcttgtgcttcctgggtacaagtacctcggacccttcaacggactcgacaagggggagccggtcaacgaggcagacgccgcggccctcgagcacgacaaggcctacgaccggcagctcgacagcggagacaacccgtacctcaagtacaaccacgccgacgcggagtttcaggagcgtcttaaagaagatacgtcttttgggggcaacctcggacgagcagtcttccaggcgaaaaagagggttcttgaacctctgggcctggttgaggaacctgttaagacggctccgggaaaaaagaggccggtagagcactctcctgtggagccagactcctcctcgggaaccggaaaggcgggccagcagcctgcaagaaaaagattgaatttcggtcagactggagacgcagactccgtacctgacccccagcctctcggacagccaccagcagccccctctggtctgggaactaatacgatggctacaggcagtggcgcaccaatggcagacaataacgagggcgccgacggagtgggtaattcctcgggaaattggcattgcgattccacatggatgggcgacagagtcatcaccaccagcacccgcacctgggctctgcccacctacaacaaccatctgtacaagcaaatttccagccaatcaggaacatcgaacgacaaccactactttggctacagcaccccctgggggtattttgacttcaacagattccactgccacttttcgccacgtgactggcaaagactcatcaacaacaactggggattccggcccaagagactcagcttcaagctctttaacattcaagtcaaggaggtcacgcagaatgacggtacgacgacgattgccaataaccttaccagcacggttcaggtctttactgactcggagtaccagctcccgtacgtcctcggctcggcgcatcaaggatgcctcccgccgttcccagcagacgtcttcatggtgccacagtatggatacctcaccctgaacaacgggagtcaggcggtaggacgctcttcattttactgcctggagtacttcccttctcagatgcttcgcacgggaaacaactttaccttcagctacacctttgaggacgtgccttttcacagcagctacgctcacagccaaagtctggaccgtctcatgaatcctctcatcgaccaatacctgtattacttgagcaaaacaaacgctccaagcggaaccaccacgatgtccaggcttcagttttctcaggccggagcgagtgacattcgggaccagtctagaaactggcttcctggaccctgttaccgccagcagcgagtatcaaagacagctgcggacaacaacaacagtgattactcgtggactggagctaccaagtaccacctcaatggaagagactctctggtgaacccgggcccagctatggccagccacaaggatgatgaagaaaaatattttcctcagagcggggttctcatcttcgggaaacaaggctcaaataaaactaatgtggacattgaaaaggttatgattacagacgaagaggaaatcaggaccaccaatcccgtggctacggagcagtatggttctgtatctaccaaccttcaaagcggcaacacacaagcagctacctcagatgtcaacacacaaggcgttcttcctggcatggtctggcaggacagagatgtgtacctgcaggggcccatctgggcaaagattcctcacacggacggacactttcacccttctcccctcatgggcggatttggattgaagcaccctcccccacagattctcatcaagaataccccggtacctgcgaatccttcgaccaccttcagtgcggcaaagtttgcttccttcatcacacagtattccacgggacaggtcagcgtggagatagagtgggagctgcagaaggagaacagcaaacgctggaaccccgagatccagtatacttccaactacaacaaatctgttaatgtggactttactgtggacactaatggtgtgtattcagagcctcgccccattggcaccagatacctgactcgtaatctgtaa

SEQ ID NO: 12116 - DNA, 2208 bp, Artificial Sequence
  source: /note="Description of Artificial Sequence: Synthetic polynucleotide"
atggctgccgatggttatcttccagattggctcgaggacactctctctgaaggaataagacagtggtggaagctcaaacctggcccaccaccgccaaagcccgcagagcggcataaggrcgacagcaggggtcttgtgcttcctgggtacaagtacctcggacccttcaacggactcgacaagggggagccggtcaacgaggcagacgccgcggccctcgagcacgacaaggcctacgaccggcagctcgacagcggagacaacccgtacctcaagtacaaccacgccgacgcggagtttcaggagcgtcttaaagaagatacgtcttttgggggcaacctcggacgagcagtcttccaggcgaaaaagagggttcttgaacctctgggcctggttgaggaacctgttaagacggctccgggaaaaaagaggccggtagagcactctcctgtggagccagactcctcctcgggaaccggaaaggcgggccagcagcctgcaagaaaaagattgaatttcggtcagactggagacgcagactccgtacctgacccccagcctctcggacagccaccagcagccccctctggtctgggaactaatacgatggctacaggcagtggcgcaccaatggcagacaataacgagggcgccgacggagtgggtaattcctcgggaaattggcattgcgattccacatggatgggcgacagagtcatcaccaccagcacccgcacctgggctctgcccacctacaacaaccatctgtacaagcaaatttccagccaatcaggagcatcgaacgacaaccactactttggctacagcaccccctgggggtattttgacttcaacagattccactgccacttttcgccacgtgactggcaaagactcatcaacaacaactggggattccggcccaagagactcagcttcaagctctttaacattcaagtcaaggaggtcacgcagaatgacggtacgacgacgattgccaataaccttaccagcacggttcaggtctttactgactcggagtaccagctcccgtacgtcctcggctcggcgcatcaaggatgcctcccgccgttcccagcagacgtcttcatggtgccacagtatggatacctcaccctgaacaacgggagtcaggcggtaggacgctcttcattttactgcctggagtacttcccttctcagatgcttcgcacgggaaacaactttaccttcagctacacctttgaggacgtgccttttcacagcagctacgctcacagccaaagtctggaccgtctcatgaatcctctcatcgaccaatacctgtattacttgagcaaaacaaacgctccaagcggaaccaccacgatgtccaggcttcagttttctcaggccggagcgagtgacattcgggaccagtctagaaactggcttcctggaccctgttaccgccagcagcgagtatcaaagacagctgcggacaacaacaacagtgattactcgtggactggagctaccaagtaccacctcaatggaagagactctctggtgaacccgggcccagctatggccagccacaaggatgatgaagaaaaatattttcctcagagcggggttctcatcttcgggaaacaaggctcaaataaaactaatgtggacattgaaaaggttatgattacagacgaagaggaaatcaggaccaccaatcccgtggctacggagcagtatggttctgtatctaccaaccttcaaagcggcaacacacaagcagctacctcagatgtcaacacacaaggcgttcttcctggcatggtctggcaggacagagatgtgtacctgcaggggcccatctgggcaaagattcctcacacggacggacactttcacccttctcccctcatgggcggatttggattgaagcaccctcccccacagattctcatcaagaataccccggtacctgcgaatccttcgaccaccttcagtgcggcaaagtttgcttccttcatcacacagtattccacgggacaggtcagcgtggagatagagtgggagctgcagaaggagaacagcaaacgctggaaccccgagatccagtatacttccaactacaacaaatctgttaatgtggactttactgtggacactaatggtgtgtattcagagcctcaccccattggcaccagatacctgactcgtaatctgtaa

SEQ ID NO: 12117 - DNA, 2208 bp, Artificial Sequence
  source: /note="Description of Artificial Sequence: Synthetic polynucleotide"
atggctgccgatggttatcttccagattggctcgaggacactctctctgaaggaataagacagtggtggaagttcaaacctggcccaccaccgccaaagcccgcagagcggcataaggacgacagcaggggtcttgtgcttcctgggtacaagtacctcggacccttcaacggactcgacaagggggagccggtcaacgaggcagacgccgcggccctcgagcacgacaaggcctacgaccggcagctcgacagcggagacaacccgtacctcaagtacaaccacgccgacgcggagtttcaggagcgtcttaaagaagatacgtcttttgggggcaacctcggacgagcagtcttccaggcgaaaaagagggttcttgaacctctgggcctggttgaggaacctgttaagacggctccgggaaaaaagaggccggtagagcactctcctgtggagccagactcctcctcgggaaccggaaaggcgggccagcagcctgcaagaaaaagattgaatttcggtcagactggagacgcagactccgtacctgacccccagcctctcggacagccaccagcagccccctctggtctgggaactaatacgatggctacaggcagtggcgcaccaatggcagacaataacgagggcgccgacggagtgggtaattcctcgggaaattggcattgcgattccacatggatgggcgacagagtcatcaccaccagcacccgcacctgggctctgcccacctacaacaaccatctgtacaagcaaatttccagccaatcaggagcatcgaacgacaaccactactttggctacagcaccccctgggggtattttgacttcaacagattccactgccacttttcgccacgtgactggcaaagactcatcaacaacaactggggattccggcccaagagactcagcttcaagctctttaacattcaagtcaaggaggtcacgcagaatgacggtacgacgacgattgccaataaccttaccagcacggttcaggtctttactgactcggagtaccagctcccgtacgtcctcggctcggcgcatcaaggatgcctcccgccgttcccagcagacgtcttcatggtgccacagtatggatacctcaccctgaacaacgggagtcaggcggtaggacgctcttcattttactgcctggagtacttcccttctcagatgcttcgcacgggaaacaactttaccttcagctacacctttgaggacgtgccttttcacagcagctacgctcacagccaaagtctggaccgtctcatgaatcctctcatcgaccaatacctgtattacttgagcaaaacaaacgctccaagcggaaccaccacgatgtccaggcttcagttttctcaggccggagcgagtgacattcgggaccagtctagaaactggcttcctggaccctgttaccgccagcagcgagtatcaaagacagctgcggacaacaacaacagtgattactcgtggactggagctaccaagtaccacctcaatggaagagactctctggtgaacccgggcccagctatggccagccacaaggatgatgaagaaaaatattttcctcagagcggggttctcatcttcgggaaacaaggctcaaataaaactaatgtggacattgaaaaggttatgattacagacgaagaggaaatcaggaccaccaatcccgtggctacggagcagtatggttctgtatctaccaaccttcaaagcggcaacacacaagcagctacctcagatgtcaacacacaaggcgttcttcctggcatggtctggcaggacagagatgtgtacctgcaggggcccatctgggcaaagattcctcacacggacggacactttcacccttctcccctcatgggcggatttggattgaagcaccctcccccacagattctcatcaagaataccccggtacctgcgaatccttcgaccaccttcagtgcggcaaagtttgcttccttcatcacacagtattccacgggacaggtcagcgtggagatagagtgggagctgcagaaggagaacagcaaacgctggaaccccgagatccagtatacttccaactacaacaaatctgttaatgtggactttactgtggacactaatggtgtgtattcagagcctcgccccattggcaccagatacctgactcgtaatctgtaa

SEQ ID NO: 12118 - DNA, 2208 bp, Artificial Sequence
  source: /note="Description of Artificial Sequence: Synthetic polynucleotide"
atggctgccgatggttatcttccagattggctcgaggacactctctctgaaggaataagacagtggtggaagctcaaacctggcccaccaccgccaaagcccgcagagcggcataaggacgacagcaggggtcttgtgcttcctgggtacaagtacctcggacccttcaacggactcgacaagggggagccggtcaacgaggcagacgccgcggccctcgagcacgacaaggcctacgaccggcagctcgacagcggagacaacccgtacctcaagtacaaccacgccgacgcggagtttcaggagcgtcttaaagaagatacgtcttttgggggcaacctcggacgagcagtcttccaggcgaaaaagagggttcttgaacctctgggcctggttgaggaacctgttaagacggctccgggaaaaaagaggccggtagagcactctcctgtggagccagactcctcctcgggaaccggaaaggcgggccagcagcctgcaagaaaaagattgaatttcggtcagactggagacgcagactccgtacctgacccccagcctctcggacagccaccagcagccccctctggtctgggaactaatacgatggctacaggcagtggcgcaccaatggcagacaataacgagggcgccgacggagtgggtaattcctcgggaaattggcattgcgattccacatggatgggcgacagagtcatcaccaccagcacccgcacctgggctctgcccacctacaacaaccatctgtacaagcaaatttccagccaatcaggagcatcgaacgacaaccactactttggctacagcaccccctgggggtattttgacttcaacagattccactgccacttttcgtcacgtgactggcaaagactcatcaacaacaactggggattccggcccaagagactcagcttcaagctctttaacattcaagtcaaggaggtcacgcagaatgacggtacgacgacgattgccaataaccttaccagcacggttcaggtctttactgactcggagtaccagctcccgtacgtcctcggctcggcgcatcaaggatgcctcccgccgttcccagcagacgtcttcatggtgccacagtatggatacctcaccctgaacaacgggagtcaggcggtaggacgctcttcattttactgcctggagtacttcccttctcagatgcttcgcacgggaaacaactttaccttcagctacacctttgaggacgtgccttttcacagcagctacgctcacagccaaagtctggaccgtctcatgaatcctctcatcgaccaatacctgtattacttgagcaaaacaaacgctccaagcggaaccaccacgatgtccaggcttcagttttctcaggccggagcgagtgacattcgggaccagtctagaaactggcttcctggaccctgttaccgccagcagcgagtatcaaagacagctgcggacaacaacaacagtgattactcgtggactggagctaccaagtaccacctcaatggaagagactctctggtgaacccgggcccagctatggccagccacaaggatgatgaagaaaaatattttcctcagagcggggttctcatcttcgggaaacaaggctcaaataaaactaatgtggacattgaaaaggttatgattacagacgaagaggaaatcaggaccaccaatcccgtggctacggagcagtatggttctgtatctaccaaccttcaaagcggcaacacacaagcagctacctcagatgtcaacacacaaggcgttcttcctggcatggtctggcaggacagagatgtgtacctgcaggggcccatctgggcaaagattcctcacacggacggacactttcacccttctcccctcatgggcggatttggattgaagcaccctcccccacagattctcatcaagaataccccggtacctgcgaatccttcgaccaccttcagtgcggcaaagtttgcttccttcatcacacagtattccacgggacaggtcagcgtggagatagagtgggagctgcagaaggagaacagcaaacgctggaaccccgagatccagtatacttccaactacaacaaatctgttaatgtggactttactgtggacactaatggtgtgtattcagagcctcgccccattggcaccagatacctgactcgtaatctgtaa

SEQ ID NO: 12119 - DNA, 2208 bp, Artificial Sequence
  source: /note="Description of Artificial Sequence: Synthetic polynucleotide"
atggctgccgatggttatcttccagattggctcgaggacactctctctgaaggaataagacagtggtggaagctcaaacctggcccaccaccgccaaagcccgcagagcggcatgaggacgacagcaggggtcttgtgcttcctgggtacaagtacctcggacccttcaacggactcgacaagggggagccggtcaacgaggcagacgccgcggccctcgagcacgacaaggcctacgaccggcagctcgacagcggagacaacccgtacctcaagtacaaccacgccgacgcggagtttcaggagcgtcttaaagaagatacgtcttttgggggcaacctcggacgagcagtcttccaggcgaaaaagagggttcttgaacctctgggcctggttgaggaacctgttaagacggctccgggaaaaaagaggccggtagagcactctcctgtggagccagactcctcctcgggaaccggaaaggcgggccagcagcctgcaagaaaaagattgaatttcggtcagactggagacgcagactccgtacctgacccccagcctctcggacagccaccagcagccccctctggtctgggaactaatacgatggctacaggcagtggcgcaccaatggcagacaataacgagggcgccgacggagtgggtaattcctcgggaaattggcattgcgattccacatggatgggcgacagagtcatcaccaccagcacccgcacctgggctctgcccacctacaacaaccatctgtacaagcaaatttccagccaatcaggagcatcgaacgacaaccactactttggctacagcaccccctgggggtattttgacttcaacagattccactgccacttttcgccacgtgactggcaaagactcatcaacaacaactggggattccggcccaagagactcagcttcaagctctttaacattcaagtcaaggaggtcacgcagaatgacggtacgacgacgattgccaataaccttaccagcacggttcaggtctttactgactcggagtaccagctcccgtacgtcctcggctcggcgcatcaaggatgcctcccgccgttcccagcagacgtcttcatggtgccacagtatggatacctcaccctgaacaacgggagtcaggcggtaggacgctcttcattttactgcctggagtacttcccttctcagatgcttcgcacgggaaacaactttaccttcagctacacctttgaggacgtgccttttcacagcagctacgctcacagccaaagtctggaccgtctcatgaatcctctcatcgaccaatacctgtattacttgagcaaaacaaacgctccaagcggaaccaccacgatgtccaggcttcagttttctcaggccggagcgagtgacattcgggaccagtctagaaactggcttcctggaccctgttaccgccagcagcgagtatcaaagacagctgcggacaacaacaacagtgattactcgtggactggagctaccaagtaccacctcaatggaagagactctctggtgaacccgggcccagctatggccagccacaaggatgatgaagaaaaatattttcctcagagcggggttctcatcttcgggaaacaaggctcaaataaaactaatgtggacattgaaaaggttatgattacagacgaagaggaaatcaggaccaccaatcccgtggctacggagcagtatggttctgtatctaccaaccttcaaagcggcaacacacaagcagctacctcagatgtcaacacacaaggcgttcttcctggcatggtctggcaggacagagatgtgtacctgcaggggcccatctgggcaaagattcctcacacggacggacactttcacccttctcccctcatgggcggatttggattgaagcaccctcccccacagattctcatcaagaataccccggtacctgcgaatccttcgaccaccttcagtgcggcaaagtttgcttccttcatcacacagtattccacgggacaggtcagcgtggagatagagtgggagctgcagaaggagaacagcaaacgctggaaccccgagatccagtatacttccaactacaacaaatctgttaatgtggactttactgtggacactaatggtgtgtattcagagcctcgccccattggcaccagatacctgactcgtaatctgtaa

SEQ ID NO: 12120 - DNA, 2205 bp, Artificial Sequence
  source: /note="Description of Artificial Sequence: Synthetic polynucleotide"
atggctgccgatggttatcttccagattggctcgaggacactctctctgaaggaataagacagtggtggaagctcaaacctggcccaccaccgccaaagcccgcagagcggcataaggacgacagcaggggtcttgtgcttcctgggtacaagtacctcggacccttcaacggactcgacaagggggagccggtcaacgaggcagacgccgcggccctcgagcacgacaaggcctacgaccggcagctcgacagcggagacaacccgtacctcaagtacaaccacgccgacgcggagtttcaggagcgtcttaaagaagatacgtcttttgggggcaacctcggacgagcagtcttccaggcgaaaaagagggttcttgaacctctgggcctggttgaggaacctgttaagacggctccgggaaaaaagaggccggtagagcactctcctgtggagccagactcctcctcgggaaccggaaaggcgggccagcagcctgcaagaaaaagattgaatttcggtcagactggagacgcagactccgtacctgacccccagcctctcggacagccaccagcagccccctctggtctgggaactaatacgatggctacaggcagtggcgcaccaatggcagacaataacgagggcgccgacggagtgggtaattcctcgggaaattggcattgcgattccacatggatgggcgacagagtcatcaccaccagcacccgcacctgggctctgcccacctacaacaaccatctgtacaagcaaatttccagccaatcaggagcatcgaacgacaaccactactttggctacagcaccccctgggggtattttgacttcaacagattccactgccacttttcgccacgtgactggcaaagactcatcaacaacaactggggattccggcccaagagactcagcttcaagctctttaacattcaagtcaaggaggtcacgcagaatgacggtacgacgacgattgccaataaccttaccagcacggttcaggtctttactgactcggagtaccagctcccgtacgtcctcggctcggcgcatcaaggatgcctcccgccgttcccagcagacgtcttcatggtgccacagtatggatacctcaccctgaacaacgggagtcaggcggtaggacgctcttcattttactgcctggagtacttcccttctcagatgcttcgcacgggaaacaactttaccttcagctacacctttgaggacgtgccttttcacagcagctacgctcacagccaaagtctggaccgtctcatgaatcctctcatcgaccaatacctgtattacttgagcaaaacaaacgctccaagcggaaccaccacgatgtccaggcttcagttttctcaggccggagcgagtgacattcgggaccagtctagaaactggcttcctggaccctgttaccgccagcagcgagtatcaaagacagctgcggacaacaacagtgattactcgtggactggagctaccaagtaccacctcaatggaagagactctctggtgaacccgggcccagctatggccagccacaaggatgatgaagaaaaatattttcctcagagcggggttctcatcttcgggaaacaaggctcaaataaaactaatgtggacattgaaaaggttatgattacagacgaagaggaaatcaggaccaccaatcccgtggctacggagcagtatggttctgtatctaccaaccttcaaagcggcaacacacaagcagctacctcagatgtcaacacacaaggcgttcttcctggcatggtctggcaggacagagatgtgtacctgcaggggcccatctgggcaaagattcctcacacggacggacactttcacccttctcccctcatgggcggatttggattgaagcaccctcccccacagattctcatcaagaataccccggtacctgcgaatccttcgaccaccttcagtgcggcaaagtttgcttccttcatcacacagtattccacgggacaggtcagcgtggagatagagtgggagctgcagaaggagaacagcaaacgctggaaccccgagatccagtatacttccaactacaacaaatctgttaatgtggactttactgtggacactaatggtgtgtattcagagcctcgccccattggcaccagatacctgactcgtaatctgtaa

SEQ ID NO: 12121 - DNA, 2208 bp, Artificial Sequence
  source: /note="Description of Artificial Sequence: Synthetic polynucleotide"
atggctgccgatggttatcttccagattggctcgaggacactctctctgaaggaataagacagtggtggaagctcaaacctggcccaccaccgccaaagcccgcagagtggcataaggacgacagcaggggtcttgtgcttcctgggtacaagtacctcggacccttcaacggactcgacaagggggagccggtcaacgaggcagacgccgcggccctcgagcacgacaaggcctacgaccggcagctcgacagcggagacaacccgtacctcaagtacaaccacgccgacgcggagtttcaggagcgtcttaaagaagatacgtcttttgggggcaacctcggacgagcagtcttccaggcgaaaaagagggttcttgaacctctgggcctggttgaggaacctgttaagacggctccgggaaaaaagaggccggtagagcactctcctgtggagccagactcctcctcgggaaccggaaaggcgggccagcagcctgcaagaaaaagattgaatttcggtcagactggagacgcagactccgtacctgacccccagcctctcggacagccaccagcagccccctctggtctgggaactaatacgatggctacaggcagtggcgcaccaatggcagacaataacgagggcgccgacggagtgggtaattcctcgggaaattggcattgcgattccacatggatgggcgacagagtcatcaccaccagcacccgcacctgggctctgcccacctacaacaaccatctgtacaagcaaatttccagccaatcaggagcatcgaacgacaaccactactttggctacagcaccccctgggggtattttgacttcaacagattccactgccacttttcgccacgtgactggcaaagactcatcaacaacaactggggattccggcccaagagactcagcttcaagctctttaacattcaagtcaaggaggtcacgcagaatgacggtacgacgacgattgccaataaccttaccagcacggttcaggtctttactgactcggagtaccagctcccgtacgtcctcggctcggcgcatcaaggatgcctcccgccgttcccagcagacgtcttcatggtgccacagtatggatacctcaccctgaacaacgggagtcaggcggtaggacgctcttcattttactgcctggagtacttcccttctcagatgcttcgcacgggaaacaactttaccttcagctacacctttgaggacgtgccttttcacagcagctacgctcacagccaaagtctggaccgtctcatgaatcctctcatcgaccaatacctgtattacttgagcaaaacaaacgctccaagcggaaccaccacgatgtccaggcttcagttttctcaggccggagcgagtgacattcgggaccagtctagaaactggcttcctggaccctgttaccgccagcagcgagtatcaaagacagctgcggacaacaacaacagtgattactcgtggactggagctaccaagtaccacctcaatggaagagactctctggtgaacccgggcccagctatggccagccacaaggatgatgaagaaaaatattttcctcagagcggggttctcatcttcgggaaacaaggctcaaataaaactaatgtggacattgaaaaggttatgattacagacgaagaggaaatcaggaccaccaatcccgtggctacggagcagtatggttctgtatctaccaaccttcaaagcggcaacacacaagcagctacctcagatgtcaacacacaaggcgttcttcctggcatggtctggcaggacagagatgtgtacctgcaggggcccatctgggcaaagattcctcacacggacggacactttcacccttctcccctcatgggcggatttggattgaagcaccctcccccacagattctcatcaagaataccccggtacctgcgaatccttcgaccaccttcagtgcggcaaagtttgcttccttcatcacacagtattccacgggacaggtcagcgtggagatagagtgggagctgcagaaggagaacagcaaacgctggaaccccgagatccagtatacttccaactacaacaaatctgttaatgtggactttactgtggacactaatggtgtgtattcagagcctcgccccattggcaccagatacctgactcgtaatctgtaa

SEQ ID NO: 12122 - DNA, 2208 bp, Artificial Sequence
  source: /note="Description of Artificial Sequence: Synthetic polynucleotide"
atggctgccgatggttatcttccagattggctcgaggacactctctctgaaggaataagacagtggtggaagctcaaacctggcccaccaccgccaaagcccgcagagcggcataaggacgacagcaggggtcttgtgcttcctgggtacaagtacctcggacccttcaacggactcgacaagggggagccggtcaacgaggcagacgccgcggccctcgagcacgacaaggcctacgaccggcagctcgacagcggagacaacccgtacctcaagtacaaccacgccgacgcggagtttcaggagcgtcttaaagaagatacgtcttttgggggcaacctcggacgagcagtcttccaggcgaaaaagagggttcttgaacctctgggcctggttgaggaacctgttaagacggctccgggaaaaaagaggccggtagagcactctcctgtggagccagactcctcctcgggaaccggaaaggcgggccagcagcctgcaagaaaaagattgaatttcggtcagactggagacgcagactccgtacctgacccccagcctctcggacagccaccagcagccccctctggtctgggaactaatacgatggctacaggcagtggcgcaccaatggcagacaataacgagggcgccgacggagtgggtaattcctcgggaaattggcattgcgattccacatggatgggcgacagagtcatcaccaccagcacccgcacctgggctctgcccacctacaacaaccatctgtacaagcaaatttccagccaatcaggagcatcgaacgacaaccactactttggctacagcaccccctgggggtattttgacttcaacagattccactgccacttttcgccacgtgactggcaaagactcatcaacaacaactggggattccggcccaagagactcagcttcaagctctttaacattcaagtcaaggaggtcacgcagaatgacggtacgacgacgattgccaataaccttaccagcacggttcaggtctttactgactcggagtaccagctcccgtacgtcctcggctcggcgcatcaaggatgcctcccgccgttcccagcagacgtcttcatggtgccacagtatggatacctcaccctgaacaacgggagtcaggcggtaggacgctcttcattttactgcctggagtacttcccttctcagatgcttcgcacgggaaacaactttaccttcagctacacctttgaggacgtgccttttcacagcagctacgctcacagccaaagtctggaccgtctcatgaatcctctcatcgaccaatacctgtattacttgagcaaaacaaacgctccaagcggaaccaccacgatgtccaggcttcagttttctcaggccggagcgagtgacattcgggaccagtctagaaactggcttcctggaccctgttaccgccagcagcgagtatcaaagacagctgcggacaacaacaacagtgattactcgtggactggagctaccaagtaccacctcaatggaagagactctctggtgaacccgggcccagctatggccagccacaaggatgatgaagaaaaatattttcctcagagcggggttctcatcttcgggaaacaaggctcaaataaaactaatgtggacattgaaaaggttatgattacagacgaagaggaaatcaggaccaccaatcccgtggctacggagcagtatggttctgtatctaccaaccttcaaagcggcaacacacaagcagctacctcagatgtcaacacacaaggcgttcttcctgacatggtctggcaggacagagatgtgtacctgcaggggcccatctgggcaaagattcctcacacggacggacactttcacccttctcccctcatgggcggatttggattgaagcaccctcccccacagattctcatcaagaataccccggtacctgcgaatccttcgaccaccttcagtgcggcaaagtttgcttccttcatcacacagtattccacgggacaggtcagcgtggagatagagtgggagctgcagaaggagaacagcaaacgctggaaccccgagatccagtatacttccaactacaacaaatctgttaatgtggactttactgtggacactaatggtgtgtattcagagcctcgccccattggcaccagatacctgactcgtaatctgtaa

SEQ ID NO: 12123 - DNA, 2208 bp, Artificial Sequence
  source: /note="Description of Artificial Sequence: Synthetic polynucleotide"
atggctgccgatggttatcttccagattggctcgaggacactctctctgaaggaataagacagtggtggaagctcaaacctggcccaccaccgccaaagcccgcagagcggcataaggacgacagcaggggtcttgtgcttcctgggtacaagtacctcggacccttcaacggactcgacaagggggagccggtcaacgaggcagacgccgcggccctcgagcacgacaaggcctacgaccggcagctcgacagcggagacaacccgtacctcaagtacaaccacgccgacgcggagtttcaggagcgtcttaaagaagatacgtcttttggggacaacctcggacgagcagtcttccaggcgaaaaagagggttcttgaacctctgggcctggttgaggaacctgttaagacggctccgggaaaaaagaggccggtagagcactctcctgtggagccagactcctcctcgggaaccggaaaggcgggccagcagcctgcaagaaaaagattgaatttcggtcagactggagacgcagactccgtacctgacccccagcctctcggacagccaccagcagccccctctggtctgggaactaatacgatggctacaggcagtggcgcaccaatggcagacaataacgagggcgccgacggagtgggtaattcctcgggaaattggcattgcgattccacatggatgggcgacagagtcatcaccaccagcacccgcacctgggctctgcccacctacaacaaccatctgtacaagcaaatttccagccaatcaggagcatcgaacgacaaccactactttggctacagcaccccctgggggtattttgacttcaacagattccactgccacttttcgccacgtgactggcaaagactcatcaacaacaactggggattccggcccaagagactcagcttcaagctctttaacattcaagtcaaggaggtcacgcagaatgacggtacgacgacgattgccaataaccttaccagcacggttcaggtctttactgactcggagtaccagctcccgtacgtcctcggctcggcgcatcaaggatgcctcccgccgttcccagcagacgtcttcatggtgccacagtatggatacctcaccctgaacaacgggagtcaggcggtaggacgctcttcattttactgcctggagtacttcccttctcagatgcttcgcacgggaaacaactttaccttcagctacacctttgaggacgtgccttttcacagcagctacgctcacagccaaagtctggaccgtctcatgaatcctctcatcgaccaatacctgtattacttgagcaaaacaaacgctccaagcggaaccaccacgatgtccaggcttcagttttctcaggccggagcgagtgacattcgggaccagtctagaaactggcttcctggaccctgttaccgccagcagcgagtatcaaagacagctgcggacaacaacaacagtgattactcgtggactggagctaccaagtaccacctcaatggaagagactctctggtgaacccgggcccagctatggccagccacaaggatgatgaagaaaaatattttcctcagagcggggttctcatcttcgggaaacaaggctcaaataaaactaatgtggacattgaaaaggttatgattacagacgaagaggaaatcaggaccaccaatcccgtggctacggagcagtatggttctgtatctaccaaccttcaaagcggcaacacacaagcagctacctcagatgtcaacacacaaggcgttcttcctggcatggtctggcaggacagagatgtgtacctgcaggggcccatctgggcaaagattcctcacacggacggacactttcacccttctcccctcatgggcggatttggattgaagcaccctcccccacagattctcatcaagaataccccggtacctgcgaatccttcgaccaccttcagtgcggcaaagtttgcttccttcatcacacagtattccacgggacaggtcagcgtggagatagagtgggagctgcagaaggagaacagcaaacgctggaaccccgagatccagtatacttccaactacaacaaatctgttaatgtggactttactgtggacactaatggtgtgtattcagagcctcgccccattggcaccagatacctgactcgtaatctgtaa

SEQ ID NO: 12124 - DNA, 2208 bp, Artificial Sequence
  source: /note="Description of Artificial Sequence: Synthetic polynucleotide"
atggctgccgatggttatcttccagattggctcgaggacactctctctgaaggaataagacagtggtggaagctcaaacctggcccaccaccgccaaagcccgcagagcggcataaggacgacagcaggggtcttgtgcttcctgggtacaagtacctcggacccttcaacggactcgacaagggggagccggtcaacgaggcagacgccgcggccctcgagcacgacaaggcctacgaccggcagctcgacagcggagacaacccgtacctcaagtacaaccacgccgacgcggagtttcaggagcgtcttaaagaagatacgtcttttgggggcaacctcggacgagcagtcttccaggcgaaaaagagggttcttgaacctctgggcctggttgaggaacctgttaagacggctccgggaaaaaagaggccggtagagcactctcctgtggagccagactcctcctcgggaaccggaaaggcgggccagcagcctgcaagaaaaagattgaatttcggtcagactggagacgcagactccgtacctgacccccagcctctcggacagccaccagcagccccctctggtctgggaactaatacgatggctacaggcagtggcgcaccaatggcagacaataacgagggcgccgacggagtgggtaattcctcgggaaattggcattgcgattccacatggatgggcgacagagtcatcaccaccagcacccgcacctgggctctgcccacctacaacaaccatctgtacaagcaaatttccagccaatcaggagcatcgaacgacaaccactactttggctacagcaccccctgggggtattttgacttcaacagattccactgccacttttcgccacgtgactggcaaagactcatcaacaacaactggggattccggcccaagagactcagcttcaagctctttaacattcaagtcaaggaggtcacgcagaatgacggtacgacgacgattgccaataaccttaccagcacggttcaggtctttactgactcggagtaccagctcccgtacgtcctcgactcggcgcatcaaggatgcctcccgccgttcccagcagacgtcttcatggtgccacagtatggatacctcaccctgaacaacgggagtcaggcggtaggacgctcttcattttactgcctggagtacttcccttctcagatgcttcgcacgggaaacaactttaccttcagctacacctttgaggacgtgccttttcacagcagctacgctcacagccaaagtctggaccgtctcatgaatcctctcatcgaccaatacctgtattacttgagcaaaacaaacgctccaagcggaaccaccacgatgtccaggcttcagttttctcaggccggagcgagtgacattcgggaccagtctagaaactggcttcctggaccctgttaccgccagcagcgagtatcaaagacagctgcggacaacaacaacagtgattactcgtggactggagctaccaagtaccacctcaatggaagagactctctggtgaacccgggcccagctatggccagccacaaggatgatgaagaaaaatattttcctcagagcggggttctcatcttcgggaaacaaggctcaaataaaactaatgtggacattgaaaaggttatgattacagacgaagaggaaatcaggaccaccaatcccgtggctacggagcagtatggttctgtatctaccaaccttcaaagcggcaacacacaagcagctacctcagatgtcaacacacaaggcgttcttcctggcatggtctggcaggacagagatgtgtacctgcaggggcccatctgggcaaagattcctcacacggacggacactttcacccttctcccctcatgggcggatttggattgaagcaccctcccccacagattctcatcaagaataccccggtacctgcgaatccttcgaccaccttcagtgcggcaaagtttgcttccttcatcacacagtattccacgggacaggtcagcgtggagatagagtgggagctgcagaaggagaacagcaaacgctggaaccccgagatccagtatacttccaactacaacaaatctgttaatgtggactttactgtggacactaatggtgtgtattcagagcctcgccccattggcaccagatacctgactcgtaatctgtaa

SEQ ID NO: 12125 - DNA, 2208 bp, Artificial Sequence
  source: /note="Description of Artificial Sequence: Synthetic polynucleotide"
atggctgccgatggttatcttccagattggctcgaggacactctctctgaaggaataagacagtggtggaagctcaaacctggcccaccaccgccaaagcccgcagagcggcataaggacgacagcaggggtcttgtgcttcctgggtacaagtacctcggacccttcaacggactcgacaagggggagccggtcaacgaggcagacgccgcggccctcgagcacgacaaggcctacgaccggcagctcgacagcggagacaacccgtacctcaagtacaaccacgccgacgcggagtttcaggagcgtcttaaagaagatacgtcttttgggggcaacctcggacgagcagtcttccaggcgaaaaagagggttcttgaacctctgggcctggttgaggaacctgttaagacggctccgggaaaaaagaggccggtagagcactctcctgtggagccagactcctcctcgggaaccggaaaggcgggccagcagcctgcaagaaaaagattgaatttcggtcagactggagacgcagactccgtacctgacccccagcctctcggacagccaccagcagccccctctggtctgggaactaatacgatggctacaggcagtggcgcaccaatggcagacaataacgagggcgccgacggagtgggtaattcctcgggaaattggcattgcgattccacatggatgggcgacagagtcatcaccaccagcacccgcacctgggctctgcccacctacaacaaccatctgtacaagcaaatttccagccaatcaggagcatcgaacgacaaccactactttggctacagcaccccctgggggtattttgacttcaacagattccactgccacttttcgccacgtgactggcaaagactcatcaacaacaactggggattccggcccaagagactcagcttcaagctctttaacattcaagtcaaggaggtcacgcagaatgacggtacgacgacgattgccaataaccttaccagcacggttcaggtctttactgactcggagtaccagctcccgtacgtcctcggctcggcgcatcaaggatgcctcccgccgttcccagcagacgtcttcatggtgccacagtatggatacctcaccctgaacaacgggagtcaggcggtaggacgctcttcattttactgcctggagtacttcccttctcagatgcttcgcacgggaaacaactttaccttcagctacacctttgaggacgtgccttttcacagcagctacgctcacagccaaagtctggaccgtctcatgaatcctctcatcgaccaatacctgtattacttgagcaaaacaaacgctccaagcggaaccaccacgatgtccaggcttcagttttctcaggccggagcgagtgacattcgggaccagtctagaaactggcttcctggaccctgttaccgccagcagcgagtatcaaagacagctgcggacaacaacaacagtgattactcgtggactggagctaccaagtaccacctcaatggaagagactctctggtgaacccgggcccagctatggccagccacaaggatgatgaagaaaaatattttcctcagagcggggttctcatcttcgggaaacaaggctcaaataaaactaatgtggacattgaaaaggttatgattacagacgaagaggaaatcaggaccaccaatcccgtggctacggagcagtatggttctgtatctaccaaccttcaaagcggcaacacacaagcagctacctcagatgtcaacacacaaggcgttcttcctggcatggtctggcaggacagagatgtgtacctgcaggggcccatctgggcaaagattcctcacacggacggacactttcacccttctcccctcatgggcggatttggattgaagcaccctcccccacagattctcatcaagaataccccggtacctgcgaatccttcgaccaccttcagtgcgacaaagtttgcttccttcatcacacagtattccacgggacaggtcagcgtggagatagagtgggagctgcagaaggagaacagcaaacgctggaaccccgagatccagtatacttccaactacaacaaatctgttaatgtggactttactgtggacactaatggtgtgtattcagagcctcgccccattggcaccagatacctgactcgtaatctgtaa

SEQ ID NO: 12126 - DNA, 2208 bp, Artificial Sequence
  source: /note="Description of Artificial Sequence: Synthetic polynucleotide"
atggctgccgatggttatcttccagattggctcgaggacactctctctgaaggaataagacagtggtggaagctcaaacctggcccaccaccgccaaagcccgcagagcggcataaggacgacagcaggggtcttgtgcttcctgggtacaagtacctcggacccttcaacggactcgacaagggggagtcggtcaacgaggcagacgccgcggccctcgagcacgacaaggcctacgaccggcagctcgacagcggagacaacccgtacctcaagtacaaccacgccgacgcggagtttcaggagcgtcttaaagaagatacgtcttttgggggcaacctcggacgagcagtcttccaggcgaaaaagagggttcttgaacctctgggcctggttgaggaacctgttaagacggctccgggaaaaaagaggccggtagagcactctcctgtggagccagactcctcctcgggaaccggaaaggcgggccagcagcctgcaagaaaaagattgaatttcggtcagactggagacgcagactccgtacctgacccccagcctctcggacagccaccagcagccccctctggtctgggaactaatacgatggctacaggcagtggcgcaccaatggcagacaataacgagggcgccgacggagtgggtaattcctcgggaaattggcattgcgattccacatggatgggcgacagagtcatcaccaccagcacccgcacctgggctctgcccacctacaacaaccatctgtacaagcaaatttccagccaatcaggagcatcgaacgacaaccactactttggctacagcaccccctgggggtattttgacttcaacagattccactgccacttttcgccacgtgactggcaaagactcatcaacaacaactggggattccggcccaagagactcagcttcaagctctttaacattcaagtcaaggaggtcacgcagaatgacggtacgacgacgattgccaataaccttaccagcacggttcaggtctttactgactcggagtaccagctcccgtacgtcctcggctcggcgcatcaaggatgcctcccgccgttcccagcagacgtcttcatggtgccacagtatggatacctcaccctgaacaacgggagtcaggcggtaggacgctcttcattttactgcctggagtacttcccttctcagatgcttcgcacgggaaacaactttaccttcagctacacctttgaggacgtgccttttcacagcagctacgctcacagccaaagtctggaccgtctcatgaatcctctcatcgaccaatacctgtattacttgagcaaaacaaacgctccaagcggaaccaccacgatgtccaggcttcagttttctcaggccggagcgagtgacattcgggaccagtctagaaactggcttcctggaccctgttaccgccagcagcgagtatcaaagacagctgcggacaacaacaacagtgattactcgtggactggagctaccaagtaccacctcaatggaagagactctctggtgaacccgggcccagctatggccagccacaaggatgatgaagaaaaatattttcctcagagcggggttctcatcttcgggaaacaaggctcaaataaaactaatgtggacattgaaaaggttatgattacagacgaagaggaaatcaggaccaccaatcccgtggctacggagcagtatggttctgtatctaccaaccttcaaagcggcaacacacaagcagctacctcagatgtcaacacacaaggcgttcttcctggcatggtctggcaggacagagatgtgtacctgcaggggcccatctgggcaaagattcctcacacggacggacactttcacccttctcccctcatgggcggatttggattgaagcaccctcccccacagattctcatcaagaataccccggtacctgcgaatccttcgaccaccttcagtgcggcaaagtttgcttccttcatcacacagtattccacgggacaggtcagcgtggagatagagtgggagctgcagaaggagaacagcaaacgctggaaccccgagatccagtatacttccaactacaacaaatctgttaatgtggactttactgtggacactaatggtgtgtattcagagcctcgccccattggcaccagatacctgactcgtaatctgtaa

SEQ ID NO: 12127 - DNA, 2208 bp, Artificial Sequence
  source: /note="Description of Artificial Sequence: Synthetic polynucleotide"
atggctgccgatggttatcttccagattggctcgaggacactctctctgaaggaataagacagtggtggaagctcaaacctggcccaccaccgccaaagcccgcagagcggcataaggacgacagcaggggtcttgtgcttcctgggtacaagtacctcggacccttcaacggactcgacaagggggagccggtcaacgaggcagacgccgcggccctcgagcacgacaaggcctacgaccggcagctcgacagcggagacaacccgtacctcaagtacaaccacgccgacgcggagtttcaggagcgtcttaaagaagatacgtcttttgggggcaacctcggacgagcagtcttccaggcgaaaaagagggttcttgaacctctgggcctggttgaggaacctgttaagacggctccgggaaaaaagaggccggtagagcactctcctgtggagccagactcctcctcgggaaccggaaaggcgggccagcagcctgcaagaaaaagattgaatttcggtcagactggagacgcagactccgtacctgacccccagcctctcggacagccaccagcagccccctctggtctgggaactaatacgatggctacaggcagtggcgcaccaatggcagacaataacgagggcgccgacggagtgggtaattcctcgggaaattggcattgcgattccacatggatgggcgacagagtcatcaccaccagcacccgcacctgggctctgcccacctacaacaaccatctgtacaagcaaatttccagccaatcaggagcatcgaacgacaaccactactttggctacagcaccccctgggggtattttgacttcaacagattccactgccacttttcgccacgtgactggcaaagactcatcaacaacaactggggattccggcccaagagactcagcttcaagctctttaacattcaagtcaaggaggtcacgcagaatgacggtacgacgacgattgccaataaccttaccagcacggttcaggtctttactgactcggagtaccagctcccgtacgtcctcggctcggtgcatcaaggatgcctcccgccgttcccagcagacgtcttcatggtgccacagtatggatacctcaccctgaacaacgggagtcaggcggtaggacgctcttcattttactgcctggagtacttcccttctcagatgcttcgcacgggaaacaactttaccttcagctacacctttgaggacgtgccttttcacagcagctacgctcacagccaaagtctggaccgtctcatgaatcctctcatcgaccaatacctgtattacttgagcaaaacaaacgctccaagcggaaccaccacgatgtccaggcttcagttttctcaggccggagcgagtgacattcgggaccagtctagaaactggcttcctggaccctgttaccgccagcagcgagtatcaaagacagctgcggacaacaacaacagtgattactcgtggactggagctaccaagtaccacctcaatggaagagactctctggtgaacccgggcccagctatggccagccacaaggatgatgaagaaaaatattttcctcagagcggggttctcatcttcgggaaacaaggctcaaataaaactaatgtggacattgaaaaggttatgattacagacgaagaggaaatcaggaccaccaatcccgtggctacggagcagtatggttctgtatctaccaaccttcaaagcggcaacacacaagcagctacctcagatgtcaacacacaaggcgttcttcctggcatggtctggcaggacagagatgtgtacctgcaggggcccatctgggcaaagattcctcacacggacggacactttcacccttctcccctcatgggcggatttggattgaagcaccctcccccacagattctcatcaagaataccccggtacctgcgaatccttcgaccaccttcagtgcggcaaagtttgcttccttcatcacacagtattccacgggacaggtcagcgtggagatagagtgggagctgcagaaggagaacagcaaacgctggaaccccgagatccagtatacttccaactacaacaaatctgttaatgtggactttactgtggacactaatggtgtgtattcagagcctcgccccattggcaccagatacctgactcgtaatctgtaa

SEQ ID NO: 12128 - DNA, 2208 bp, Artificial Sequence
  source: /note="Description of Artificial Sequence: Synthetic polynucleotide"
atggctgccgatggttatcttccagattggctcgaggacactctctctgaaggaataagacagtggtggaagctcaaacctggcccaccaccgccaaagcccgcagagcggcataaggacgacagcaggggtcttgtgcttcctgggtacaagtacctcggacccttcaacggactcgacaagggggagccggtcaacgaggcagacgccgcggccctcgagcacgacaaggcctacgaccggcagctcgacagcggagacaacccgtacctcaagtacaaccacgccgacgcggagtttcaggagcgtcttaaagaagatacgtcttttgggggcaacctcggacgagcagtcttccaggcgaaaaagagggttcttgaacctctgggcctggttgaggaacctgttaagacggctccgggaaaaaagaggccggtagagcactctcctgtggagtcagactcctcctcgggaaccggaaaggcgggccagcagcctgcaagaaaaagattgaatttcggtcagactggagacgcagactccgtacctgacccccagcctctcggacagccaccagcagccccctctggtctgggaactaatacgatggctacaggcagtggcgcaccaatggcagacaataacgagggcgccgacggagtgggtaattcctcgggaaattggcattgcgattccacatggatgggcgacagagtcatcaccaccagcacccgcacctgggctctgcccacctacaacaaccatctgtacaagcaaatttccagccaatcaggagcatcgaacgacaaccactactttggctacagcaccccctgggggtattttgacttcaacagattccactgccacttttcgccacgtgactggcaaagactcatcaacaacaactggggattccggcccaagagactcagcttcaagctctttaacattcaagtcaaggaggtcacgcagaatgacggtacgacgacgattgccaataaccttaccagcacggttcaggtctttactgactcggagtaccagctcccgtacgtcctcggctcggcgcatcaaggatgcctcccgccgttcccagcagacgtcttcatggtgccacagtatggatacctcaccctgaacaacgggagtcaggcggtaggacgctcttcattttactgcctggagtacttcccttctcagatgcttcgcacgggaaacaactttaccttcagctacacctttgaggacgtgccttttcacagcagctacgctcacagccaaagtctggaccgtctcatgaatcctctcatcgaccaatacctgtattacttgagcaaaacaaacgctccaagcggaaccaccacgatgtccaggcttcagttttctcaggccggagcgagtgacattcgggaccagtctagaaactggcttcctggaccctgttaccgccagcagcgagtatcaaagacagctgcggacaacaacaacagtgattactcgtggactggagctaccaagtaccacctcaatggaagagactctctggtgaacccgggcccagctatggccagccacaaggatgatgaagaaaaatattttcctcagagcggggttctcatcttcgggaaacaaggctcaaataaaactaatgtggacattgaaaaggttatgattacagacgaagaggaaatcaggaccaccaatcccgtggctacggagcagtatggttctgtatctaccaaccttcaaagcggcaacacacaagcagctacctcagatgtcaacacacaaggcgttcttcctggcatggtctggcaggacagagatgtgtacctgcaggggcccatctgggcaaagattcctcacacggacggacactttcacccttctcccctcatgggcggatttggattgaagcaccctcccccacagattctcatcaagaataccccggtacctgcgaatccttcgaccaccttcagtgcggcaaagtttgcttccttcatcacacagtattccacgggacaggtcagcgtggagatagagtgggagctgcagaaggagaacagcaaacgctggaaccccgagatccagtatacttccaactacaacaaatctgttaatgtggactttactgtggacactaatggtgtgtattcagagcctcgccccattggcaccagatacctgactcgtaatctgtaa

SEQ ID NO: 12129 - DNA, 2208 bp, Artificial Sequence
  source: /note="Description of Artificial Sequence: Synthetic polynucleotide"
atggctgccgatggttatcttccagattggctcgaggacactctctctgaaggaataagacagtggtggaagctcaaacctggcccaccaccgccaaagcccgcagagcggcataaggacgacagcaggggtcttgtgcttcctgggtacaagtacctcggacccttcaacggactcgacaagggggagccggtcaacgaggcagacgccgcggccctcgagcacgacaaggcctacgaccggcagctcgacagcggagacaacccgtacctcaagtacaaccacgccgacgcggagtttcaggagcgtcttaaagaagatacgtcttttgggggcaacctcggacgagcagtcttccaggcgaaaaagagggttcttgaacctctgggcctggttgaggaacctgttaagacggctccgggaaaaaagaggccggtagagcactctcctgtggagccagactcctcctcgggaaccggaaaggcgggccagcagcctgcaagaaaaagattgaatttcggtcagactggagacgcagactccgtacctgacccccagcctctcggacagccaccagcagccccctctggtctgggaactaatacgatggctacaggcagtggcgcaccaatggcagacaataacgagggcgccgacggagtgggtaattcctcgggaaattggcattgcgattccacatggatgggcgacagagtcatcaccaccagcacccgcacctgggctctgcccacctacaacaaccatctgtacaagcaaatttccagccaatcaggagcatcgaacgacaaccactactttggctacagcaccccctgggggtattttgacttcaacagattccactgccacttttcgccacgtgactggcaaagactcatcaacaacaactggggattccggcccaagagactcagcttcaagctctttaacattcaagtcaaggaggtcacgcagaatgacggtacgacgacgattgccaataaccttaccagcacggttcaggtctttactgactcggagtaccagctcccgtacgtcctcggctcggcgcatcaaggatgcctcccgccgttcccagcagacgtcttcatggtgccacagtatggatacctcaccctgaacaacgggagtcaggcggtaggacgctcttcattttactgcctggagtacttcccttctcagatgcttcgcacgggaaacaactttaccttcagctacacctttgaggacgtgccttttcacagcagctacgctcacagccaaagtatggaccgtctcatgaatcctctcatcgaccaatacctgtattacttgagcaaaacaaacgctccaagcggaaccaccacgatgtccaggcttcagttttctcaggccggagcgagtgacattcgggaccagtctagaaactggcttcctggaccctgttaccgccagcagcgagtatcaaagacagctgcggacaacaacaacagtgattactcgtggactggagctaccaagtaccacctcaatggaagagactctctggtgaacccgggcccagctatggccagccacaaggatgatgaagaaaaatattttcctcagagcggggttctcatcttcgggaaacaaggctcaaataaaactaatgtggacattgaaaaggttatgattacagacgaagaggaaatcaggaccaccaatcccgtggctacggagcagtatggttctgtatctaccaaccttcaaagcggcaacacacaagcagctacctcagatgtcaacacacaaggcgttcttcctggcatggtctggcaggacagagatgtgtacctgcaggggcccatctgggcaaagattcctcacacggacggacactttcacccttctcccctcatgggcggatttggattgaagcaccctcccccacagattctcatcaagaataccccggtacctgcgaatccttcgaccaccttcagtgcggcaaagtttgcttccttcatcacacagtattccacgggacaggtcagcgtggagatagagtgggagctgcagaaggagaacagcaaacgctggaaccccgagatccagtatacttccaactacaacaaatctgttaatgtggactttactgtggacactaatggtgtgtattcagagcctcgccccattggcaccagatacctgactcgtaatctgtaa

SEQ ID NO: 12130 - DNA, 2208 bp, Artificial Sequence
  source: /note="Description of Artificial Sequence: Synthetic polynucleotide"
atggctgccgatggttatcttccagattggctcgaggacactctctctgaaggaataagacagtggtggaagctcaaacctggcccaccaccgccaaagcccgcagagcggcataaggacgacagcaggggtcttgtgcttcctgggtacaagtacctcggacccttcaacggactcgacaagggggagccggtcaacgaggcagacgccgcggccctcgagcacgacaaggcctacgaccggcagctcgacagcggagacaacccgtacctcaagtacaaccacgccgacgcggagtttcaggagcgtcttaaagaagatacgtcttttgggggcaacctcggacgagcagtcttccaggcgaaaaagagggttcttgaacctctgggcctggttgaggaacctgttaagacggctccgggaaaaaagaggccggtagagcactctcctgtggagccagactcctcctcgggaaccggaaaggcgggccagcagcctgcaagaaaaagattgaatttcggtcagactggagacgcagactccgtacctgacccccagcctctcggacagccaccagcagccccctctggtctgggaactaatacgatggctacaggcagtggcgcaccaatggcagacaataacgagggcgccgacggagtgggtaattcctcgggaaattggcattgcgattccacatggatgggcgacagagtcatcaccaccagcacccgcacctgggctctgcccacctacaacaaccatctgtacaagcaaatttccagccaatcaggagcatcgaacgacaaccactactttggctacagcaccccctgggggtattttgacttcaacagattccactgccacttttcgccacgtgactggcaaagactcatcaacaacaactggggattccggcccaagagactcagcttcaagctctttaacattcaagtcaaggaggtcacgcagaatgacggtacgacgacgattgccaataaccttaccagcacggttcaggtctttactgactcggagtaccagctcccgtacgtcctcggctcggcgcatcaaggatgcctcccgccgttcccagcagacgtcttcatggtgccacagtatggatacctcaccctgaacaacgggagtcaggcggtaggacgctcttcattttactgcctggagtacttcccttctcagatgcttcgcacgggaaacaactttaccttcagctacacctttgaggacgtgccttttcacagcagctacgctcacagccaaagtctggaccgtctcatgaatcctctcatcgaccaatacctgtattacttgagcaaaacaaacgctccaagcggaaccaccacgatgtccaggcttcagttttctcaggccggagcgagtgacattcgggaccagtctagaaactggcttcctggaccctgttaccgccagcagcgagtatcaaagacagctgcggacaacaacaacagtgattactcgtggactggagctaccaagtaccacctcaatggaagagactctctggtgaacccgggcccagctatggccagccacaaggatgatgaagaaaaatattttcctcagagcggggttctcatctttcggaaacaaggctcaaataaaactaatgtggacattgaaaaggttatgattacagacgaagaggaaatcaggaccaccaatcccgtggctacggagcagtatggttctgtatctaccaaccttcaaagcggcaacacacaagcagctacctcagatgtcaacacacaaggcgttcttcctggcatggtctggcaggacagagatgtgtacctgcaggggcccatctgggcaaagattcctcacacggacggacactttcacccttctcccctcatgggcggatttggattgaagcaccctcccccacagattctcatcaagaataccccggtacctgcgaatccttcgaccaccttcagtgcggcaaagtttgcttccttcatcacacagtattccacgggacaggtcagcgtggagatagagtgggagctgcagaaggagaacagcaaacgctggaaccccgagatccagtatacttccaactacaacaaatctgttaatgtggactttactgtggacactaatggtgtgtattcagagcctcgccccattggcaccagatacctgactcgtaatctgtaa

SEQ ID NO: 12131 - DNA, 2208 bp, Artificial Sequence
  source: /note="Description of Artificial Sequence: Synthetic polynucleotide"
atggctgccgatggttatcttccagattggctcgaggacactctctctgaaggaataagacagtggtggaagctcaaacctggcccaccaccgccaaagcccgcagagcggcataaggacgacagcaggggtcttgtgcttcctgggtacaagtacctcggacccttcaacggactcgacaagggggagccggtcaacgaggcagacaccgcggccctcgagcacgacaaggcctacgaccggcagctcgacagcggagacaacccgtacctcaagtacaaccacgccgacgcggagtttcaggagcgtcttaaagaagatacgtcttttgggggcaacctcggacgagcagtcttccaggcgaaaaagagggttcttgaacctctgggcctggttgaggaacctgttaagacggctccgggaaaaaagaggccggtagagcactctcctgtggagccagactcctcctcgggaaccggaaaggcgggccagcagcctgcaagaaaaagattgaatttcggtcagactggagacgcagactccgtacctgacccccagcctctcggacagccaccagcagccccctctggtctgggaactaatacgatggctacaggcagtggcgcaccaatggcagacaataacgagggcgccgacggagtgggtaattcctcgggaaattggcattgcgattccacatggatgggcgacagagtcatcaccaccagcacccgcacctgggctctgcccacctacaacaaccatctgtacaagcaaatttccagccaatcaggagcatcgaacgacaaccactactttggctacagcaccccctgggggtattttgacttcaacagattccactgccacttttcgccacgtgactggcaaagactcatcaacaacaactggggattccggcccaagagactcagcttcaagctctttaacattcaagtcaaggaggtcacgcagaatgacggtacgacgacgattgccaataaccttaccagcacggttcaggtctttactgactcggagtaccagctcccgtacgtcctcggctcggcgcatcaaggatgcctcccgccgttcccagcagacgtcttcatggtgccacagtatggatacctcaccctgaacaacgggagtcaggcggtaggacgctcttcattttactgcctggagtacttcccttctcagatgcttcgcacgggaaacaactttaccttcagctacacctttgaggacgtgccttttcacagcagctacgctcacagccaaagtctggaccgtctcatgaatcctctcatcgaccaatacctgtattacttgagcaaaacaaacgctccaagcggaaccaccacgatgtccaggcttcagttttctcaggccggagcgagtgacattcgggaccagtctagaaactggcttcctggaccctgttaccgccagcagcgagtatcaaagacagctgcggacaacaacaacagtgattactcgtggactggagctaccaagtaccacctcaatggaagagactctctggtgaacccgggcccagctatggccagccacaaggatgatgaagaaaaatattttcctcagagcggggttctcatcttcgggaaacaaggctcaaataaaactaatgtggacattgaaaaggttatgattacagacgaagaggaaatcaggaccaccaatcccgtggctacggagcagtatggttctgtatctaccaaccttcaaagcggcaacacacaagcagctacctcagatgtcaacacacaaggcgttcttcctggcatggtctggcaggacagagatgtgtacctgcaggggcccatctgggcaaagattcctcacacggacggacactttcacccttctcccctcatgggcggatttggattgaagcaccctcccccacagattctcatcaagaataccccggtacctgcgaatccttcgaccaccttcagtgcggcaaagtttgcttccttcatcacacagtattccacgggacaggtcagcgtggagatagagtgggagctgcagaaggagaacagcaaacgctggaaccccgagatccagtatacttccaactacaacaaatctgttaatgtggactttactgtggacactaatggtgtgtattcagagcctcgccccattggcaccagatacctgactcgtaatctgtaa

SEQ ID NO: 12132 - DNA, 2208 bp, Artificial Sequence
  source: /note="Description of Artificial Sequence: Synthetic polynucleotide"
atggctgccgatggttatcttccagattggctcgaggacactctctctgaaggaataagacagtggtggaagctcaaacctggcccaccaccgccaaagcccgcagagcggcataaggacgacagcaggggtcttgtgcttcctgggtacaagtacctcggacccttcaacggactcgacaagggggagccggtcaacgaggcagacgccgcggccctcgagcacgacaaggcctacgaccggcagctcgacagcggagacaacccgtacctcaagtacaaccacgccgacgcggagtttcaggagcgtcttaaagaagatacgtcttttgggggcaacctcggacgagcagtcttccaggcgaaaaagagggttcttgaacctctgggcctggttgaggaacctgttaagacggctccgggaaaaaagaggccggtagagcactctcctgtggagccagactcctcctcgggaaccggaaaggcgggccagcagcctgcaagaaaaagattgaatttcggtcagactggagacgcagactccgtacctgacccccagcctctcggacagccaccagcagccccctctggtctgggaactaatacgatggctacaggcagtggcacaccaatggcagacaataacgagggcgccgacggagtgggtaattcctcgggaaattggcattgcgattccacatggatgggcgacagagtcatcaccaccagcacccgcacctgggctctgcccacctacaacaaccatctgtacaagcaaatttccagccaatcaggagcatcgaacgacaaccactactttggctacagcaccccctgggggtattttgacttcaacagattccactgccacttttcgccacgtgactggcaaagactcatcaacaacaactggggattccggcccaagagactcagcttcaagctctttaacattcaagtcaaggaggtcacgcagaatgacggtacgacgacgattgccaataaccttaccagcacggttcaggtctttactgactcggagtaccagctcccgtacgtcctcggctcggcgcatcaaggatgcctcccgccgttcccagcagacgtcttcatggtgccacagtatggatacctcaccctgaacaacgggagtcaggcggtaggacgctcttcattttactgcctggagtacttcccttctcagatgcttcgcacgggaaacaactttaccttcagctacacctttgaggacgtgccttttcacagcagctacgctcacagccaaagtctggaccgtctcatgaatcctctcatcgaccaatacctgtattacttgagcaaaacaaacgctccaagcggaaccaccacgatgtccaggcttcagttttctcaggccggagcgagtgacattcgggaccagtctagaaactggcttcctggaccctgttaccgccagcagcgagtatcaaagacagctgcggacaacaacaacagtgattactcgtggactggagctaccaagtaccacctcaatggaagagactctctggtgaacccgggcccagctatggccagccacaaggatgatgaagaaaaatattttcctcagagcggggttctcatcttcgggaaacaaggctcaaataaaactaatgtggacattgaaaaggttatgattacagacgaagaggaaatcaggaccaccaatcccgtggctacggagcagtatggttctgtatctaccaaccttcaaagcggcaacacacaagcagctacctcagatgtcaacacacaaggcgttcttcctggcatggtctggcaggacagagatgtgtacctgcaggggcccatctgggcaaagattcctcacacggacggacactttcacccttctcccctcatgggcggatttggattgaagcaccctcccccacagattctcatcaagaataccccggtacctgcgaatccttcgaccaccttcagtgcggcaaagtttgcttccttcatcacacagtattccacgggacaggtcagcgtggagatagagtgggagctgcagaaggagaacagcaaacgctggaaccccgagatccagtatacttccaactacaacaaatctgttaatgtggactttactgtggacactaatggtgtgtattcagagcctcgccccattggcaccagatacctgactcgtaatctgtaa

SEQ ID NO: 12133 - DNA, 2208 bp, Artificial Sequence
  source: /note="Description of Artificial Sequence: Synthetic polynucleotide"
atggctgccgatggttatcttccagattggctcgaggacactctctctgaaggaataagacagtggtggaagctcaaacctggcccaccaccgccaaagcccgcagagcggcataaggacgacagcaggggtcttgtgcttcctgggtacaagtacctcggacccttcaacggactcgacaagggggagccggtcaacgaggcagacgccgcggccctcgagcacgacaaggcctacgaccggcagctcgacagcggagacaacccgtacctcaagtacaaccacgccgacgcggagtttcaggagcgtcttaaagaagatacgtcttttgggggcaacctcggacgagcagtcttccaggcgaaaaagagggttcttgaacctctgggcctggttgaggaacctgttaagacggctccgggaaaaaagaggccggtagagcactctcctgtggagccagactcctcctcgggaaccggaaaggcgggccagcagcctgcaagaaaaagattgaatttcggtcagactggagacgcagactccgtacctgacccccagcctctcggacagccaccagcagccccctctggtctgggaactaatacgatggctacaggcagtggcgcaccaatggcagacaataacgagggcgccgacggagtgggtaattcctcgggaaattggcattgcgattccacatggatgggcgacagagtcatcaccaccagcacccgcacctgggctctgtccacctacaacaaccatctgtacaagcaaatttccagccaatcaggagcatcgaacgacaaccactactttggctacagcaccccctgggggtattttgacttcaacagattccactgccacttttcgccacgtgactggcaaagactcatcaacaacaactggggattccggcccaagagactcagcttcaagctctttaacattcaagtcaaggaggtcacgcagaatgacggtacgacgacgattgccaataaccttaccagcacggttcaggtctttactgactcggagtaccagctcccgtacgtcctcggctcggcgcatcaaggatgcctcccgccgttcccagcagacgtcttcatggtgccacagtatggatacctcaccctgaacaacgggagtcaggcggtaggacgctcttcattttactgcctggagtacttcccttctcagatgcttcgcacgggaaacaactttaccttcagctacacctttgaggacgtgccttttcacagcagctacgctcacagccaaagtctggaccgtctcatgaatcctctcatcgaccaatacctgtattacttgagcaaaacaaacgctccaagcggaaccaccacgatgtccaggcttcagttttctcaggccggagcgagtgacattcgggaccagtctagaaactggcttcctggaccctgttaccgccagcagcgagtatcaaagacagctgcggacaacaacaacagtgattactcgtggactggagctaccaagtaccacctcaatggaagagactctctggtgaacccgggcccagctatggccagccacaaggatgatgaagaaaaatattttcctcagagcggggttctcatcttcgggaaacaaggctcaaataaaactaatgtggacattgaaaaggttatgattacagacgaagaggaaatcaggaccaccaatcccgtggctacggagcagtatggttctgtatctaccaaccttcaaagcggcaacacacaagcagctacctcagatgtcaacacacaaggcgttcttcctggcatggtctggcaggacagagatgtgtacctgcaggggcccatctgggcaaagattcctcacacggacggacactttcacccttctcccctcatgggcggatttggattgaagcaccctcccccacagattctcatcaagaataccccggtacctgcgaatccttcgaccaccttcagtgcggcaaagtttgcttccttcatcacacagtattccacgggacaggtcagcgtggagatagagtgggagctgcagaaggagaacagcaaacgctggaaccccgagatccagtatacttccaactacaacaaatctgttaatgtggactttactgtggacactaatggtgtgtattcagagcctcgccccattggcaccagatacctgactcgtaatctgtaa

SEQ ID NO: 12134 - DNA, 2208 bp, Artificial Sequence
  source: /note="Description of Artificial Sequence: Synthetic polynucleotide"
atggctgccgatggttatcttccagattggctcgaggacactctctctgaaggaataagacagtggtggaagctcaaacctggcccaccaccgccaaagcccgcagagcggcataaggacgacagcaggggtcttgtgcttcctgggtacaagtacctcggacccttcaacggactcgacaagggggagccggtcaacgaggcagacgccgcggccctcgagcacgacaaggcctacgaccggcagctcgacagcggagacaacccgtacctcaagtacaaccacgccgacgcggagtttcaggagcgtcttaaagaagatacgtcttttgggggcaacctcggacgagcagtcttccaggcgaaaaagagggttcttgaacctctgggcctggttgaggaacctgttaagacggctccgggaaaaaagaggccggtagagcactctcctgtggagccagactcctcctcgggaaccggaaaggcgggccagcagcctgcaagaaaaagattgaatttcggtcagactggagacgcagactccgtacctgacccccagcctctcggacagccaccagcagccccctctggtctgggaactaatacgatggctacaggcagtggcgcaccaatggcagacaataacgagggcgccgacggagtgggtaattcctcgggaaattggcattgcgattccacatggatgggcgacagagtcatcaccaccagcacccgcacctgggctctgcccacctacaacaaccatctgtacaagcaaatttccagccaatcaggagcatcgaacgacaaccactactttggctacagcaccccctgggggtattttgacttcaacagattccactgccacttttcgccacgtgactggcaaagactcatcaacaacaactggggattccggcccaagagactcagcttcaagctctttaacattcaagtcaaggaggtcacgcagaatgacggtacgacgacgattgccaataaccttaccagcacggttcaggtctttactgactcggagtaccagctcccgtacgtcctcggctcggcgcatcaaggatgcctcccgccgttcccagcagacgtcttcatggtgccacagtatggatacctcaccctgaacaacgggagtcaggcggtaggacgctcttcattttactgcctggagtacttcccttctcagatgcttcgcacgggaaacaactttaccttcagctacacctttgaggacgtgccttttcacagcagctacgctcacagccaaagtctggaccgtctcatgaatcctctcatcgaccaatacctgtattacttgagcaaaacaaacgctccaagcggaaccaccacgatgtccaggcttcagttttctcaggccggagcgagtgacattcgggaccagtctagaaactggcttcctggaccctgttaccgccagcagcgagtatcaaagacagctgtggacaacaacaacagtgattactcgtggactggagctaccaagtaccacctcaatggaagagactctctggtgaacccgggcccagctatggccagccacaaggatgatgaagaaaaatattttcctcagagcggggttctcatcttcgggaaacaaggctcaaataaaactaatgtggacattgaaaaggttatgattacagacgaagaggaaatcaggaccaccaatcccgtggctacggagcagtatggttctgtatctaccaaccttcaaagcggcaacacacaagcagctacctcagatgtcaacacacaaggcgttcttcctggcatggtctggcaggacagagatgtgtacctgcaggggcccatctgggcaaagattcctcacacggacggacactttcacccttctcccctcatgggcggatttggattgaagcaccctcccccacagattctcatcaagaataccccggtacctgcgaatccttcgaccaccttcagtgcggcaaagtttgcttccttcatcacacagtattccacgggacaggtcagcgtggagatagagtgggagctgcagaaggagaacagcaaacgctggaaccccgagatccagtatacttccaactacaacaaatctgttaatgtggactttactgtggacactaatggtgtgtattcagagcctcgccccattggcaccagatacctgactcgtaatctgtaa

SEQ ID NO: 12135 - DNA, 2208 bp, Artificial Sequence
  source: /note="Description of Artificial Sequence: Synthetic polynucleotide"
atggctgccgatggttatcttccagattggctcgaggacactctctctgaaggaataagacagtggtggaagctcaaacctggcccaccaccgccaaagcccgcagagcggcataaggacgacagcaggggtcttgtgcttcctgggtacaagtacctcggacccttcaacggactcgacaagggggagccggtcaacgaggcagacgccgcggccctcgagcacgacaaggcctacgaccggcagctcgacagcggagacaacccgtacctcaagtacaaccacgccgacgcggagtttcaggagcgtcttaaagaagatacgtcttttgggggcaacctcggacgagcagtcttccaggcgaaaaagagggttcttgaacctctgggcctggttgaggaacctgttaagacggctccgggaaaaaagaggccggtagagcactctcctgtggagccagactcctcctcgggaaccggaaaggcgggccagcagcctgcaagaaaaagattgaatttcggtcagactggagacgcagactccgtacctgacccccagcctctcggacagccaccagcagccccctctggtctgggaactaatacgatggctacaggcagtggcgcaccaatggcagacaataacgagggcgccgacggagtgggtaattcctcgggaaattggcattgcgattccacatggatgggcgacagagtcatcaccaccagcacccgcacctgggctctgcccacctacaacaaccatctgtacaagcaaatttccagccaatcaggagcatcgaacgacaaccactactttggctacagcaccccctgggggtattttgacttcaacagattccactgccacttttcgccacgtgactggcaaagactcatcaacaacaactggggattccggcccaagagactcagcttcaagctctttaacattcaagtcaaggaggtcacgcagaatgacggtacgacgacgattgccaataaccttaccagcacggttcaggtctttactgactcggagtaccagctcccgtacgtcctcggctcggcgcatcaaggatgcctcccgccgttcccagcagacgtcttcatggtgccacagtatggatacctcaccctgaacaacgggagtcaggcggtaggacgctcttcattttactgcctggagtacttcccttctcagatacttcgcacgggaaacaactttaccttcagctacacctttgaggacgtgccttttcacagcagctacgctcacagccaaagtctggaccgtctcatgaatcctctcatcgaccaatacctgtattacttgagcaaaacaaacgctccaagcggaaccaccacgatgtccaggcttcagttttctcaggccggagcgagtgacattcgggaccagtctagaaactggcttcctggaccctgttaccgccagcagcgagtatcaaagacagctgcggacaacaacaacagtgattactcgtggactggagctaccaagtaccacctcaatggaagagactctctggtgaacccgggcccagctatggccagccacaaggatgatgaagaaaaatattttcctcagagcggggttctcatcttcgggaaacaaggctcaaataaaactaatgtggacattgaaaaggttatgattacagacgaagaggaaatcaggaccaccaatcccgtggctacggagcagtatggttctgtatctaccaaccttcaaagcggcaacacacaagcagctacctcagatgtcaacacacaaggcgttcttcctggcatggtctggcaggacagagatgtgtacctgcaggggcccatctgggcaaagattcctcacacggacggacactttcacccttctcccctcatgggcggatttggattgaagcaccctcccccacagattctcatcaagaataccccggtacctgcgaatccttcgaccaccttcagtgcggcaaagtttgcttccttcatcacacagtattccacgggacaggtcagcgtggagatagagtgggagctgcagaaggagaacagcaaacgctggaaccccgagatccagtatacttccaactacaacaaatctgttaatgtggactttactgtggacactaatggtgtgtattcagagcctcgccccattggcaccagatacctgactcgtaatctgtaa

SEQ ID NO: 12136 - DNA, 2208 bp, Artificial Sequence
  source: /note="Description of Artificial Sequence: Synthetic polynucleotide"
atggctgccgatggttatcttccagattggctcgaggacactctctctgaaggaataagacagtggtggaagctcaaacctggcccaccaccgccaaagcccgcagagcggcataaggacgacagcaggggtcttgtgcttcctgggtacaagtacctcggacccttcaacggactcgacaagggggagccggtcaacgaggcagacgccgcggccctcgagcacgacaaggcctacgaccggcagctcgacagcggagacaacccgtacctcaagtacaaccacgccgacgcggagtttcaggagcgtcttaaagaagatacgtcttttgggggcaacctcggacgagcagtcttccaggcgaaaaagagggttcttgaacctctgggcctggttgaggaacctgttaagacggctccgggaaaaaagaggccggtagagcactctcctgtggagccagactcctcctcgggaaccggaaaggtgggccagcagcctgcaagaaaaagattgaatttcggtcagactggagacgcagactccgtacctgacccccagcctctcggacagccaccagcagccccctctggtctgggaactaatacgatggctacaggcagtggcgcaccaatggcagacaataacgagggcgccgacggagtgggtaattcctcgggaaattggcattgcgattccacatggatgggcgacagagtcatcaccaccagcacccgcacctgggctctgcccacctacaacaaccatctgtacaagcaaatttccagccaatcaggagcatcgaacgacaaccactactttggctacagcaccccctgggggtattttgacttcaacagattccactgccacttttcgccacgtgactggcaaagactcatcaacaacaactggggattccggcccaagagactcagcttcaagctctttaacattcaagtcaaggaggtcacgcagaatgacggtacgacgacgattgccaataaccttaccagcacggttcaggtctttactgactcggagtaccagctcccgtacgtcctcggctcggcgcatcaaggatgcctcccgccgttcccagcagacgtcttcatggtgccacagtatggatacctcaccctgaacaacgggagtcaggcggtaggacgctcttcattttactgcctggagtacttcccttctcagatgcttcgcacgggaaacaactttaccttcagctacacctttgaggacgtgccttttcacagcagctacgctcacagccaaagtctggaccgtctcatgaatcctctcatcgaccaatacctgtattacttgagcaaaacaaacgctccaagcggaaccaccacgatgtccaggcttcagttttctcaggccggagcgagtgacattcgggaccagtctagaaactggcttcctggaccctgttaccgccagcagcgagtatcaaagacagctgcggacaacaacaacagtgattactcgtggactggagctaccaagtaccacctcaatggaagagactctctggtgaacccgggcccagctatggccagccacaaggatgatgaagaaaaatattttcctcagagcggggttctcatcttcgggaaacaaggctcaaataaaactaatgtggacattgaaaaggttatgattacagacgaagaggaaatcaggaccaccaatcccgtggctacggagcagtatggttctgtatctaccaaccttcaaagcggcaacacacaagcagctacctcagatgtcaacacacaaggcgttcttcctggcatggtctggcaggacagagatgtgtacctgcaggggcccatctgggcaaagattcctcacacggacggacactttcacccttctcccctcatgggcggatttggattgaagcaccctcccccacagattctcatcaagaataccccggtacctgcgaatccttcgaccaccttcagtgcggcaaagtttgcttccttcatcacacagtattccacgggacaggtcagcgtggagatagagtgggagctgcagaaggagaacagcaaacgctggaaccccgagatccagtatacttccaactacaacaaatctgttaatgtggactttactgtggacactaatggtgtgtattcagagcctcgccccattggcaccagatacctgactcgtaatctgtaa

SEQ ID NO: 12137 - DNA, 2208 bp, Artificial Sequence
  source: /note="Description of Artificial Sequence: Synthetic polynucleotide"
atggctgccgatggttatcttccagattggctcgaggacactctctctgaaggaataagacagtggtggaagctcaaacctggcccaccaccgccaaagcccgcagagcggcataaggacgacagcaggggtcttgtgcttcctgggtacaagtacctcggacccttcaacggactcgacaagggggagccggtcaacgaggcagacgccgcggccctcgagcacgacaaggcctacgaccggcagctcgacagcggagacaacccgtacctcaagtacaaccacgccgacgcggagtttcaggagcgtcttaaagaagatacgtcttttgggggcaacctcggacgagcagtcttccaggcgaaaaagagggttcttgaacctctgggcctggttgaggaacctgttaagacggctccgggaaaaaagaggccggtagagcactctcctgtggagccagactcctcctcgggaaccggaaaggcgggccagcagcctgcaagaaaaagattgaatttcggtcagactggagacgcagactccgtacctgacccccagcctctcggacagccaccagcagccccctctggtctgggaactaatacgatggctgcaggcagtggcgcaccaatggcagacaataacgagggcgccgacggagtgggtaattcctcgggaaattggcattgcgattccacatggatgggcgacagagtcatcaccaccagcacccgcacctgggctctgcccacctacaacaaccatctgtacaagcaaatttccagccaatcaggagcatcgaacgacaaccactactttggctacagcaccccctgggggtattttgacttcaacagattccactgccacttttcgccacgtgactggcaaagactcatcaacaacaactggggattccggcccaagagactcagcttcaagctctttaacattcaagtcaaggaggtcacgcagaatgacggtacgacgacgattgccaataaccttaccagcacggttcaggtctttactgactcggagtaccagctcccgtacgtcctcggctcggcgcatcaaggatgcctcccgccgttcccagcagacgtcttcatggtgccacagtatggatacctcaccctgaacaacgggagtcaggcggtaggacgctcttcattttactgcctggagtacttcccttctcagatgcttcgcacgggaaacaactttaccttcagctacacctttgaggacgtgccttttcacagcagctacgctcacagccaaagtctggaccgtctcatgaatcctctcatcgaccaatacctgtattacttgagcaaaacaaacgctccaagcggaaccaccacgatgtccaggcttcagttttctcaggccggagcgagtgacattcgggaccagtctagaaactggcttcctggaccctgttaccgccagcagcgagtatcaaagacagctgcggacaacaacaacagtgattactcgtggactggagctaccaagtaccacctcaatggaagagactctctggtgaacccgggcccagctatggccagccacaaggatgatgaagaaaaatattttcctcagagcggggttctcatcttcgggaaacaaggctcaaataaaactaatgtggacattgaaaaggttatgattacagacgaagaggaaatcaggaccaccaatcccgtggctacggagcagtatggttctgtatctaccaaccttcaaagcggcaacacacaagcagctacctcagatgtcaacacacaaggcgttcttcctggcatggtctggcaggacagagatgtgtacctgcaggggcccatctgggcaaagattcctcacacggacggacactttcacccttctcccctcatgggcggatttggattgaagcaccctcccccacagattctcatcaagaataccccggtacctgcgaatccttcgaccaccttcagtgcggcaaagtttgcttccttcatcacacagtattccacgggacaggtcagcgtggagatagagtgggagctgcagaaggagaacagcaaacgctggaaccccgagatccagtatacttccaactacaacaaatctgttaatgtggactttactgtggacactaatggtgtgtattcagagcctcgccccattggcaccagatacctgactcgtaatctgtaa

SEQ ID NO: 12138 - DNA, 2208 bp, Artificial Sequence
  source: /note="Description of Artificial Sequence: Synthetic polynucleotide"
atggctgccgatggttatcttccagattggctcgaggacactctctctgaaggaataagacagtggtggaagctcaaacctggcccaccaccgccaaagcccgcagagcggcataaggacgacagcaggggtcttgtgcttcctgggtacaagtacctcggacccttcaacggactcgacaagggggagccggtcaacgaggcagacgccgcggccctcgagcacgacaaggcctacgaccggcagctcgacagcggagacaacccgtacctcaagtacaaccacgccgacgcggagtttcaggagcgtcttaaagaagatacgtcttttgggggcaacctcggacgagcagtcttccaggcgaaaaagagggttcttgaacctctgggcctggttgaggaacctgttaagacggctccgggaaaaaagaggccggtagagcactctcctgtggagccagactcctcctcgggaaccggaaaggcgggccagcagcctgcaagaaaaagattgaatttcggtcagactggagacgcagactccgtacctgacccccagcctctcggacagccaccagcagccccctctggtctgggaactaatacgatggctacaggcagtggcgcaccaatggcagacaataacgagggcgccgacggagtgggtaattcctcgggaaattggcattgcgattccacatggatgggcgacagagtcatcaccaccagcacccgcacctgggctctgcccacctacaacaaccatctgtacaagcaaatttccagccaatcaggagcatcgaacgacaaccactactttggctacagcaccccctgggggtattttgacttcaacagattccactgccacttttcgccacgtgactggcaaagactcatcaacaacaactggggattccggcccaagagactcagcttcaagctctttaacattcaagtcaaggaggtcacgcagaatgacggtacgacgacgattgccaataaccttaccagcacggttcaggtctttactgactcggagtaccagctcccgtacgtcctcggctcggcgcatcaaggatgcctcccgccgttcccagcagacgtcttcatggtgccacagtatggatacctcaccctgaacaacgggagtcaggcggtaggacgctcttcattttactgcctggagtacttcccttctcagatgcttcgcacgggaaacaactttaccttcagctacacctttgaggacgtgccttttcacagcagctacgctcacagccaaagtctggaccgtctcatgaatcctctcatcgaccaatacctgtattacttgagcaaaacaaacgctccaagcggaaccaccacgatgtccaggcttcagttttctcaggccggagcgagtgacattcgggaccagtctagaaactggcttcctggaccctgttaccgccagcagcgagtatcaaagacagctgcggacaacaacaacagtgattactcgtggactggagctaccaagtaccacctcaatggaagagactctctggtgaacccgggcccagctatggccagccacaaggatgatgaagaaaaatattttcctcagagcggggttctcatcttcgggaaacaaggctcaaataaaactaatgtggacattgaaaaggttatgattacagacgaagaggaaatcaggaccaccaatcccgtggctacggagcagtatggttctgtatctaccaaccttcaaagcgacaacacacaagcagctacctcagatgtcaacacacaaggcgttcttcctggcatggtctggcaggacagagatgtgtacctgcaggggcccatctgggcaaagattcctcacacggacggacactttcacccttctcccctcatgggcggatttggattgaagcaccctcccccacagattctcatcaagaataccccggtacctgcgaatccttcgaccaccttcagtgcggcaaagtttgcttccttcatcacacagtattccacgggacaggtcagcgtggagatagagtgggagctgcagaaggagaacagcaaacgctggaaccccgagatccagtatacttccaactacaacaaatctgttaatgtggactttactgtggacactaatggtgtgtattcagagcctcgccccattggcaccagatacctgactcgtaatctgtaa

SEQ ID NO: 12139 - DNA, 2208 bp, Artificial Sequence
  source: /note="Description of Artificial Sequence: Synthetic polynucleotide"
atggctgccgatggttatcttccagattggctcgaggacactctctctgaaggaataagacagtggtggaagctcaaacctggcccaccaccgccaaagcccgcagagcggcataaggacgacagcaggggtcttgtgcttcctgggtacaagtacctcggacccttcaacggactcgacaagggggagccggtcaacgaggcagacgccgcggccctcgagcacgacaaggcctacgaccggcagctcgacagcggagacaacccgtacctcaagtacaaccacgccgacgcggagtttcaggagcgtcttaaagaagatacgtcttttgggggcaacctcggacgagcagtcttccaggcgaaaaagagggttcttgaacctctgggcctggttgaggaacctgttaagacggctccgggaaaaaagaggccggtagagcactctcctgtggagccagactcctcctcgggaaccggaaaggcgggccagcagcctgcaagaaaaagattgaatttcggtcagactggagacgcagactccgtacctgacccccagcctctcggacagccaccagcagccccctctggtctgggaactaatacgatggctacaggcagtggcgcaccaatggcagacaataacgagggcgccgacggagtgggtaattcctcgggaaattggcattgcgattccacatggatgggcgacagagtcatcaccaccagcacccgcacctgggctctgcccacctacaacaaccatctgtacaagcaaatttccagccaatcaggagcatcgaacgacaaccactactttggctacagcaccccctgggggtattttgacttcaacagattccactgccacttttcgccacgtgactggcaaagactcatcaacaacaactggggattccggcccaagagactcagcttcaagctctttaacattcaagtcaaggaggtcacgcagaatgacggtaygacgacgattgccaataaccttaccagcacggttcaggtctttactgactcggagtaccagctcccgtacgtcctcggctcggcgcatcaaggatgcctcccgccgttcccagcagacgtcttcatggtgccacagtatggatacctcaccctgaacaacgggagtcaggcggtaggacgctcttcattttactgcctggagtacttcccttctcagatgcttcgcacgggaaacaactttaccttcagctacacctttgaggacgtgccttttcacagcagctacgctcacagccaaagtctggaccgtctcatgaatcctctcatcgaccaatacctgtattacttgagcaaaacaaacgctccaagcggaaccaccacgatgtccaggcttcagttttctcaggccggagcgagtgacattcgggaccagtctagaaactggcttcctggaccctgttaccgccagcagcgagtatcaaagacagctgcggacaacaacaacagtgattactcgtggactggagctaccaagtaccacctcaatggaagagactctctggtgaacccgggcccagctatggccagccacaaggatgatgaagaaaaatattttcctcagagcggggttctcatcttcgggaaacaaggctcaaataaaactaatgtggacattgaaaaggttatgattacagacgaagaggaaatcaggaccaccaatcccgtggctacggagcagtatggttctgtatctaccaaccttcaaagcggcaacacacaagcagctacctcagatgtcaacacacaaggcgttcttcctggcatggtctggcaggacagagatgtgtacctgcaggggcccatctgggcaaagattcctcacacggacggacactttcacccttctcccctcatgggcggatttggattgaagcaccctcccccacagattctcatcaagaataccccggtacctgcgaatccttcgaccaccttcagtgcggcaaagtttgcttccttcatcacacagtattccacgggacaggtcagcgtggagatagagtgggagctgcagaaggagaacagcaaacgctggaaccccgagatccagtatacttccaactacaacaaatctgttaatgtggactttactgtggacactaatggtgtgtattcagagcctcgccccattggcaccagatacctgactcgtaatctgtaa

SEQ ID NO: 12140 - DNA, 2208 bp, Artificial Sequence
  source: /note="Description of Artificial Sequence: Synthetic polynucleotide"
atggctgccgatggttatcttccagattggctcgaggacactctctctgaaggaataagacagtggtggaagctcaaacctggcccaccaccgccaaagcccgcagagcggcataaggacgacagcaggggtcttgtgcttcctgggtacaagtacctcggacccttcaacggactcgacaagggggagccggtcaacgaggcagacgccgcggccctcgagcacgacaaggcctacgaccggcagctcgacagcggagacaacccgtacctcaagtacaaccacgccgacgcggagtttcaggagcgtcttaaagaagatacgtcttttgggggcaacctcggacgagcagtcttccaggcgaaaaagagggttcttgaacctctgggcctggttgaggaacctgttaagacggctccgggaaaaaagaggccggtagagcactctcctgtggagccagactcctcctcgggaaccggaaaggcgggccagcagcctgcaagaaaaagattgaatttcggtcagactggagacgcagactccgtacctgacccccagcctctcggacagccaccagcagccccctctggtctgggaactaatacgatggctacaggcagtggcgcaccaatggcagacaataacgagggcgccgacggagtgggtaattcctcgggaaattggcattgcgattccacatggatgggcgacagagtcatcaccaccagcacccgcacctgggctctgcccacctacaacaaccatctgtacaagcaaatttccagccaatcaggagcatcgaacgacaaccactactttggctacagcaccccctgggggtattttgacttcaacagattccactgccacttttcgccacgtgactggcaaagactcatcaacaacaactggggattccggcccaagagactcagcttcaagctctttaacattcaagtcaaggaggtcacgcagaatgacggtacgacgacgattgccaataaccttaccagcacggttcaggtctttactgactcggagtaccagctcccgtacgtcctcggctcggcgcatcaaggatgcctcccgccgttcccagcagacgtcttcatggtgccacagtatggatacctcaccctgaacaacgggagtcaggcggtaggacgctcttcattttactgcctggagtacttcccttctcagatgcttcgcacgggaaacaactttaccttcagctacacctttgaggacgtgccttttcacagcagctacgctcacagccaaagtctggaccgtctcatgaatcctctcatcgaccaatacctgtattacttgagcaaaacaaacgctccaagcggaaccaccacgatgtccaggcttcagttttctcaggccggagcgagtgacattcgggaccagtctagaaactggcttcctggaccctgttaccgccagcagcgagtatcaaagacagctgcggacaacaacaacagtgattactcgtggactggagctaccaagtaccacctcaatggaagagactctctggtgaacccgggcccagctatggccagccacaaggatgatgaagaaaaatattttcctcagagcggggttctcatcttcgggaaacaaggctcaaataaaactaatgtggacattgaaaaggttatgattacagacgaagaggaaatcaggaccaccaatcccgtggctacggagcagtatggttctgtatctaccaaccttcaaagcggcaacacacaagcagctacctcagatgtcaacacacaaggcgttcttcctggcatggtctggcaggacagagatgtgtacctgcaggggcccatctgggcaaagattcctcacacggacggacactttcacccttctcccctcatgggcggatttggattgaagcaccctcccccacagattctcatcaagaataccccggtacctgcgaatccttcgaccaccttcagtgcggcaaagtttgcttccttcatcacacagtattccacgggacaggtcagcgtggagatagagtgggagctgcagaaggagaacagcaaacgctggaaccccgagatccagtatacttccaactacaacaaatctgttaatgtggactttactgtggacactaatggtgtgtattcagagcctcgccccattgacaccagatacctgactcgtaatctgtaa

SEQ ID NO: 12141 - DNA, 2208 bp, Artificial Sequence
  source: /note="Description of Artificial Sequence: Synthetic polynucleotide"
atggctgccgatggttatcttccagattggctcgaggacactctctctgaaggaataagacagtggtggaagctcaaacctggcccaccaccgccaaagcccgcagagcggcataaggacgacagcaggggtcttgtgcttcctgggtacaagtacctcggacccttcaacggactcgacaagggggagccggtcaacgaggcagacgccgcggccctcgagcacgacaaggcctacgaccggcagctcgacagcggagacaacccgtacctcaagtacaaccacgccgacgcggagtttcaggagcgtcttaaagaagatacgtcttttgggggcaacctcggacgagcagtcttccaggcgaaaaagagggttcttgaacctctgggcctggttgaggaacctgttaagacggctccgggaaaaaagaggccggtagagcactctcctgtggagccagactcctcctcgggaaccggaaaggcgggccagcagcctgcaagaaaaagattgaatttcggtcagactggagacacagactccgtacctgacccccagcctctcggacagccaccagcagccccctctggtctgggaactaatacgatggctacaggcagtggcgcaccaatggcagacaataacgagggcgccgacggagtgggtaattcctcgggaaattggcattgcgattccacatggatgggcgacagagtcatcaccaccagcacccgcacctgggctctgcccacctacaacaaccatctgtacaagcaaatttccagccaatcaggagcatcgaacgacaaccactactttggctacagcaccccctgggggtattttgacttcaacagattccactgccacttttcgccacgtgactggcaaagactcatcaacaacaactggggattccggcccaagagactcagcttcaagctctttaacattcaagtcaaggaggtcacgcagaatgacggtacgacgacgattgccaataaccttaccagcacggttcaggtctttactgactcggagtaccagctcccgtacgtcctcggctcggcgcatcaaggatgcctcccgccgttcccagcagacgtcttcatggtgccacagtatggatacctcaccctgaacaacgggagtcaggcggtaggacgctcttcattttactgcctggagtacttcccttctcagatgcttcgcacgggaaacaactttaccttcagctacacctttgaggacgtgccttttcacagcagctacgctcacagccaaagtctggaccgtctcatgaatcctctcatcgaccaatacctgtattacttgagcaaaacaaacgctccaagcggaaccaccacgatgtccaggcttcagttttctcaggccggagcgagtgacattcgggaccagtctagaaactggcttcctggaccctgttaccgccagcagcgagtatcaaagacagctgcggacaacaacaacagtgattactcgtggactggagctaccaagtaccacctcaatggaagagactctctggtgaacccgggcccagctatggccagccacaaggatgatgaagaaaaatattttcctcagagcggggttctcatcttcgggaaacaaggctcaaataaaactaatgtggacattgaaaaggttatgattacagacgaagaggaaatcaggaccaccaatcccgtggctacggagcagtatggttctgtatctaccaaccttcaaagcggcaacacacaagcagctacctcagatgtcaacacacaaggcgttcttcctggcatggtctggcaggacagagatgtgtacctgcaggggcccatctgggcaaagattcctcacacggacggacactttcacccttctcccctcatgggcggatttggattgaagcaccctcccccacagattctcatcaagaataccccggtacctgcgaatccttcgaccaccttcagtgcggcaaagtttgcttccttcatcacacagtattccacgggacaggtcagcgtggagatagagtgggagctgcagaaggagaacagcaaacgctggaaccccgagatccagtatacttccaactacaacaaatctgttaatgtggactttactgtggacactaatggtgtgtattcagagcctcgccccattggcaccagatacctgactcgtaatctgtaa

SEQ ID NO: 12142 - DNA, 2208 bp, Artificial Sequence
  source: /note="Description of Artificial Sequence: Synthetic polynucleotide"
atggctgccgatggttatcttccagattggctcgaggacactctctctgaaggaataagacagtggtggaagctcaaacctggcccaccaccgccaaagcccgcagagcggcataaggacgacagcaggggtcttgtgcttcctgggtacaagtacctcggacccttcaacggactcgacaagggggagccggtcaacgaggcagacgccgcggccctcgagcacgacaaggcctacgaccggcagctcgacagcggagacaacccgtacctcaagtacaaccacgccgacgcggagtttcaggagcgtcttaaagaagatacgtcttttgggggcaacctcggacgagcagtcttccaggcgaaaaagagggttcttgaacctctgggcctggttgaggaacctgttaagacgactccgggaaaaaagaggccggtagagcactctcctgtggagccagactcctcctcgggaaccggaaaggcgggccagcagcctgcaagaaaaagattgaatttcggtcagactggagacgcagactccgtacctgacccccagcctctcggacagccaccagcagccccctctggtctgggaactaatacgatggctacaggcagtggcgcaccaatggcagacaataacgagggcgccgacggagtgggtaattcctcgggaaattggcattgcgattccacatggatgggcgacagagtcatcaccaccagcacccgcacctgggctctgcccacctacaacaaccatctgtacaagcaaatttccagccaatcaggagcatcgaacgacaaccactactttggctacagcaccccctgggggtattttgacttcaacagattccactgccacttttcgccacgtgactggcaaagactcatcaacaacaactggggattccggcccaagagactcagcttcaagctctttaacattcaagtcaaggaggtcacgcagaatgacggtacgacgacgattgccaataaccttaccagcacggttcaggtctttactgactcggagtaccagctcccgtacgtcctcggctcggcgcatcaaggatgcctcccgccgttcccagcagacgtcttcatggtgccacagtatggatacctcaccctgaacaacgggagtcaggcggtaggacgctcttcattttactgcctggagtacttcccttctcagatgcttcgcacgggaaacaactttaccttcagctacacctttgaggacgtgccttttcacagcagctacgctcacagccaaagtctggaccgtctcatgaatcctctcatcgaccaatacctgtattacttgagcaaaacaaacgctccaagcggaaccaccacgatgtccaggcttcagttttctcaggccggagcgagtgacattcgggaccagtctagaaactggcttcctggaccctgttaccgccagcagcgagtatcaaagacagctgcggacaacaacaacagtgattactcgtggactggagctaccaagtaccacctcaatggaagagactctctggtgaacccgggcccagctatggccagccacaaggatgatgaagaaaaatattttcctcagagcggggttctcatcttcgggaaacaaggctcaaataaaactaatgtggacattgaaaaggttatgattacagacgaagaggaaatcaggaccaccaatcccgtggctacggagcagtatggttctgtatctaccaaccttcaaagcggcaacacacaagcagctacctcagatgtcaacacacaaggcgttcttcctggcatggtctggcaggacagagatgtgtacctgcaggggcccatctgggcaaagattcctcacacggacggacactttcacccttctcccctcatgggcggatttggattgaagcaccctcccccacagattctcatcaagaataccccggtacctgcgaatccttcgaccaccttcagtgcggcaaagtttgcttccttcatcacacagtattccacgggacaggtcagcgtggagatagagtgggagctgcagaaggagaacagcaaacgctggaaccccgagatccagtatacttccaactacaacaaatctgttaatgtggactttactgtggacactaatggtgtgtattcagagcctcgccccattggcaccagatacctgactcgtaatctgtaa

SEQ ID NO: 12143 - DNA, 2208 bp, Artificial Sequence
  source: /note="Description of Artificial Sequence: Synthetic polynucleotide"
atggctgccgatggttatcttccagattggctcgaggacactctctctgaaggaataagacagtggtggaagctcaaacctggcccaccaccgccaaagcccgcagagcggcataaggacgacagcaggggtcttgtgcttcctgggtacaagtacctcggacccttcaacggactcgacaagggggagccggtcaacgaggcagacgccgcggccctcgagcacgacaaggcctacgaccggcagctcgacagcggagacaacccgtacctcaagtacaaccacgccgacgcggagtttcaggagcgtcttaaagaagatacgtcttttgggggcaacctcggacgagcagtcttccaggcgaaaaagagggttcttgaacctctgggcctggttgaggaacctgttaagacggctccgggaaaaaagaggccggtagagcactctcctgtggagccagactcctcctcgggaaccggaaaggcgggccagcagcctgcaagaaaaagattgaatttcggtcagactggagacgcagactccgtacctgacccccagcctctcggacagtcaccagcagccccctctggtctgggaactaatacgatggctacaggcagtggcgcaccaatggcagacaataacgagggcgccgacggagtgggtaattcctcgggaaattggcattgcgattccacatggatgggcgacagagtcatcaccaccagcacccgcacctgggctctgcccacctacaacaaccatctgtacaagcaaatttccagccaatcaggagcatcgaacgacaaccactactttggctacagcaccccctgggggtattttgacttcaacagattccactgccacttttcgccacgtgactggcaaagactcatcaacaacaactggggattccggcccaagagactcagcttcaagctctttaacattcaagtcaaggaggtcacgcagaatgacggtacgacgacgattgccaataaccttaccagcacggttcaggtctttactgactcggagtaccagctcccgtacgtcctcggctcggcgcatcaaggatgcctcccgccgttcccagcagacgtcttcatggtgccacagtatggatacctcaccctgaacaacgggagtcaggcggtaggacgctcttcattttactgcctggagtacttcccttctcagatgcttcgcacgggaaacaactttaccttcagctacacctttgaggacgtgccttttcacagcagctacgctcacagccaaagtctggaccgtctcatgaatcctctcatcgaccaatacctgtattacttgagcaaaacaaacgctccaagcggaaccaccacgatgtccaggcttcagttttctcaggccggagcgagtgacattcgggaccagtctagaaactggcttcctggaccctgttaccgccagcagcgagtatcaaagacagctgcggacaacaacaacagtgattactcgtggactggagctaccaagtaccacctcaatggaagagactctctggtgaacccgggcccagctatggccagccacaaggatgatgaagaaaaatattttcctcagagcggggttctcatcttcgggaaacaaggctcaaataaaactaatgtggacattgaaaaggttatgattacagacgaagaggaaatcaggaccaccaatcccgtggctacggagcagtatggttctgtatctaccaaccttcaaagcggcaacacacaagcagctacctcagatgtcaacacacaaggcgttcttcctggcatggtctggcaggacagagatgtgtacctgcaggggcccatctgggcaaagattcctcacacggacggacactttcacccttctcccctcatgggcggatttggattgaagcaccctcccccacagattctcatcaagaataccccggtacctgcgaatccttcgaccaccttcagtgcggcaaagtttgcttccttcatcacacagtattccacgggacaggtcagcgtggagatagagtgggagctgcagaaggagaacagcaaacgctggaaccccgagatccagtatacttccaactacaacaaatctgttaatgtggactttactgtggacactaatggtgtgtattcagagcctcgccccattggcaccagatacctgactcgtaatctgtaa

SEQ ID NO: 12144 - DNA, 2208 bp, Artificial Sequence
  source: /note="Description of Artificial Sequence: Synthetic polynucleotide"
atggctgccgatggttatcttccagattggctcgaggacactctctctgaaggaataagacagtggtggaagctcaaacctggcccaccaccgccaaagcccgcagagcggcataaggacgacagcaggggtcttgtgcttcctgggtacaagtacctcggacccttcaacggactcgacaagggggagccggtcaacgaggcagacgccgcggccctcgagcacgacaaggcctacgaccggcagctcgacagcggagacaacccgtacctcaagtacaaccacgccgacgcggagtttcaggagcgtcttaaagaagatacgtcttttgggggcaacctcggacgagcagtcttccaggcgaaaaagagggttcttgaacctctgggcctggttgaggaacctgttaagacggctccgggaaaaaagaggccggtagagcactctcctgtggagccagactcctcctcgggaaccggaaaggcgggccagcagcctgcaagaaaaagattgaatttcggtcagactggagacgcagactccgtacctgacccccagcctctcggacagccaccagcagccccctctggtctgggaactaatacgatggctacaggcagtggcgcaccaatggcagacaataacgagggcgccgacggagtgggtaattcctcgggaaattggcattgcgattccacatggatgggcgacagagtcatcaccaccagcacccgcacctgggctctgcccacctacaacaaccatctgtacaagcaaatttccagccaatcaggagcatcgaacgacaaccactactttggctacagcaccccctgggggtattttgacttcaacagattccactgccacttttcgccacgtgactggcaaagactcatcaacaacaactggggattccggcccaagagactcagcttcaagctctttaacattcaagtcaaggaggtcacgcagaatgacggtacgacgacgattgccaataaccttaccagcacggttcaggtctttactgactcggagtaccagctcccgtacgtcctcggctcggcgcatcaaggatgcctcccgccgttcccagcagacgtcttcatggtgccacagtatggatacctcaccctgaacaacgggagtcaggcggtaggacgctcttcattttactgcctggagtacttcccttctcagatgcttcgcacgggaaacaactttaccttcagctacacctttgaggacgtgccttttcacagcagctacgctcacagccaaagtctggaccgtctcatgaatcctctcatcgaccaatacctgtattacttgagcaaaacaaacgctccaagcggaaccaccacgatgtccaggcttcagttttctcaggccggagcgagtgacattcgggaccagtctagaaactggcttcctggaccctgttaccgccagcagcgagtatcaaagacagctgcggacaacaacaacagtgattactcgtggactggagctaccaagtaccacctcaatggaagagactctctggtgaacccgggcccagctatggtcagccacaaggatgatgaagaaaaatattttcctcagagcggggttctcatcttcgggaaacaaggctcaaataaaactaatgtggacattgaaaaggttatgattacagacgaagaggaaatcaggaccaccaatcccgtggctacggagcagtatggttctgtatctaccaaccttcaaagcggcaacacacaagcagctacctcagatgtcaacacacaaggcgttcttcctggcatggtctggcaggacagagatgtgtacctgcaggggcccatctgggcaaagattcctcacacggacggacactttcacccttctcccctcatgggcggatttggattgaagcaccctcccccacagattctcatcaagaataccccggtacctgcgaatccttcgaccaccttcagtgcggcaaagtttgcttccttcatcacacagtattccacgggacaggtcagcgtggagatagagtgggagctgcagaaggagaacagcaaacgctggaaccccgagatccagtatacttccaactacaacaaatctgttaatgtggactttactgtggacactaatggtgtgtattcagagcctcgccccattggcaccagatacctgactcgtaatctgtaa

SEQ ID NO: 12145 - DNA, 2208 bp, Artificial Sequence
  source: /note="Description of Artificial Sequence: Synthetic polynucleotide"
atggctgccgatggttatcttccagattggctcgaggacactctctctgaaggaataagacagtggtggaagctcaaacctggcccaccaccgccaaagcccgcagagcggcataaggacgacagcaggggtcttgtgcttcctgggtacaagtacctcggacccttcaacggactcgacaagggggagccggtcaacgaggcagacgccgcggccctcgagcacgacaaggcctacgaccggcagctcgacagcggagacaacccgtacctcaagtacaaccacgccgacgcggagtttcaggagcgtcttaaagaagatacgtcttttgggggcaacctcggacgagcagtcttccaggcgaaaaagagggttcttgaacctctgggcctggttgaggaacctgttaagacggctccgggaaaaaagaggccggtagagcactctcctgtggagccagactcctcctcgggaaccggaaaggcgggccagcagcctgcaagaaaaagattgaatttcggtcagactggagacgcagactccgtacctgacccccagcctctcggacagccaccagcagccccctctggtctgggaactaatacgatggctacaggcagtggcgcaccaatggcagacaataacgagggcgccgacggagtgggtaattcctcgggaaattggcattgcgattccacatggatgggcgacagagtcatcaccaccagcacccgcacctgggctctgcccacctacaacaaccatctgtacaagcaaatttccagccaatcaggagcatcgaacgacaaccactactttggctacagcaccccctgggggtattttgacttcaacagattccactgccacttttcgccacgtgactggcaaagactcatcaacaacaactggggattccggcccaagagactcagcttcaagctctttaacattcaagtcaaggaggtcacgcagaatgacggtacgacgacgattgccaataaccttaccagcacggttcaggtctttactgactcggagtaccagctcccgtacgtcctcggctcggcgcatcaaggatgcctcccgccgttcccagcagacgtcttcatggtgccacagtatggatacctcaccctgaacaacgggagtcaggcggtaggacgctcttcattttactgcctggagtacttcccttctcagatgcttcgcacgggaaacaactttaccttcagctacacctttgaggacgtgccttttcacagcagctacgctcacagccaaagtctggaccgtctcatgaatcctctcatcgaccaatacctgtattacttgagcaaaacaaacgctccaagcggaaccaccacgatgtccaggcttcagttttctcaggccggagcgagtgacattcgggaccagtctagaaactggcttcctggaccctgttaccgccagcagcgagtatcaaagacagctgcggacaacaacaacagtgattactcgtggactggagctaccaagtaccacctcaatggaagagactctctggtgaacccgggcccagctatggccagccacaaggatgatgaagaaaaatattttcctcagagcggggttctcatcttcgggaaacaaggctcaaataaaactaatgtggacattgaaaaggttatgattacagacgaagaggaaatcaggaccaccaatcccgtggctacggagcagtatggttctgtatctaccaaccttcaaagcggcaacacacaagcagctacctcagatgtcaacacacaaggcgttcttcctggcatggtctggcaggacagagatgtgtacctgcaggggcccatctgggcaaagattcctcacacggacggacactttcacccttctcccctcatgggcggatttggattgaagcaccctcccccacagattctcatcaagaataccccggtacctgcgaatccttcgaccaccttcagtgcggcaaagtttgcttccttcatcacacagtattccatgggacaggtcagcgtggagatagagtgggagctgcagaaggagaacagcaaacgctggaaccccgagatccagtatacttccaactacaacaaatctgttaatgtggactttactgtggacactaatggtgtgtattcagagcctcgccccattggcaccagatacctgactcgtaatctgtaa

SEQ ID NO: 12146 - DNA, 2208 bp, Artificial Sequence
  source: /note="Description of Artificial Sequence: Synthetic polynucleotide"
atggctgccgatggttatcttccagattggctcgaggacactctctctgaaggaataagacagtggtggaagctcaaacctggcccaccaccgccaaagcccgcagagcggcataaggacgacagcaggggtcttgtgcttcctgggtacaagtacctcggacccttcaacggactcgacaagggggagccggtcaacgaggcagacgccgcggccctcgagcacgacaaggtctacgaccggcagctcgacagcggagacaacccgtacctcaagtacaaccacgccgacgcggagtttcaggagcgtcttaaagaagatacgtcttttgggggcaacctcggacgagcagtcttccaggcgaaaaagagggttcttgaacctctgggcctggttgaggaacctgttaagacggctccgggaaaaaagaggccggtagagcactctcctgtggagccagactcctcctcgggaaccggaaaggcgggccagcagcctgcaagaaaaagattgaatttcggtcagactggagacgcagactccgtacctgacccccagcctctcggacagccaccagcagccccctctggtctgggaactaatacgatggctacaggcagtggcgcaccaatggcagacaataacgagggcgccgacggagtgggtaattcctcgggaaattggcattgcgattccacatggatgggcgacagagtcatcaccaccagcacccgcacctgggctctgcccacctacaacaaccatctgtacaagcaaatttccagccaatcaggagcatcgaacgacaaccactactttggctacagcaccccctgggggtattttgacttcaacagattccactgccacttttcgccacgtgactggcaaagactcatcaacaacaactggggattccggcccaagagactcagcttcaagctctttaacattcaagtcaaggaggtcacgcagaatgacggtacgacgacgattgccaataaccttaccagcacggttcaggtctttactgactcggagtaccagctcccgtacgtcctcggctcggcgcatcaaggatgcctcccgccgttcccagcagacgtcttcatggtgccacagtatggatacctcaccctgaacaacgggagtcaggcggtaggacgctcttcattttactgcctggagtacttcccttctcagatgcttcgcacgggaaacaactttaccttcagctacacctttgaggacgtgccttttcacagcagctacgctcacagccaaagtctggaccgtctcatgaatcctctcatcgaccaatacctgtattacttgagcaaaacaaacgctccaagcggaaccaccacgatgtccaggcttcagttttctcaggccggagcgagtgacattcgggaccagtctagaaactggcttcctggaccctgttaccgccagcagcgagtatcaaagacagctgcggacaacaacaacagtgattactcgtggactggagctaccaagtaccacctcaatggaagagactctctggtgaacccgggcccagctatggccagccacaaggatgatgaagaaaaatattttcctcagagcggggttctcatcttcgggaaacaaggctcaaataaaactaatgtggacattgaaaaggttatgattacagacgaagaggaaatcaggaccaccaatcccgtggctacggagcagtatggttctgtatctaccaaccttcaaagcggcaacacacaagcagctacctcagatgtcaacacacaaggcgttcttcctggcatggtctggcaggacagagatgtgtacctgcaggggcccatctgggcaaagattcctcacacggacggacactttcacccttctcccctcatgggcggatttggattgaagcaccctcccccacagattctcatcaagaataccccggtacctgcgaatccttcgaccaccttcagtgcggcaaagtttgcttccttcatcacacagtattccacgggacaggtcagcgtggagatagagtgggagctgcagaaggagaacagcaaacgctggaaccccgagatccagtatacttccaactacaacaaatctgttaatgtggactttactgtggacactaatggtgtgtattcagagcctcgccccattggcaccagatacctgactcgtaatctgtaa

SEQ ID NO: 12147 - DNA, 2208 bp, Artificial Sequence
  source: /note="Description of Artificial Sequence: Synthetic polynucleotide"
atggctgccgatggttatcttccagattggctcgaggacactctctctgaaggaataagacagtggtggaagctcaaacctggcccaccaccgccaaagcccgcagagcggcataaggacgacagcaggggtcttgtgcttcctgggtacaagtacctcggacccttcaacggactcgacaagggggagccggtcaacgaggcagacgccgcggccctcgagcacgacaaggcctacgaccggcagctcgacagcggagacaacccgtacctcaagtacaaccacgccgacgcggagtttcaggagcgtcttaaagaagatacgtcttttgggggcaacctcggacgagcagtcttccaggcgaaaaagagggttcttgaacctctgggcctggttgaggaacctgttaagacggctccgggaaaaaagaggccggtagagcactctcctgtggagccagactcctcctcgggaaccggaaaggcgggccagcagcctgcaagaaaaagattgaatttcggtcagactggagacgcagactccgtacctgacccccagcctctcggacagccaccagcagccccctctggtctgggaactaatacgatggctacaggcagtggcgcaccaatggcagacaataacgagggcgccgacggagtgggtaattcctcgggaaattggcattgcgattccacatggatgggcgacagagtcatcaccaccagcacccgcacctgggctctgcccacctacaacaaccatctgtacaagcaaatttccagccaatcaggagcatcgaacgacaaccactactttggctacagcaccccctgggggtattttgacttcaacagattccactgccacttttcgccacgtgactggcaaagactcatcaacaacaactggggattccggcccaagagactcagcttcaagctctttaacattcaagtcaaggaggtcacgcagaatgacggtacgacgacgattgccaataaccttaccagcacggttcaggtctttactgactcggagtaccagctcccgtacgtcctcggctcggcgcatcaaggatgcctcccgccgttcccagcagacgtcttcatggtgccacagtatggatacctcaccctgaacaacgggagtcaggcggtaggacgctcttcattttactgcctggagtacttcccttctcagatgcttcgcacgggaaacaactttaccttcagctacacctttgaggacgtgccttttcacagcagctacgctcacagccaaagtctggaccgtctcatgaatcctctcatcgaccaatacctgtattacttgagcaaaacaaacgctccaagcggaaccaccacgatgtccaggcttcagttttctcaggccggagcgagtgacattcgggaccagtctagaaactggcttcctggaccctgttaccgccagcagcgagtatcaaagacagctgcggacaacaacaacagtgattactcgtggactggagctaccaagtaccacctcaatggaagagactctctggtgaacccgggcccagctatggccagccacaaggatgatgaagaaaaatattttcctcagagcggggttctcatcttcgggaaacaaggctcaaataaaactaatgtggacattgaaaaggttatgattacagacgaagaggaaatcaggaccaccaatcccgtggctacggagcagtatggttctgtatctaccaaccttcaaagcggcaacacacaagcagctacctcagatgtcaacacacaaggcgttcttcctggcatggtctggcaggacagagatgtgtacctgcaggggcccatctgggcaaagattcctcacacggacggacactttcacccttctcccctcatgggcggatttggattgaagcaccctcccccacagattctcatcaagaataccccggtacctgcgaatccttcgaccaccttcagtgcggcaaagtttgcttccttcatcacacagtattccacgggacaggtcagcgtggagatagagtgggagctgcagaaggagaacaacaaacgctggaaccccgagatccagtatacttccaactacaacaaatctgttaatgtggactttactgtggacactaatggtgtgtattcagagcctcgccccattggcaccagatacctgactcgtaatctgtaa

SEQ ID NO: 12148 - DNA, 2208 bp, Artificial Sequence
  source: /note="Description of Artificial Sequence: Synthetic polynucleotide"
atggctgccgatggttatcttccagattggctcgaggacactctctctgaaggaataagacagtggtggaagctcaaacctggcccaccaccgccaaagcccgcagagcggcataaggacgacagcaggggtcttgtgcttcctgggtacaagtacctcggacccttcaacggactcgacaagggggagccggtcaacgaggcagacgccgcggccctcgagcacgacaaggcctacgaccggcagctcgacagcggagacaacccgtacctcaagtacaaccacgccgacgcggagtttcaggagcgtcttaaagaagatacgtcttttgggggcaacctcggacgagcagtcttccaggcgaaaaagagggttcttgaacctctgggcctggttgaggaacctgttaagacggctccgggaaaaaagaggccggtagagcactctcctgtggagccagactcctcctcgggaaccggaaaggcgggccagcagcctacaagaaaaagattgaatttcggtcagactggagacgcagactccgtacctgacccccagcctctcggacagccaccagcagccccctctggtctgggaactaatacgatggctacaggcagtggcgcaccaatggcagacaataacgagggcgccgacggagtgggtaattcctcgggaaattggcattgcgattccacatggatgggcgacagagtcatcaccaccagcacccgcacctgggctctgcccacctacaacaaccatctgtacaagcaaatttccagccaatcaggagcatcgaacgacaaccactactttggctacagcaccccctgggggtattttgacttcaacagattccactgccacttttcgccacgtgactggcaaagactcatcaacaacaactggggattccggcccaagagactcagcttcaagctctttaacattcaagtcaaggaggtcacgcagaatgacggtacgacgacgattgccaataaccttaccagcacggttcaggtctttactgactcggagtaccagctcccgtacgtcctcggctcggcgcatcaaggatgcctcccgccgttcccagcagacgtcttcatggtgccacagtatggatacctcaccctgaacaacgggagtcaggcggtaggacgctcttcattttactgcctggagtacttcccttctcagatgcttcgcacgggaaacaactttaccttcagctacacctttgaggacgtgccttttcacagcagctacgctcacagccaaagtctggaccgtctcatgaatcctctcatcgaccaatacctgtattacttgagcaaaacaaacgctccaagcggaaccaccacgatgtccaggcttcagttttctcaggccggagcgagtgacattcgggaccagtctagaaactggcttcctggaccctgttaccgccagcagcgagtatcaaagacagctgcggacaacaacaacagtgattactcgtggactggagctaccaagtaccacctcaatggaagagactctctggtgaacccgggcccagctatggccagccacaaggatgatgaagaaaaatattttcctcagagcggggttctcatcttcgggaaacaaggctcaaataaaactaatgtggacattgaaaaggttatgattacagacgaagaggaaatcaggaccaccaatcccgtggctacggagcagtatggttctgtatctaccaaccttcaaagcggcaacacacaagcagctacctcagatgtcaacacacaaggcgttcttcctggcatggtctggcaggacagagatgtgtacctgcaggggcccatctgggcaaagattcctcacacggacggacactttcacccttctcccctcatgggcggatttggattgaagcaccctcccccacagattctcatcaagaataccccggtacctgcgaatccttcgaccaccttcagtgcggcaaagtttgcttccttcatcacacagtattccacgggacaggtcagcgtggagatagagtgggagctgcagaaggagaacagcaaacgctggaaccccgagatccagtatacttccaactacaacaaatctgttaatgtggactttactgtggacactaatggtgtgtattcagagcctcgccccattggcaccagatacctgactcgtaatctgtaa

SEQ ID NO: 12149 - DNA, 2208 bp, Artificial Sequence
  source: /note="Description of Artificial Sequence: Synthetic polynucleotide"
atggctgccgatggttatcttccagattggctcgaggacactctctctgaaggaataagacagtggtggaagctcaaacctggcccaccaccgccaaagcccgcagagcggcataaggacgacagcaggggtcttgtgcttcctgggtacaagtacctcggacccttcaacggactcgacaagggggagccggtcaacgaggcagacgccgcggccctcgagcacgacaaggcctacgaccggcagctcgacagcggagacaacccgtacctcaagtacaaccacgccgacgcggagtttcaggagcgtcttaaagaagatacgtcttttgggggcaacctcggacgagcagtcttccaggcgaaaaagagggttcttgaacctctgggcctggttgaggaacctgttaagacggctccgggaaaaaagaggccggtagagcactctcctgtggagccagactcctcctcgggaaccggaaaggcgggccagcagcctgcaagaaaaagattgaatttcggtcagactggagacgcagactccgtacctgacccccagcctctcggacagccaccagcagccccctctggtctgggaactaatacgatggctacaggcagtggcgcaccaatggcagacaataacgagggcgccgacggagtgggtaattcctcgggaaattggcattgcgattccacatggatgggcgacagagtcatcaccaccagcacccgcacctgggctctgcccacctacaacaaccatctgtacaagcaaatttccagccaatcaggagcatcgaacgacaaccactactttggctacagcaccccctgggggtattttgacttcaacagattccactgccacttttcgccacgtgactggcaaagactcatcaacaacaactggggattccggcccaagagactcagcttcaagctctttaacattcaagtcaaggaggtcacgcagaatgacggtacgacgacgattgccaataaccttaccagcacggttcaggtctttactgactcggagtaccagctcccgtacgtcctcggctcggcgcatcaaggatgcctcccgccgttcccagcagacgtcttcatggtgccacagtatggatacctcaccctgaacaacgggagtcaggcggtaggacgctcttcattttactgcctggagtacttcccttctcagatgcttcgcacgggaaacaactttaccttcagctacacctttgaggacgtgccttttcacagcagctacgctcacagccaaagtctggaccgtctcatgaatcctctcatcgaccaatacctgtattacttgagcaaaacaaacgctccaagcggaaccaccacgatgtccaggcttcagttttctcaggccggagcgagtgacattcgggaccagtctagaaactggcttcctggaccctgttaccgccagcagcgagtatcaaagacagctgcggacaacaacaacagtgattactcgtggactggagctaccaagtaccacctcaatggaagagactctctggtgaacccgggcccagctatggccagccacaaggatgatgaagaaaaatattttcctcagagcggggttctcatcttcgggaaacaaggctcaaataaaactaatgtggacattgaaagggttatgattacagacgaagaggaaatcaggaccaccaatcccgtggctacggagcagtatggttctgtatctaccaaccttcaaagcggcaacacacaagcagctacctcagatgtcaacacacaaggcgttcttcctggcatggtctggcaggacagagatgtgtacctgcaggggcccatctgggcaaagattcctcacacggacggacactttcacccttctcccctcatgggcggatttggattgaagcaccctcccccacagattctcatcaagaataccccggtacctgcgaatccttcgaccaccttcagtgcggcaaagtttgcttccttcatcacacagtattccacgggacaggtcagcgtggagatagagtgggagctgcagaaggagaacagcaaacgctggaaccccgagatccagtatacttccaactacaacaaatctgttaatgtggactttactgtggacactaatggtgtgtattcagagcctcgccccattggcaccagatacctgactcgtaatctgtaa

SEQ ID NO: 12150 - DNA, 2208 bp, Artificial Sequence
  source: /note="Description of Artificial Sequence: Synthetic polynucleotide"
atggctgccgatggttatcttccagattggctcgaggacactctctctgaaggaataagacagtggtggaagctcaaacctggcccaccaccgccaaagcccgcagagcggcataaggacgacagcaggggtcttgtgcttcctgggtacaagtacctcggacccttcaacggactcgacaagggggagccggtcaacgaggcagacgccgcggccctcgagcacgacaaggcctacgaccggcagctcgacagcggagacaacccgtacctcaagtacaaccacgccgacgcggagtttcaggagcgtcttaaagaagatacgtcttttgggggcaacctcggacgagcagtcttccaggcgaaaaagagggttcttgaacctctgggcctggttgaggaacctgttaagacggctccgggaaaaaagaggccggtagagcactctcctgtggagccagactcctcctcgggaaccggaaaggcgggccagcagcctgtaagaaaaagattgaatttcggtcagactggagacgcagactccgtacctgacccccagcctctcggacagccaccagcagccccctctggtctgggaactaatacgatggctacaggcagtggcgcaccaatggcagacaataacgagggcgccgacggagtgggtaattcctcgggaaattggcattgcgattccacatggatgggcgacagagtcatcaccaccagcacccgcacctgggctctgcccacctacaacaaccatctgtacaagcaaatttccagccaatcaggagcatcgaacgacaaccactactttggctacagcaccccctgggggtattttgacttcaacagattccactgccacttttcgccacgtgactggcaaagactcatcaacaacaactggggattccggcccaagagactcagcttcaagctctttaacattcaagtcaaggaggtcacgcagaatgacggtacgacgacgattgccaataaccttaccagcacggttcaggtctttactgactcggagtaccagctcccgtacgtcctcggctcggcgcatcaaggatgcctcccgccgttcccagcagacgtcttcatggtgccacagtatggatacctcaccctgaacaacgggagtcaggcggtaggacgctcttcattttactgcctggagtacttcccttctcagatgcttcgcacgggaaacaactttaccttcagctacacctttgaggacgtgccttttcacagcagctacgctcacagccaaagtctggaccgtctcatgaatcctctcatcgaccaatacctgtattacttgagcaaaacaaacgctccaagcggaaccaccacgatgtccaggcttcagttttctcaggccggagcgagtgacattcgggaccagtctagaaactggcttcctggaccctgttaccgccagcagcgagtatcaaagacagctgcggacaacaacaacagtgattactcgtggactggagctaccaagtaccacctcaatggaagagactctctggtgaacccgggcccagctatggccagccacaaggatgatgaagaaaaatattttcctcagagcggggttctcatcttcgggaaacaaggctcaaataaaactaatgtggacattgaaaaggttatgattacagacgaagaggaaatcaggaccaccaatcccgtggctacggagcagtatggttctgtatctaccaaccttcaaagcggcaacacacaagcagctacctcagatgtcaacacacaaggcgttcttcctggcatggtctggcaggacagagatgtgtacctgcaggggcccatctgggcaaagattcctcacacggacggacactttcacccttctcccctcatgggcggatttggattgaagcaccctcccccacagattctcatcaagaataccccggtacctgcgaatccttcgaccaccttcagtgcggcaaagtttgcttccttcatcacacagtattccacgggacaggtcagcgtggagatagagtgggagctgcagaaggagaacagcaaacgctggaaccccgagatccagtatacttccaactacaacaaatctgttaatgtggactttactgtggacactaatggtgtgtattcagagcctcgccccattggcaccagatacctgactcgtaatctgtaa

SEQ ID NO: 12151 - DNA, 2208 bp, Artificial Sequence
  source: /note="Description of Artificial Sequence: Synthetic polynucleotide"
atggctgccgatggttatcttccagattggctcgaggacactctctctgaaggaataagacagtggtggaagctcaaacctggcccaccaccgccaaagcccgcagagcggcataaggacgacagcaggggtcttgtgcttcctgggtacaagtacctcggacccttcaacggactcgacaagggggagccggtcaacgaggcagacgccgcggccctcgagcacgacaaggcctacgaccggcagctcgacagcggagacaacccgtacctcaagtacaaccacgccgacgcggagtttcaggagcgtcttaaagaagatacgtcttttgggggcaacctcggacgagcagtcttccaggcgaaaaagagggttcttgaacctctgggcctggttgaggaacctgttaagacggctccgggaaaaaagaggccggtagagcactctcctgtggagccagactcctcctcgggaaccggaaaggcgggccagcagcctgcaagaaaaagattgaatttcggtcagactggagacgcagactccgtacctgacccccagcctctcggacagccaccagcagccccctctggtctgggaactaatacgatggctacaggcagtggcgcaccaatggcagacaataacgagggcgccgacggagtgggtaattcctcgggaaattggcattgcgattccacatggatgggcgacagagtcatcaccaccagcacccgcacctgggctctgcccacctacaacaaccatctgtacaagcaaatttccagccaatcaggagcatcgaacgacaaccactactttggctacagcaccccctgggggtattttgacttcaacagattccactgccacttttcgccacgtgactggcaaagactcatcaacaacaactggggattccggcccaagagactcagcttcaagctctttaacattcaagtcaaggaggtcacgcagaatgacggtacgacgacgattgccaataaccttaccagcacggttcaggtctttactgactcggagtaccagctcccgtacgtcctcggctcggcgcatcaaggatgcctcccgccgttcccagcagacgtcttcatggtgccacagtatggataccccaccctgaacaacgggagtcaggcggtaggacgctcttcattttactgcctggagtacttcccttctcagatgcttcgcacgggaaacaactttaccttcagctacacctttgaggacgtgccttttcacagcagctacgctcacagccaaagtctggaccgtctcatgaatcctctcatcgaccaatacctgtattacttgagcaaaacaaacgctccaagcggaaccaccacgatgtccaggcttcagttttctcaggccggagcgagtgacattcgggaccagtctagaaactggcttcctggaccctgttaccgccagcagcgagtatcaaagacagctgcggacaacaacaacagtgattactcgtggactggagctaccaagtaccacctcaatggaagagactctctggtgaacccgggcccagctatggccagccacaaggatgatgaagaaaaatattttcctcagagcggggttctcatcttcgggaaacaaggctcaaataaaactaatgtggacattgaaaaggttatgattacagacgaagaggaaatcaggaccaccaatcccgtggctacggagcagtatggttctgtatctaccaaccttcaaagcggcaacacacaagcagctacctcagatgtcaacacacaaggcgttcttcctggcatggtctggcaggacagagatgtgtacctgcaggggcccatctgggcaaagattcctcacacggacggacactttcacccttctcccctcatgggcggatttggattgaagcaccctcccccacagattctcatcaagaataccccggtacctgcgaatccttcgaccaccttcagtgcggcaaagtttgcttccttcatcacacagtattccacgggacaggtcagcgtggagatagagtgggagctgcagaaggagaacagcaaacgctggaaccccgagatccagtatacttccaactacaacaaatctgttaatgtggactttactgtggacactaatggtgtgtattcagagcctcgccccattggcaccagatacctgactcgtaatctgtaa

SEQ ID NO: 12152 - DNA, 2208 bp, Artificial Sequence
  source: /note="Description of Artificial Sequence: Synthetic polynucleotide"
atggctgccgatggttatcttccagattggctcgaggacactctctctgaaggaataagacagtggtggaagctcaaacctggcccaccaccgccaaagcccgcagagcggcataaggacgacagcaggggtcttgtgcttcctgggtacaagtacctcggacccttcaacggactcgacaagggggagccggtcaacgaggcagacgccgcggccctcgagcacgacaaggcctacgaccggcagctcgacagcggagacaacccgtacctcaagtacaaccacgccgacgcggagtttcaggagcgtcttaaagaagatacgtcttttgggggcaacctcggacgagcagtcttccaggcgaaaaagagggttcttgaacctctgggcctggttgaggaacctgttaagacggctccgggaaaaaagaggccggtagagcactctcctgtggagccagactcctcctcgggaaccggaaaggcgggccagcagcctgcaagaaaaagattgaatttcggtcagactggagacgcagactccgtacctgacccccagtctctcggacagccaccagcagccccctctggtctgggaactaatacgatggctacaggcagtggcgcaccaatggcagacaataacgagggcgccgacggagtgggtaattcctcgggaaattggcattgcgattccacatggatgggcgacagagtcatcaccaccagcacccgcacctgggctctgcccacctacaacaaccatctgtacaagcaaatttccagccaatcaggagcatcgaacgacaaccactactttggctacagcaccccctgggggtattttgacttcaacagattccactgccacttttcgccacgtgactggcaaagactcatcaacaacaactggggattccggcccaagagactcagcttcaagctctttaacattcaagtcaaggaggtcacgcagaatgacggtacgacgacgattgccaataaccttaccagcacggttcaggtctttactgactcggagtaccagctcccgtacgtcctcggctcggcgcatcaaggatgcctcccgccgttcccagcagacgtcttcatggtgccacagtatggatacctcaccctgaacaacgggagtcaggcggtaggacgctcttcattttactgcctggagtacttcccttctcagatgcttcgcacgggaaacaactttaccttcagctacacctttgaggacgtgccttttcacagcagctacgctcacagccaaagtctggaccgtctcatgaatcctctcatcgaccaatacctgtattacttgagcaaaacaaacgctccaagcggaaccaccacgatgtccaggcttcagttttctcaggccggagcgagtgacattcgggaccagtctagaaactggcttcctggaccctgttaccgccagcagcgagtatcaaagacagctgcggacaacaacaacagtgattactcgtggactggagctaccaagtaccacctcaatggaagagactctctggtgaacccgggcccagctatggccagccacaaggatgatgaagaaaaatattttcctcagagcggggttctcatcttcgggaaacaaggctcaaataaaactaatgtggacattgaaaaggttatgattacagacgaagaggaaatcaggaccaccaatcccgtggctacggagcagtatggttctgtatctaccaaccttcaaagcggcaacacacaagcagctacctcagatgtcaacacacaaggcgttcttcctggcatggtctggcaggacagagatgtgtacctgcaggggcccatctgggcaaagattcctcacacggacggacactttcacccttctcccctcatgggcggatttggattgaagcaccctcccccacagattctcatcaagaataccccggtacctgcgaatccttcgaccaccttcagtgcggcaaagtttgcttccttcatcacacagtattccacgggacaggtcagcgtggagatagagtgggagctgcagaaggagaacagcaaacgctggaaccccgagatccagtatacttccaactacaacaaatctgttaatgtggactttactgtggacactaatggtgtgtattcagagcctcgccccattggcaccagatacctgactcgtaatctgtaa

SEQ ID NO: 12153 - DNA, 2208 bp, Artificial Sequence
  source: /note="Description of Artificial Sequence: Synthetic polynucleotide"
atggctgccgatggttatcttccagattggctcgaggacactctctctgaaggaataagacagtggtggaagctcaaacctggcccaccaccgccaaagcccgcagagcggcataaggacgacagcaggggtcttgtgcttcctgggtacaagtacctcggacccttcaacggactcgacaagggggagccggtcaacgaggcagacgccgcggccctcgagcacgacaaggcctacgaccggcagctcgacagcggagacaacccgtacctcaagtacaaccacgccgacgcggagtttcaggagcgtcttaaagaagatacgtcttttgggggcaacctcggacgagcagtcttccaggcgaaaaagagggttcttgaacctctgggcctggttgaggaacctgttaagacggctccgggaaaaaagaggccggtagagcactctcctgtggagccagactcctcctcgggaaccggaaaggcgggccagcagcctgcaagaaaaagattgaatttcggtcagactggagacgcagactccgtacctgacccccagcctctcggacagccaccagcagccccctctggtctgggaactaatacgatggctacaggcagtggcgcaccaatggcagacaataacgagggcgccgacggagtgggtaattcctcgggaaattggcattgcgattccacatggatgggcgacagagtcatcaccaccagcacccgcacctgggctctgcccacctacaacaaccatctgtacaagcaaatttccagccaatcaggagcatcgaacgacaaccactactttggctacagcaccccctgggggtattttgacttcaacagattccactgccacttttcgccacgtgactggcaaagactcatcaacaacaactggggattccggcccaagagactcagcttcaagctctttaacattcaagtcaaggaggtcacgcagaatggcggtacgacgacgattgccaataaccttaccagcacggttcaggtctttactgactcggagtaccagctcccgtacgtcctcggctcggcgcatcaaggatgcctcccgccgttcccagcagacgtcttcatggtgccacagtatggatacctcaccctgaacaacgggagtcaggcggtaggacgctcttcattttactgcctggagtacttcccttctcagatgcttcgcacgggaaacaactttaccttcagctacacctttgaggacgtgccttttcacagcagctacgctcacagccaaagtctggaccgtctcatgaatcctctcatcgaccaatacctgtattacttgagcaaaacaaacgctccaagcggaaccaccacgatgtccaggcttcagttttctcaggccggagcgagtgacattcgggaccagtctagaaactggcttcctggaccctgttaccgccagcagcgagtatcaaagacagctgcggacaacaacaacagtgattactcgtggactggagctaccaagtaccacctcaatggaagagactctctggtgaacccgggcccagctatggccagccacaaggatgatgaagaaaaatattttcctcagagcggggttctcatcttcgggaaacaaggctcaaataaaactaatgtggacattgaaaaggttatgattacagacgaagaggaaatcaggaccaccaatcccgtggctacggagcagtatggttctgtatctaccaaccttcaaagcggcaacacacaagcagctacctcagatgtcaacacacaaggcgttcttcctggcatggtctggcaggacagagatgtgtacctgcaggggcccatctgggcaaagattcctcacacggacggacactttcacccttctcccctcatgggcggatttggattgaagcaccctcccccacagattctcatcaagaataccccggtacctgcgaatccttcgaccaccttcagtgcggcaaagtttgcttccttcatcacacagtattccacgggacaggtcagcgtggagatagagtgggagctgcagaaggagaacagcaaacgctggaaccccgagatccagtatacttccaactacaacaaatctgttaatgtggactttactgtggacactaatggtgtgtattcagagcctcgccccattggcaccagatacctgactcgtaatctgtaa

SEQ ID NO: 12154 - DNA, 2208 bp, Artificial Sequence
  source: /note="Description of Artificial Sequence: Synthetic polynucleotide"
atggctgccgatggttatcttccagattggctcgaggacactctctctgaaggaataagacagtggtggaagctcaaacctggcccaccaccgccaaagcccgcagagcggcataaggacgacagcaggggtcttgtgcttcctgggtacaagtacctcggacccttcaacggactcgacaagggggagccggtcaacgaggcagacgccgcggccctcgagcacgacaaggcctacgaccggcagctcgacagcggagacaacccgtacctcaagtacaaccacgccgacgcggagtttcaggagcgtcttaaagaagatacgtcttttgggggcaacctcggacgagcagtcttccaggcgaaaaagagggttcttgaacctctgggcctggttgaggaacctgttaagacggctccgggaaaaaagaggccggtagagcactctcctgtggagccagactcctcctcgggaaccggaaaggcgggccagcagcctgcaagaaaaagattgaatttcggtcagactggagacgcagactccgtacctgacccccagcctctcggacagccaccagcagccccctctggtctgggaactaatacgatggctacaggcagtggcgcaccaatggcagacaataacgagggcgccgacggagtgggtaattcctcgggaaattggcattgcgattccacatggatgggcgacagagtcatcaccaccagcacccgcacctgggctctgcccacctacaacaaccatctgtacaagcaaatttccagccaatcaggagcatcgaacgacaaccactactttggctacagcaccccctgggggtattttgacttcaacagattccactgccacttttcgccacgtgactggcaaagactcatcaacaacaactggggattccggcccaagagactcagcttcaagctctttaacattcaagtcaaggaggtcacgcagaatgacggtacgacgacgattgccaataaccttaccagcacggttcaggtctttactgactcggagtaccagctcccgtacgtcctcggctcggcgcatcaaggatgcctcccgccgttcccagcagacgtcttcatggtgccacagtatggatacctcaccctgaacaacgggagtcaggcggtaggacgctcttcattttactgcctggagtacttcccttctcagatgcttcgcacgggaaacaactttaccttcagctacacctttgaggacgtgccttttcacagcagctacgctcacagccaaagtctggaccgtctcatgaatcctctcatcgaccaatacctgtattacttgagcaaaacaaacgctccaagcggaaccaccacgatgtccgggcttcagttttctcaggccggagcgagtgacattcgggaccagtctagaaactggcttcctggaccctgttaccgccagcagcgagtatcaaagacagctgcggacaacaacaacagtgattactcgtggactggagctaccaagtaccacctcaatggaagagactctctggtgaacccgggcccagctatggccagccacaaggatgatgaagaaaaatattttcctcagagcggggttctcatcttcgggaaacaaggctcaaataaaactaatgtggacattgaaaaggttatgattacagacgaagaggaaatcaggaccaccaatcccgtggctacggagcagtatggttctgtatctaccaaccttcaaagcggcaacacacaagcagctacctcagatgtcaacacacaaggcgttcttcctggcatggtctggcaggacagagatgtgtacctgcaggggcccatctgggcaaagattcctcacacggacggacactttcacccttctcccctcatgggcggatttggattgaagcaccctcccccacagattctcatcaagaataccccggtacctgtgaatccttcgaccaccttcagtgcggcaaagtttgcttccttcatcacacagtattccacgggacaggtcagcgtggagatagagtgggagctgcagaaggagaacagcaaacgctggaaccccgagatccagtatacttccaactacaacaaatctgttaatgtggactttactgtggacactaatggtgtgtattcagagcctcgccccattggcaccagatacctgactcgtaatctgtaa

SEQ ID NO: 12155 - DNA, 2208 bp, Artificial Sequence
  source: /note="Description of Artificial Sequence: Synthetic polynucleotide"
atggctgccgatggttatcttccagattggctcgaggacactctctctgaaggaataagacagtggtggaagctcaaacctggcccaccaccgccaaagcccgcagagcggcataaggacgacagcaggggtcttgtgcttcctgggtacaagtacctcggacccttcaacggactcgacaagggggagccggtcaacgaggcagacgccgcggccctcgagcacgacaaggcctacgaccggcagctcgacagcggagacaacccgtacctcaagtacaaccacgccgacgcggagtttcaggagcgtcttaaagaagatacgtcttttgggggcaacctcggacgagcagtcttccaggcgaaaaagagggttcttgaacctctgggcctggttgaggaacctgttaagacggctccgggaaaaaagaggccggtagagcactctcctgtggagccagactcctcctcgggaaccggaaaggcgggccagcagcctgcaagaaaaagattgaatttcggtcagactggagacgcagactccgtacctgacccccagcctctcggacagccaccagcagccccctctggtctgggaactaatacgatggctacaggcagtggcgcaccaatggcagacaataacgagggcgccgacggagtgggtaattcctcgggaaattggcattgcgattccacatggatgggcgacagagtcatcaccaccagcacccgcacctgggctctgcccacctacaacaaccatctgtacaagcaaatttccagccaatcaggagcatcgaacgacaaccactactttggctacagcaccccctgggggtattttgacttcaacagattccactgccacttttcgccacgtgactggcaaagactcatcaacaacaactggggattccggcccaagagactcagcttcaagctctttaacattcaagtcaaggaggtcacgcagaatgacggtacgacgacgattgccaataaccttaccagcacggttcaggtctttactgactcggagtaccagctcccgtacgtcctcggctcggcgcatcaaggatgcctcccgccgttcccagcagacgtcttcatggtgccacagtatggatacctcaccctgaacaacgggagtcaggcggtaggacgctcttcattttactgcctggagtacttcccttctcagatgcttcgcacgggaaacaactttaccttcagctacacctttgaggacgtgccttttcacagcagctacgctcacagccaaagtctggaccgtctcatgaatcctctcatcgaccaatacctgtattacttgagcaaaacaaacgctccaagcggaaccaccacgatgtccaggcttcagttttctcaggccggagcgagtgacattcgggaccagtctagaaactggcttcctggaccctgttaccgccagcagcgagtatcaaagacagctgcggacaacaacaacagtgattactcgtggactggagctaccaagtaccacctcaatggaagagactctctggtgaacccgggcccaactatggccagccacaaggatgatgaagaaaaatattttcctcagagcggggttctcatcttcgggaaacaaggctcaaataaaactaatgtggacattgaaaaggttatgattacagacgaagaggaaatcaggaccaccaatcccgtggctacggagcagtatggttctgtatctaccaaccttcaaagcggcaacacacaagcagctacctcagatgtcaacacacaaggcgttcttcctggcatggtctggcaggacagagatgtgtacctgcaggggcccatctgggcaaagattcctcacacggacggacactttcacccttctcccctcatgggcggatttggattgaagcaccctcccccacagattctcatcaagaataccccggtacctgcgaatccttcgaccaccttcagtgcggcaaagtttgcttccttcatcacacagtattccacgggacaggtcagcgtggagatagagtgggagctgcagaaggagaacagcaaacgctggaaccccgagatccagtatacttccaactacaacaaatctgttaatgtggactttactgtggacactaatggtgtgtattcagagcctcgccccattggcaccagatacctgactcgtaatctgtaa

SEQ ID NO: 12156 - DNA, 2208 bp, Artificial Sequence
  source: /note="Description of Artificial Sequence: Synthetic polynucleotide"
atggctgccgatggttatcttccagattggctcgaggacactctctctgaaggaataagacagtggtggaagctcaaacctggcccaccaccgccaaagcccgcagagcggcataaggacgacagcaggggtcttgtgcttcctgggtacaagtacctcggacccctcaacggactcgacaagggggagccggtcaacgaggcagacgccgcggccctcgagcacgacaaggcctacgaccggcagctcgacagcggagacaacccgtacctcaagtacaaccacgccgacgcggagtttcaggagcgtcttaaagaagatacgtcttttgggggcaacctcggacgagcagtcttccaggcgaaaaagagggttcttgaacctctgggcctggttgaggaacctgttaagacggctccgggaaaaaagaggccggtagagcactctcctgtggagccagactcctcctcgggaaccggaaaggcgggccagcagcctgcaagaaaaagattgaatttcggtcagactggagacgcagactccgtacctgacccccagcctctcggacagccaccagcagccccctctggtctgggaactaatacgatggctacaggcagtggcgcaccaatggcagacaataacgagggcgccgacggagtgggtaattcctcgggaaattggcattgcgattccacatggatgggcgacagagtcatcaccaccagcacccgcacctgggctctgcccacctacaacaaccatctgtacaagcaaatttccagccaatcaggagcatcgaacgacaaccactactttggctacagcaccccctgggggtattttgacttcaacagattccactgccacttttcgccacgtgactggcaaagactcatcaacaacaactggggattccggcccaagagactcagcttcaagctctttaacattcaagtcaaggaggtcacgcagaatgacggtacgacgacgattgccaataaccttaccagcacggttcaggtctttactgactcggagtaccagctcccgtacgtcctcggctcggcgcatcaaggatgcctcccgccgttcccagcagacgtcttcatggtgccacagtatggatacctcaccctgaacaacgggagtcaggcggtaggacgctcttcattttactgcctggagtacttcccttctcagatgcttcgcacgggaaacaactttaccttcagctacacctttgaggacgtgccttttcacagcagctacgctcacagccaaagtctggaccgtctcatgaatcctctcatcgaccaatacctgtattacttgagcaaaacaaacgctccaagcggaaccaccacgatgtccaggcttcagttttctcaggccggagcgagtgacattcgggaccagtctagaaactggcttcctggaccctgttaccgccagcagcgagtatcaaagacagctgcggacaacaacaacagtgattactcgtggactggagctaccaagtaccacctcaatggaagagactctctggtgaacccgggcccagctatggccagccacaaggatgatgaagaaaaatattttcctcagagcggggttctcatcttcgggaaacaaggctcaaataaaactaatgtggacattgaaaaggttatgattacagacgaagaggaaatcaggaccaccaatcccgtggctacggagcagtatggttctgtatctaccaaccttcaaagcggcaacacacaagcagctacctcagatgtcaacacacaaggcgttcttcctggcatggtctggcaggacagagatgtgtacctgcaggggcccatctgggcaaagattcctcacacggacggacactttcacccttctcccctcatgggcggatttggattgaagcaccctcccccacagattctcatcaagaataccccggtacctgcgaatccttcgaccaccttcagtgcggcaaagtttgcttccttcatcacacagtattccacgggacaggtcagcgtggagatagagtgggagctgcagaaggagaacagcaaacgctggaaccccgagatccagtatacttccaactacaacaaatctgttaatgtggactttactgtggacactaatggtgtgtattcagagcctcgccccattggcaccagatacctgactcgtaatctgtaa

SEQ ID NO: 12157 - DNA, 2208 bp, Artificial Sequence
  source: /note="Description of Artificial Sequence: Synthetic polynucleotide"
atggctgccgatggttatcttccagattggctcgaggacactctctctgaaggaataagacagtggtggaagctcaaacctggcccaccaccgccaaagcccgcagagcggcataaggacgacagcaggggtcttgtgcttcctgggtacaagtacctcggacccttcaacggactcgacaagggggagccggtcaacgaggcagacgccgcggccctcgagcacgacaaggcctacgaccggcagctcgacagcggagacaacccgtacctcaagtacaaccacgccgacgcggagtttcaggagcgtcttaaagaagatacgtcttttgggggcaacctcggacgagcagtcttccaggcgaaaaagagggttcttgaacctctgggcctggttgaggaacctgttaagacggctccgggaaaaaagaggccggtagagcactctcctgtggagccagactcctcctcgggaaccggaaaggcgggccagcagcctgcaagaaaaagattgaatttcggtcagactggagacgcagactccgtacctgacccccagcctctcggacagccaccagcagccccctctggtctgggaactaatacgatggctacaggcagtggcgcaccaatggcagacaataacgagggcgccgacggagtgggtaattcctcgggaaattggcattgcgattccacatggatgggcgacagagtcatcaccaccagcacccgcacctgggctctgcccacctacaacaaccatctgtacaagcaaatttccagccaatcaggagcatcgaacgacaaccactactttggctacagcaccccctgggggtattttgacttcaacagattccactgccacttttcgccacgtgactggcaaagactcatcaacaacaactggggattccggcccaagagactcagcttcaagctctttaacattcaagtcaaggaggtcacgcagaatgacggtacgacgacgattgccaataaccttaccagcacggttcaggtctttactgactcggagtaccagctcccgtacgtcctcggctcggcgcatcaaggatgcctcccgccgttcccagcagacgtcttcatggtgccacagtatggatacctcaccctgaacaacgggagtcaggcggtaggacgctcttcattttactgcctggagtacttcccttctcagatgcttcgcacgggaaacaactttaccttcagctacacctttgaggacgtgccttttcacagcagctacgctcacagccaaagtctggaccgtctcatgaatcctctcatcgaccaatacctgtattacttgagcaaaacaaacgctccaagcggaaccaccacgatgtccaggcttcagttttctcaggccggagcgagtgacattcgggaccagtctagaaactggcttcctggaccctgttaccgccagcagcgagtatcaaagacagctgcggacaacaacaacagtgattactcgtggactggagctaccaagtaccacctcaatggaagagactctctggtgaacccgggcccagctatgaccagccacaaggatgatgaagaaaaatattttcctcagagcggggttctcatcttcgggaaacaaggctcaaataaaactaatgtggacattgaaaaggttatgattacagacgaagaggaaatcaggaccaccaatcccgtggctacggagcagtatggttctgtatctaccaaccttcaaagcggcaacacacaagcagctacctcagatgtcaacacacaaggcgttcttcctggcatggtctggcaggacagagatgtgtacctgcaggggcccatctgggcaaagattcctcacacggacggacactttcacccttctcccctcatgggcggatttggattgaagcaccctcccccacagattctcatcaagaataccccggtacctgcgaatccttcgaccaccttcagtgcggcaaagtttgcttccttcatcacacagtattccacgggacaggtcagcgtggagatagagtgggagctgcagaaggagaacagcaaacgctggaaccccgagatccagtatacttccaactacaacaaatctgttaatgtggactttactgtggacactaatggtgtgtattcagagcctcgccccattggcaccagatacctgactcgtaatctgtaa

SEQ ID NO: 12158 - DNA, 2208 bp, Artificial Sequence
  source: /note="Description of Artificial Sequence: Synthetic polynucleotide"
atggctgccgatggttatcttccagattggctcgaggacactctctctgaaggaataagacagtggtggaagctcaaacctggcccaccaccgccaaagcccgcagagcggcataaggacgacagcaggggtcttgtgcttcctgggtacaagtacctcggacccttcaacggactcgacaagggggagccggtcaacgaggcagacgccgcggccctcgagcacgacaaggcctacgaccggcagctcgacagcggagacaacccgtacctcaagtacaaccacgccgacgcggagtttcaggagcgtcttaaagaagatacgtcttttgggggcaacctcggacgagcagtcttccaggcgaaaaagagggttcttgaacctctgggcctggttgaggaacctgttaagacggctccgggaaaaaagaggccggtagagcactctcctgtggagccagactcctcctcgggaaccggaaaggcgggccagcagcctgcaagaaaaagattgaatttcggtcagactggagacgcagactccgtacctgacccccagcctctcggacagccaccagcagccccctctggtctgggaactaatacgatggctacaggcagtggcgcaccaatggcagacaataacgagggcgccgacggagtgggtaattcctcgggaaattggcattgcgattccacatggatgggcgacagagtcatcaccaccagcacccgcacctgggctctgcccacctacaacaaccatctgtacaagcaaatttccagccaatcaggagcatcgaacgacaaccactactttggctacagcaccccctgggggtattttgacttcaacagattccactgccacttttcgccacgtgactggcaaagactcatcaacaacaactggggattccggcccaagagactcagcttcaagctctttaacattcaagtcaaggaggtcacgcagaatgacggtacgacgacgattgccaataaccttaccagcacggttcaggtctttactgactcggagtaccagctcccgtacgtcctcggctcggcgcatcaaggatgcctcccgccgttcccagcagacgtcttcatggtgccacagtatggatacctcaccctgaacaacgggagtcaggcggtaggacgctcttcattttactgcctggagtacttcccttctcagatgcttcgcacgggaaacaactttaccttcagctacacctttgaggacgtgccttttcacagcagctacgctcacagccaaagtctggaccgtctcatgaatcctctcatcgaccaatacctgtattacttgagcaaaacaaacgctccaagcggaaccaccacgatgtccaggcttcagttttctcaggccggagcgagtgacattcgggaccagtctagaaactggcttcctggaccctgttaccgccagcagcgagtatcaaagacagctgcggacaacaacaacagtgattactcgtggactggagctaccaagtaccacctcaatggaagagactctctggtgaacccgggcccagctatggccagccacaaggatgatgaagaaaaatattttcctcagagcggggttctcatcttcgggaaacaaggctcaaataaaactaatgtggacattgaaaaggttatgattacagacgaagaggaaatcaggaccaccaatcccgtggctacggagcagtatggttctgtatctaccaaccttcaaagcggcaacacacaagcagctacctcagatgtcaacacacaaggcgttcttcctggcatggtctggcaggacagagatgtgtacctgcaggggcccatctggacaaagattcctcacacggacggacactttcacccttctcccctcatgggcggatttggattgaagcaccctcccccacagattctcatcaagaataccccggtacctgcgaatccttcgaccaccttcagtgcggcaaagtttgcttccttcatcacacagtattccacgggacaggtcagcgtggagatagagtgggagctgcagaaggagaacagcaaacgctggaaccccgagatccagtatacttccaactacaacaaatctgttaatgtggactttactgtggacactaatggtgtgtattcagagcctcgccccattggcaccagatacctgactcgtaatctgtaa

SEQ ID NO: 12159 - DNA, 2208 bp, Artificial Sequence
  source: /note="Description of Artificial Sequence: Synthetic polynucleotide"
atggctgccgatggttatcttccagattggctcgaggacactctctctgaaggaataagacagtggtggaagctcaaacctggcccaccaccgccaaagcccgcagagcggcataaggacgacagcaggggtcttgtgcttcctgggtacaagtacctcggacccttcaacggactcgacaagggggagccggtcaacgaggcagacgccgcggccctcgagcacgacaaggcctacgaccggcagctcgacagcggagacaacccgtacctcaagtacaaccacgccgacgcggagtttcaggagcgtcttaaagaagatacgtcttttgggggcaacctcggacgagcagtcttccaggcgaaaaagagggttcttgaacctctgggcctggttgaggaacctgttaagacggctccgggaaaaaagaggccggtagagcactctcctgtggagccagactcctcctcgggaaccggaaaggcgggccagcagcctgcaagaaaaagattgaatttcggtcagactggagacgcagactccgtacctgacccccagcctctcggacagccaccagtagccccctctggtctgggaactaatacgatggctacaggcagtggcgcaccaatggcagacaataacgagggcgccgacggagtgggtaattcctcgggaaattggcattgcgattccacatggatgggcgacagagtcatcaccaccagcacccgcacctgggctctgcccacctacaacaaccatctgtacaagcaaatttccagccaatcaggagcatcgaacgacaaccactactttggctacagcaccccctgggggtattttgacttcaacagattccactgccacttttcgccacgtgactggcaaagactcatcaacaacaactggggattccggcccaagagactcagcttcaagctctttaacattcaagtcaaggaggtcacgcagaatgacggtacgacgacgattgccaataaccttaccagcacggttcaggtctttactgactcggagtaccagctcccgtacgtcctcggctcggcgcatcaaggatgcctcccgccgttcccagcagacgtcttcatggtgccacagtatggatacctcaccctgaacaacgggagtcaggcggtaggacgctcttcattttactgcctggagtacttcccttctcagatgcttcgcacgggaaacaactttaccttcagctacacctttgaggacgtgccttttcacagcagctacgctcacagccaaagtctggaccgtctcatgaatcctctcatcgaccaatacctgtattacttgagcaaaacaaacgctccaagcggaaccaccacgatgtccaggcttcagttttctcaggccggagcgagtgacattcgggaccagtctagaaactggcttcctggaccctgttaccgccagcagcgagtatcaaagacagctgcggacaacaacaacagtgattactcgtggactggagctaccaagtaccacctcaatggaagagactctctggtgaacccgggcccagctatggccagccacaaggatgatgaagaaaaatattttcctcagagcggggttctcatcttcgggaaacaaggctcaaataaaactaatgtggacattgaaaaggttatgattacagacgaagaggaaatcaggaccaccaatcccgtggctacggagcagtatggttctgtatctaccaaccttcaaagcggcaacacacaagcagctacctcagatgtcaacacacaaggcgttcttcctggcatggtctggcaggacagagatgtgtacctgcaggggcccatctgggcaaagattcctcacacggacggacactttcacccttctcccctcatgggcggatttggattgaagcaccctcccccacagattctcatcaagaataccccggtacctgcgaatccttcgaccaccttcagtgcggcaaagtttgcttccttcatcacacagtattccacgggacaggtcagcgtggagatagagtgggagctgcagaaggagaacagcaaacgctggaaccccgagatccagtatacttccaactacaacaaatctgttaatgtggactttactgtggacactaatggtgtgtattcagagcctcgccccattggcaccagatacctgactcgtaatctgtaa

SEQ ID NO: 12160 - DNA, 2208 bp, Artificial Sequence
  source: /note="Description of Artificial Sequence: Synthetic polynucleotide"
atggctgccgatggttatcttccagattggctcgaggacactctctctgaaggaataagacagtggtggaagctcaaacctggcccaccaccgccaaagcccgcagagcggcataaggacgacagcaggggtcttgtgcttcctgggtacaagtacctcggacccttcaacggactcgacaagggggagccggtcaacgaggcagacgccgcggccctcgagcacgacaaggcctacgaccggcagctcgacagcggagacaacccgtacctcaagtacaaccacgccgacgcggagtttcaggagcgtcttaaagaagatacgtcttttgggggcaacctcggacgagcagtcttccaggcgaaaaagagggttcttgaacctctgggcctggttgaggaacctgttaagacggctccgggaaaaaagaggccggtagagcactctcctgtggagccagactcctcctcgggaaccggaaaggcgggccagcagcctgcaagaaaaagattgaatttcggtcagactggagacgcagactccgtacctgacccccagcctctcggacagccaccagcagccccctctggtctgggaactaatacgatggctacaggcagtggcgcaccaatggcagacaataacgagggcgccgacggagtgggtaattcctcgggaaattggcattgcgattccacatggatgggcgacagagtcatcaccaccagcacccgcacctgggctctgcccacctacaacaaccatctgtacaagcaaatttccagccaatcaggagcatcgaacgacaaccactactttggctacagcaccccctgggggtattttgacttcaacagattccactgccacttttcgccacgtgactggcaaagactcatcaacaacaactggggattccggcccaagagactcagcttcaagctctttaacattcaagtcaaggaggtcacgcagaatgacggtacgacgacgattgccaataaccttaccagcacggttcaggtctttactgactcggagtaccagctcccgtacgtcctcggctcggcgcatcaaggatgcctcccgccgttcccagcagacgtcttcatggtgccacagtatggatacctcaccctgaacaacgggagtcaggcggtaggacgctcttcattttactgcctggagtacttcccttctcagatgcttcgcacgggaaacaactttaccttcagctacacctttgaggacgtgccttttcacagcagctacgctcacagccaaagtctggaccgtctcatgaatcctctcatcgaccaatacctgtattacttgagcaaaacaaacgctccaagcggaaccaccacgatgtccaggcttcagttttctcaggccggagcgagtgacattcgggaccagtctagaaactggcttcctggaccctgttaccgccagcagcgagtatcaaagacagctgcggacaacaacaacagtgattactcgtggactggagctaccaagtaccacctcaatggaagagactctctggtgaacccgggcccagctatggccagccacaaggatgatgaagaaaaatattttcctcagagcggggttctcatcttcgggaaacaaggctcaaataaaactaatgtggacattgaaaaggttatgattacagacgaagaggaaatcaggaccaccaatcccgtggctacggagcagtatggttctgtatctaccaaccttcaaagcggcaacacacaagcagctacctcagatgtcaacacacaaggcgttcttcctggcatggtctggcaggacagagatgtgtacctgcaggggcccatctgggcaaagattcctcacacggacggacactttcacccttctcccctcatgggcggatttggattgaagcaccctcccccacagattctcatcaagaataccccggtacctgcgaatccttcgaccaccttcagtgcggcaaagtttgcttccttcatcacacagtattccacgggacaggtcagcgtggagatagagtgggagccgcagaaggagaacagcaaacgctggaaccccgagatccagtatacttccaactacaacaaatctgttaatgtggactttactgtggacactaatggtgtgtattcagagcctcgccccattggcaccagatacctgactcgtaatctgtaa

SEQ ID NO: 12161 - DNA, 2208 bp, Artificial Sequence
  source: /note="Description of Artificial Sequence: Synthetic polynucleotide"
atggctgccgatggttatcttccagattggctcgaggacactctctctgaaggaataagacagtggtggaagctcaaacctggcccaccaccgccaaagcccgcagagcggcataaggacgacagcaggggtcttgtgcttcctgggtacaagtacctcggacccttcaacggactcgacaagggggagccggtcaacgaggcagacgccgcggccctcgagcacgacaaggcctacgaccggcagctcgacagcggagacaacccgtacctcaagtacaaccacgccgacgcggagtttcaggagcgtcttaaagaagatacgtcttttgggggcaacctcggacgagcagtcttccaggcgaaaaagagggttcttgaacctctgggcctggttgaggaacctgttaagacggctccgggaaaaaagaggccggtagagcactctcctgtggagccagactcctcctcgggaaccggaaaggcgggccagcagcctgcaagaaaaagattgaatttcggtcagactggagacgcagactccgtacctgacccccagcctctcggacagccaccagcagccccctctggtctgggaactaatacgatggctacaggcagtggcgcaccaatggcagacaataacgagggcgccgacggagtgggtaattcctcgggaaattggcattgcgattccacatggatgggcgacagagtcatcaccaccagcacccgcacctgggctctgcccacctacaacaaccatctgtacaagcaaatttccagccaatcaggagcatcgaacgacaaccactactttggctacagcaccccctgggggtattttgacttcaacagattccactgccacttttcgccacgtgactggcaaagactcatcaacaacaactggggattccggcccaagagactcagcttcaagctctttaacattcaagtcaaggaggtcacgcagaatgacggtacgacgacgattgccaataaccttaccagcacggttcaggtctttactgactcggagtaccagctcccgtacgtcctcggctcggcgcatcaaggatgcctcccgccgttcccagcagacgtcttcatggtgccacagtatggatacctcaccctgaacaacgggagtcaggcggtaggacgctcttcattttactgcctggagtacttcccttctcagatgcttcgcacgggaaacaactttaccttcagctacacctttgaggacgtgccttttcacagcagctacgctcacagccaaagtctggaccgtctcatgaatcctctcatcgaccaatacctgtattacttgagcaaaacaaacgctccaagcggaaccaccacgatgtccaggcttcagttttctcaggccggagcgagtgacattcgggaccagtctagaaactggcttcctggaccctgttaccgccagcagcgagtatcaaagacagttgcggacaacaacaacagtgattactcgtggactggagctaccaagtaccacctcaatggaagagactctctggtgaacccgggcccagctatggccagccacaaggatgatgaagaaaaatattttcctcagagcggggttctcatcttcgggaaacaaggctcaaataaaactaatgtggacattgaaaaggttatgattacagacgaagaggaaatcaggaccaccaatcccgtggctacggagcagtatggttctgtatctaccaaccttcaaagcggcaacacacaagcagctacctcagatgtcaacacacaaggcgttcttcctggcatggtctggcaggacagagatgtgtacctgcaggggcccatctgggcaaagattcctcacacggacggacactttcacccttctcccctcatgggcggatttggattgaagcaccctcccccacagattctcatcaagaataccccggtacctgcgaatccttcgaccaccttcagtgcggcaaagtttgcttccttcatcacacagtattccacgggacaggtcagcgtggagatagagtgggagctgcagaaggagaacagcaaacgctggaaccccgagatccagtatacttccaactacaacaaatctgttaatgtggactttactgtggacactaatggtgtgtattcagagcctcgccccattggcaccagatacctgactcgtaatctgtaa

SEQ ID NO: 12162 - DNA, 2208 bp, Artificial Sequence
  source: /note="Description of Artificial Sequence: Synthetic polynucleotide"
atggctgccgatggttatcttccagattggctcgaggacactctctctgaaggaataagacagtggtggaagctcaaacctggcccaccaccgccaaagcccgcagagcggcataaggacgacagcaggggtcttgtgcttcctgggtacaagtacctcggacccttcaacggactcgacaagggggagccggtcaacgaggcagacgccgcggccctcgagcacgacaaggcctacgaccggcagctcgacagcggagacaacccgtacctcaagtacaaccacgccgacgcggagtttcaggagcgtcttaaagaagatacgtcttttgggggcaacctcggacgagcagtcttccaggcgaaaaagagggttcttgaacctctgggcctggttgaggaacctgttaagacggctccgggaaaaaagaggccggtagagcactctcctgtggagccagactcctcctcgggaaccggaaaggcgggccagcagcctgcaagaaaaagattgaatttcggtcagactggagacgcagactccgtacctgacccccagcctctcggacagccaccagcagccccctctggtctgggaactaatacgatggctacaggcagtggcgcaccaatggcagacaataacgagggcgccgacggagtgggtaattcctcgggaaattggcattgcgattccacatggatgggcgacagagtcatcaccaccagcacccgcacctgggctctgcccacctacaacaaccatctgtacaagcaaatttccagccaatcaggagcatcgaacgacaaccactactttggctacagcaccccctgggggtattttgacttcaacagattccactgccacttttcgccacgtgactggcaaagactcatcaacaacaactggggattccggcccaagagactcagcttcaagctctttaacattcaagtcaaggaggtcacgcagaatgacggtacgacgacgattgccaataaccttaccagcacggttcaggtctttactgactcggagtaccagctcccgtacgtcctcggctcggcgcatcaaggatgcctcccgccgttcccagcagacgtcttcatggtgccacagtatggatacctcaccctgaacaacgggagtcaggcggtaggacgctcttcattttactgcctggagtacttcccttctcagatgcttcgcacgggaaacaactttaccttcagctacacctttgaggacgtgccttttcacagcagctacgctcacagccaaagtctggaccgtctcatgaatcctctcatcgaccaatacccgtattacttgagcaaaacaaacgctccaagcggaaccaccacgatgtccaggcttcagttttctcaggccggagcgagtgacattcgggaccagtctagaaactggcttcctggaccctgttaccgccagcagcgagtatcaaagacagctgcggacaacaacaacagtgattactcgtggactggagctaccaagtaccacctcaatggaagagactctctggtgaacccgggcccagctatggccagccacaaggatgatgaagaaaaatattttcctcagagcggggttctcatcttcgggaaacaaggctcaaataaaactaatgtggacattgaaaaggttatgattacagacgaagaggaaatcaggaccaccaatcccgtggctacggagcagtatggttctgtatctaccaaccttcaaagcggcaacacacaagcagctacctcagatgtcaacacacaaggcgttcttcctggcatggtctggcaggacagagatgtgtacctgcaggggcccatctgggcaaagattcctcacacggacggacactttcacccttctcccctcatgggcggatttggattgaagcaccctcccccacagattctcatcaagaataccccggtacctgcgaatccttcgaccaccttcagtgcggcaaagtttgcttccttcatcacacagtattccacgggacaggtcagcgtggagatagagtgggagctgcagaaggagaacagcaaacgctggaaccccgagatccagtatacttccaactacaacaaatctgttaatgtggactttactgtggacactaatggtgtgtattcagagcctcgccccattggcaccagatacctgactcgtaatctgtaa

SEQ ID NO: 12163 - DNA, 2208 bp, Artificial Sequence
  source: /note="Description of Artificial Sequence: Synthetic polynucleotide"
atggctgccgatggttatcttccagattggctcgaggacactctctctgaaggaataagacagtggtggaagctcaaacctggcccaccaccgccaaagcccgcagagcggcataaggacgacagcaggggtcttgtgcttcctgggtacaagtacctcggacccttcaacggactcgacaagggggagccggtcaacgaggcagacgccgcggccctcgagcacgacaaggcctacgaccggcagctcgacagcggagacaacccgtacctcaagtacaaccacaccgacgcggagtttcaggagcgtcttaaagaagatacgtcttttgggggcaacctcggacgagcagtcttccaggcgaaaaagagggttcttgaacctctgggcctggttgaggaacctgttaagacggctccgggaaaaaagaggccggtagagcactctcctgtggagccagactcctcctcgggaaccggaaaggcgggccagcagcctgcaagaaaaagattgaatttcggtcagactggagacgcagactccgtacctgacccccagcctctcggacagccaccagcagccccctctggtctgggaactaatacgatggctacaggcagtggcgcaccaatggcagacaataacgagggcgccgacggagtgggtaattcctcgggaaattggcattgcgattccacatggatgggcgacagagtcatcaccaccagcacccgcacctgggctctgcccacctacaacaaccatctgtacaagcaaatttccagccaatcaggagcatcgaacgacaaccactactttggctacagcaccccctgggggtattttgacttcaacagattccactgccacttttcgccacgtgactggcaaagactcatcaacaacaactggggattccggcccaagagactcagcttcaagctctttaacattcaagtcaaggaggtcacgcagaatgacggtacgacgacgattgccaataaccttaccagcacggttcaggtctttactgactcggagtaccagctcccgtacgtcctcggctcggcgcatcaaggatgcctcccgccgttcccagcagacgtcttcatggtgccacagtatggatacctcaccctgaacaacgggagtcaggcggtaggacgctcttcattttactgcctggagtacttcccttctcagatgcttcgcacgggaaacaactttaccttcagctacacctttgaggacgtgccttttcacagcagctacgctcacagccaaagtctggaccgtctcatgaatcctctcatcgaccaatacctgtattacttgagcaaaacaaacgctccaagcggaaccaccacgatgtccaggcttcagttttctcaggccggagcgagtgacattcgggaccagtctagaaactggcttcctggaccctgttaccgccagcagcgagtatcaaagacagctgcggacaacaacaacagtgattactcgtggactggagctaccaagtaccacctcaatggaagagactctctggtgaacccgggcccagctatggccagccacaaggatgatgaagaaaaatattttcctcagagcggggttctcatcttcgggaaacaaggctcaaataaaactaatgtggacattgaaaaggttatgattacagacgaagaggaaatcaggaccaccaatcccgtggctacggagcagtatggttctgtatctaccaaccttcaaagcggcaacacacaagcagctacctcagatgtcaacacacaaggcgttcttcctggcatggtctggcaggacagagatgtgtacctgcaggggcccatctgggcaaagattcctcacacggacggacactttcacccttctcccctcatgggcggatttggattgaagcaccctcccccacagattctcatcaagaataccccggtacctgcgaatccttcgaccaccttcagtgcggcaaagtttgcttccttcatcacacagtattccacgggacaggtcagcgtggagatagagtgggagctgcagaaggagaacagcaaacgctggaaccccgagatccagtatacttccaactacaacaaatctgttaatgtggactttactgtggacactaatggtgtgtattcagagcctcgccccattggcaccagatacctgactcgtaatctgtaa

SEQ ID NO: 12164 - DNA, 2208 bp, Artificial Sequence
  source: /note="Description of Artificial Sequence: Synthetic polynucleotide"
atggctgccgatggttatcttccagattggctcgaggacactctctctgaaggaataagacagtggtggaagctcaaacctggcccaccaccgccaaagcccgcagagcggcataaggacgacagcaggggtcttgtgcttcctgggtacaagtacctcggacccttcaacggactcgacaagggggggccggtcaacgaggcagacgccgcggccctcgagcacgacaaggcctacgaccggcagctcgacagcggagacaacccgtacctcaagtacaaccacgccgacgcggagtttcaggagcgtcttaaagaagatacgtcttttgggggcaacctcggacgagcagtcttccaggcgaaaaagagggttcttgaacctctgggcctggttgaggaacctgttaagacggctccgggaaaaaagaggccggtagagcactctcctgtggagccagactcctcctcgggaaccggaaaggcgggccagcagcctgcaagaaaaagattgaatttcggtcagactggagacgcagactccgtacctgacccccagcctctcggacagccaccagcagccccctctggtctgggaactaatacgatggctacaggcagtggcgcaccaatggcagacaataacgagggcgccgacggagtgggtaattcctcgggaaattggcattgcgattccacatggatgggcgacagagtcatcaccaccagcacccgcacctgggctctgcccacctacaacaaccatctgtacaagcaaatttccagccaatcaggagcatcgaacgacaaccactactttggctacagcaccccctgggggtattttgacttcaacagattccactgccacttttcgccacgtgactggcaaagactcatcaacaacaactggggattccggcccaagagactcagcttcaagctctttaacattcaagtcaaggaggtcacgcagaatgacggtacgacgacgattgccaataaccttaccagcacggttcaggtctttactgactcggagtaccagctcccgtacgtcctcggctcggcgcatcaaggatgcctcccgccgttcccagcagacgtcttcatggtgccacagtatggatacctcaccctgaacaacgggagtcaggcggtaggacgctcttcattttactgcctggagtacttcccttctcagatgcttcgcacgggaaacaactttaccttcagctacacctttgaggacgtgccttttcacagcagctacgctcacagccaaagtctggaccgtctcatgaatcctctcatcgaccaatacctgtattacttgagcaaaacaaacgctccaagcggaaccaccacgatgtccaggcttcagttttctcaggccggagcgagtgacattcgggaccagtctagaaactggcttcctggaccctgttaccgccagcagcgagtatcaaagacagctgcggacaacaacaacagtgattactcgtggactggagctaccaagtaccacctcaatggaagagactctctggtgaacccgggcccagctatggccagccacaaggatgatgaagaaaaatattttcctcagagcggggttctcatcttcgggaaacaaggctcaaataaaactaatgtggacattgaaaaggttatgattacagacgaagaggaaatcaggaccaccaatcccgtggctacggagcagtatggttctgtatctaccaaccttcaaagcggcaacacacaagcagctacctcagatgtcaacacacaaggcgttcttcctggcatggtctggcaggacagagatgtgtacctgcaggggcccatctgggcaaagattcctcacacggacggacactttcacccttctcccctcatgggcggatttggattgaagcaccctcccccacagattctcatcaagaataccccggtacctgcgaatccttcgaccaccttcagtgcggcaaagtttgcttccttcatcacacagtattccacgggacaggtcagcgtggagatagagtgggagctgcagaaggagaacagcaaacgctggaaccccgagatccagtatacttccaactacaacaaatctgttaatgtggactttactgtggacactaatggtgtgtattcagagcctcgccccattggcaccagatacctgactcgtaatctgtaa

SEQ ID NO: 12165 - DNA, 2208 bp, Artificial Sequence
  source: /note="Description of Artificial Sequence: Synthetic polynucleotide"
atggctgccgatggttatcttccagattggctcgaggacactctctctgaaggaataagacagtggtggaagctcaaacctggcccaccaccgccaaagcccgcagagcggcataaggacgacagcaggggtcttgtgcttcctgggtacaagtacctcggacccttcaacggactcgacaagggggagccggtcaacgaggcagacgccgcggccctcgagcacgacaaggcctacgaccggcagctcgacagcggagacaacccgtacctcaagtacaaccacgccgacgcggagtttcaggagcgtcttaaagaagatacgtcttttgggggcaacctcggacgagcagtcttccaggcgaaaaagagggttcttgaacctctgggcctggttgaggaacctgttaagacggctccgggaaaaaagaggccggtagagcactctcctgtggagccagactcctcctcgggaaccggaaaggcgggccagcagcctgcaagaaaaagattgaatttcggtcagactggagacgcagactccgtacctgacccccagcctctcggacagccaccagcagccccctctggtctgggaactaatacgatggctacaggcagtggcgcaccaatggcagacaataacgagggcgccgacggagtgggtaattcctcgggaaattggcattgcgattccacatggatgggcgacagagtcatcaccaccagcacccgcacctggactctgcccacctacaacaaccatctgtacaagcaaatttccagccaatcaggagcatcgaacgacaaccactactttggctacagcaccccctgggggtattttgacttcaacagattccactgccacttttcgccacgtgactggcaaagactcatcaacaacaactggggattccggcccaagagactcagcttcaagctctttaacattcaagtcaaggaggtcacgcagaatgacggtacgacgacgattgccaataaccttaccagcacggttcaggtctttactgactcggagtaccagctcccgtacgtcctcggctcggcgcatcaaggatgcctcccgccgttcccagcagacgtcttcatggtgccacagtatggatacctcaccctgaacaacgggagtcaggcggtaggacgctcttcattttactgcctggagtacttcccttctcagatgcttcgcacgggaaacaactttaccttcagctacacctttgaggacgtgccttttcacagcagctacgctcacagccaaagtctggaccgtctcatgaatcctctcatcgaccaatacctgtattacttgagcaaaacaaacgctccaagcggaaccaccacgatgtccaggcttcagttttctcaggccggagcgagtgacattcgggaccagtctagaaactggcttcctggaccctgttaccgccagcagcgagtatcaaagacagctgcggacaacaacaacagtgattactcgtggactggagctaccaagtaccacctcaatggaagagactctctggtgaacccgggcccagctatggccagccacaaggatgatgaagaaaaatattttcctcagagcggggttctcatcttcgggaaacaaggctcaaataaaactaatgtggacattgaaaaggttatgattacagacgaagaggaaatcaggaccaccaatcccgtggctacggagcagtatggttctgtatctaccaaccttcaaagcggcaacacacaagcagctacctcagatgtcaacacacaaggcgttcttcctggcatggtctggcaggacagagatgtgtacctgcaggggcccatctgggcaaagattcctcacacggacggacactttcacccttctcccctcatgggcggatttggattgaagcaccctcccccacagattctcatcaagaataccccggtacctgcgaatccttcgaccaccttcagtgcggcaaagtttgcttccttcatcacacagtattccacgggacaggtcagcgtggagatagagtgggagctgcagaaggagaacagcaaacgctggaaccccgagatccagtatacttccaactacaacaaatctgttaatgtggactttactgtggacactaatggtgtgtattcagagcctcgccccattggcaccagatacctgactcgtaatctgtaa

SEQ ID NO: 12166 - DNA, 2208 bp, Artificial Sequence
  source: /note="Description of Artificial Sequence: Synthetic polynucleotide"
atggctgccgatggttatcttccagattggctcgaggacactctctctgaaggaataagacagtggtggaagctcaaacctggcccaccaccgccaaagcccgcagagcggcataaggacgacagcaggggtcttgtgcttcctgggtacaagtacctcggacccttcaacggactcgacaagggggagccggtcaacgaggcagacgccgcggtcctcgagcacgacaaggcctacgaccggcagctcgacagcggagacaacccgtacctcaagtacaaccacgccgacgcggagtttcaggagcgtcttaaagaagatacgtcttttgggggcaacctcggacgagcagtcttccaggcgaaaaagagggttcttgaacctctgggcctggttgaggaacctgttaagacggctccgggaaaaaagaggccggtagagcactctcctgtggagccagactcctcctcgggaaccggaaaggcgggccagcagcctgcaagaaaaagattgaatttcggtcagactggagacgcagactccgtacctgacccccagcctctcggacagccaccagcagccccctctggtctgggaactaatacgatggctacaggcagtggcgcaccaatggcagacaataacgagggcgccgacggagtgggtaattcctcgggaaattggcattgcgattccacatggatgggcgacagagtcatcaccaccagcacccgcacctgggctctgcccacctacaacaaccatctgtacaagcaaatttccagccaatcaggagcatcgaacgacaaccactactttggctacagcaccccctgggggtattttgacttcaacagattccactgccacttttcgccacgtgactggcaaagactcatcaacaacaactggggattccggcccaagagactcagcttcaagctctttaacattcaagtcaaggaggtcacgcagaatgacggtacgacgacgattgccaataaccttaccagcacggttcaggtctttactgactcggagtaccagctcccgtacgtcctcggctcggcgcatcaaggatgcctcccgccgttcccagcagacgtcttcatggtgccacagtatggatacctcaccctgaacaacgggagtcaggcggtaggacgctcttcattttactgcctggagtacttcccttctcagatgcttcgcacgggaaacaactttaccttcagctacacctttgaggacgtgccttttcacagcagctacgctcacagccaaagtctggaccgtctcatgaatcctctcatcgaccaatacctgtattacttgagcaaaacaaacgctccaagcggaaccaccacgatgtccaggcttcagttttctcaggccggagcgagtgacattcgggaccagtctagaaactggcttcctggaccctgttaccgccagcagcgagtatcaaagacagctgcggacaacaacaacagtgattactcgtggactggagctaccaagtaccacctcaatggaagagactctctggtgaacccgggcccagctatggccagccacaaggatgatgaagaaaaatattttcctcagagcggggttctcatcttcgggaaacaaggctcaaataaaactaatgtggacattgaaaaggttatgattacagacgaagaggaaatcaggaccaccaatcccgtggctacggagcagtatggttctgtatctaccaaccttcaaagcggcaacacacaagcagctacctcagatgtcaacacacaaggcgttcttcctggcatggtctggcaggacagagatgtgtacctgcaggggcccatctgggcaaagattcctcacacggacggacactttcacccttctcccctcatgggcggatttggattgaagcaccctcccccacagattctcatcaagaataccccggtacctgcgaatccttcgaccaccttcagtgcggcaaagtttgcttccttcatcacacagtattccacgggacaggtcagcgtggagatagagtgggagctgcagaaggagaacagcaaacgctggaaccccgagatccagtatacttccaactacaacaaatctgttaatgtggactttactgtggacactaatggtgtgtattcagagcctcgccccattggcaccagatacctgactcgtaatctgtaa

SEQ ID NO: 12167 - DNA, 2208 bp, Artificial Sequence
  source: /note="Description of Artificial Sequence: Synthetic polynucleotide"
atggctgccgatggttatcttccagattggctcgaggacactctctctgaaggaataagacagtggtggaagctcaaacctggcccaccaccgccaaagcccgcagagcggcataaggacgacagcaggggtcttgtgcttcctgggtacaagtacctcggacccttcaacggactcgacaagggggagccggtcaacgaggcagacgccgcggccctcgagcacgacaaggcctacgaccggcagctcgacagcggagacaacccgtacctcaagtacaaccacgccgacgcggagtttcaggagcgtcttaaagaagatacgtcttttgggggcaacctcggacgagcagtcttccaggcgaaaaagagggttcttgaacctctgggcctggttgaggaacctgttaagacggctccgggaaaaaagaggccggtagagcactctcctgtggagccagactcctcctcgggaaccggaaaggcgggccagcagcctgcaagaaaaagattgaatttcggtcagactggagacgcagactccgtacctgacccccagcctctcggacagccaccagcagccccctctggtctgggaactaatacgatggctacaggcagtggcgcaccaatggcagacaataacgagggcgccgacggagtgggtaattcctcgggaaattggcattgcgattccacatggatgggcgacagagtcatcaccaccagcacccacacctgggctctgcccacctacaacaaccatctgtacaagcaaatttccagccaatcaggagcatcgaacgacaaccactactttggctacagcaccccctgggggtattttgacttcaacagattccactgccacttttcgccacgtgactggcaaagactcatcaacaacaactggggattccggcccaagagactcagcttcaagctctttaacattcaagtcaaggaggtcacgcagaatgacggtacgacgacgattgccaataaccttaccagcacggttcaggtctttactgactcggagtaccagctcccgtacgtcctcggctcggcgcatcaaggatgcctcccgccgttcccagcagacgtcttcatggtgccacagtatggatacctcaccctgaacaacgggagtcaggcggtaggacgctcttcattttactgcctggagtacttcccttctcagatgcttcgcacgggaaacaactttaccttcagctacacctttgaggacgtgccttttcacagcagctacgctcacagccaaagtctggaccgtctcatgaatcctctcatcgaccaatacctgtattacttgagcaaaacaaacgctccaagcggaaccaccacgatgtccaggcttcagttttctcaggccggagcgagtgacattcgggaccagtctagaaactggcttcctggaccctgttaccgccagcagcgagtatcaaagacagctgcggacaacaacaacagtgattactcgtggactggagctaccaagtaccacctcaatggaagagactctctggtgaacccgggcccagctatggccagccacaaggatgatgaagaaaaatattttcctcagagcggggttctcatcttcgggaaacaaggctcaaataaaactaatgtggacattgaaaaggttatgattacagacgaagaggaaatcaggaccaccaatcccgtggctacggagcagtatggttctgtatctaccaaccttcaaagcggcaacacacaagcagctacctcagatgtcaacacacaaggcgttcttcctggcatggtctggcaggacagagatgtgtacctgcaggggcccatctgggcaaagattcctcacacggacggacactttcacccttctcccctcatgggcggatttggattgaagcaccctcccccacagattctcatcaagaataccccggtacctgcgaatccttcgaccaccttcagtgcggcaaagtttgcttccttcatcacacagtattccacgggacaggtcagcgtggagatagagtgggagctgcagaaggagaacagcaaacgctggaaccccgagatccagtatacttccaactacaacaaatctgttaatgtggactttactgtggacactaatggtgtgtattcagagcctcgccccattggcaccagatacctgactcgtaatctgtaa

SEQ ID NO: 12168 - DNA, 2208 bp, Artificial Sequence
  source: /note="Description of Artificial Sequence: Synthetic polynucleotide"
atggctgccgatggttatcttccagattggctcgaggacactctctctgaaggaataagacagtggtggaagctcaaacctggcccaccaccgccaaagcccgcagagcggcataaggacgacagcaggggtcttgtgcttcctgggtacaagtacctcggacccttcaacggactcgacaagggggagccggtcaacgaggcagacgccgcggccctcgagcacgacaaggcctacgaccggcagctcgacagcggagacaacccgtacctcaagtacaaccacgccgacgcggagtttcaggagcgtcttaaagaagatacgtcttttgggggcaacctcggacgagcagtcttccaggcgaaaaagagggttcttgaacctctgggcctggttgaggaacctgttaagacggctccgggaaaaaagaggccggtagagcactctcctgtggagccagactcctcctcgggaaccggaaaggcgggccagcagcctgcaagaaaaagattgaatttcggtcagactggagacgcagactccgtacctgacccccagcctctcggacagccaccagcagccccctctggtctgggaactaatacgatggctacaggcagtggcgcaccaatggcagacaataacgagggcgccgacggagtgggtaattcctcgggaaattggcattgcgattccacatggatgggcgacagagtcatcaccaccagcacccgcacctgggctctgcccacctacaacaaccatctgtacaagcaaatttccagccaatcaggagcatcgaacgacaaccactactttggctacagcaccccctgggggtattttgacttcaacagattccactgccacttttcgccacgtgactggcaaagactcatcaacaacaactggggattccggcccaagagactcagcttcaagctctttaacattcaagtcaaggaggtcacgcagaatgacggtacgacgacgattgccaataaccttaccagcacggttcaggtctttactgactcggagtaccagctcccgtacgtcctcggctcggcgcatcaaggatgcctcccgccgttcccagcagacgtcttcatggtgccacagtatggatacctcaccctgaacaacgggagtcaggcggtaggacgctcttcattttactgcctggagtacttcccttctcagatgcttcgcacgggaaacaactttaccttcagctacacctttgaggacgtgccttttcacagcagctacgctcacagccaaagtctggaccgtctcatgaatcctctcatcgaccaatacctgtattacttgagcaaaacaaacgctccaagcggaaccaccacgatgtccaggcttcagttttctcaggccggagcgagtggcattcgggaccagtctagaaactggcttcctggaccctgttaccgccagcagcgagtatcaaagacagctgcggacaacaacaacagtgattactcgtggactggagctaccaagtaccacctcaatggaagagactctctggtgaacccgggcccagctatggccagccacaaggatgatgaagaaaaatattttcctcagagcggggttctcatcttcgggaaacaaggctcaaataaaactaatgtggacattgaaaaggttatgattacagacgaagaggaaatcaggaccaccaatcccgtggctacggagcagtatggttctgtatctaccaaccttcaaagcggcaacacacaagcagctacctcagatgtcaacacacaaggcgttcttcctggcatggtctggcaggacagagatgtgtacctgcaggggcccatctgggcaaagattcctcacacggacggacactttcacccttctcccctcatgggcggatttggattgaagcaccctcccccacagattctcatcaagaataccccggtacctgcgaatccttcgaccaccttcagtgcggcaaagtttgcttccttcatcacacagtattccacgggacaggtcagcgtggagatagagtgggagctgcagaaggagaacagcaaacgctggaaccccgagatccagtatacttccaactacaacaaatctgttaatgtggactttactgtggacactaatggtgtgtattcagagcctcgccccattggcaccagatacctgactcgtaatctgtaa

SEQ ID NO: 12169 - DNA, 2208 bp, Artificial Sequence
  source: /note="Description of Artificial Sequence: Synthetic polynucleotide"
atggctgccgatggttatcttccagattggctcgaggacactctctctgaaggaataagacagtggtggaagctcaaacctggcccaccaccgccaaagcccgcagagcggcataaggacgacagcaggggtcttgtgcttcctgggtacaagtacctcggacccttcaacggactcgacaagggggagccggtcaacgaggcagacgccgcggccctcgagcacgacaaggcctacgaccggcagctcgacagcggagacaacccgtacctcaagtacaaccacgccgacgcggagtttcaggagcgtcttaaagaagatacgtcttttgggggcaacctcggacgagtagtcttccaggcgaaaaagagggttcttgaacctctgggcctggttgaggaacctgttaagacggctccgggaaaaaagaggccggtagagcactctcctgtggagccagactcctcctcgggaaccggaaaggcgggccagcagcctgcaagaaaaagattgaatttcggtcagactggagacgcagactccgtacctgacccccagcctctcggacagccaccagcagccccctctggtctgggaactaatacgatggctacaggcagtggcgcaccaatggcagacaataacgagggcgccgacggagtgggtaattcctcgggaaattggcattgcgattccacatggatgggcgacagagtcatcaccaccagcacccgcacctgggctctgcccacctacaacaaccatctgtacaagcaaatttccagccaatcaggagcatcgaacgacaaccactactttggctacagcaccccctgggggtattttgacttcaacagattccactgccacttttcgccacgtgactggcaaagactcatcaacaacaactggggattccggcccaagagactcagcttcaagctctttaacattcaagtcaaggaggtcacgcagaatgacggtacgacgacgattgccaataaccttaccagcacggttcaggtctttactgactcggagtaccagctcccgtacgtcctcggctcggcgcatcaaggatgcctcccgccgttcccagcagacgtcttcatggtgccacagtatggatacctcaccctgaacaacgggagtcaggcggtaggacgctcttcattttactgcctggagtacttcccttctcagatgcttcgcacgggaaacaactttaccttcagctacacctttgaggacgtgccttttcacagcagctacgctcacagccaaagtctggaccgtctcatgaatcctctcatcgaccaatacctgtattacttgagcaaaacaaacgctccaagcggaaccaccacgatgtccaggcttcagttttctcaggccggagcgagtgacattcgggaccagtctagaaactggcttcctggaccctgttaccgccagcagcgagtatcaaagacagctgcggacaacaacaacagtgattactcgtggactggagctaccaagtaccacctcaatggaagagactctctggtgaacccgggcccagctatggccagccacaaggatgatgaagaaaaatattttcctcagagcggggttctcatcttcgggaaacaaggctcaaataaaactaatgtggacattgaaaaggttatgattacagacgaagaggaaatcaggaccaccaatcccgtggctacggagcagtatggttctgtatctaccaaccttcaaagcggcaacacacaagcagctacctcagatgtcaacacacaaggcgttcttcctggcatggtctggcaggacagagatgtgtacctgcaggggcccatctgggcaaagattcctcacacggacggacactttcacccttctcccctcatgggcggatttggattgaagcaccctcccccacagattctcatcaagaataccccggtacctgcgaatccttcgaccaccttcagtgcggcaaagtttgcttccttcatcacacagtattccacgggacaggtcagcgtggagatagagtgggagctgcagaaggagaacagcaaacgctggaaccccgagatccagtatacttccaactacaacaaatctgttaatgtggactttactgtggacactaatggtgtgtattcagagcctcgccccattggcaccagatacctgactcgtaatctgtaa

SEQ ID NO: 12170 - DNA, 2208 bp, Artificial Sequence
  source: /note="Description of Artificial Sequence: Synthetic polynucleotide"
atggctgccgatggttatcttccagattggctcgaggacactctctctgaaggaataagacagtggtggaagctcaaacctggcccaccaccgccaaagcccgcagagcggcataaggacgacagcaggggtcttgtgcttcctgggtacaagtacctcggacccttcaacggactcgacaagggggagccggtcaacgaggcagacgccgcggccctcgagcacgacaaggcctacgaccggcagctcgacagcggagacaacccgtacctcaagtacaaccacgccgacgcggagtttcaggagcgtcttaaagaagatacgtcttttgggggcaacctcggacgagcagtcttccaggcgaaaaagagggttcttgaacctctgggcctggttgaggaacctgttaagacggctccgggaaaaaagaggccggtagagcactctcctgtggagccagactcctcctcgggaaccggaaaggcgggccagcagcctgcaagaaaaagattgaatttcggtcagactggagacgcagactccgtacctgacccccagcctctcggacagccaccagcagccccctctggtctgggaactaatacgatggctacaggcagtggcgcaccaatggcagacaataacgagggcgccgacggagtgggtaattcctcgggaaattggcattgcgattccacatggatgggcgacagagtcatcaccaccagcacccgcacctgggctctgcccacctacaacaaccatctgtacaagcaaatttccagccaatcaggagcatcgaacgacaaccactactttggctacagcaccccctgggggtattttgacttcaacagattccactgccacttttcgccacgtgactggcaaagactcatcaacaacaactggggattccggcccaagagactcagcttcaagctctttaacattcaagtcaaggaggtcacgcagaatgacggtacgacgacgattgccaataaccttaccagcacggttcaggtctttactgactcggagtaccagctcccgtacatcctcggctcggcgcatcaaggatgcctcccgccgttcccagcagacgtcttcatggtgccacagtatggatacctcaccctgaacaacgggagtcaggcggtaggacgctcttcattttactgcctggagtacttcccttctcagatgcttcgcacgggaaacaactttaccttcagctacacctttgaggacgtgccttttcacagcagctacgctcacagccaaagtctggaccgtctcatgaatcctctcatcgaccaatacctgtattacttgagcaaaacaaacgctccaagcggaaccaccacgatgtccaggcttcagttttctcaggccggagcgagtgacattcgggaccagtctagaaactggcttcctggaccctgttaccgccagcagcgagtatcaaagacagctgcggacaacaacaacagtgattactcgtggactggagctaccaagtaccacctcaatggaagagactctctggtgaacccgggcccagctatggccagccacaaggatgatgaagaaaaatattttcctcagagcggggttctcatcttcgggaaacaaggctcaaataaaactaatgtggacattgaaaaggttatgattacagacgaagaggaaatcaggaccaccaatcccgtggctacggagcagtatggttctgtatctaccaaccttcaaagcggcaacacacaagcagctacctcagatgtcaacacacaaggcgttcttcctggcatggtctggcaggacagagatgtgtacctgcaggggcccatctgggcaaagattcctcacacggacggacactttcacccttctcccctcatgggcggatttggattgaagcaccctcccccacagattctcatcaagaataccccggtacctgcgaatccttcgaccaccttcagtgcggcaaagtttgcttccttcatcacacagtattccacgggacaggtcagcgtggagatagagtgggagctgcagaaggagaacagcaaacgctggaaccccgagatccagtatacttccaactacaacaaatctgttaatgtggactttactgtggacactaatggtgtgtattcagagcctcgccccattggcaccagatacctgactcgtaatctgtaa

SEQ ID NO: 12171 - DNA, 2208 bp, Artificial Sequence
  source: /note="Description of Artificial Sequence: Synthetic polynucleotide"
atggctgccgatggttatcttccagattggctcgaggacactctctctgaaggaataagacagtggtggaagctcaaacctggcccaccaccgccaaagcccgcagagcggcataaggacgacagcaggggtcttgtgcttcctgggtacaagtacctcggacccttcaacggactcgacaagggggagccggtcaacgaggcagacgccgcggccctcgagcacgacaaggcctacgaccggcagctcgacagcggagacaacccgtacctcaagtacaaccacgccgacgcggagtttcaggagcgtcttaaagaagatacgtcttttgggggcaacctcggacgagcagtcttccaggcgaaaaagagggttcttgaacctctgggcctggttgaggaacctgttaagacggctccgggaaaaaagaggccggtagagcactctcctgtggagccagactcctcctcgggaaccggaaaggcgggccagcagcctgcaagaaaaagattgaatttcggtcagactggagacgcagactccgtacctgacccccagcctctcggacagccaccagcagccccctctggtctgggaactaatacgatggctacaggcagtggcgcaccaatggcagacaataacgagggcgtcgacggagtgggtaattcctcgggaaattggcattgcgattccacatggatgggcgacagagtcatcaccaccagcacccgcacctgggctctgcccacctacaacaaccatctgtacaagcaaatttccagccaatcaggagcatcgaacgacaaccactactttggctacagcaccccctgggggtattttgacttcaacagattccactgccacttttcgccacgtgactggcaaagactcatcaacaacaactggggattccggcccaagagactcagcttcaagctctttaacattcaagtcaaggaggtcacgcagaatgacggtacgacgacgattgccaataaccttaccagcacggttcaggtctttactgactcggagtaccagctcccgtacgtcctcggctcggcgcatcaaggatgcctcccgccgttcccagcagacgtcttcatggtgccacagtatggatacctcaccctgaacaacgggagtcaggcggtaggacgctcttcattttactgcctggagtacttcccttctcagatgcttcgcacgggaaacaactttaccttcagctacacctttgaggacgtgccttttcacagcagctacgctcacagccaaagtctggaccgtctcatgaatcctctcatcgaccaatacctgtattacttgagcaaaacaaacgctccaagcggaaccaccacgatgtccaggcttcagttttctcaggccggagcgagtgacattcgggaccagtctagaaactggcttcctggaccctgttaccgccagcagcgagtatcaaagacagctgcggacaacaacaacagtgattactcgtggactggagctaccaagtaccacctcaatggaagagactctctggtgaacccgggcccagctatggccagccacaaggatgatgaagaaaaatattttcctcagagcggggttctcatcttcgggaaacaaggctcaaataaaactaatgtggacattgaaaaggttatgattacagacgaagaggaaatcaggaccaccaatcccgtggctacggagcagtatggttctgtatctaccaaccttcaaagcggcaacacacaagcagctacctcagatgtcaacacacaaggcgttcttcctggcatggtctggcaggacagagatgtgtacctgcaggggcccatctgggcaaagattcctcacacggacggacactttcacccttctcccctcatgggcggatttggattgaagcaccctcccccacagattctcatcaagaataccccggtacctgcgaatccttcgaccaccttcagtgcggcaaagtttgcttccttcatcacacagtattccacgggacaggtcagcgtggagatagagtgggagctgcagaaggagaacagcaaacgctggaaccccgagatccagtatacttccaactacaacaaatctgttaatgtggactttactgtggacactaatggtgtgtattcagagcctcgccccattggcaccagatacctgactcgtaatctgtaa

SEQ ID NO: 12172 - DNA, 2208 bp, Artificial Sequence
  source: /note="Description of Artificial Sequence: Synthetic polynucleotide"
atggctgccgatggttatcttccagattggctcgaggacactctctctgaaggaataagacagtggtggaagctcaaacctggcccaccaccgccaaagcccgcagagcggcataaggacgacagcaggggtcttgtgcttcctgggtacaagtacctcggacccttcaacggactcgacaagggggagccggtcaacgaggcagacgccgcggccctcgagcacgacaaggcctacgaccggcagctcgacagcggagacaacccgtacctcaagtacaaccacgccgacgcggagtttcaggagcgtcttaaagaagatacgtcttttgggggcaacctcggacgagcagtcttccaggcgaaaaagagggttcttgaacctctgggcctggttgaggaacctgttaagacggctccgggaaaaaagaggccggtagagcactctcctgtggagccagactcctcctcgggaaccggaaaggcgggccagcagcctgcaagaaaaagattgaatttcggtcagactggagacgcagactccgtacctgacccccagcctctcggacagccaccagcagccccctctggtctgggaactaatacgatggctacaggcagtggcgcaccaatggcagacaataacgagggcgccgacggagtgggtaattcctcgggaaattggcattgcgattccacatggatgggcgacagagtcatcaccaccagcacccgcacctgggctctgcccacctacaacaaccatctgtacaagcaaatttccagccaatcaggagcatcgaacgacaaccactactttggctacagcaccccctgggggtattttgacttcaacagattccactgccacttttcgccacgtgactggcaaagactcatcaacaacaactggggattccggcccaagagactcagcttcaagctctttaacattcaagtcaaggaggtcacgcagaatgacggtacgacgacgattgccaataaccttaccagcacggttcaggtctttactgactcggagtaccagctcccgtacgtcctcggctcggcgcatcaaggatgcctcccgccgttcccagcagacgtcttcatggtgccacagtatggatacctcaccctgaacaacgggagtcaggcggtaggacgctcttcattttactgcctggagtacttcccttctcagatgcttcgcacgggaaacaactttaccttcagctacacctttgaggacgtgccttttcacagcagctacgctcacagccaaagtctggaccgtctcatgaatcctctcatcgaccaatacctgtattacttgagcaaaacaaacgctccaagcggaaccaccacgatgtccaggcttcagttttctcaggccggagcgagtgacattcgggaccagtctagaaactggcttcctggaccctgttaccgccagcagcgagtatcaaagacagctgcggacaacaacaacagtgattactcgtggactggagctaccaagtaccacctcaatggaagaggctctctggtgaacccgggcccagctatggccagccacaaggatgatgaagaaaaatattttcctcagagcggggttctcatcttcgggaaacaaggctcaaataaaactaatgtggacattgaaaaggttatgattacagacgaagaggaaatcaggaccaccaatcccgtggctacggagcagtatggttctgtatctaccaaccttcaaagcggcaacacacaagcagctacctcagatgtcaacacacaaggcgttcttcctggcatggtctggcaggacagagatgtgtacctgcaggggcccatctgggcaaagattcctcacacggacggacactttcacccttctcccctcatgggcggatttggattgaagcaccctcccccacagattctcatcaagaataccccggtacctgcgaatccttcgaccaccttcagtgcggcaaagtttgcttccttcatcacacagtattccacgggacaggtcagcgtggagatagagtgggagctgcagaaggagaacagcaaacgctggaaccccgagatccagtatacttccaactacaacaaatctgttaatgtggactttactgtggacactaatggtgtgtattcagagcctcgccccattggcaccagatacctgactcgtaatctgtaa

SEQ ID NO: 12173 - DNA, 2208 bp, Artificial Sequence
  source: /note="Description of Artificial Sequence: Synthetic polynucleotide"
atggctgccgatggttatcttccagattggctcgaggacactctctctgaaggaataagacagtggtggaagctcaaacctggcccaccaccgccaaagcccgcagagcggcataaggacgacagcaggggtcttgtgcttcctgggtacaagtacctcggacccttcaacggactcgacaagggggagccggtcaacgaggcagacgccgcggccctcgagcacgacaaggcctacgaccggcagctcgacagcggagacaacccgtacctcaagtacaaccacgccgacgcggagtttcaggagcgtcttaaagaagatacgtcttttgggggcaacctcggacgagcagtcttccaggcgaaaaagagggttcttgaacctctgggcctggttgaggaacctgttaagacggctccgggaaaaaagaggccggtagagcactctcctgtggagccagactcctcctcgggaaccggaaaggcgggccagcagcctgcaagaaaaagattgaatttcggtcagactggagacgcagactccgtacctgacccccagcctctcggacagccaccagcagccccctctggtctgggaactaatacgatggctacaggcagtggcgcaccaatggcagacaataacgagggcgccgacggagtgggtaattcctcgggaaattggcattgcgattccacatggatgggcgacagagtcatcaccaccagcacccgcacctgggctctgcccacctacaacaaccatctgtacaagcaaatttccagccaatcaggagcatcgaacgacaaccactactttggctacagcaccccctgggggtattttgacttcaacagattccactgccacttttcgccacgtgactggcaaagactcatcaacaacaactggggattccggcccaagagactcagcttcaagctctttaacattcaagtcaaggaggtcacgcagaatgacggtacgacgacgattgccaataaccttaccagcacggttcaggtctttactgactcggagtaccagctcccgtacgtcctcggctcggcgcatcaaggatgcctcccgccgttcccagcagacgtcttcatggtgccacagtatggatacctcaccctgaacaacgggagtcaggcggtaggacgctcttcattttactgcctggagtacttcccttctcagatgcttcgcacgggaaacaactttaccttcagctacacctttgaggacgtgccttttcacagcagctacgctcacagccaaagtctggaccgtctcatgaatcctctcatcgaccaatacctgtattacttgagcaaaacaaacgctccaagcggaaccaccacgatgtccaggcttcagttttctcaggccggagcgagtgacattcgggaccagtctagaaactggcttcctggaccctgttaccgccagcagcgagtatcaaagacagctgcggacaacaacaacagtgattactcgtggactggagctaccaagtaccacctcaatggaagagactctctggtgaacccgggcccagctatggccagccacaaggatgatgaagaaaaatattttcctcagagcggggttctcatcttcgggaaacaaggctcaaataaaactaatgtggacattgaaaaggttatgattacagacgaagaggaaatcaggaccaccaatcccgtggctacggagcagtatggttctgtatctaccaaccttcaaagcggcaacacacaagcagctaccccagatgtcaacacacaaggcgttcttcctggcatggtctggcaggacagagatgtgtacctgcaggggcccatctgggcaaagattcctcacacggacggacactttcacccttctcccctcatgggcggatttggattgaagcaccctcccccacagattctcatcaagaataccccggtacctgcgaatccttcgaccaccttcagtgcggcaaagtttgcttccttcatcacacagtattccacgggacaggtcagcgtggagatagagtgggagctgcagaaggagaacagcaaacgctggaaccccgagatccagtatacttccaactacaacaaatctgttaatgtggactttactgtggacactaatggtgtgtattcagagcctcgccccattggcaccagatacctgactcgtaatctgtaa

SEQ ID NO: 12174 - DNA, 2208 bp, Artificial Sequence
  source: /note="Description of Artificial Sequence: Synthetic polynucleotide"
atggctgccgatggttatcttccagattggctcgaggacactctctctgaaggaataagacagtggtggaagctcaaacctggcccaccaccgccaaagcccgcagagcggcataaggacgacagcaggggtcttgtgcttcctgggtacaagtacctcggacccttcaacggactcgacaagggggagccggtcaacgaggcagacgccgcggccctcgagcacgacaaggcctacgaccggcagctcgacagcggagacaacccgtacctcaagtacaaccacgccgacgcggagtttcaggagcgtcttaaagaagatacgtcttttgggggcaacctcggacgagcagtcttccaggcgaaaaagagggttcttgaacctctgggcctggttgaggaacctgttaagacggctccgggaaaaaagaggccggtagagcactctcctgtggagccagactcctcctcgggaaccggaaaggcgggccagcagcctgcaagaaaaagattgaatttcggtcagactggagacgcagactccgtacctgacccccagcctctcggacagccaccagcagccccctctggtctgggaactaatacgatggctacaggcagtggcgcaccaatggcagacaataacgagggcgccgacggagtgggtaattcctcgggaaattggcattgcgattccacatggatgggcgacagagtcatcaccaccagcacccgcacctgggctctgcccacctacaacaaccatctgtacaagcaaatttccagccaatcaggagcatcgaacgacaaccactactttggctacagcaccccctgggggtattttgacttcaacagattccactgccacttttcgccacgtgactggcaaagactcatcaacaacaactggggattccggcccaagagactcagcttcaagctctttaacattcaagtcaaggaggtcacgcagaatgacggtacgacgacgattgccaataaccttaccagcacggttcaggtctttactgactcggagtaccagctcccgtacgtcctcggctcggcgcatcaaggatgcctcccgccgttcccagcagacgtcttcatggtgccacagtatggatacctcaccctgaacaacgggagtcaggcggtaggacgctcttcattttactgcctggagtacttcccttctcagatgcttcgcacgggaaacaactttaccttcagctacacctttgaggacgtgccttttcacagcagctacgctcacagccaaagtctggaccgtctcatgaatcctctcatcgaccaatacctgtattacttgagcaaaacaaacgctccaagcggaaccaccacgatgtccaggcttcagttttctcaggccggagcgagtgacattcgggaccagtctagaaactggcttcctggaccctgttaccgccagcagcgagtatcaaagacagctgcggacaacaacaacagtgattactcgtggactggagctaccaagtaccacctcaatggaagagactctctggtgaacccgggcccagctatggccagccacaaggatgatgaagaaaaatattttcctcagagcggggttctcatcttcgggaaacaaggctcaaataaaactaatgtggacattgaaaaggttatgattacagacgaagaggaaatcaggaccaccaatcccgtggctacggagcagtatggttctgtatctaccaaccttcaaagcggcaacacacaagcagctacctcagatgtcaacacacaaggcgttcttcctggcatggtctggcaggacagagatgtgtacctgcaggggcccatctgggcaaagattcctcacacggacggacactttcacccttctcccctcatgggcggatttggattgaagcaccctcccccacagattctcatcaagaataccccggtacctgcgaatccttcgaccaccttcagtgtggcaaagtttgcttccttcatcacacagtattccacgggacaggtcagcgtggagatagagtgggagctgcagaaggagaacagcaaacgctggaaccccgagatccagtatacttccaactacaacaaatctgttaatgtggactttactgtggacactaatggtgtgtattcagagcctcgccccattggcaccagatacctgactcgtaatctgtaa

SEQ ID NO: 12175 - DNA, 2208 bp, Artificial Sequence
  source: /note="Description of Artificial Sequence: Synthetic polynucleotide"
atggctgccgatggttatcttccagattggctcgaggacactctctctgaaggaataagacagtggtggaagctcaaacctggcccaccaccgccaaagcccgcagagcggcataaggacgacagcaggggtcttgtgcttcctgggtacaagtacctcggacccttcaacggactcgacaagggggagccggtcaacgaggcagacgccgcggccctcgagcacgacaaggcctacgaccggcagctcgacagcggagacaacccgtacctcaagtacaaccacgccgacgcggagtttcaggagcgtcttaaagaagatacgtcttttgggggcaacctcggacgagcagtcttccaggcgaaaaagagggttcttgaacctctgggcctggttgaggaacctgttaagacggctccgggaaaaaagaggccggtagagcactctcctgtggagccagactcctcctcgggaaccggaaaggcgggccagcagcctgcaagaaaaagattgaatttcggtcagactggagacgcagactccgtacctgacccccagcctctcggacagccaccagcagccccctctggtctgggaactaatacgatggctacaggcagtggcgcaccaatggcagacaataacgagggcgccgacggagtgggtaattcctcgggaaattggcattgcgattccacatggatgggcgacagagtcatcaccaccagcacccgcacctgggctctgcccacctacaacaaccatctgtacaagcaaatttccagccaatcaggagcatcgaacgacaaccactactttggctacagcaccccctgggggtattttgacttcaacagattccactgccacttttcgccacgtgactggcaaagactcatcaacaacaactggggattccggcccaagagactcagcttcaagctctttaacattcaagtcaaggaggtcacgcagaatgacggtacgacgacgattgccaataaccttaccagcacggttcaggtctttactgactcggagtaccagctcccgtacgtcctcggctcggcgcatcaaggatgcctcccgccgttcccagcagacgtcttcatggtgccacagtatggatacctcaccctgaacaacgggagtcaggcggtaggacgctcttcattttactgcctggagtacttcccttctcagatgcttcgcacgggaaacaactttaccttcagctacacctttgaggacgtgccttttcgcagcagctacgctcacagccaaagtctggaccgtctcatgaatcctctcatcgaccaatacctgtattacttgagcaaaacaaacgctccaagcggaaccaccacgatgtccaggcttcagttttctcaggccggagcgagtgacattcgggaccagtctagaaactggcttcctggaccctgttaccgccagcagcgagtatcaaagacagctgcggacaacaacaacagtgattactcgtggactggagctaccaagtaccacctcaatggaagagactctctggtgaacccgggcccagctatggccagccacaaggatgatgaagaaaaatattttcctcagagcggggttctcatcttcgggaaacaaggctcaaataaaactaatgtggacattgaaaaggttatgattacagacgaagaggaaatcaggaccaccaatcccgtggctacggagcagtatggttctgtatctaccaaccttcaaagcggcaacacacaagcagctacctcagatgtcaacacacaaggcgttcttcctggcatggtctggcaggacagagatgtgtacctgcaggggcccatctgggcaaagattcctcacacggacggacactttcacccttctcccctcatgggcggatttggattgaagcaccctcccccacagattctcatcaagaataccccggtacctgcgaatccttcgaccaccttcagtgcggcaaagtttgcttccttcatcacacagtattccacgggacaggtcagcgtggagatagagtgggagctgcagaaggagaacagcaaacgctggaaccccgagatccagtatacttccaactacaacaaatctgttaatgtggactttactgtggacactaatggtgtgtattcagagcctcgccccattggcaccagatacctgactcgtaatctgtaa

SEQ ID NO: 12176 - DNA, 2208 bp, Artificial Sequence
  source: /note="Description of Artificial Sequence: Synthetic polynucleotide"
atggctgccgatggttatcttccagattggctcgaggacactctctctgaaggaataagacagtggtggaagctcaaacctggcccaccaccgccaaagcccgcagagcggcataaggacgacagcaggggtcttgtgcttcctgggtacaagtacctcggacccttcaacggactcgacaagggggagccggtcaacgaggcagacgccgcggccctcgagcacgacaaggcctacgaccggcagctcgacagcggagacaacccgtacctcaagtacaaccacgccgacgcggagtttcaggagcgtcttaaagaagatacgtcttttgggggcaacctcggacgagcagtcttccaggcgaaaaagagggttcttgaacctctgggcctggttgaggaacctgttaagacggctccgggaaaaaagaggccggtagagcactctcctgtggagccagactcctcctcgggaaccggaaaggcggaccagcagcctgcaagaaaaagattgaatttcggtcagactggagacgcagactccgtacctgacccccagcctctcggacagccaccagcagccccctctggtctgggaactaatacgatggctacaggcagtggcgcaccaatggcagacaataacgagggcgccgacggagtgggtaattcctcgggaaattggcattgcgattccacatggatgggcgacagagtcatcaccaccagcacccgcacctgggctctgcccacctacaacaaccatctgtacaagcaaatttccagccaatcaggagcatcgaacgacaaccactactttggctacagcaccccctgggggtattttgacttcaacagattccactgccacttttcgccacgtgactggcaaagactcatcaacaacaactggggattccggcccaagagactcagcttcaagctctttaacattcaagtcaaggaggtcacgcagaatgacggtacgacgacgattgccaataaccttaccagcacggttcaggtctttactgactcggagtaccagctcccgtacgtcctcggctcggcgcatcaaggatgcctcccgccgttcccagcagacgtcttcatggtgccacagtatggatacctcaccctgaacaacgggagtcaggcggtaggacgctcttcattttactgcctggagtacttcccttctcagatgcttcgcacgggaaacaactttaccttcagctacacctttgaggacgtgccttttcacagcagctacgctcacagccaaagtctggaccgtctcatgaatcctctcatcgaccaatacctgtattacttgagcaaaacaaacgctccaagcggaaccaccacgatgtccaggcttcagttttctcaggccggagcgagtgacattcgggaccagtctagaaactggcttcctggaccctgttaccgccagcagcgagtatcaaagacagctgcggacaacaacaacagtgattactcgtggactggagctaccaagtaccacctcaatggaagagactctctggtgaacccgggcccagctatggccagccacaaggatgatgaagaaaaatattttcctcagagcggggttctcatcttcgggaaacaaggctcaaataaaactaatgtggacattgaaaaggttatgattacagacgaagaggaaatcaggaccaccaatcccgtggctacggagcagtatggttctgtatctaccaaccttcaaagcggcaacacacaagcagctacctcagatgtcaacacacaaggcgttcttcctggcatggtctggcaggacagagatgtgtacctgcaggggcccatctgggcaaagattcctcacacggacggacactttcacccttctcccctcatgggcggatttggattgaagcaccctcccccacagattctcatcaagaataccccggtacctgcgaatccttcgaccaccttcagtgcggcaaagtttgcttccttcatcacacagtattccacgggacaggtcagcgtggagatagagtgggagctgcagaaggagaacagcaaacgctggaaccccgagatccagtatacttccaactacaacaaatctgttaatgtggactttactgtggacactaatggtgtgtattcagagcctcgccccattggcaccagatacctgactcgtaatctgtaa

SEQ ID NO: 12177 - DNA, 2208 bp, Artificial Sequence
  source: /note="Description of Artificial Sequence: Synthetic polynucleotide"
atggctgccgatggttatcttccagattggctcgaggacactctctctgaaggaataagacagtggtggaagctcaaacctggcccaccaccgccaaagcccgcagagcggcataaggacgacagcaggggtcttgtgcttcctgggtacaagtacctcggacccttcaacggactcgacaagggggagccggtcaacgaggcagacgccgcggccctcgagcacgacaaggcctacgaccggcagctcgacagcggagacaacccgtacctcaagtacaaccacgccgacgcggagtttcaggagcgtcttaaagaagatacgtcttttgggggcaacctcggacgagcagtcttccaggcgaaaaagagggttcttgaacctctgggcctggttgaggaacctgttaagacggctccgggaaaaaagaggccggtagagcactctcctgtggagccagactcctcctcgggaaccggaaaggcgggccagcagcctgcaagaaaaagattgaatttcggtcagactggagacgcagactccgtacctgacccccagcctctcggacagccaccagcagccccctctggtctgggaactaatacgatggctacaggcagtggcgcaccaatggcagacaataacgagggcgccgacggagtgggtaattcctcgggaaattggcattgcgattccacatggatgggcgacagagtcatcaccaccagcacccgcacctgggctctgcccacctacaacaaccatctgtacaagcaaatttccagccaatcaggagcatcgaacgacaaccactactttggctacagcaccccctgggggtattttgacttcaacagattccactgccacttttcgccacgtgactggcaaagactcatcaacaacaactggggattccggcccaagagactcagcttcaagctctttaacattcaagtcaaggaggtcacgcagaatgacggtacgacgacgattgccaataaccttaccaacacggttcaggtctttactgactcggagtaccagctcccgtacgtcctcggctcggcgcatcaaggatgcctcccgccgttcccagcagacgtcttcatggtgccacagtatggatacctcaccctgaacaacgggagtcaggcggtaggacgctcttcattttactgcctggagtacttcccttctcagatgcttcgcacgggaaacaactttaccttcagctacacctttgaggacgtgccttttcacagcagctacgctcacagccaaagtctggaccgtctcatgaatcctctcatcgaccaatacctgtattacttgagcaaaacaaacgctccaagcggaaccaccacgatgtccaggcttcagttttctcaggccggagcgagtgacattcgggaccagtctagaaactggcttcctggaccctgttaccgccagcagcgagtatcaaagacagctgcggacaacaacaacagtgattactcgtggactggagctaccaagtaccacctcaatggaagagactctctggtgaacccgggcccagctatggccagccacaaggatgatgaagaaaaatattttcctcagagcggggttctcatcttcgggaaacaaggctcaaataaaactaatgtggacattgaaaaggttatgattacagacgaagaggaaatcaggaccaccaatcccgtggctacggagcagtatggttctgtatctaccaaccttcaaagcggcaacacacaagcagctacctcagatgtcaacacacaaggcgttcttcctggcatggtctggcaggacagagatgtgtacctgcaggggcccatctgggcaaagattcctcacacggacggacactttcacccttctcccctcatgggcggatttggattgaagcaccctcccccacagattctcatcaagaataccccggtacctgcgaatccttcgaccaccttcagtgcggcaaagtttgcttccttcatcacacagtattccacgggacaggtcagcgtggagatagagtgggagctgcagaaggagaacagcaaacgctggaaccccgagatccagtatacttccaactacaacaaatctgttaatgtggactttactgtggacactaatggtgtgtattcagagcctcgccccattggcaccagatacctgactcgtaatctgtaa

SEQ ID NO: 12178 - DNA, 2208 bp, Artificial Sequence
  source: /note="Description of Artificial Sequence: Synthetic polynucleotide"
atggctgccgatggttatcttccagattggctcgaggacactctctctgaaggaataagacagtggtggaagctcaaacctggcccaccaccgccaaagcccgcagagcggcataaggacgacagcaggggtcttgtgcttcctgggtacaagtacctcggacccttcaacggactcgacaagggggagccggtcaacgaggcagacgccgcggccctcgagcacgacaaggcctacgaccggcagctcgacagcggagacaacccgtacctcaagtacaaccacgccgacgcggagtttcaggagcgtcttaaagaagatacgtcttttgggggcaacctcggacgagcagtcttccaggcgaaaaagagggttcttgaacctctgggcctggttgaggaacctgttaagacggctccgggaaaaaagaggccggtagagcactctcctgtggagccagactcctcctcgggaaccggaaaggcgggccagcagcctgcaagaaaaagattgaatttcggtcagactggagacgcagactccgtacctgacccccagcctctcggacagccaccagcagccccctctggtctgggaactaatacgatggctacaggcagtggcgcaccaatggcagacaataacgagggcgccgacggagtgggtaattcctcgggaaattggcattgcgattccacatggatgggcgacagagtcatcaccaccagcacccgcacctgggctctgcccacctacaacaaccatctgtacaagcaaatttccagccaatcaggagcatcgaacgacaaccactactttggctacaacaccccctgggggtattttgacttcaacagattccactgccacttttcgccacgtgactggcaaagactcatcaacaacaactggggattccggcccaagagactcagcttcaagctctttaacattcaagtcaaggaggtcacgcagaatgacggtacgacgacgattgccaataaccttaccagcacggttcaggtctttactgactcggagtaccagctcccgtacgtcctcggctcggcgcatcaaggatgcctcccgccgttcccagcagacgtcttcatggtgccacagtatggatacctcaccctgaacaacgggagtcaggcggtaggacgctcttcattttactgcctggagtacttcccttctcagatgcttcgcacgggaaacaactttaccttcagctacacctttgaggacgtgccttttcacagcagctacgctcacagccaaagtctggaccgtctcatgaatcctctcatcgaccaatacctgtattacttgagcaaaacaaacgctccaagcggaaccaccacgatgtccaggcttcagttttctcaggccggagcgagtgacattcgggaccagtctagaaactggcttcctggaccctgttaccgccagcagcgagtatcaaagacagctgcggacaacaacaacagtgattactcgtggactggagctaccaagtaccacctcaatggaagagactctctggtgaacccgggcccagctatggccagccacaaggatgatgaagaaaaatattttcctcagagcggggttctcatcttcgggaaacaaggctcaaataaaactaatgtggacattgaaaaggttatgattacagacgaagaggaaatcaggaccaccaatcccgtggctacggagcagtatggttctgtatctaccaaccttcaaagcggcaacacacaagcagctacctcagatgtcaacacacaaggcgttcttcctggcatggtctggcaggacagagatgtgtacctgcaggggcccatctgggcaaagattcctcacacggacggacactttcacccttctcccctcatgggcggatttggattgaagcaccctcccccacagattctcatcaagaataccccggtacctgcgaatccttcgaccaccttcagtgcggcaaagtttgcttccttcatcacacagtattccacgggacaggtcagcgtggagatagagtgggagctgcagaaggagaacagcaaacgctggaaccccgagatccagtatacttccaactacaacaaatctgttaatgtggactttactgtggacactaatggtgtgtattcagagcctcgccccattggcaccagatacctgactcgtaatctgtaa

SEQ ID NO: 12179 - DNA, 2208 bp, Artificial Sequence
  source: /note="Description of Artificial Sequence: Synthetic polynucleotide"
atggctgccgatggttatcttccagattggctcgaggacactctctctgaaggaataagacagtggtggaagctcaaacctggcccaccaccgccaaagcccgcagagcggcataaggacgacagcaggggtcttgtgcttcctgggtacaagtacctcggacccttcaacggactcgacaagggggagccggtcaacgaggcagacgccgcggccctcgagcacgacaaggcctacgaccggcagctcgacagcggagacaacccgtacctcaagtacaaccacgccgacgcggagtttcaggagcgtcttaaagaagatacgtcttttgggggcaacctcggacgagcagtcttccaggcgaaaaagagggttcttgaacctctgggcctggttgaggaacctgttaagacggctccgggaaaaaagaggccggtagagcactctcctgtggagccagactcctcctcgggaaccggaaaggcgggccagcagcctgcaagaaaaagattgaatttcggtcagactggaggcgcagactccgtacctgacccccagcctctcggacagccaccagcagccccctctggtctgggaactaatacgatggctacaggcagtggcgcaccaatggcagacaataacgagggcgccgacggagtgggtaattcctcgggaaattggcattgcgattccacatggatgggcgacagagtcatcaccaccagcacccgcacctgggctctgcccacctacaacaaccatctgtacaagcaaatttccagccaatcaggagcatcgaacgacaaccactactttggctacagcaccccctgggggtattttgacttcaacagattccactgccacttttcgccacgtgactggcaaagactcatcaacaacaactggggattccggcccaagagactcagcttcaagctctttaacattcaagtcaaggaggtcacgcagaatgacggtacgacgacgattgccaataaccttaccagcacggttcaggtctttactgactcggagtaccagctcccgtacgtcctcggctcggcgcatcaaggatgcctcccgccgttcccagcagacgtcttcatggtgccacagtatggatacctcaccctgaacaacgggagtcaggcggtaggacgctcttcattttactgcctggagtacttcccttctcagatgcttcgcacgggaaacaactttaccttcagctacacctttgaggacgtgccttttcacagcagctacgctcacagccaaagtctggaccgtctcatgaatcctctcatcgaccaatacctgtattacttgagcaaaacaaacgctccaagcggaaccaccacgatgtccaggcttcagttttctcaggccggagcgagtgacattcgggaccagtctagaaactggcttcctggaccctgttaccgccagcagcgagtatcaaagacagctgcggacaacaacaacagtgattactcgtggactggagctaccaagtaccacctcaatggaagagactctctggtgaacccgggcccagctatggccagccacaaggatgatgaagaaaaatattttcctcagagcggggttctcatcttcgggaaacaaggctcaaataaaactaatgtggacattgaaaaggttatgattacagacgaagaggaaatcaggaccaccaatcccgtggctacggagcagtatggttctgtatctaccaaccttcaaagcggcaacacacaagcagctacctcagatgtcaacacacaaggcgttcttcctggcatggtctggcaggacagagatgtgtacctgcaggggcccatctgggcaaagattcctcacacggacggacactttcacccttctcccctcatgggcggatttggattgaagcaccctcccccacagattctcatcaagaataccccggtacctgcgaatccttcgaccaccttcagtgcggcaaagtttgcttccttcatcacacagtattccacgggacaggtcagcgtggagatagagtgggagctgcagaaggagaacagcaaacgctggaaccccgagatccagtatacttccaactacaacaaatctgttaatgtggactttactgtggacactaatggtgtgtattcagagcctcgccccattggcaccagatacctgactcgtaatctgtaa

SEQ ID NO: 12180 - DNA, 2208 bp, Artificial Sequence
  source: /note="Description of Artificial Sequence: Synthetic polynucleotide"
atggctgccgatggttatcttccagattggctcgaggacactctctctgaaggaataagacagtggtggaagctcaaacccggcccaccaccaccaaggcccgcagagcggcatcaggacgacagcaggggtcttgtgcttcctgggtacaagtacctcggacccttcaacggactcgacaaaggagagccggtcaacgaggcagacgctgcggccctcgagcacgacaaggcctacgaccggcagctcgacagcggagacaacccgtacctcaagtacaaccacgccgacgcggagtttcaggagcgtcttaaagaagatacgtcttttgggggcaacctcggacgagcagtcttccaggcgaaaaagagggttcttgaacctctgggcctggttgaggaacctgttaagacggctccgggaaaaaagaggccggtagagcactctcctgcggagccagactcctcctcgggaaccggaaaagcgggccagcagcctgcaagaaagagattgaatttcggtcagactggagacgcagactccgtacctgacccccagcctctcggacagccaccagcagcccccacaagtttgggatctactacaatggctacaggcagtggcgcaccaatggcagacaataacgagggtgccgatggagtgggtaattcctcaggaaattggcattgcgattcccaatggctgggcgacagagtcatcaccaccagcacccgaacctgggccctgcccacctacaacaaccacctctacaagcaaatctccagccaatcaggagcatcgaacgacaaccactactttggctacagcaccccttgggggtattttgacttcaacagattccactgtcacttctccccacgtgactggcaaagactcatcaacaacaactggggattccgacccaagagactcaacttcaagctctttaacattcaagtcaaagaggtcacgcagaatgacggtacgacgacgattgccaataaccttaccagcacggttcaggtgtttactgactcggagtaccagctcccgtacgtcctcggctcggcgcatcaaggatgcctcccgccgtttccagcggacgtcttcatggtcccacagtatggatacctcaccctgaacaacgggagtcaggcggtaggacgctcttccctttactgcctggagtactttccttctcagatgctgcgtaccggaaacaactttaccttcagctacacctttgaggacgtgcccttccacagcagctacgctcacagccagagtttggaccggctgatgaatcctctgatcgaccagtatctgtattatctgaacaggacacaatcaaatagtggaactcttcagcagtctaggctactgtttagccaagctggacccaccagcatgtcccttcaagctaaaaactggctgcctggaccttgctacagacagcagcgtctgtcaaagcaggcaaacgacaacaacaacagcaactttccctggactgcggctacaaagtatcatctaaatggtcgggactcgttggttaatccaggaccagctatggccagccacaaagacgatgaagaaaagtttttccccatgcatggaaccctgatatttggtaaacaaggaacaaatgctaacgacgcggatttggaacatgtcatgattacagatgaagaagaaatcaggaccaccaatcccgtggctacagagcagtacggaaacgtgtcaaataatttgcaaaactcaaatactggtccaactacagaaaatgtcaatcaccagggagcgttacctggtatggtgtggcaggatcgagacgtgtacctgcagggacccatttgggccaagattcctcacaccgacggacactttcacccttctccactgatgggaggttttggactcaaacacccgcctcctcaaatcatgatcaaaaacactcctgttccagccaatcctcctacaaacttcagcgcggcaaagtttgcttccttcatcacacagtattccacgggacaggtcagcgtggagatcgagtgggagctgcagaaggagaacagcaaacgctggaaccccgagatccagtacacttccaactacaacaaatctgttaatgtggactttactgtggacgctaatggtgtgtattcagagcctcgccccattggcaccagatacctgactcgtaatctgtaa

SEQ ID NO: 12181 - DNA, 2208 bp, Artificial Sequence
  source: /note="Description of Artificial Sequence: Synthetic polynucleotide"
atggctgccgatggttatcttccagattggctcgaggacactctctctgaaggaataagacagtggtggaagctcaaacctggcccaccaccaccaaggcccgcagagcggcatcaggacgacagcaggggtcttgtgcttcctgggtacaagtacctcggacccttcaacggactcgacaaaggagagccggtcaacgaggcagacgctgcggccctcgagcacgacaaggcctacgaccggcagctcgacagcggagacaacccgtacctcaagtacaaccacgccgacgcggagtttcaggagcgtcttaaagaagatacgtcttttgggggcaacctcggacgagcagtcttccaggcgaaaaagagggttcttgaacctctgggcctggttgaggaacctgttaagacggctccgggaaaaaagaggccggtagagcactctcctgcggagccagactcctcctcgggaaccggaaaagcgggccagcagcctgcaagaaagagattgaatttcggtcagactggagacgcagactccgtacctgacccccagcctctcggacagccaccagcagcccccacaagtttgggatctactacaatggctacaggcagtggcgcaccaatggcagacaataacgagggtgccgatggagtgggtaattcctcaggaaattggcattgcgatccccaatggctgggcgacagagtcatcaccaccagcacccgaacctgggccctgcccacctacaacaaccacctctacaagcaaatctccagccaatcaggagcatcgaacgacaaccactactttggctacagcaccccttgggggtattttgacttcaacagattccactgtcacttctccccacgtgactggcaaagactcatcaacaacaactggggattccgacccaagagactcaacttcaagctctttaacattcaagtcaaagaggtcacgcagaatgacggtacgacgacgattgccaataaccttaccagcacggttcaggtgtttactgactcggagtaccagctcccgtacgtcctcggctcggcgcatcaaggatgcctcccgccgtttccagcggacgtcttcatggtcccacagtatggatacctcaccctgaacaacgggagtcaggcggtaggacgctcttccttttactgcctggagtactttccttctcagatgctgcgtaccggaaacaactttaccttcagctacacctttgaggacgtgcccttccacagcagctacgctcacagccagagtttggaccggctgatgaatcctctgatcgaccagtatctgtattatctgaacaggacacaatcaaatagtggaactcttcagcagtctaggctactgtttagccaagctggacccaccagcatgtcccttcaagctaaaaactggctgcctggaccttgctacagacagcagcgtctgtcaaagcaggcaaacgacaacaacaacagcaactttccctggactgcggctacaaagtatcatctaaatggtcgggactcgttggttaatccaggaccagctatggccagccacaaagacgatgaagaaaagtttttccccatgcatggaaccctgatatttggtaaacaaggaacaaatgctaacgacgcggatttggaacatgtcatgattacagatgaagaagaaatcaggaccaccaatcccgtggctacagagcagtacggaaacgtgtcaaataatttgcaaaactcaaatactggtccaactacagaaaatgtcaatcaccagggagcgttacctggtatggtgtggcaggatcgagacgtgtacctgcagggacccatttgggccaagattcctcacaccgacggacactttcacccttctccactgatgggaggttttggactcaaacacccgcctcctcaaatcatgatcaaaaacactcctgttccagccaatcctcctacaaacttcagcgcggcaaagtttgcttccttcatcacacagtattccacgggacaggtcagcgtggagatcgagtgggagctgcagaaggagaacagcaaacgctggaaccccgagatccagtacacttccaactacaacaaatctgttaatgtggactttactgtggacgctaatggtgtgtattcagagcctcgccccattggcaccagatacctgactcgtaatctgtaa

SEQ ID NO: 12182 - DNA, 2208 bp, Artificial Sequence
  source: /note="Description of Artificial Sequence: Synthetic polynucleotide"
atggctgccgatggttatcttccagattggctcgaggacactctctctgaaggaataagacagtggtggaagctcaaacctggcccaccaccaccaaggcccgcagagcggcatcaggacgacagcaggggtcttgtgcttcctgggtacaagtacctcggacccttcaacggactcgacaaaggagagccggtcaacgaggcagacgctgcggccctcgagcacgacaaggcctacgaccggcagctcgacagcggagacaacccgtacctcaagtacaaccacgccgacgcggagtttcaggagcgtcttaaagaagatacgtcttttgggggcaacctcggacgagcagtctcccaggcgaaaaagagggttcttgaacctctgggcctggttgaggaacctgttaagacggctccgggaaaaaagaggccggtagagcactctcctgcggagccagactcctcctcgggaaccggaaaagcgggccagcagcctgcaagaaagagattgaatttcggtcagactggagacgcagactccgtacctgacccccagcctctcggacagccaccagcagcccccacaagtttgggatctactacaatggctacaggcagtggcgcaccaatggcagacaataacgagggtgccgatggagtgggtaattcctcaggaaattggcattgcgattcccaatggctgggcgacagagtcatcaccaccagcacccgaacctgggccctgcccacctacaacaaccacctctacaagcaaatctccagccaatcaggagcatcgaacgacaaccactactttggctacagcaccccttgggggtattttgacttcaacagattccactgtcacttctccccacgtgactggcaaagactcatcaacaacaactggggattccgacccaagagactcaacttcaagctctttaacattcaagtcaaagaggtcacgcagaatgacggtacgacgacgattgccaataaccttaccagcacggttcaggtgtttactgactcggagtaccagctcccgtacgtcctcggctcggcgcatcaaggatgcctcccgccgtttccagcggacgtcttcatggtcccacagtatggatacctcaccctgaacaacgggagtcaggcggtaggacgctcttccttttactgcctggagtactttccttctcagatgctgcgtaccggaaacaactttaccttcagctacacctttgaggacgtgcccttccacagcagctacgctcacagccagagtttggaccggctgatgaatcctctgatcgaccagtatctgtattatctgaacaggacacaatcaaatagtggaactcttcagcagtctaggctactgtttagccaagctggacccaccagcatgtcccttcaagctaaaaactggctgcctggaccttgctacagacagcagcgtctgtcaaagcaggcaaacgacaacaacaacagcaactttccctggactgcggctacaaagtatcatctaaatggtcgggactcgttggttaatccaggaccagctatggccagccacaaagacgatgaagaaaagtttttccccatgcatggaaccctgatatttggtaaacaaggaacaaatgctaacgacgcggatttggaacatgtcatgattacagatgaagaagaaatcaggaccaccaatcccgtggctacagagcagtacggaaacgtgtcaaataatttgcaaaactcaaatactggtccaactacagaaaatgtcaatcaccagggagcgttacctggtatggtgtggcaggatcgagacgtgtacctgcagggacccatttgggccaagattcctcacaccgacggacactttcacccttctccactgatgggaggttttggactcaaacacccgcctcctcaaatcatgatcaaaaacactcctgttccagccaatcctcctacaaacttcagcgcggcaaagtttgcttccttcatcacacagtattccacgggacaggtcagcgtggagatcgagtgggagctgcagaaggagaacagcaaacgctggaaccccgagatccagtacacttccaactacaacaaatctgttaatgtggactttactgtggacgctaatggtgtgtattcagagcctcgccccattggcaccagatacctgactcgtaatctgtaa

SEQ ID NO: 12183 - DNA, 2208 bp, Artificial Sequence
  source: /note="Description of Artificial Sequence: Synthetic polynucleotide"
atggctgccgatggttatcttccagattggctcgaggacactctctctgaaggaataagacagtggtggaagctcaaacctggcccaccaccaccaaggcccgcagagcggcatcaggacgacagcaggggtcttgtgcttcctgggtacaagtacctcggacccttcaacggactcgacaaaggagagccggtcaacgaggcagacgctgcggccctcgagcacgacaaggcctacgaccggcagctcgacagcggagacaacccgtacctcaagtacaaccacgccgacgcggagtttcaggagcgtcttaaagaagatacgtcttttgggggcaacctcggacgagcagtcttccaggcgaaaaagagggttcttgaacctctgggcctggttgaggaacctgttaagacggctccgggaaaaaagaggccggtagagcactctcctgcggagccagactcctcctcgggaaccggaaaagcgggccagcagcctgcaagaaagagattgaatttcggtcagactggagacgcagactccgtacctgacccccagcctctcggacagccaccagcagcccccacaagtttgggatctactacaatggctacaggcagtggcgcaccaatggcagacaataacgagggtgccgatggagtgggtaattcctcaggaaattggcattgcgattcccaatggctgggcgacagagtcatcaccaccagcacccgaacctgggccctgcccacctacaacaaccacctctacaagcaaatctccagccaatcaggagcatcgaacgacaaccactactttggctacagcaccccttgggggtattttgacttcaacagattccactgtcacttctccccacgtgactggcaaagactcatcaacaacaactggggattccgacccaagagactcaacttcaagctctttaacattcaagtcaaagaggtcacgcagaatgacggtacgacgacgattgccaataaccttaccagcacggttcaggtgtttactgactcggagtaccagctcccgtacgtcctcggctcggcgcatcaaggatgcctcccgccgtttccagcggacgtcttcatggtcccacagtatggatacctcaccctgaacaacgggagtcaggcggtaggacgctcttccttttactgcctggagtactttccttctcagatgctgcgtaccggaaacaactttaccttcagctacacctttgaggacgtgcccttccacagcagctacgctcacagccagagtttggaccggctgatgagtcctctgatcgaccagtatctgtattatctgaacaggacacaatcaaatagtggaactcttcagcagtctaggctactgtttagccaagctggacccaccagcatgtcccttcaagctaaaaactggctgcctggaccttgctacagacagcagcgtctgtcaaagcaggcaaacgacaacaacaacagcaactttccctggactgcggctacaaagtatcatctaaatggtcgggactcgttggttaatccaggaccagctatggccagccacaaagacgatgaagaaaagtttttccccatgcatggaaccctgatatttggtaaacaaggaacaaatgctaacgacgcggatttggaacatgtcatgattacagatgaagaagaaatcaggaccaccaatcccgtggctacagagcagtacggaaacgtgtcaaataatttgcaaaactcaaatactggtccaactacagaaaatgtcaatcaccagggagcgttacctggtatggtgtggcaggatcgagacgtgtacctgcagggacccatttgggccaagattcctcacaccgacggacactttcacccttctccactgatgggaggttttggactcaaacacccgcctcctcaaatcatgatcaaaaacactcctgttccagccaatcctcctacaaacttcagcgcggcaaagtttgcttccttcatcacacagtattccacgggacaggtcagcgtggagatcgagtgggagctgcagaaggagaacagcaaacgctggaaccccgagatccagtacacttccaactacaacaaatctgttaatgtggactttactgtggacgctaatggtgtgtattcagagcctcgccccattggcaccagatacctgactcgtaatctgtaa

SEQ ID NO: 12184 - DNA, 2208 bp, Artificial Sequence
  source: /note="Description of Artificial Sequence: Synthetic polynucleotide"
atggctgccgatggttatcttccagattggctcgaggacactctctctgaaggaataagacagtggtggaagctcaaacctggcccaccaccaccaaggcccgcagagcggcatcaggacgacagcaggggtcttgtgcttcctgggtacaagtacctcggacccttcaacggactcgacaaaggagagccggtcaacgaggcagacgctgcggccctcgagcacgacaaggcctacgaccggcagctcgacagcggagacaacccgtacctcaagtacaaccacgccgacgcggagtttcaggagcgtcttaaagaagatacgtcttttgggggcaacctcggacgagcagtcttccaggcgaaaaagagggttcttgaacctctgggcctggttgaggaacctgttaagacggctccgggaaaaaagaggccggtagagcactctcctgcggagccagactcctcctcgggaaccggaaaagcgggccagcagcctgcaagaaagagattgaatttcggtcagactggagacgcagactccgtacctgacccccagcctctcggacagccaccagcagcccccacaagtttgggatctactacaatggctacaggcagtggcgcaccaatggcaggcaataacgagggtgccgatggagtgggtaattcctcaggaaattggcattgcgattcccaatggctgggcgacagagtcatcaccaccagcacccgaacctgggccctgcccacctacaacaaccacctctacaagcaaatctccagccaatcaggagcatcgaacgacaaccactactttggctacagcaccccttgggggtattttgacttcaacagattccactgtcacttctccccacgtgactggcaaagactcatcaacaacaactggggattccgacccaagagactcaacttcaagctctttaacattcaagtcaaagaggtcacgcagaatgacggtacgacgacgattgccaataaccttaccagcacggttcaggtgtttactgactcggagtaccagctcccgtacgtcctcggctcggcgcatcaaggatgcctcccgccgtttccagcggacgtcttcatggtcccacagtatggatacctcaccctgaacaacgggagtcaggcggtaggacgctcttccttttactgcctggagtactttccttctcagatgctgcgtaccggaaacaactttaccttcagctacacctttgaggacgtgcccttccacagcagctacgctcacagccagagtttggaccggctgatgaatcctctgatcgaccagtatctgtattatctgaacaggacacaatcaaatagtggaactcttcagcagtctaggctactgtttagccaagctggacccaccagcatgtcccttcaagctaaaaactggctgcctggaccttgctacagacagcagcgtctgtcaaagcaggcaaacgacaacaacaacagcaactttccctggactgcggctacaaagtatcatctaaatggtcgggactcgttggttaatccaggaccagctatggccagccacaaagacgatgaagaaaagtttttccccatgcatggaaccctgatatttggtaaacaaggaacaaatgctaacgacgcggatttggaacatgtcatgattacagatgaagaagaaatcaggaccaccaatcccgtggctacagagcagtacggaaacgtgtcaaataatttgcaaaactcaaatactggtccaactacagaaaatgtcaatcaccagggagcgttacctggtatggtgtggcaggatcgagacgtgtacctgcagggacccatttgggccaagattcctcacaccgacggacactttcacccttctccactgatgggaggttttggactcaaacacccgcctcctcaaatcatgatcaaaaacactcctgttccagccaatcctcctacaaacttcagcgcggcaaagtttgcttccttcatcacacagtattccacgggacaggtcagcgtggagatcgagtgggagctgcagaaggagaacagcaaacgctggaaccccgagatccagtacacttccaactacaacaaatctgttaatgtggactttactgtggacgctaatggtgtgtattcagagcctcgccccattggcaccagatacctgactcgtaatctgtaa

SEQ ID NO: 12185 - DNA, 2208 bp, Artificial Sequence
  source: /note="Description of Artificial Sequence: Synthetic polynucleotide"
atggctgccgatggttatcttccagattggctcgaggacactctctctgaaggaataagacagtggtggaagctcaaacctggcccaccaccaccaaggcccgcagagcggcatcaggacgacagcaggggtcttgtgcttcctgggtacaagtacctcggacccttcaacggactcgacaaaggagagccggtcaacgaggcagacgctgcggccctcgagcacgacaaggcctacgaccggcagctcgacagcggagacaacccgtacctcaagtacaaccacgccgacgcggagtttcaggagcgtcttaaagaagatacgtcttttgggggcaacctcggacgagcagtcttccaggcgaaaaagagggttcttgaacctctgggcctggttgaggaacctgttaagacggctccgggaaaaaagaggccggtagagcactctcctgcggagccagactcctcctcgggaaccggaaaagcgggccagcagcctgcaagaaagagattgaatttcggtcagactggagacgcagactccgtacctgacccccagcctctcggacagccaccagcagcccccacaagtttgggatctactacaatggctacaggcagtggcgcaccaatggcagacagtaacgagggtgccgatggagtgggtaattcctcaggaaattggcattgcgattcccaatggctgggcgacagagtcatcaccaccagcacccgaacctgggccctgcccacctacaacaaccacctctacaagcaaatctccagccaatcaggagcatcgaacgacaaccactactttggctacagcaccccttgggggtattttgacttcaacagattccactgtcacttctccccacgtgactggcaaagactcatcaacaacaactggggattccgacccaagagactcaacttcaagctctttaacattcaagtcaaagaggtcacgcagaatgacggtacgacgacgattgccaataaccttaccagcacggttcaggtgtttactgactcggagtaccagctcccgtacgtcctcggctcggcgcatcaaggatgcctcccgccgtttccagcggacgtcttcatggtcccacagtatggatacctcaccctgaacaacgggagtcaggcggtaggacgctcttccttttactgcctggagtactttccttctcagatgctgcgtaccggaaacaactttaccttcagctacacctttgaggacgtgcccttccacagcagctacgctcacagccagagtttggaccggctgatgaatcctctgatcgaccagtatctgtattatctgaacaggacacaatcaaatagtggaactcttcagcagtctaggctactgtttagccaagctggacccaccagcatgtcccttcaagctaaaaactggctgcctggaccttgctacagacagcagcgtctgtcaaagcaggcaaacgacaacaacaacagcaactttccctggactgcggctacaaagtatcatctaaatggtcgggactcgttggttaatccaggaccagctatggccagccacaaagacgatgaagaaaagtttttccccatgcatggaaccctgatatttggtaaacaaggaacaaatgctaacgacgcggatttggaacatgtcatgattacagatgaagaagaaatcaggaccaccaatcccgtggctacagagcagtacggaaacgtgtcaaataatttgcaaaactcaaatactggtccaactacagaaaatgtcaatcaccagggagcgttacctggtatggtgtggcaggatcgagacgtgtacctgcagggacccatttgggccaagattcctcacaccgacggacactttcacccttctccactgatgggaggttttggactcaaacacccgcctcctcaaatcatgatcaaaaacactcctgttccagccaatcctcctacaaacttcagcgcggcaaagtttgcttccttcatcacacagtattccacgggacaggtcagcgtggagatcgagtgggagctgcagaaggagaacagcaaacgctggaaccccgagatccagtacacttccaactacaacaaatctgttaatgtggactttactgtggacgctaatggtgtgtattcagagcctcgccccattggcaccagatacctgactcgtaatctgtaa

SEQ ID NO: 12186 - DNA, 2208 bp, Artificial Sequence
  source: /note="Description of Artificial Sequence: Synthetic polynucleotide"
atggctgccgatggttatcttccagattggctcgaggacactctctctgaaggaataagacagtggtggaagctcaaacctggcccaccaccaccaaggcccgcagagcggcatcaggacgacagcaggggtcttgtgcttcctgggtacaagtacctcggacccttcaacggactcgacaaaggagagccggtcaacgaggcagacgctgcggccctcgagcacgacaaggcctacgaccggcagctcgacagcggagacaacccgtacctcaagtacaaccacgccgacgcggagtttcaggagcgtcttaaagaagatacgtcttttgggggcaacctcggacgagcagtcttccaggcgaaaaagagggttcttgaacctctgggcctggttgaggaacctgttaagacggctccgggaaaaaagaggccggtagagcactctcctgcggagccagactcctcctcgggaaccggaaaagcgggccagcagcctgcaagaaagagattgaatttcggtcagactggagacgcagactccgtacctgacccccagcctctcggacagccaccagcagcccccacaagtttgggatctactacaatggctacaggcagtggcgcaccaatggcagacaataacgagggtgccgatggagtgggtaattcctcaggaaattggcattgcgattcccaatggctgggcgacagagtcatcaccaccagcacccgaacctgggccctgcccacctacaacaaccaccactacaagcaaatctccagccaatcaggagcatcgaacgacaaccactactttggctacagcaccccttgggggtattttgacttcaacagattccactgtcacttctccccacgtgactggcaaagactcatcaacaacaactggggattccgacccaagagactcaacttcaagctctttaacattcaagtcaaagaggtcacgcagaatgacggtacgacgacgattgccaataaccttaccagcacggttcaggtgtttactgactcggagtaccagctcccgtacgtcctcggctcggcgcatcaaggatgcctcccgccgtttccagcggacgtcttcatggtcccacagtatggatacctcaccctgaacaacgggagtcaggcggtaggacgctcttccttttactgcctggagtactttccttctcagatgctgcgtaccggaaacaactttaccttcagctacacctttgaggacgtgcccttccacagcagctacgctcacagccagagtttggaccggctgatgaatcctctgatcgaccagtatctgtattatctgaacaggacacaatcaaatagtggaactcttcagcagtctaggctactgtttagccaagctggacccaccagcatgtcccttcaagctaaaaactggctgcctggaccttgctacagacagcagcgtctgtcaaagcaggcaaacgacaacaacaacagcaactttccctggactgcggctacaaagtatcatctaaatggtcgggactcgttggttaatccaggaccagctatggccagccacaaagacgatgaagaaaagtttttccccatgcatggaaccctgatatttggtaaacaaggaacaaatgctaacgacgcggatttggaacatgtcatgattacagatgaagaagaaatcaggaccaccaatcccgtggctacagagcagtacggaaacgtgtcaaataatttgcaaaactcaaatactggtccaactacagaaaatgtcaatcaccagggagcgttacctggtatggtgtggcaggatcgagacgtgtacctgcagggacccatttgggccaagattcctcacaccgacggacactttcacccttctccactgatgggaggttttggactcaaacacccgcctcctcaaatcatgatcaaaaacactcctgttccagccaatcctcctacaaacttcagcgcggcaaagtttgcttccttcatcacacagtattccacgggacaggtcagcgtggagatcgagtgggagctgcagaaggagaacagcaaacgctggaaccccgagatccagtacacttccaactacaacaaatctgttaatgtggactttactgtggacgctaatggtgtgtattcagagcctcgccccattggcaccagatacctgactcgtaatctgtaa

SEQ ID NO: 12187 - DNA, 2208 bp, Artificial Sequence
  source: /note="Description of Artificial Sequence: Synthetic polynucleotide"
atggctgccgatggttatcttccagattggctcgaggacactctctctgaaggaataagacagtggtggaagctcaaacctggcccaccaccaccaaggcccgcagagcggcatcaggacgacagcaggggtcttgtgcttcctgggtacaagtacctcggacccttcaacggactcgacaaaggagagccggtcaacgaggcagacgctgcggccctcgagcacgacaaggcctacgaccggcagctcgacagcggagacaacccgtacctcaagtacaaccacgccgacgcggagtttcaggagcgtcttaaagaagatacgtcttttgggggcaacctcggacgagcagtcttccaggcgaaaaagagggttcttgaacctctgggcctggttgaggaacctgtgaagacggctccgggaaaaaagaggccggtagagcactctcctgcggagccagactcctcctcgggaaccggaaaagcgggccagcagcctgcaagaaagagattgaatttcggtcagactggagacgcagactccgtacctgacccccagcctctcggacagccaccagcagcccccacaagtttgggatctactacaatggctacaggcagtggcgcaccaatggcagacaataacgagggtgccgatggagtgggtaattcctcaggaaattggcattgcgattcccaatggctgggcgacagagtcatcaccaccagcacccgaacctgggccctgcccacctacaacaaccacctctacaagcaaatctccagccaatcaggagcatcgaacgacaaccactactttggctacagcaccccttgggggtattttgacttcaacagattccactgtcacttctccccacgtgactggcaaagactcatcaacaacaactggggattccgacccaagagactcaacttcaagctctttaacattcaagtcaaagaggtcacgcagaatgacggtacgacgacgattgccaataaccttaccagcacggttcgggtgtttactgactcggagtaccagctcccgtacgtcctcggctcggcgcatcaaggatgcctcccgccgtttccagcggacgtcttcatggtcccacagtatggatacctcaccctgaacaacgggagtcaggcggtaggacgctcttccttttactgcctggagtactttccttctcagatgctgcgtaccggaaacaactttaccttcagctacacctttgaggacgtgcccttccacagcagctacgctcacagccagagtttggaccggctgatgaatcctctgatcgaccagtatctgtattatctgaacaggacacaatcaaatagtggaactcttcagcagtctaggctactgtttagccaagctggacccaccagcatgtcccttcaagctaaaaactggctgcctggaccttgctacagacagcagcgtctgtcaaagcaggcaaacgacaacaacaacagcaactttccctggactgcggctacaaagtatcatctaaatggtcgggactcgttggttaatccaggaccagctatggccagccacaaagacgatgaagaaaagtttttccccatgcatggaaccctgatatttggtaaacaaggaacaaatgctaacgacgcggatttggaacatgtcatgattacagatgaagaagaaatcaggaccaccaatcccgtggctacagagcagtacggaaacgtgtcaaataatttgcaaaactcaaatactggtccaactacagaaaatgtcaatcaccagggagcgttacctggtatggtgtggcaggatcgagacgtgtacctgcagggacccatttgggccaagattcctcacaccgacggacactttcacccttctccactgatgggaggttttggactcaaacacccgcctcctcaaatcatgatcaaaaacactcctgttccagccaatcctcctacaaacttcagcgcggcaaagtttgcttccttcatcacacagtattccacgggacaggtcagcgtggagatcgagagggagctgcagaaggagaacagcaaacgctggaaccccgagatccagtacacttccaactacaacaagtctgttaatgtggactttactgtggacgctaatggtgtgtattcagagcctcgccccattggcaccagatacctgactcgtaatctgtaa

SEQ ID NO: 12188 - DNA, 2208 bp, Artificial Sequence
  source: /note="Description of Artificial Sequence: Synthetic polynucleotide"
atggctgccgatggttatcttccagattggctcgaggacactctctctgaaggaataagacagtggtggaagctcaaacctggcccaccaccaccaaggcccgcagagcggcatcaggacgacagcaggggtcttgtgcttcctgggtacaagtacctcggacccttcaacggactcgacaaaggagagccggtcaacgaggcagacgctgcggccctcgagcacgacaaggcctacgaccggcagctcgacagcggagacaacccgtacctcaagtacaaccacgccgacgcggagtttcaggagcgtcttaaagaagatacgtcttttgggggcaacctcggacgagcagtcttccaggcgaaaaagagggttcttgaacctctgggcctggttgaggaacctgttaagacggctccgggaaaaaagaggccggtagagcactctcctgcggagccagactcctcctcgggaaccggaaaagcgggccagcagcctgcaagaaagagattgaatttcggtcagactggagacgcagactccgtacctgacccccagcctctcggacagccaccagcagcccccacaagtttgggatctactacaatggctacaggcagtggcgcaccaatggcagacaataacgagggtgccgatggagtgggtaattcctcaggaaattggcattgcgattcccaatggctgggcgacagagtcatcaccaccagcacccgaacctgggccctgcccacctacaacaaccacctctacaagcaaatctccagccaatcaggagcatcgaacgacaaccactactttggctacagcaccccttgggggtattttgacttcaacagattccactgtcacttctccccacgtgactggcaaagactcatcaacaacaactggggattccgacccaagagactcaacttcaagctctttaacattcaagtcaaagaggtcacgcagaatgacggtacgacgacgattgccaataaccttaccagcacggttcaggtgtttactgactcggagtaccagctcccgtacgtcctcggctcggcgcatcaaggatgcctcccgccgtttccagcggacgtcttcatggtcccacagtatggatacctcaccctgaacaacgggagtcaggcggtaggacgctcttccttttactgcctggagtactttccttctcagatgctgcgtaccggaaacaactttaccttcagctacacctttgaggacgtgccctcccacagcagctacgctcacagccagagtttggaccggctgatgaatcctctgatcgaccagtatctgtattatctgaacaggacacaatcaaatagtggaactcttcagcagtctaggctactgtttagccaagctggacccaccagcatgtcccttcaagctaaaaactggctgcctggaccttgctacagacagcagcgtctgtcaaagcaggcaaacgacaacaacaacagcaactttccctggactgcggctacaaagtatcatctaaatggtcgggactcgttggttaatccaggaccagctatggccagccacaaagacgatgaagaaaagttcttccccatgcatggaaccctgatatttggtaaacaaggaacaaatgctaacgacgcggatttggaacatgtcatgattacagatgaagaagaaatcaggaccaccaatcccgtggctacagagcagtacggaaacgtgtcaaataatttgcaaaactcaaatactggtccaactacagaaaatgtcaatcaccagggagcgttacctggtatggtgtggcaggatcgagacgtgtacctgcagggacccatttgggccaagattcctcacaccgacggacactttcacccttctccactgatgggaggttttggactcaaacacccgcctcctcaaatcatgatcaaaaacactcctgttccagccaatcctcctacaaacttcagcgcggcaaagtttgcttccttcatcacacagtattccacgggacaggtcagcgtggagatcgagtgggagctgcagaaggagaacagcaaacgctggaaccccgagatccagtacacttccaactacaacaaatctgttaatgtggactttactgtggacgctaatggtgtgtattcagagcctcgccccattggcaccagatacctgactcgtaatctgtaa

SEQ ID NO: 12189 - DNA, 2208 bp, Artificial Sequence
  source: /note="Description of Artificial Sequence: Synthetic polynucleotide"
atggctgccgatggttatcttccagattggctcgaggacactctctctgaaggaataagacagtggtggaagctcaaacctggcccaccaccaccaaggcccgcagagcggcatcaggacgacagcaggggtcttgtgcttcctgggtacaagtacctcggacccttcaacggactcgacaaaggagagccggtcaacgaggcagacgctgcggccctcgagcacgacaaggcctacgaccggcagctcgacagcggagacaacccgtacctcaagtacaaccacgccgacgcggagtttcaggagcgtcttaaagaagatacgtcttttgggggcaacctcggacgagcagtcttccaggcgaaaaagagggttcttgaacctctgggcctggttgaggaacctgttaagacggctccgggaaaaaagaggccggtagagcactctcctgcggagccagactcctcctcgggaaccggaaaagcgggccagcggcctgcaagaaagagattgaatttcggtcagactggagacgcagactccgtacctgacccccagcctctcggacagccaccagcagcccccacaagtttgggatctactacaatggctacaggcagtggcgcaccaatggcagacaataacgagggtgccgatggagtgggtaattcctcaggaaattggcattgcgattcccaatggctgggcgacagagtcatcaccaccagcacccgaacctgggccctgcccacctacaacaaccacctctacaagcaaatctccagccaatcaggagcatcgaacgacaaccactactttggctacagcaccccttgggggtattttgacttcaacagattccactgtcacttctccccacgtgactggcaaagactcatcaacaacaactggggattccgacccaagagactcaacttcaagctctttaacattcaagtcaaagaggtcacgcagaatgacggtacgacgacgattgccaataaccttaccagcacggttcaggtgtttactgactcggagtaccagctcccgtacgtcctcggctcggcgcatcaaggatgcctcccgccgtttccagcggacgtcttcatggtcccacagtatggatacctcaccctgaacaacgggagtcaggcggtaggacgctcttccttttactgcctggagtactttccttctcagatgctgcgtaccggaaacaactttaccttcagctacacctttgaggacgtgcccttccacagcagctacgctcacagccagagtttggaccggctgatgaatcctctgatcgaccagtatctgtattatctgaacaggacacaatcaaatagtggaactcttcagcagtctaggctactgtttagccaagctggacccaccagcatgtcccttcaagctaaaaactggctgcctggaccttgctacagacagcagcgtctgtcaaagcaggcaaacgacaacaacaacagcaactttccctggactgcggctacaaagtatcatctaaatggtcgggactcgttggttaatccaggaccagctatggccagccacaaagacgatgaagaaaagtttttccccatgcatggaaccctgatatttggtaaacaaggaacaaatgctaacgacgcggatttggaacatgtcatgattacagatgaagaagaaatcaggaccaccaatcccgtggctacagagcagtacggaaacgtgtcaaataatttgcaaaactcaaatactggtccaactacagaaaatgtcaatcaccagggagcgttacctggtatggtgtggcaggatcgagacgtgtacctgcagggacccatttgggccaagattcctcacaccgacggacactttcacccttctccactgatgggaggttttggactcaaacacccgcctcctcaaatcatgatcaaaaacactcctgttccagccaatcctcctacaaacttcagcgcggcaaagtttgcttccttcatcacacagtattccacgggacaggtcagcgtggagatcgagtgggagctgcagaaggagaacagcaaacgctggaaccccgagatccagtacacttccaactacaacaaatctgttaatgtggactttactgtggacgctaatggtgtgtattcagagcctcgccccattggcaccagatacctgactcgtaatctgtaa

SEQ ID NO: 12190 - DNA, 2208 bp, Artificial Sequence
  source: /note="Description of Artificial Sequence: Synthetic polynucleotide"
atggctgccgatggttatcttccagattggctcgaggacactctctctgaaggaataagacagtggtggaagctcaaacctggcccaccaccgccaaagcccgcagagcggcataaggacgacagcaggggtcttgtgcttcctgggtacaagtacctcggacccttcaacggactcgacaaaggagagccggtcaacgaggcagacgccgcggccctcgagcacgacaaggcctacgaccggcagctcgacagcggagacaacccgtacctcaagtacaaccacgccgacgcggagtttcaggagcgccttaaagaagatacgtcttttgggggcaacctcgcaagagcagtattccaggcgaaaaagagggttcttgaacctctgggcctggttgaggagcctgttaagacggctccgggaaaaaagaggccggtagagcactctcctgcggagccagattcctcctccggaactggaaagtcgggccaacagcctgcaagaaagagattgaattttggtcagactggagacgcagactccgtacctgacccccagcctctcggacagccaccagcagccccctctggtctgggaactaatacgatggcttcaggcagtggcgcaccaatggcagacaataacgagggcgccgacggagtgggtaattcctcgggaaattggcattgcgattccacatggatgggcgacagagtcatcaccaccagcacccgcacctgggctctgcccacctacaacaaccatctgtacaagcaaatttccagccagtctggagcagcgaacgacaaccactactttggctacagcaccccttgggggtattttgacttcaacagattccactgccacttctccccacgtgactggcaaagactcatcaacaacaattggggattccggcccaaaagactcaacttcaagctctttaacattcaagtcaaggaggtcacgcagaatgacggtacgacgacgattgccaataaccttaccagcacggttcaggtgtttactgactcggagtaccagctcccgtacgtcctcggctcggcgcatcaaggatgcctcccgccgttcccagcagacgtcttcatggtgccacagtatggatacctcaccctgaacaacgggagtcaggcggtaggacgctcttcattttactgcctggagtactttccttctcagatgctgcgtaccggaaacaactttaccttcagctacacctttgaggacgtgcccttccacagcagctacgctcacagccagagtttggaccggctgatgaatcctctgatcgaccagtatctgtattatctgaacaggacacaatcaaatagtggaactcttcagcagtctaggctactgtttagccaagctggacccaccagcatgtcccttcaagctaaaaactggctgcctggaccttgctacagacagcagcgtctgtcaaagcaggcaaacgacaacaacaacagcaactttccctggactgcggctacaaagtatcatctaaatggtcgggactcgttggttaatccaggaccagctatggccagccacaaagacgatgaagaaaagtttttccccatgcatggaaccctgatatttggtaaacaaggaacaaatgctaacgacgcggatttggaacatgtcatgattacagatgaagaagaaatcaggaccaccaatcccgtggctacagagcagtacggaaacgtgtcaaataatttgcaaaactcaaatactggtccaactacagaaaatgtcaatcaccagggagcgttacctggtatggtgtggcaggatcgagacgtgtacctgcagggacccatttgggccaagattcctcacaccgacggacactttcacccttctccactgatgggaggttttggactcaaacacccgcctcctcaaatcatgatcaaaaacactcctgttccagccaatcctcctacaaacttcagcgcggcaaagtttgcttccttcatcacacagtattccacgggacaggtcagcgtggagatcgagtgggagctgcagaaggagaacagcaaacgctggaaccccgagatccagtacacttccaactacaacaaatctgttaatgtggactttactgtggacgctaatggtgtgtattcagagcctcgccccattggcaccagatacctgactcgtaatctgtaa

SEQ ID NO: 12191 - DNA, 2208 bp, Artificial Sequence
  source: /note="Description of Artificial Sequence: Synthetic polynucleotide"
atggctgccgatggttatcttccagattggctcgaggacactctctctgaaggaataagacagtggtggaagctcaaacctggcccaccaccaccaaggcccgcagagcggcatcaggacgacagcaggggtcttgtgcttcctgggtacaagtacctcggacccttcaacggactcgacaaaggagagccggtcaacgaggcagacgctgcggccctcgagcacgacaaggcctacgaccggcagctcgacagcggagacaacccgtacctcaagtacaaccacgccgacgcggagtttcaggagcgtcttaaagaagatacgtcttttgggggcaacctcggacgagcagtcttccaggcgaaaaagagggttcttgaacctctgggcctggttgaggaacctgttaagacggctccgggaaaaaagaggccggtagagcactctcctgcggagccagactcctcctcgggaaccggaaaagcgggccagcagcctgcaagaaagagattgaatttcggtcagactggagacgcagactccgtacctgacccccggcctctcggacagccaccagcagcccccacaagtttgggatctactacaatggctacaggcagtggcgcaccaatggcagacaataacgagggtgccgatggagtgggtaattcctcaggaaattggcattgcgattcccaatggctgggcgacagagtcatcaccaccagcacccgaacctgggccctgcccacctacaacaaccacctctacaagcaaatctccagccaatcaggagcatcgaacgacaaccactactttggctacagcaccccttgggggtattttgacttcaacagattccactgtcacttctccccacgtgactggcaaagactcatcaacaacaactggggattccgacccaagagactcaacttcaagctctttaacattcaagtcaaagaggtcacgcagaatgacggtacgacgacgattgccaataaccttaccagcacggttcaggtgtttactgactcggagtaccagctcccgtacgtcctcggctcggcgcatcaaggatgcctcccgccgtttccagcggacgtcttcatggtcccacagtatggatacctcaccctgaacaacgggagtcaggcggtaggacgctcttccttttactgcctggagtactttccttctcagatgctgcgtaccggaaacaactttaccttcagctacacctttgaggacgtgcccttccacagcagctacgctcacagccagagtttggaccggctgatgaatcctctgatcgaccagtatctgtattatctgaacaggacacaatcaaatagtggaactcttcagcagtctaggctactgtttagccaagctggacccaccagcatgtcccttcaagctaaaaactggctgcctggaccttgctacagacagcagcgtctgtcaaagcaggcaaacgacaacaacaacagcaactttccctggactgcggctacaaagtatcatctaaatggtcgggactcgttggttaatccaggaccagctatggccagccacaaagacgatgaagaaaagtttttccccatgcatggaaccctgatatttggtaaacaaggaacaaatgctaacgacgcggatttggaacatgtcatgattacagatgaagaagaaatcaggaccaccaatcccgtggctacagagcagtacggaaacgtgtcaaataatttgcaaaactcaaatactggtccaactacagaaaatgtcaatcaccagggagcgttacctggtatggtgtggcaggatcgagacgtgtacctgcagggacccatttgggccaagattcctcacaccgacggacactttcacccttctccactgatgggaggttttggactcaaacacccgcctcctcaaatcatgatcaaaaacactcctgttccagccaatcctcctacaaacttcagcgcggcaaagtttgcttccttcatcacacagtattccacgggacaggtcagcgtggagatcgagtgggagctgcagaaggagaacagcaaacgctggaaccccgagatccagtacacttccaactacaacaaatctgttaatgtggactttactgtggacgctaatggtgtgtattcagagcctcgccccattggcaccagatacctgactcgtaatctgtaa

SEQ ID NO: 12192 - DNA, 2208 bp, Artificial Sequence
  source: /note="Description of Artificial Sequence: Synthetic polynucleotide"
atggctgccgatggttatcttccagattggctcgaggacactctctctgaaggaataagacagtggtggaagctcaaacctggcccaccaccgccaaagcccgcagagcggcataaggacgacagcaggggtcttgtgcttcctgggtacaagtacctcggacccttcaacggactcgacaaaggagagccggtcaacgaggcagacgccgcggccctcgagcacgacaaggcctacgaccggcagctcgacagcggagacaacccgtacctcaagtacaaccacgccgacgcggagtttcaggagcgccttaaagaagatacgtcttttgggggcaacctcgcaagagcagtattccaggcgaaaaagagggttcttgaacctctgggcctggttgaggagcctgttaagacggctccgggaaaaaagaggccggtagagcactctcctgcggagccagattcctcctccggaactggaaagtcgggccaacagcctgcaagaaagagattgaatttcggtcagactggagacgcagactccgtacctgacccccagcctctcggacagccaccagcagcccccacaagtttgggatctactacaatggctacaggcagtggcgcaccaatggcagacaataacgagggtgccgatggagtgggtaattcctcaggaaattggcattgcgattcccaatggctgggcgacagagtcatcaccaccagcacccgaacctgggccctgcccacctacaacaaccacctctacaagcaaatctccagccaatcaggagcatcgaacgacaaccactactttggctacagcaccccttgggggtattttgacttcaacagattccactgtcacttctccccacgtgactggcaaagactcatcaacaacaactggggattccgacccaagagactcaacttcaagctctttaacattcaagtcaaagaggtcacgcagaatgacggtacgacgacgattgccaataaccttaccagcacggttcaggtgtttactgactcggagtaccagctcccgtacgtcctcggctcggcgcatcaaggatgcctcccgccgtttccagcggacgtcttcatggtcccacagtatggatacctcaccctgaacaacgggagtcaggcggtaggacgctcttccttttactgcctggagtactttccttctcagatgctgcgtaccggaaacaactttaccttcagctacacctttgaggacgtgcccttccacagcagctacgctcacagccagagtttggaccggctgatgaatcctctgatcgaccagtatctgtattatctgaacaggacacaatcaaatagtggaactcttcagcagtctaggctactgtttagccaagctggacccaccagcatgtcccttcaagctaaaaactggctgcctggaccttgctacagacagcagcgtctgtcaaagcaggcaaacgacaacaacaacagcaactttccctggactgcggctacaaagtatcatctaaatggtcgggactcgttggttaatccaggaccagctatggccagccacaaagacgatgaagaaaagtttttccccatgcatggaaccctgatatttggtaaacaaggaacaaatgctaacgacgcggatttggaacatgtcatgattacagatgaagaagaaatcaggaccaccaatcccgtggctacagagcagtacggaaacgtgtcaaataatttgcaaaactcaaatactggtccaactacagaaaatgtcaatcaccagggagcgttacctggtatggtgtggcaggatcgagacgtgtacctgcagggacccatttgggccaagattcctcacaccgacggacactttcacccttctccactgatgggaggttttggactcaaacacccgcctcctcaaatcatgatcaaaaacactcctgttccagccaatcctcctacaaacttcagcgcggcaaagtttgcttccttcatcacacagtattccacgggacaggtcagcgtggagatcgagtgggagctgcagaaggagaacagcaaacgctggaaccccgagatccagtacacttccaactacaacaaatctgttaatgtggactttactgtggacgctaatggtgtgtattcagagcctcgccccattggcaccagatacctgactcgtaatctgtaa

SEQ ID NO: 12193 - DNA, 2208 bp, Artificial Sequence
  source: /note="Description of Artificial Sequence: Synthetic polynucleotide"
atggctgccgatggttatcttccagattggctcgaggacactctctctgaaggaataagacagtggtggaagctcaaacctggcccaccaccaccaaggcccgcagagcggcatcaggacgacagcaggggtcttgtgcttcctgggtacaagtacctcggacccttcaacggactcgacaaaggagagccggtcaacgaggcagacgctgcggccctcgagcacgacaaggcctacgaccggcagctcgacagcggagacaacccgtacctcaagtacaaccacgccgacgcggagtttcaggagcgtcttaaagaagatacgtcttttgggggcaacctcggacgagcagtcttccaggcgaaaaagagggttcttgaacctctgggcctggttgaggaacctgttaagacggctccgggaaaaaagaggccggtagagcactctcctgcggagccagactcctcctcgggaaccggaaaagcgggccagcagcctgcaagaaagagattgaatttcggtcagactggagacgcagactccgtacctgacccccagcctctcggacagccaccagcagcccccacaagtttgggatctactacaatggctacaggcagtggcgcaccaatggcagacaataacgagggtgccgatggagtgggtaattcctcaggaaattggcattgcgattcccaatggctgggcgacagagtcatcaccaccagcacccgaacctgggccctgcccacctacaacaaccacctctacaagcaaatctccagccaatcaggagcatcgaacgacaaccactactttggctacagcaccccttgggggtattttgacttcaacagattccactgtcacttctccccacgtgactggcaaagactcatcaacaacaactggggattccgacccaagagactcaacttcaagctctttaacattcaagtcaaagaggtcacgcagaatgacggtacgacgacgattgccaataaccttaccagcacggttcgggtgtttactgactcggagtaccagctcccgtacgtcctcggctcggcgcatcaaggatgcctcccgccgtttccagcggacgtcttcatggtcccacagtatggatacctcaccctgaacaacgggagtcaggcggtaggacgctcttccttttactgcctggagtactttccttctcagatgctgcgtaccggaaacaactttaccttcagctacacctttgaggacgtgcccttccacagcagctacgctcacagccagagtttggaccggctgatgaatcctctgatcgaccagtatctgtattatctgaacaggacacaatcaaatagtggaactcttcagcagtctaggctactgtttagccaagctggacccaccagcatgtcccttcaagctaaaaactggctgcctggaccttgctacagacagcagcgtctgtcaaagcaggcaaacgacaacaacaacagcaactttccctggactgcggctacaaagtatcatctaaatggtcgggactcgttggttaatccaggaccagctatggccagccacaaagacgatgaagaaaagtttttccccatgcatggaaccctgatatttggtaaacaaggaacaaatgctaacgacgcggatttggaacatgtcatgattacagatgaagaagaaatcaggaccaccaatcccgtggctacagagcagtacggaaacgtgtcaaataatttgcaaaactcaaatactggtccaactacagaaaatgtcaatcaccagggagcgttacctggtatggtgtggcaggatcgagacgtgtacctgcagggacccatttgggccaagattcctcacaccgacggacactttcacccttctccactgatgggaggttttggactcaaacacccgcctcctcaaatcatgatcaaaaacactcctgttccagccaatcctcctacaaacttcagcgcggcaaagtttgcttccttcatcacacagtattccacgggacaggtcagcgtggagatcgagagggagctgcagaaggagaacagcaaacgctggaaccccgagatccagtacacttccaactacaacaagtctgttaatgtggactttactgtgggcgctaatggtgtgtattcagagcctcgccccattggcaccagatacctgactcgtaatctgtaa

SEQ ID NO: 12194 - DNA, 2208 bp, Artificial Sequence
  source: /note="Description of Artificial Sequence: Synthetic polynucleotide"
atggctgccgatggttatcttccagattggctcgaggacactctctctgaaggaataagacagtggtggaagctcaaacctggcccaccaccgccaaagcccgcagagcggcataaggacgacagcaggggtcttgtgcttcctgggtacaagtacctcggacccttcaacggactcgacaaaggagagccggtcaacgaggcagacgccgcggccctcgagcacgacaaggcctacgaccggcagctcgacagcggagacaacccgtacctcaagtacaaccacgccgacgcggagtttcaggagcgccttaaagaagatacgtcttttgggggcaacctcgcaagagcagtattccaggcgaaaaagagggttcttgaacctctgggcctggttgaggagcctgttaagacggctccgggaaaaaagaggccggtagagcactctcctgcggagccagattcctcctccggaactggaaagtcgggccaacagcctgcaagaaagagattgaattttggtcagactggagacgcagactccgtacctgacccccagcctctcggacagccaccagcagccccctctggtctgggaactaatacgatggcttcaggcagtggcgcaccaatggcagacaataacgagggcgccgacggagtgggtaattcctcaggaaattggcattgcgattcccaatggctgggcgacagagtcatcaccaccagcacccgaacctgggccctgcccacctacaacaaccacctctacaagcaaatctccagccaatcaggagcatcgaacgacaaccactactttggctacagcaccccttgggggtattttgacttcaacagattccactgtcacttctccccacgtgactggcaaagactcatcaacaacaactggggattccgacccaagagactcaacttcaagctctttaacattcaagtcaaagaggtcacgcagaatgacggtacgacgacgattgccaataaccttaccagcacggttcaggtgtttactgactcggagtaccagctcccgtacgtcctcggctcggcgcatcaaggatgcctcccgccgtttccagcggacgtcttcatggtcccacagtatggatacctcaccctgaacaacgggagtcaggcggtaggacgctcttccttttactgcctggagtactttccttctcagatgctgcgtaccggaaacaactttaccttcagctacacctttgaggacgtgcccttccacagcagctacgctcacagccagagtttggaccggctgatgaatcctctgatcgaccagtatctgtattatctgaacaggacacaatcaaatagtggaactcttcagcagtctaggctactgtttagccaagctggacccaccagcatgtcccttcaagctaaaaactggctgcctggaccttgctacagacagcagcgtctgtcaaagcaggcaaacgacaacaacaacagcaactttccctggactgcggctacaaagtatcatctaaatggtcgggactcgttggttaatccaggaccagctatggccagccacaaagacgatgaagaaaagtttttccccatgcatggaaccctgatatttggtaaacaaggaacaaatgctaacgacgcggatttggaacatgtcatgattacagatgaagaagaaatcaggaccaccaatcccgtggctacagagcagtacggaaacgtgtcaaataatttgcaaaactcaaatactggtccaactacagaaaatgtcaatcaccagggagcgttacctggtatggtgtggcaggatcgagacgtgtacctgcagggacccatttgggccaagattcctcacaccgacggacactttcacccttctccactgatgggaggttttggactcaaacacccgcctcctcaaatcatgatcaaaaacactcctgttccagccaatcctcctacaaacttcagcgcggcaaagtttgcttccttcatcacacagtattccacgggacaggtcagcgtggagatcgagtgggagctgcagaaggagaacagcaaacgctggaaccccgagatccagtacacttccaactacaacaaatctgttaatgtggactttactgtggacgctaatggtgtgtattcagagcctcgccccattggcaccagatacctgactcgtaatctgtaa

SEQ ID NO: 12195 - DNA, 2208 bp, Artificial Sequence
  source: /note="Description of Artificial Sequence: Synthetic polynucleotide"
atggctgccgatggttatcttccagattggctcgaggacactctctctgaaggaataagacagtggtggaagctcaaacctggcccaccaccaccaaggcccgcagagcggcatcaggacgacagcaggggtcttgtgcttcctgggtacaagtacctcggacccttcaacggactcgacaaaggagagccggtcaacgaggcagacgctgcggccctcgagcacgacaaggcctacgaccggcagctcgacagcggagacaacccgtacctcaagtacaaccacgccgacgcggagtttcaggagcgtcttaaagaagatacgtcttttgggggcaacctcggacgagcagtcttccaggcgaaaaagagggttcttgaacctctgggcctggttgaggaacctgttaagacggctccgggaaaaaagaggccggtagagcactctcctgcggagccagactcctcctcgggaaccggaaaagcgggccagcagcctgcaagaaagagattgaatttcggtcagactggagacgcagactccgtacctgacccccagcctctcggacagccaccagcagcccccacaagtttgggatctactacaatggctacaggcagtggcgcaccaatggcagacaataacgagggtgccgatggagtgggtaattcctcaggaaattggcattgcgattcccaatggctgggcgacagagtcatcaccaccagcacccgaacctgggccctgcccacctacaacaaccacctctacaagcaaatctccagccaatcaggagcatcgaacgacaaccactactttggctacagcaccccttgggggtattttgacttcaacagattccactgtcacttctccccacgtgactggcaaagactcatcaacaacaactggggattccgacccaagagactcaacttcaagctctttaacattcaagtcaaagaggtcacgcagaatgacggtacgacgacgattgccaataaccttaccagcacggttcaggtgtttactgactcggagtaccagctcccgtacgtcctcggctcggcgcatcaaggatgcctcccgccgtttccagcggacgtcttcatggtcccacagtatggatacctcaccctgaacaacgggagtcaggcggtaggacgctcttccttttactgcctggagtactttccttctcagatgctgcgtaccggaaacaactttaccttcagctacacctttgaggacgtgcccttccacagcagctacgctcacagccagagtttggaccggctgatgaatcctctgatcgaccagtatctgtattatctgaacaggacacaatcaaatagtggaactcttcagcagtctaggctactgtttagccaagctggacccaccagcatgtcccttcaagctaaaaactggctgcctggaccttgctacagacagcagcgtctgtcaaagcaggcaaacgacaacaacaacagcaactttccctggactgcggctacaaagtatcatctaaatggtcgggactcgttggttaatccaggaccagctatggccagccacaaagacgatgaagaaaagtttttccccatgcatggaaccctgatatttggtaaacaaggaacaaatgctaacgacgcggatttggaacatgtcatgattacagatgaagaagaaatcaggaccaccaatcccgtggctacagagcagtacggaaacgtgtcaaataatttgcaaaactcaaatactggtccaactacagaaaatgtcaatcaccagggagcgttacctggtatggtgtggcaggatcgagacgtgtacctgcagggacccatttgggccaagattcctcacaccgacggacactttcacccttctcctcttatgggaggatttggactgaagcaccctcccccgcagattctcatcaagaataccccggtacctgcgaatccttctaccaccttcagcgcggcaaagtttgcttccttcatcacacagtactccacggggcaggtcagcgtggagatcgagtgggagctgcagaaagagaacagcaaacgctggaaccccgagatccagtatacctccaactacaacaagtctgttaatgtggactttactgtggacactaatggcgtgtattcagagcctcgccccattggcacaagatacctgactcgtaatctgtaa

SEQ ID NO: 12196 - DNA, 2208 bp, Artificial Sequence
  source: /note="Description of Artificial Sequence: Synthetic polynucleotide"
atggctgccgatggttatcttccagattggctcgaggacactctctctgaaggaataagacagtggtggaagctcaaacctggcccaccaccaccaaggcccgcagagcggcatcaggacgacagcaggggtcttgtgcttcctgggtacaagtacctcggacccttcaacggactcgacaaaggagagccggtcaacgaggcagacgctgcggccctcgagcacgacaaggcctacgaccggcagctcgacagcggagacaacccgtacctcaagtacaaccacgccgacgcggagtttcaggagcgtcttaaagaagatacgtcttttgggggcaacctcggacgagcagtcttccaggcgaaaaagagggttcttgaacctctgggcctggttgaggaacctgttaagacggctccgggaaaaaagaggccggtagagcactctcctgcggagccagactcctcctcgggaaccggaaaagcgggccagcagcctgcaagaaagagattgaatttcggtcagactggagacgcagactccgtacctgacccccagcctctcggacagccaccagcagcccccacaagtttgggatctactacaatggctacaggcagtggcgcaccaatggcagacaataacgagggtgccgatggagtgggtaattcctcaggaaattggcattgcgattcccaatggctgggcgacagagtcatcaccaccagcacccgaacctgggccctgcccacctacaacaaccacctctacaagcaaatctccagccaatcaggagcatcgaacgacaaccactactttggctacagcaccccttgggggtattttgacttcaacagattccactgtcacttctccccacgtgactggcaaagactcatcaacaacaactggggattccgacccaagagactcaacttcaagctctttaacattcaagtcaaagaggtcacgcagaatgacggtacgacgacgattgccaataaccttaccagcacggttcaggtgtttactgactcggagtaccagctcccgtacgtcctcggctcggcgcatcaaggatgcctcccgccgtttccagcggacgtcttcatggtcccacagtatggatacctcaccctgaacaacgggagtcaggcggtaggacgctcttccttttactgcctggagtactttccttctcagatgctgcgtaccgggaacaactttaccttcagctacacctttgaggacgtgcccttccacagcagctacgctcacagccagagtttggaccggctgatgaatcctctgatcgaccagtatctgtattatctgaacaggacacaatcaaatagtggaactcttcagcagtctaggctactgtttagccaagctggacccaccagcatgtcccttcaagctaaaaactggctgcctggaccttgctacagacagcagcgtctgtcaaagcaggcaaacgacaacaacaacagcaactttccctggactgcggctacaaagtatcatctaaatggtcgggactcgtcggttaatccaggaccagctatggccagccacaaagacgatgaagaaaagtttttctccatgcatggaaccctgatatttggtaaacaaggaacaaatgctaacgacgcggatttggaacatgtcatgattacagatgaagaagaaatcaggaccaccaatcccgtggctacagagcagtacggaaacgtgtcaaataatttgcaaaactcaaatactggtccaactacagaaaatgtcaatcaccagggagcgttacctggtatggtgtggcaggatcgagacgtgtacctgcagggacccatttgggccaagattcctcacaccgacggacactttcacccttctccactgatgggaggttttggactcaaacacccgcctccccaaatcatgatcaaaaacactcctgttccagccaatcctcctacaaacttcagcgcggcaaagtttgcttccttcatcacacagtattccacgggacaggtcagcgtggagatcgagtgggagctgcagaaggagaacagcaaacgctggaaccccgagatccagtacacttccaactacaacaaatctgttaatgtggactttactgtggacgctaatggtgtgtattcagagcctcgccccattggcaccagatacctgactcgtaatctgtaa

SEQ ID NO: 12197 - DNA, 2208 bp, Artificial Sequence
  source: /note="Description of Artificial Sequence: Synthetic polynucleotide"
atggctgccgatggttatcttccagattggctcgaggacactctctctgaaggaataagacagtggtggaagctcaaacctggcccaccaccaccaaggcccgcagagcggcatcaggacgacagcaggggtcttgtgcttcctgggtacaagtacctcggacccttcaacggactcgacaaaggagagccggtcaacgaggcagacgctgcggccctcgagcacgacaaggcctacgaccggcagctcgacagcggagacaacccgtacctcaagtacaaccacgccgacgcggagtttcaggagcgtcttaaagaagatacgtcttttgggggcaacctcggacgagcagtcttccaggcgaaaaagagggttcttgaacctctgggcctggttgaggaacctgttaagacggctccgggaaaaaagaggccggtagagcactctcctgcggagccagactcctcctcgggaaccggaaaagcgggccagcagcctgcaagaaagagattgaatttcggtcagactggagacgcagactccgtacctgacccccagcctctcggacagccaccagcagcccccacaagtttgggatctactacaatggctacaggcagtggcgcaccaatggcagacaataacgagggtgccgatggagtgggtaattcctcaggaaattggcattgcgattcccaatggctgggcgacagagtcatcaccaccagcacccgaacctgggccctgcccacctacaacaaccacctctacaagcaaatctccagccaatcaggagcatcgaacgacaaccactactttggctacagcaccccttgggggtattttgacttcaacagattccactgtcacttctccccacgtgactggcaaagactcatcaacaacaactggggattccgacccaagagactcaacttcaagctctttaacattcaagtcaaagaggtcacgcagaatgacggtacgacgacgattgccaataaccttaccagcacggttcaggtgtttactgactcggagtaccagctcccgtacgtcctcggctcggcgcatcaaggatgcctcccgccgtttccagcgggcgtcttcatggtcccacagtatggatacctcaccctgaacaacgggagtcaggcggtaggacgctcttccttttactgcctggagtactttccttctcagatgctgcgtaccggaaacaactttaccttcagctacacctttgaggacgtgcccttccacagcagctacgctcacagccagagtttggaccggctgatgaatcctctgatcgaccagtatctgtattatctgaacaggacacaatcaaatagtggaactcttcagcagtctaggctactgtttagccaagctggacccaccagcatgtcccttcaagctaaaaactggctgcctggaccttgctgcagacagcagcgtctgtcaaagcaggcaaacgacaacaacaacagcaactttccctggactgcggctacaaagtatcatctaaatggtcgggactcgttggttaatccaggaccagctatggccagccacaaagacgatgaagaaaagtttttccccatgcatggaaccctgatatttggtaaacaaggaacaaatgctaacgacgcggatttggaacatgtcatgattacagatgaagaagaaatcaggaccaccaatcccgtggctacagagcagtacggaaacgtgtcaaataatttgcaaaactcaaatactggtccaactacagaaaatgtcaatcaccagggagcgttacctggtatggtgtggcaggatcgagacgtgtacctgcagggacccatttgggccaagattcctcacaccgacggacactttcacccttctccactgatgggaggttttggactcaaacacccgcctcctcaaatcatgatcaaaaacactcctgttccagccaatcctcctacaaacttcagcgcggcaaagtttgcttccttcatcacacagtattccacgggacaggtcagcgtggagatcgagtgggagctgcagaaggagaacagcaaacgctggaaccccgagatccagtacacttccaactacaacaaatctgttaatgtggactttactgtggacgctaatggtgtgtattcagagcctcgccccattggcaccagatacctgactcgtaatctgtaa

SEQ ID NO: 12198 - DNA, 2208 bp, Artificial Sequence
  source: /note="Description of Artificial Sequence: Synthetic polynucleotide"
atggctgccgatggttatcttccagattggctcgaggacactctctctgaaggaataagacagtggtggaagctcaaacctggcccaccaccaccaaggcccgcagagcggcatcaggacgacagcaggggtcttgtgcttcctgggtacaagtacctcggacccttcaacggactcgacaaaggagagccggtcaacgaggcagacgctgcggccctcgagcacgacaaggcctacgaccggcagctcgacagcggagacaacccgtacctcaagtacaaccacgccgacgcggagtttcaggagcgtcttaaagaagatacgtcttttgggggcaacctcggacgagcagtcttccaggcgaaaaagagggttcttgaacctctgggcctggttgaggaacctgttaagacggctccgggaaaaaagaggccggtagagcactctcctgcggagccagactcctcctcgggaaccggaaaagcgggccagcagcctgcaagaaagagattgaatttcggccagactggagacgcagactccgtacctgacccccagcctcccggacagccaccagcagcccccacaagtttgggatctactacaatggctacaggcagtggcgcaccaatggcagacaataacgagggtgccgatggagtgggtaattcctcaggaaattggcattgcgattcccaatggctgggcgacagagtcatcaccaccagcacccgaacctgggccctgcccacctacaacaaccacctctacaagcaaatctccagccaatcaggagcatcgaacgacaaccactactttggctacagcaccccttgggggtattttgacttcaacagattccactgtcacttctccccacgtgactggcaaagactcatcaacaacaactggggattccgacccaagagactcaacttcaagctctttaacattcaagtcaaagaggtcacgcagaatgacggtacgacgacgattgccaataaccttaccagcacggttcaggtgtttactgactcggagtaccagctcccgtacgtcctcggctcggcgcatcaaggatgcctcccgccgtttccagcggacgtcttcatggtcccacagtatggatacctcaccctgaacaacgggagtcaggcggtaggacgctcttccttttactgcctggagtactttccttctcagatgctgcgtaccggaaacaactttaccttcagctacacctttgaggacgtgcccttccacagcagctacgctcacagccagagtttggaccggctgatgaatcctctgatcgaccagtatctgtattatctgaacaggacacaatcaaatagtggaactcttcagcagtctaggctactgtttagccaagctggacccaccagcatgtcccttcaagctaaaaactggctgcctggaccttgctacagacagcagcgtctgtcaaagcaggcaaacgacaacaacaacagcaactttccctggactgcggctacaaagtatcatctaaatggtcgggactcgttggttaatccaggaccagctatggccagccacaaagacgatgaagaaaagtttttccccatgcatggaaccctgatatttggtaaacaaggaacaaatgctaacgacgcggatttggaacatgtcatgattacagatgaagaagaaatcaggaccaccaatcccgtggctacagagcagtacggaaacgtgtcaaataatttgcaaaactcaaatactggtccaactacagaaaatgtcaatcaccagggagcgttacctggtatggtgtggcaggatcgagacgtgtacctgcagggacccatttgggccaagattcctcacaccgacggacactttcacccttctccactgatgggaggttttggactcaaacacccgcctcctcaaatcatgatcaaaaacactcctgttccagccaatcctcctacaaacttcagcgcggcaaagtttgcttccttcatcacacagtattccacgggacaggtcagcgtggagatcgagtgggagctgcagaaggagaacagcaaacgctggaaccccgagatccagtacacttccaactacaacaaatctgttaatgtggactttactgtggacgctaatggtgtgtattcagagcctcgccccattggcaccagatacctgactcgtaatctgtaa

SEQ ID NO: 12199 - DNA, 2208 bp, Artificial Sequence
  source: /note="Description of Artificial Sequence: Synthetic polynucleotide"
atggctgccgatggttatcttccagattggctcgaggacactctctctgaaggaataagacagtggtggaagctcaaacctggcccaccaccaccaaggcccgcagagcggcatcaggacgacagcaggggtcttgtgcttcctgggtacaagtacctcggacccttcaacggactcgacaaaggagagccggtcaacgaggcagacgctgcggccctcgagcacgacaaggcctacgaccggcagctcgacagcggagacaacccgtacctcaagtacaaccacgccgacgcggagtttcaggagcgtcttaaagaagatacgtcttttgggggcaacctcggacgagcagtcttccaggcgaaaaagagggttcttgaacctctgggcctggttgaggaacctgttaagacggctccgggaaaaaagaggccggtagagcactctcctgcggagccagactcctcctcgggaaccggaaaagcgggccagcagcctgcaagaaagagattgaatttcggtcagactggagacgcagactccgtacctgacccccagcctctcggacagccaccagcagcccccacaagtttgggatctactacaatggctacaggcagtggcgcaccaatggcagacaataacgagggtgccgatggagtgggtaattcctcaggaaattggcattgcgattcccaatggctgggcgacagagtcatcaccaccagcacccgaacctgggccctgcccacctacaacaaccaccactacaagcaaatctccagccaatcaggagcatcgaacgacaaccactactttggctacagcaccccttgggggtattttgacttcaacagattccactgtcacttctccccacgtgactggcaaagactcatcaacaacaactggggattccgacccaagagactcaacttcaagctctttaacattcaagtcaaagaggtcacgcagaatgacggtacgacgacgattgccaataaccttaccagcacggttcaggtgtttactgactcggagtaccagctcccgtacgtcctcggctcggcgcatcaaggatgcctcccgccgtttccagcggacgtcttcatggtcccacagtatggatacctcaccctgaacaacgggagtcaggcggtaggacgctcttccttttactgcctggagtactttccttctcagatgctgcgtaccggaaacaactttaccttcagctacacctttgaggacgtgcccttccacagcagctacgctcacagccagagtttggaccggctgatgaatcctctgatcgaccagtatctgtattatctgaacaggacacaatcaaatagtggaactcttcagcagtctaggctactgtttagccaagctggacccaccagcatgtcccttcaagctaaaaactggctgcctggaccttgctacagacagcagcgtctgtcaaagcaggcaaacgacaacaacaacagcaactttccctggactgcggctacaaagtatcatctaaatggtcgggactcgttggttaatccaggaccagctatggccagccacaaagacgatgaagaaaagtttttccccatgcatggaaccctgatatttggtaaacaaggaacaaatgctaacgacgcggatttggaacatgtcatgattacagatgaagaagaaatcaggaccaccaatcccgtggctacagagcagtacggaaacgtgtcaaataatttgcaaaactcaaatactggtccaactacagaagatgtcaatcaccagggagcgttacctggtatggtgtggcaggatcgagacgtgtacctgcagggacccatttgggccaagattcctcacaccgacggacactttcacccttctccactgatgggaggttttggactcaaacacccgcctcctcaaatcatgatcaaaaacactcctgttccagccaatcctcctacaaacttcagcgcggcaaagtttgcttccttcatcacacagtattccacgggacaggtcagcgtggagatcgagtgggagctgcagaaggagaacagcaaacgctggaaccccgagatccagtacacttccaactacaacaaatctgttaatgtggactttactgtggacgctaatggtgtgtattcagagcctcgccccattggcaccagatacctgactcgtaatctgtaa

SEQ ID NO: 12200 - DNA, 2208 bp, Artificial Sequence
  source: /note="Description of Artificial Sequence: Synthetic polynucleotide"
atggctgccgatggttatcttccagattggctcgaggacactctctctgaaggaataagacagtggtggaagctcaaacctggcccaccaccaccaaggcccgcagagcggcatcaggacgacagcaggggtcttgtgcttcctgggtacaagtacctcggacccttcaacggactcgacaaaggagagccggtcaacgaggcagacgctgcggccctcgagcacgacaaggcctacgaccggcagctcgacagcggagacaacccgtacctcaagtacaaccacgccgacgcggagtttcaggagcgtcttaaagaagatacgtcttttgggggcaacctcggacgagcagtcttccaggcgaaaaagagggttcttgaacctctgggcctggttgaggaacctgttaagacggctccgggaaaaaagaggccggtagagcactctcctgcggagccagactcctcctcgggaaccggaaaagcgggccagcagcctgcaagaaagagattgaatttcggtcagactggagacgcagactccgtacctgacccccggcctctcggacagccaccagcagcccccacaagtttgggatctactacaatggctacaggcagtggcgcaccaatggcagacaataacgagggtgccgatggagtgggtaattcctcaggaaattggcattgcgattcccaatggctgggcgacagagtcatcaccaccagcacccgaacctgggccctgcccacctacaacaaccacctctacaagcaaatctccagccaatcaggagcatcgaacgacaaccactactttggctacagcaccccttgggggtattttgacttcaacagattccactgtcacttctccccacgtgactggcaaagactcatcaacaacaactggggattccgacccaagagactcaacttcaagctctttaacattcaagtcaaagaggtcacgcagaatgacggtacgacgacgattgccaataaccttaccagcacggttcaggtgtttactgactcggagtaccagctcccgtacgtcctcggctcggcgcatcaaggatgcctcccgccgtttccagcggacgtcttcatggtcccacagtatggatacctcaccctgaacaacgggagtcaggcggtaggacgctcttccttttactgcctggagtactttccttctcagatgctgcgtaccggaaacaactttaccttcagctacacctttgaggacgtgcccttccacagcagctacgctcacagccagagtttggaccggctgatgaatcctctgatcgaccagtatctgtattatctgaacaggacacaatcaaatagtggaactcttcagcagtctaggctactgtttagccaagctggacccaccagcatgtcccttcaagctaaaaactggctgcctggaccttgctacagacagcagcgtctgtcaaagcaggcaaacgacaacaacaacagcaactttccctggactgcggctacaaagtatcatctaaatggtcgggactcgttggttaatccaggaccagctatggccagccacaaagacgatgaagaaaagtttttccccatgcatggaaccctgatatttggtaaacaaggaacaaatgctaacgacgcggatttggaacatgtcatgattacagatgaagaagaaatcaggaccaccgatcccgtggctacagagcagtacggaaacgtgtcaaataatttgcaaaactcaaatactggtccaactacagaaaatgtcaatcaccagggagcgttacctggtatggtgtggcaggatcgagacgtgtacctgcagggacccatttgggccaagattcctcacaccgacggacactttcacccttctccactgatgggaggttttggactcaaacacccgcctcctcaaatcatgatcaaaaacactcctgttccagccaatcctcctacaaacttcagcgcggcaaagtttgcttccttcatcacacagtattccacgggacaggtcagcgtggagatcgagtgggagctgcagaaggagaacagcaaacgctggaaccccgagatccagtacacttccaactacaacaaatctgttaatgtggactttactgtggacgctaatggtgtgtattcagagcctcgccccattggcaccagatacctgactcgtaatctgtaa

SEQ ID NO: 12201 - DNA, 2208 bp, Artificial Sequence
  source: /note="Description of Artificial Sequence: Synthetic polynucleotide"
atggctgccgatggttatcttccagattggctcgaggacactctctctgaaggaataagacagtggtggaagctcaaacctggcccaccaccaccaaggcccgcagagcggcatcaggacgacagcaggggtcttgtgcttcctgggtacaagtacctcggacccttcaacggactcgacaaaggagagccggtcaacgaggcagacgctgcggccctcgagcacgacaaggcctacgaccggcagctcgacagcggagacaacccgtacctcaagtacaaccacgccgacgcggagtttcaggagcgtcttaaagaagatacgtcttttgggggcaacctcggacgagcagtcttccaggcgaaaaagagggttcttgaacctctgggcctggttgaggaacctgttaagacggctccgggaaaaaagaggccggtagagcactctcctgcggagccagactcctcctcgggaaccggaaaagcgggccagcagcctgcaagaaagagattgaatttcggtcagactggagacgcagactccgtacctgacccccagcctctcggacagccaccagcagcccccacaagtttgggatctactacaatggctacaggcagtggcgcaccaatggcagacaataacgagggtgccgatggagtgggtaattcctcaggaaattggcattgcgattcccaatggctgggcgacagagtcatcaccaccagcacccgaacctgggccctgcccacctacaacaaccacctctacaagcaaatctccagccaatcaggagcatcgaacgacaaccactactttggctacagcaccccttgggggtattttgacttcaacagattccactgtcacttctccccacgtgactggcaaagactcatcaacaacaactggggattccgacccaagagactcaacttcaagctctttaacattcaagtcaaagaggtcacgcagaatgacggtacgacgacgattgccaataaccttaccagcacggttcaggtgtttactgactcggagtaccagctcccgtacgtcctcggctcggcgcatcaaggatgcctcccgccgtttccagcggacgtcttcatggtcccacagtatggatacctcaccctgaacaacgggagtcaggcggtaggacgctcttccttttactgcctggagtactttccttctcagatgctgcgtaccggaaacaactttaccttcagctacacctttgaggacgtgcccttccacagcagctacgctcacagccagagtttggaccggctgatgaatcctctgatcgaccagtatctgtattatctgaacaggacacaatcaaatagtggaactcttcagcagtctaggctactgtttagccaagctggacccaccagcatgtcccttcaagctaaaaactggctgcctggaccttgctacagacagcagcgtctgtcaaagcaggcaaacgacaacaacaacagcaactttccctggactgcggctacaaagtatcatctaaatggtcgggactcgttggttaatccaggaccagctatggccagccacaaagacgatgaagaaaagtttttccccatgcatggaaccctgatatttggtaaacaaggaacaaatgctaacgacgcggatttggaacatgtcatgattacagatgaagaagaaatcaggaccaccaatcccgtggctacagagcagtacggaaacgtgtcaaataatttgcaaaactcaaatactggtccaactacaggaaatgtcaatcaccagggagcgttacctggtatggtgtggcaggatcgagacgtgtacctgcagggacccatttgggccaagattcctcacaccgacggacactttcacccttctccactgatgggaggttttggactcaaacacccgcctcctcaaatcatgatcaaaaacactcctgttccagccaatcctcctacaaacttcagcgcggcaaagtttgcttccttcatcacacagtattccacgggacaggtcagcgtggagatcgagtgggagctgcagaaggagaacagcaaacgctggaaccccgagatccagtacacttccaactacaacaaatctgttaatgtggactttactgtggacgctaatggtgtgtattcagagcctcgccccattggcaccagatacctgactcgtaatctgtaa

SEQ ID NO: 12202 - DNA, 2208 bp, Artificial Sequence
  source: /note="Description of Artificial Sequence: Synthetic polynucleotide"
atggctgccgatggttatcttccagattggctcgaggacactctctctgaaggaataagacagtggtggaagctcaaacctggcccaccaccaccaaggcccgcagagcggcatcaggacgacagcaggggtcttgtgcttcctgggtacaagtacctcggacccttcaacggactcgacaaaggagagccggtcaacgaggcagacgctgcggccctcgagcacgacaaggcctacgaccggcagctcgacagcggagacaacccgtacctcaagtacaaccacgccgacgcggagtttcaggagcgtcttaaagaagatacgtcttttgggggcaacctcggacgagcagtcttccaggcgaaaaagagggttcttgaacctctgggcctggttgaggaacctgttaagacggctccgggaaaaaagaggccggtagagcactctcctgcggagccagactcctcctcgggaaccggaaaagcgggccagcagcctgcaagaaagagattgaatttcggtcagactggagacgcagactccgtacctgacccccagcctctcggacagccaccagcagcccccacaagtttgggatctactacaatggctacaggcagtggcgcaccaatggcagacaataacgagggtgccgatggagtgggtaattcctcaggagattggcattgcgattcccaatggctgggcgacagagtcatcaccaccagcacccgaacctgggccctgcccacctacaacaaccacctctacaagcaaatctccagccaatcaggagcatcgaacgacaaccactactttggctacagcaccccttgggggtattttgacttcaacagattccactgtcacttctccccacgtgactggcaaagactcatcaacaacaactggggattccgacccaagagactcaacttcaagctctttaacattcaagtcaaagaggtcacgcagaatgacggtacgacgacgattgccaataaccttaccagcacggttcaggtgtttactgactcggagtaccagctcccgtacgtcctcggctcggcgcatcaaggatgcctcccgccgtttccagcggacgtcttcatggtcccacagtatggatacctcaccctgaacaacgggagtcaggcggtaggacgctcttccttttactgcctggagtactttccttctcagatgctgcgtaccggaaacaactttaccttcagctacacctttgaggacgtgcccttccacagcagctacgctcacagccagagtttggaccggctgatgaatcctctgatcgaccagtatctgtattatctgaacaggacacaatcaaatagtggaactcttcagcagtctaggctactgtttagccaagctggacccaccagcatgtcccttcaagctaaaaactggctgcctggaccttgctacagacagcagcgtctgtcaaagcaggcaaacgacaacaacaacagcaactttccctggactgcggctacaaagtatcatctaaatggtcgggactcgttggttaatccaggaccagctatggccagccacaaagacgatgaagaaaagtttttccccatgcatggaaccctgatatttggtaaacaaggaacaaatgctaacgacgcggatttggaacatgtcatgattacagatgaagaagaaatcaggaccaccaatcccgtggctacagagcagtacggaaacgtgtcaaatagtttgcaaaactcaaatactggtccaactacagaaaatgtcaatcaccagggagcgttacctggtatggtgtggcaggatcgagacgtgtacctgcagggacccatttgggccaagattcctcacaccgacggacactttcacccttctccactgatgggaggttttggactcaaacacccgcctcctcaaatcatgatcaaaaacactcctgttccagccaatcctcctacaaacttcagcgcggcaaagtttgcttccttcatcacacagtattccacgggacaggtcagcgtggagatcgagtgggagctgcagaaggagaacagcaaacgctggaaccccgagatccagtacacttccaactacaacaaatctgttaatgtggactttactgtggacgctaatggtgtgtattcagagcctcgccccattggcaccagatacctgactcgtaatctgtaa

SEQ ID NO: 12203 - DNA, 2208 bp, Artificial Sequence
  source: /note="Description of Artificial Sequence: Synthetic polynucleotide"
atggctgccgatggttatcttccagattggctcgaggacattctctctgaaggaataagacagtggtggaagctcaaacctggcccaccaccaccaaagcccgcagagcggcataaggacgacagcaggggtcttgtgcttcctgggtacaagtacctcggacccttcaacggactcgacaaaggagagccggtcaacgaggcagacgccgcggccctcgagcacgacaaggcctacgaccggcagctcgacagcggagacaacccgtacctcaagtacaaccacgccgacgcggagtttcaggagcgtcttaaagaagatacgtcttttgggggcaacctcggacgagcagtcttccaggcaaaaaagagggttcttgaacctctgggcctggttgaggaacctgttaagacgactccgggaaaaaagaggccggtagagcaatctcctgcggagccagactcctcctcgggaaccggaaaggcgggcaaccagcctgcaagaaagagattgaattttggtcagactggagacgcagactccgtacctgacccccagcctctcggacagccaccagcagccccctctggtctgggatctactacaatggctacaggcagtggcgcaccaatggcagacaataacgagggtgccgatggagtgggtaattcctcaggaaattggcattgcgattcccaatggttgggcgacagagtcatcaccaccagcacccgaacctgggccctgcccacctacaacaatcacctctacaagcaaatctccagccaatcaggagccagcaacgacaaccactactttggctacagcaccccctgggggtattttgacttcaacagattccactgccacttttcaccacgtgactggcaaagactcatcaacaacaactggggattccgacccaaaagactcaacttcaagctctttaacattcaagtcaaagaggtcacgcagaatgacggtacgacgacgattgccaataaccttaccagcacggttcaggtgtttactgactcggagtaccagctcccgtacgtcctcggctcggcgcatcaaggatgcctcccgccgtttccagcggacgtcttcatggtcccacagtatggatacctcaccctgaacaacgggagtcaggcggtaggacgctcttccttttactgcctggagtactttccttctcagatgcttcgtaccggaaacaactttaccttcagttacacctttgaagacgttcctttccacagcagctacgctcacagtcaaagtctggaccggctgatgaatcctctgatagaccagtacctgtattatctaaacaaaacacaatcaaatagtggaactcttcagcagtctcggctactgtttagtcaagctggacccaccagcatgtctcttcaagctaaaaactggctgcctggaccttgctacagacaacagcgtctgtcaaagcaggcaaacgacaacaacaacagcaactttccctggactgcggctacaaagtatcatctaaatggccgggactcgttggttaatccaggaccagctatggccagccacaaagacgatgaagaaaagtttttccccatgcatggaaccctgatatttggtaaacaaggaacaaatgctaacgacgcggatttggacaatgtcatgattacagatgaagaagaaatccgcaccaccaatcccgtggctacggagcagtacgggactgtgtcaaataatttgcaaaactcaaatactggtccaactactggaactgtcaatcaccaaggagcgttacctggtatggtgtggcaggatcgagacgtgtaccttcagggacccatttgggccaagattcctcacaccgatggacactttcatccttctccactgatgggaggttttggactcaaacacccgcctcctcagatcatgatcaaaaacactcccgttccagccaatcctcctacaaacttcagttctgccaagtttgcttctttcatcacacagtattccacggggcaggtcagcgtggagatagagtgggagctgcagaaggagaacagcaaacgctggaaccccgagatccagtatacttccaactacaacaagtctgttaatgtggactttactgtggacactaatggtgtgtattcagagcctcgccccattggcaccagatacctgactcgtaatctgtaa

SEQ ID NO: 12204 - DNA, 2208 bp, Artificial Sequence
  source: /note="Description of Artificial Sequence: Synthetic polynucleotide"
atggctgccgatggttatcttccagattggctcgaggacattctctctgaaggaataagacagtggtggaagctcaaacctggcccaccaccaccaaagcccgcagagcggcataaggacgacagcaggggtcttgtgcttcctgggtacaagtacctcggacccttcaacggactcgacaaaggagagccggtcaacgaggcagacgccgcggccctcgagcacgacaaggcctacgaccggcagctcgacagcggagacaacccgtacctcaagtacaaccacgccgacgcggagtttcaggagcgtcttaaagaagatacgtcttttgggggcaacctcggacgagcagtcttccaggcaaaaaagagggttcttgaacctctgggcctggttgaggaacctgttaagacggctccgggaaaaaagaggccggtagagcaatctcctgcggagccagactcctcctcgggaaccggaaaggcgggcaaccagcctgcaagaaagagattgaattttggtcagactggagacgcagactccgtacctgacccccagcctctcggacagccaccagcagccccctctggtctgggatctactacaatggctacaggcagtggcgcaccaatggcagacaataacgagggtgccgatggagtgggtaattcctcaggaaattggcattgcgattcccaatggttgggcgacagagtcatcaccaccagcacccgaacctgggccctgcccacctacaacaatcacctctacaagcaaatctccagccaatcaggagccagcaacgacaaccactactttggctacagcaccccctgggggtattttgacttcaacagattccactgccacttttcaccacgtgactggcaaagactcatcaacaacaactggggattccgacccaaaagactcaacttcaagctctttaacattcaagtcaaagaggtcacgcagaatgacggtacgacgacgattgccaataaccttaccagcacggttcaggtgtttactgactcggagtaccagctcccgtacgtcctcggctcggcgcatcaaggatgcctcccgccgtttccagcggacgtcttcatggtcccacagtatggatacctcaccctgaacaacgggagtcaggcggtaggacgctcttccttttactgcctggagtactttccttctcagatgcttcgtaccggaaacaactttaccttcagttacacctttgaagacgttcctttccacagcagctacgctcacagtcaaagtctggaccggctgatgaatcctctgatagaccagtacctgtattatctaaacaaaacacaatcaaatagtggaactcttcagcagtctcggctactgtttagtcaagctggacccaccagcatgtctcttcaagctaaaaactggctgcctggaccttgctacagacaacagcgtctgtcaaagcaggcaaacgacaacaacaacagcaactttccctggactgcggctacaaagtatcatctaaatggccgggactcgttggttaatccaggaccagctatggccagccacaaagacgatgaagaaaagtttttccccatgcatggaaccctgatatttggtaaacaaggaacaaatgctaacgacgcggatttggacaatgtcatgattacagatgaagaagaaatccgcaccaccaatcccgtggctacggagcagtacgggactgtgtcaaataatttgcaaaactcaaatactggtccaactactggaactgtcaatcaccaaggagcgttacctggtatggtgtggcaggatcgagacgtgtaccttcagggacccatttgggccaagattcctcacaccgatggacactttcatccttctccactgatgggaggttttggactcaaacacccgcctcctcagatcatgatcaaaaacactcccgttccagccaatcctcctacaaacttcagttctgccaagtttgcttctttcatcacacagtattccacggggcaggtcagcgtggagatagagtgggagctgcagaaggagaacagcaaacgctggaaccccgagatccagtatacttccaactacaacaagtctgttaatgtggactttactgtggacactaatggtgtgtattcagagcctcgccccattggcaccagatacctgactcgtaatctgtaa

SEQ ID NO: 12205 - DNA, 2208 bp, Artificial Sequence
  source: /note="Description of Artificial Sequence: Synthetic polynucleotide"
atggctgccgatggttatcttccagattggctcgaggacattctctctgaaggaataagacagtggtggaagctcaaacctggcccaccaccaccaaagcccgcagagcggcataaggacgacagcaggggtcttgtgcttcctgggtacaagtacctcggacccttcaacggactcgacaaaggagagccggtcaacgaggcagacgccgcggccctcgagcacgacaaggcctacgaccggcagctcgacagcggagacaacccgtacctcaagtacaaccacgccgacgcggagtttcaggagcgtcttaaagaagatacgtcttttgggggcaacctcggacgagcagtcttccaggcaaaaaagagggttcttgaacctctgggcctggttgaggaacctgttaagacggctccgggaaaaaagaggccggtagagcaatctcctgcggagccagactcctcctcgggaaccggaaaggcgggcaaccagcctgcaagaaagagattgaattttggtcagactggagacgcagactccgtacctgacccccagcctctcggacagccaccagcagccccctctggtctgggatctactacaatggctacaggcagtggcgcaccaatggcagacaataacgagggtgccgatggagtgggtaattcctcaggaaattggcattgcgattcccaatggttgggcgacagagtcatcaccaccagcacccgaacctgggccctgcccacctacaacaatcacctctacaagcaaatctccagccaatcaggagccagcaacgacaaccactactttggctacagcaccccctgggggtattttgacttcaacagattccactgccacttttcaccacgtgactggcaaagactcatcaacaacaactggggattccgacccaaaagactcaacttcaagctctttaacattcaagtcaaagaggtcacgcagaatgacggtacgacgacgattgccaataaccttaccagcacggttcaggtgtttactgactcggagtaccagctcccgtacgtcctcggctcggcgcatcaaggatgcctcccgccgtttccagcggacgtcttcatggtcccacagtatggatacctcaccctgaacaacgggagtcaggcggtaggacgctcttccttttactgcctggagtactttccttctcagatgcttcgtaccggaaacaactttaccttcagttacacctttgaagacgttcctttccacagcggctacgctcacagtcaaagtctggaccggctgatgaatcctctgatagaccagtacctgtattatctaaacaaaacacaatcaaatagtggaactcttcagcagtctcggctactgtttagtcaagctggacccaccagcatgtctcttcaagctaaaaactggctgcctggaccttgctacagacaacagcgtctgtcaaagcaggcaaacgacaacaacaacagcaactttccctggactgcggctacaaagtatcatctaaatggccgggactcgttggttaatccaggaccagctatggccagccacaaagacgatgaagaaaagtttttccccatgcatggaaccctgatatttggtaaacaaggaacaaatgctaacgacgcggatttggacaatgtcatgattacagatgaagaagaaatccgcaccaccaatcccgtggctacggagcagtacgggactgtgtcaaataatttgcaaaactcaaatactggtccaactactggaactgtcaatcaccaaggagcgttacctggtatggtgtggcaggatcgagacgtgtaccttcagggacccatttgggccaagattcctcacaccgatggacactttcatccttctccactgatgggaggttttggactcaaacacccgcctcctcagatcatgatcaaaaacactcccgttccagccaatcctcctacaaacttcagttctgccaagtttgcttctttcatcacacagtattccacggggcaggtcagcgtggagatagagtgggagctgcagaaggagaacagcaaacgctggaaccccgagatccagtatacttccaactacaacaagtctgttaatgtggactttactgtggacactaatggtgtgtattcagagcctcgccccattggcaccagatacctgactcgtaatctgtaa

SEQ ID NO: 12206 - DNA, 2205 bp, Artificial Sequence
  source: /note="Description of Artificial Sequence: Synthetic polynucleotide"
atggctgccgatggttatcttccagattggctcgaggacattctctctgaaggaataagacagtggtggaagctcaaacctggcccaccaccaaagcccgcagagcggcataaggacgacagcaggggtcttgtgcttcctgggtacaagtacctcggacccttcaacggactcgacaaaggagagccggtcaacgaggcagacgccgcggccctcgagcacgacaaggcctacgaccggcagctcgacagcggagacaacccgtacctcaagtacaaccacgccgacgcggagtttcaggagcgtcttaaagaagatacgtcttttgggggcaacctcggacgagcagtcttccaggcaaaaaagagggttcttgaacctctgggcctggttgaggaacctgttaagacggctccgggaaaaaagaggccggtagagcaatctcctgcggagccagactcctcctcgggaaccggaaaggcgggcaaccagcctgcaagaaagagattgaattttggtcagactggagacgcagactccgtacctgacccccagcctctcggacagccaccagcagccccctctggtctgggatctactacaatggctacaggcagtggcgcaccaatggcagacaataacgagggtgccgatggagtgggtaattcctcaggaaattggcattgcgattcccaatggttgggcgacagagtcatcaccaccagcacccgaacctgggccctgcccacctacaacaatcacctctacaagcaaatctccagccaatcaggagccagcaacgacaaccactactttggctacagcaccccctgggggtattttgacttcaacagattccactgccacttttcaccacgtgactggcaaagactcatcaacaacaactggggattccgacccaaaagactcaacttcaagctctttaacattcaagtcaaagaggtcacgcagaatgacggtacgacgacgattgccaataaccttaccagcacggttcaggtgtttactgactcggagtaccagctcccgtacgtcctcggctcggcgcatcaaggatgcctcccgccgtttccagcggacgtcttcatggtcccacagtatggatacctcaccctgaacaacgggagtcaggcggtaggacgctcttccttttactgcctggagtactttccttctcagatgcttcgtaccggaaacaactttaccttcagttacacctttgaagacgttcctttccacagcagctacgctcacagtcaaagtctggaccggctgatgaatcctctgatagaccagtacctgtattatctaaacaaaacacaatcaaatagtggaactcttcagcagtctcggctactgtttagtcaagctggacccaccagcatgtctcttcaagctaaaaactggctgcctggaccttgctacagacaacagcgtctgtcaaagcaggcaaacgacaacaacaacagcaactttccctggactgcggctacaaagtatcatctaaatggccgggactcgttggttaatccaggaccagctatggccagccacaaagacgatgaagaaaagtttttccccatgcatggaaccctgatatttggtaaacaaggaacaaatgctaacgacgcggatttggacaatgtcatgattacagatgaagaagaaatccgcaccaccaatcccgtggctacggagcagtacgggactgtgtcaaataatttgcaaaactcaaatactggtccaactactggaactgtcaatcaccaaggagcgttacctggtatggtgtggcaggatcgagacgtgtaccttcagggacccatttgggccaagattcctcacaccgatggacactttcatccttctccactgatgggaggttttggactcaaacacccgcctcctcagatcatgatcaaaaacactcccgttccagccaatcctcctacaaacttcagttctgccaagtttgcttctttcatcacacagtattccacggggcaggtcagcgtggagatagagtgggagctgcagaaggagaacagcaaacgctggaaccccgagatccagtatacttccaactacaacaagtctgttaatgtggactttactgtggacactaatggtgtgtattcagagcctcgccccattggcaccagatacctgactcgtaatctgtaa

SEQ ID NO: 12207 - DNA, 2208 bp, Artificial Sequence
  source: /note="Description of Artificial Sequence: Synthetic polynucleotide"
atggctgccgatggttatcttccagattggctcgaggacactctctctgaaggaataagacagtggtggaagctcaaacctggcccaccaccaccaaggcccgcagagcggcatcaggacgacagcaggggtcttgtgcttcctgggtacaagtacctcggacccttcaacggactcgacaaaggagagccggtcaacgaggcagacgctgcggccctcgagcacgacaaggcctacgaccggcagctcgacagcggagacaacccgtacctcaagtacaaccacgccgacgcggagtttcaggagcgtcttaaagaagatacgtcttttgggggcaacctcggacgagcagtcttccaggcgaaaaagagggttcttgaacctctgggcctggttgaggaacctgttaagacggctccgggaaaaaagaggccggtagagcactctcctgcggagccagactcctcctcgggaaccggaaaagcgggccagcagcctgcaagaaagagattgaatttcggtcagactggagacgcagactccgtacctgacccccagcctctcggacagccaccagcagcccccacaagtttgggatctactacaatggctacaggcagtggcgcaccaatggcagacaataacgagggtgccgatggagtgggtaattcctcaggaaattggcattgcgattcccaatggctgggcgacagagtcatcaccaccagcacccgaacctgggccctgcccacctacaacaaccacctctacaagcaaatctccagccaatcaggagcatcgaacgacaaccactactttggctacagcaccccttgggggtattttgacttcaacagattccactgtcacttctccccacgtgactggcaaagactcatcaacaacaactggggattccgacccaagagactcaacttcaagctctttaacattcaagtcaaagaggtcacgcagaatgacggtacgacgacgattgccaataaccttaccagcacggttcaggtgtttactgactcggagtaccagctcccgtacgtcctcggctcggcgcatcaaggatgcctcccgccgtttccagcggacgtcttcatggtcccacagtatggatacctcaccctgaacaacgggagtcaggcggtaggacactcttcctcttactgcctggagtactttccttctcagatgctgcgtaccggaaacaactttaccttcagctacacctttgaggacgtgcctttccacagcagctacgctcacagccagagtttggaccggctgatgaatcctctgatcgaccagtatctgtattatctgaacaggacacaatcaaatagtggaactcttcagcagtctaggctactgtttagccaagctggacccaccagcatgtctcttcaagctaaaaactggctgcctggaccttgctacagacagcagcgtctgtcaaagcaggcaaacgacaacaacaacagcaactttccctggactgcggctacaaagtatcatctaaatggtcgggactcgttggttaatccaggaccagctatggccagccacaaagacgatgaagaaaagtttttccccatgcatggaaccctgatatttggtaaacaaggaacaaatgctaacgacgcggatttggaacatgtcatgattacagatgaagaagaaatcaggaccaccaatcccgtggctacagagcagtacggaaacgtgtcaaataatttgcaaaactcaaatactggtccaactacagaaaatgtcaatcaccagggagcgttacctggtatggtgtggcaggatcgagacgtgtacctgcagggacccatttgggccaagattcctcacaccgacggacactttcacccttctccactgatgggaggttttggactcaaacacccgcctcctcaaatcatgatcaaaaacactcctgttccagccaatcctcctacaaacttcagcgcggcaaagtttgcttccttcatcacacagtattccacgggacaggtcagcgtggagatcgagtgggagctgcagaaggagaacagcaaacgctggaaccccgagatccagtacacttccaactacaacaaatctgttaatgtggactttactgtagacactaatggtgtgtattcagagcctcgccccattggcaccagatacctgactcgtaatctgtaa

SEQ ID NO: 12208 - DNA, 2208 bp, Artificial Sequence
  source: /note="Description of Artificial Sequence: Synthetic polynucleotide"
atggctgccgatggttatcttccagattggctcgaggacactctctctgaaggaataagacagtggtggaagctcaaacctggcccaccaccaccaaagcccgcagagcggcatcaggacgacagcaggggtcttgtgcttcccgggcacaagtacctcggacccttcaacggactcgacaaaggagagccggtcaacgaggcagacgctgcggccctcgagcacgacaaggcctacgaccggcagctcgacagcggagacaacccgtacctcaagtacaaccacgccgacgcggagtttcaggagcgtcttaaagaagatacgtcttttgggggcaacctcggacgagcagtcttccaggcgaaaaagagggttcttgaacctctgggcctggttgaggaacctgttaagacggctccgggaaaaaagaggccggtagagcactctcctgcggagccagactcctcctcgggaaccggaaaagcgggccagcagcctgcaagaaagagattgaatttcggtcagactggagacgcagactccgtacctgacccccagcctctcggacagccaccagcagcccccacaagtttgggatctactacaatggctacaggcagtggcgcaccaatggcagacaataacgagggtgccgatggagtgggtaattcctcaggaaattggcattgcgattcccaatggctgggcgacagagtcatcaccaccagcacccgaacctgggccctgcccacctacaacaaccacctctataagcaaatctccagccaatcaggagcatcgaacgacaaccactactttggctacagcaccccttgggggtattttgacttcaacagattccactgtcacttctccccacgtgactggcaaagactcatcaacaacaactggggattccgacccaagagactcaacttcaagctctttaacattcaagtcaaagaggtcacgcagaatgacggtacgacgacgattgccaataaccttaccagcacggttcaggtgtttactgactcggagtaccagctcccgtacgtcctcggctcggcgcatcaaggatgcctcccgccgtttccagcggacgtcttcatggtcccacagtatggatacctcaccctgaacaacgggagtcaggcggtaggacgctcttccttttactgcctggagtactttccttctcagatgctgcgtaccggaaacaactttaccttcagctacacctttgaggacgtgcccttccacagcagctacgctcacagccagagtttggaccggctgatgaatcctctgatcgaccagtatctgtattatctgaacaggacacaatcaaatagtggaactcttcagcagtctaggctactgtttagccaagctggacccaccagcatgtcccttcaagctaaaaactggctgcctggaccttgctacagacagcagcgtctgtcaaagcaggcaaacgacaacaacaacagcaactttccctggactgcggctacaaagtatcatctaaatggtcgggactcgttggttaatccaggaccagctatggccagccacaaagacgatgaagaaaagtttttccccatgcatggaaccctgatatttggtaaacaaggaacaaatgctaacgacgcggatttggaacatgtcatgattacagatgaagaagaaatcaggaccaccaatcccgtggctacagagcagtacggaaacgtgtcaaataatttgcaaaactcaaatactggtccaactacagaaaatgtcaatcaccagggagcgttacctggtatggtgtggcaggatcgagacgtgtacctgcagggacccatttgggccaagattcctcacaccgacggacactttcacccttctccactgatgggaggttttggactcaaacacccgcctcctcaaatcatgatcaaaaacactcctgttccagccaatcctcctacaaacttcagcgcggcaaagtttgcttccttcatcacacagtattccacgggacaggtcagcgtggagatcgagtgggagctgcagaaggagaacagcaaacgctggaaccccgagatccagtacacttccaactacaacaaatctgttaatgtggactttactgtggacgctaatggtgtgtattcagagcctcgccccattggcaccagatacctgactcgtaatctgtaa

SEQ ID NO: 12209 - DNA, 2208 bp, Artificial Sequence
  source: /note="Description of Artificial Sequence: Synthetic polynucleotide"
atggctgccgatggttatcttccagattggctcgaggacactctctctgaaggaataagacagtggtggaagctcaaacctggcccaccaccgccaaagcccgcagagcggcataaggacgacagcaggggtcttgtgcttcctgggtacaagtacctcggacccttcaacggactcgacaagggagagccggtcaacgaggcagacgccgcggccctcgagcacgacaaggcctacgaccggcagctcgacagcggagacaacccgtacctcaagtacaaccacgccgacgcggagtttcaggagcgccttaaagaagatacgtcttttgggggcaacctcggacgagcagtcttccaggcgaaaaagagggttcttgaacctctgggcctggttgaggaacctgttaagacggctccgggaaaaaagaggccggtagagcactctcctgcggagccagactcctcctcgggaaccggaaaagcgggccagcagcctgcaagaaagagattgaatttcggtcagactggagacgcagactccgtacctgacccccagcctctcggacagccaccagcagcccccacaagtttgggatctactacaatggctacaggcagtggcgcaccaatggcagacaataacgagggtgccgatggagtgggtaattcctcaggaaattggcattgcgattcccaatggctgggcgacagagtcatcaccaccagcacccgaacctgggccctgcccacctacaacaaccacctctacaagcaaatctccagccaatcaggagcatcgaacgacaaccactactttggctacagcaccccttgggggtattttgacttcaacagattccactgtcacttctccccacgtgactggcaaagactcatcaacaacaactggggattccgacccaagagactcaacttcaagctctttaacattcaagtcaaagaggtcacgcagaatgacggtacgacgacgattgccaataaccttaccagcacggttcaggtgtttactgactcggagtaccagctcccgtacgtcctcggctcggcgcatcaaggatgcctcccgccgtttccagcggacgtcttcatggtcccacagtatggatacctcaccctgaacaacgggagtcaggcggtaggacgctcttccttttactgcctggagtactttccttctcagatgctgcgtaccggaaacaactttaccttcagctacacctttgaggacgtgcccttccacagcagctacgctcacagccagagtttggaccggctgatgaatcctctgatcgaccagtatctgtattatctgaacaggacacaatcaaatagtggaactcttcagcagtctaggctactgtttagccaagctggacccaccagcatgtcccttcaagctaaaaactggctgcctggaccttgctacagacagcagcgtctgtcaaagcaggcaaacgacaacaacaacagcaactttccctggactgcggctacaaagtatcatctaaatggtcgggactcgttggttaatccaggaccagctatggccagccacaaagacgatgaagaaaagtttttccccatgcatggaaccctgatatttggtaaacaaggaacaaatgctaacgacgcggatttggaacatgtcatgattacagatgaagaagaaatcaggaccaccaatcccgtggctacagagcagtacggaaacgtgtcaaataatttgcaaaactcaaatactggtccaactacagaaaatgtcaatcaccagggagcgttacctggtatggtgtggcaggatcgagacgtgtacctgcagggacccatttgggccaagattcctcacaccgacggacactttcacccttctccactgatgggaggttttggactcaaacacccgcctcctcaaatcatgatcaaaaacactcctgttccagccaatcctcctacaaacttcagcgcggcaaagtttgcttccttcatcacacagtattccacgggacaggtcagcgtggagatcgagtgggagctgcagaaggagaacagcaaacgctggaaccccgagatccagtacacttccaactacaacaaatctgttaatgtggactttactgtggacgctaatggtgtgtattcagagcctcgccccattggcaccagatacctgactcgtaatctgtaa

SEQ ID NO: 12210 - DNA, 2208 bp, Artificial Sequence
  source: /note="Description of Artificial Sequence: Synthetic polynucleotide"
atggctgccgatggttatcttccagattggctcgaggacactctctctgaaggaataagacagtggtggaagctcaaacctggcccaccaccaccaaggcccgcagagcggcatcaggacgacagcaggggtcttgtgcttcctgggtacaagtacctcggacccttcaacggactcgacaaaggagagccggtcaacgaggcagacgctgcggccctcgagcacgacaaggcctacgaccggcagctcgacagcggagacaacccgtacctcaagtacaaccacgccgacgcggagtttcaggagcgtcttaaagaagatacgtcttttgggggcaacctcggacgagcagtcttccaggcgaaaaagagggttcttgaacctctgggcctggttgaggaacctgttaagacggctccgggaaaaaagaggccggtagagcactctcctgcggagccagactcctcctcgggaaccggaaaagcgggccagcagcctgcaagaaagagattgaatttcggtcagactggagacgcagactccgtacctgacccccagcctctcggacagccaccagcagcccccacaagtttgggatctactacaatggctacaggcagtggcgcaccaatggcagacaataacgagggtgccgatggagtgggtaattcctcaggaaattggcattgcgattcccaatggctgggcgacagagtcatcaccaccagcacccgaacctgggccctgcccacctacaacaaccacctctacaagcaaatctccagccaatcaggagcatcgaacgacaaccactactttggctacagcaccccttgggggtattttgacttcaacagattccactgtcacttctccccacgtgactggcaaagactcatcaacaacaactggggattccgacccaagagactcaacttcaagctctttaacattcaagtcaaagaggtcacgcagaatgacggtacgacgacgattgccaataaccttaccagcacggttcaggtgtttactgactcggagtaccagctcccgtacgtcctcggctcggcgcatcaaggatgcctcccgccgtttccagcggacgtcttcatggtcccacagtatggatacctcaccctgaacaacgggagtcaggcggtaggacgctcttcctcttactgcctggagtactttccttctcagatgctgcgtaccggaaacaactttaccttcagctacacctttgaggacgtgcccttccacagcagctacgctcacagccagagtttggaccggctgatgaatcctctgatcgaccagtatctgtattatctgaacaggacacaatcaaatagtggaactcttcagcagtctaggctactgtttagccaagctggacccaccagcatgtcccttcaagctaaaaactggctgcctggaccttgctacagacagcagcgtctgtcaaagcaggcaaacgacaacaacaacagcaactttccctggactgcggctacaaagtatcatctaaatggtcgggactcgttggttaatccaggaccagctatggccagccacaaagacgatgaagaaaagtttttccccatgcatggaaccctgatatttggtaaacaaggaacaaatgctaacgacgcggatttggaacatgtcatgattacagatgaagaagaaatcaggaccaccaatcccgtggctacagagcagtacggaaacgtgtcaaataatttgcaaaactcaaatactggtccaactacagaaaatgtcaatcaccagggagcgttacctggtatggtgtggcaggatcgagacgtgtacctgcagggacccatttgggccaagattcctcacaccgacggacactttcacccttctccactgatgggaggttttggactcaaacacccgcctcctcaaatcatgatcaaaaacactcctgttccagccaatcctcctacaaacttcagcgcggcaaagtttgcttccttcatcacacagtattccacgggacaggtcagcgtggagatcgagtgggagctgcagaaggagaacagcaaacgctggaaccccgagatccagtacacttccaactacaacaaatctgttaatgtggactttactgtggacgctaatggtgtgtattcagagcctcgccccattggcaccagatacctgactcgtaatctgtaa

SEQ ID NO: 12211 - DNA, 2208 bp, Artificial Sequence
  source: /note="Description of Artificial Sequence: Synthetic polynucleotide"
atggctgccgatggttatcttccagattggctcgaggacactctctctgaaggaataagacagtggtggaagctcaaacctggcccaccaccaccaaggcccgcagagcggcatcaggacgacagcaggggtcttgtgcttcctgggtacaagtacctcggacccttcaacggactcgacaaaggagagccggtcaacgaggcagacgctgcggccctcgagcacgacaaggcctacgaccggcagctcgacagcggagacaacccgtacctcaagtacaaccacgccgacgcggagtttcaggagcgtcttaaagaagatacgtcttttgggggcaacctcggacgagcagtcttccaggcgaaaaagagggttcttgaacctctgggcctggttgaggaacctgttaagacggctccgggaaaaaagaggccggtagagcactctcctgcggagccagactcctcctcgggaaccggaaaagcgggccagcagcctgcaagaaagagattgaatttcggtcagactggagacgcagactccgtacctgacccccagcctctcggacagccaccagcagcccccacaagtttgggatctactacaatggctacaggcagtggcgcaccaatggcagacaataacgagggtgccgatggagtgggtaattcctcaggaaattggcattgcgattcccaatggctgggcgacagagtcatcaccaccagcacccgaacctgggccctgcccacctacaacaaccacctctacaagcaaatctccagccaatcaggagcatcgaacgacaaccactactttggctacagcaccccttgggggtattttgacttcaacagattccactgtcacttctccccacgtgactggcaaagactcatcaacaacaactggggattccgacccaagagactcaacttcaagctctttaacattcaagtcaaagaggtcacgcagaatgacggtacgacgacgattgccaataaccttaccagcacggttcaggtgtttactgactcggagtaccagctcccgtacgtcctcggctcggcgcatcaaggatgcctcccgccgtttccagcggacgtcttcatggtcccacagtatggatacctcaccctgaacaacgggagtcaggcggtaggacgctcttccttttactgcctggagtactttccttctcagatgctgcgtaccggaaacaactttaccttcagctacacctttgaggacgtgcccttccacagcagctacgctcacagccagagtttggaccggctgatgaatcctctgatcgaccagtatctgtattatccgaacaggacacaatcaaatagtggaactcttcagcagtctaggctactgtttagccaagctggacccaccagcatgtcccttcaagctaaaaactggctgcctggaccttgctacagacagcagcgtctgtcaaagcaggcaaacgacaacaacaacagcaactttccctggactgcggctacaaagtatcatctaaatggtcgggactcgttggttaatccaggaccagctatggccagccacaaagacgatgaagaaaagtttttccccatgcatggaaccctgatatttggtaaacaaggaacaaatgctaacgacgcggatttggaacatgtcatgattacagatgaagaagaaatcaggaccaccaatcccgtggctacagagcagtacggaaacgtgtcaaataatttgcaaaactcaaatactggtccaactacagaaaatgtcaatcaccagggagcgttacctggtatggtgtggcaggatcgagacgtgtacctgcagggacccatttgggccaagattcctcacaccgacggacactttcacccttctccactgatgggaggttttggactcaaacacccgcctcctcaaatcatgatcaaaaacactcctgttccagccaatcctcctacaaacttcagcgcggcaaagtttgcttccttcatcacacagtattccacgggacaggtcagcgtggagatcgagtgggagctgcagaaggagaacagcaaacgctggaaccccgagatccagtacacttccaactacaacaaatctgttaatgtggactttactgtggacgctaatggtgtgtattcagagcctcgccccattggcaccagatacctgactcgtaatctgtaa

SEQ ID NO: 12212 - DNA, 2208 bp, Artificial Sequence
  source: /note="Description of Artificial Sequence: Synthetic polynucleotide"
atggctgccgatggttatcttccagattggctcgaggacactctctctgaaggaataagacagtggtggaagctcaaacctggcccaccaccaccaaggcccgcagagcggcatcaggacgacagcaggggtcttgtgcttcctgggtacaagtacctcggacccttcaacggactcgacaaaggagagccggtcaacgaggcagacgctgcggccctcgagcacgacaaggcctacgaccggcagctcgacagcggagacaacccgtacctcaagtacaaccacgccgacgcggagtttcaggagcgtcttaaagaagatacgtcttttgggggcaacctcggacgagcagtcttccaggcgaaaaagagggttcttgaacctctgggcctggttgaggaacctgttaagacggctccgggaaaaaagaggccggtagagcactctcctgcggagccagactcctcctcgggaaccggaaaagcgggccagcagcctgcaagaaagagattgaatttcggtcagactggagacgcagactccgtacctgacccccagcctctcggacagccaccagcagcccccacaagtttgggatctactacaatggctacaggcagtggcgcaccaatggcagacaataacgagggtgccgatggagtgggtaattcctcaggaaattggcattgcgattcccaatggctgggcgacagagtcatcaccaccagcacccgaacctgggccctgcccacctacaacaaccacctctacaagcaaatctccagccaatcaggagcatcgaacgacaaccactactttggctacagcaccccttgggggtattttgacttcaacagattccactgtcacttctccccacgtgactggcaaagactcatcaacaacaactggggattccgacccaagagactcaacttcaagctctttaacattcaagtcaaagaggtcacgcagaatgacggtacgacgacgattgccaataaccttaccagcacggttcaggtgtttactgactcggagtaccagctcccgtacgtcctcggctcggcgcatcaaggatgcctcccgccgtttccagcggacgtcttcatggtcccacagtatggatacctcaccctgaacaacgggagtcaggcggtaggacgctcttccttttactgcctggagtactttccttctcagatgcttcgtaccggaaacaactttaccttcagttacacctttgaagacgttcctttccacagcagctacgctcacagtcaaagtctggaccggctgatgaatcctcttatcgaccagtacctgtattatctaaacaaaacacaatcaaatagtggaactcttcagcagtctcggctactgtttagtcaagctggacctaccagcatgtctcttcaagctaaaaactggctgcctggaccttgctacagacaacagcgtctgtcaaagcaggcaaacgacaacaacaacagcaactttccctggactgcggctacaaagtatcatctaaatggccgggactcgttggttaatccaggaccagctatggccagccacaaagacgatgaagaaaagtttttccccatgcatggaaccctgatatttggcaaacaagggacaaatgctaacgacgcggatttggacaatgtcatgattacagatgaagaagaaatccgtaccaccaatcccgtggctacggagcagtacgggactgtgtcaaataatttgcaaaactcaaatactggtccaactactggaactgtcaatcaccaaggagcgttacctggtatggtgtggcaggatcgagacgtgtaccttcagggacccatttgggccaagattcctcacaccgatggacactttcacccttctccgctgatgggaggttttggactcaaacacccgcctcctcagatcatgatcaaaaacactcccgttccagccaatcctcccacaaacttcagttctgccaagtttgcttctttcatcacacagtattccacgggacaggttagcgtggagatcgagtgggagctgcagaaggagaacagcaaacgctggaaccccgagatccagtacacttccaactacaacaagtctgttaatgtggactttactgtggacactaatggtgtgtattcagagcctcgccccattggcaccagatacctgactcgtaatctgtaa

SEQ ID NO: 12213 - DNA, 2208 bp, Artificial Sequence
  source: /note="Description of Artificial Sequence: Synthetic polynucleotide"
atggctgccgatggttatcttccagattggctcgaggacactctctctgaaggaataagacagtggtggaagctcaaacctggcccaccaccaccaaagcccgcagagcggcatcaggacgacagcaggggtcttgtgcttcccgggcacaagtacctcggacccttcaacggactcgacaaaggagagccggtcaacgaggcagacgctgcggccctcgagcacgacaaggcctacgaccggcagctcgacagcggagacaacccgtacctcaagtacaaccacgccgacgcggagtttcaggagcgtcttaaagaagatacgtcttttgggggcaacctcggacgagcagtcttccaggcgaaaaagagggttcttgaacctctgggcctggttgaggaacctgttaagacggctccgggaaaaaagaggccggtagagcactctcctgcggagccagactcctcctcgggaaccggaaaagcgggccagcagcctgcaagaaagagattgaatttcggtcagactggagacgcagactccgtacctgacccccagcctctcggacagccaccagcagcccccacaagtttgggatctactacaatggctacaggcagtggcgcaccaatggcagacaataacgagggtgccgatggagtgggtaattcctcaggaaattggcattgcgattcccaatggctgggcgacagagtcatcaccaccagcacccgaacctgggccctgcccacctacaacaaccacctctataagcaaatctccagccaatcaggagcatcgaacgacaaccactactttggctacagcaccccttgggggtattttgacttcaacagattccactgtcacttctccccacgtgactggcaaagactcatcaacaacaactggggattccgacccaagagactcaacttcaagctctttaacattcaagtcaaagaggtcacgcagaatgacggtacgacgacgattgccaataaccttaccagcacggttcaggtgtttactgactcggagtaccagctcccgtacgtcctcggctcggcgcatcaaggatgcctcccgccgtttccagcggacgtcttcatggtcccacagtatggatacctcaccctgaacaacgggagtcaggcggtaggacactcttcctcttactgcctggagtactttccttctcagatgctgcgtaccggaaacaactttaccttcagctacacctttgaggacgtgcctttccacagcagctacgctcacagccagagtttggaccggctgatgaatcctctgatcgaccagtatctgtattatctgaacaggacacaatcaaatagtggaactcttcagcagtctaggctactgtttagccaagctggacccaccagcatgtctcttcaagctaaaaactggctgcctggaccttgctacagacagcagcgtctgtcaaagcaggcaaacgacaacaacaacagcaactttccctggactgcggctacaaagtatcatctaaatggtcgggactcgttggttaatccaggaccagctatggccagccacaaagacgatgaagaaaagtttttccccatgcatggaaccctgatatttggtaaacaaggaacaaatgctaacgacgcggatttggaacatgtcatgattacagatgaagaagaaatcaggaccaccaatcccgtggctacagagcagtacggaaacgtgtcaaataatttgcaaaactcaaatactggtccaactacagaaaatgtcaatcaccagggagcgttacctggtatggtgtggcaggatcgagacgtgtacctgcagggacccatttgggccaagattcctcacaccgacggacactttcacccttctccactgatgggaggttttggactcaaacacccgcctcctcaaatcatgatcaaaaacactcctgttccagccaatcctcctacaaacttcagcgcggcaaagtttgcttccttcatcacacagtattccacgggacaggtcagcgtggagatcgagtgggagctgcagaaggagaacagcaaacgctggaaccccgagatccagtacacttccaactacaacaaatctgttaatgtggactttactgtagacactaatggtgtgtattcagagcctcgccccattggcaccagatacctgactcgtaatctgtaa

SEQ ID NO: 12214 - DNA, 2208 bp, Artificial Sequence
  source: /note="Description of Artificial Sequence: Synthetic polynucleotide"
atggctgccgatggttatcttccagattggctcgaggacactctctctgaaggaataagacagtggtggaagctcaaacctggcccaccaccaccaaggcccgcagagcggcatcaggacgacagcaggggtcttgtgcttcctgggtacaagtacctcggacccttcaacggactcgacaaaggagagccggtcaacgaggtagacgctgcggccctcgagcacgacaaggcctacgaccggcagctcgacagcggagacaacccgtacctcaagtacaaccacgccgacgcggagtttcaggagcgtcttaaagaagatacgtcttttgggggcaacctcggacgagcagtcttccaggcgaaaaagagggttcttgaacctctgggcctggttgaggaacctgttaagacggctccgggaaaaaagaggccggtagagcactctcctgcggagccagactcctcctcgggaaccggaaaagcgggccagcagcctgcaagaaagagattgaatttcggtcagactggagacgcagactccgtacctgacccccagcctctcggacagccaccagcagcccccacaagtttgggatctactacaatggctacaggcagtggcgcaccaatggcagacaataacgagggtgccgatggagtgggtaattcctcaggaaattggcattgcgattcccaatggctgggcgacagagtcatcaccaccagcacccgaacctgggccctgcccacctacaacaaccacctctacaagcaaatctccagccaatcaggagcatcgaacgacaaccactactttggctacagcaccccttgggggtattttgacttcaacagattccactgtcacttctccccacgtgactggcaaagactcatcaacaacaactggggattccgacccaagagactcaacttcaagctctttaacattcaagtcaaagaggtcacgcagagtgacggtacgacgacgattgccaataaccttaccagcacggttcaggtgtttactgactcggagtaccagctcccgtacgtcctcggctcggcgcatcaaggatgcctcccgccgtttccagcggacgtcttcatggtcccacagtatggatacctcaccctgaacaacgggagtcaggcggtaggacgctcttccttttactgcctggagtactttccttctcagatgctgcgtaccggaaacaactttaccttcagctacacctttgaggacgtgcccttccacagcagctacgctcacagccagagtttggaccggctgatgaatcctctgatcgaccagtatctgtattatctgaacaggacacaatcaaatagtggaactcttcagcagtctaggctactgtttagccaagctggacccaccagcatgtcccttcaagctaaaaactggctgcctggaccttgctacagacagcagcgtctgtcaaagcaggcaaacgacaacaacaacagcaactttccctggactgcggctacaaagtatcatctaaatggtcgggactcgttggttaatccaggaccagctatggccagccacaaagacgatgaagaaaagtttttccccatgcatggaaccctgatatttggtaaacaaggaacaaatgctaacgacgcggatttggaacatgtcatgattacagatgaagaagaaatcaggaccaccaatcccgtggctacagagcagtacggaaacgtgtcaaataatttgcaaaactcaaatactggtccaactacagaaaatgtcaatcaccagggagcgttacctggtatggtgtggcaggatcgagacgtgtacctgcagggacccatttgggccaagattcctcacaccgacggacactttcacccttctccactgatgggaggttttggactcaaacacccgcctcctcaaatcatgatcaaaaacactcctgttccagccaatcctcctacaaacttcagcgcggcaaagtttgcttccttcatcacacagtattccacgggacaggtcagcgtggagatcgagtgggagctgcagaaggagaacagcaaacgctggaaccccgagatccagtacacttccaactacaacaaatctgttaatgtggactttactgtggacgctaatggtgtgtattcagagcctcgccccattggcaccagatacctgactcgtaatctgtaa

SEQ ID NO: 12215 - DNA, 2208 bp, Artificial Sequence
  source: /note="Description of Artificial Sequence: Synthetic polynucleotide"
atggctgccgatggttatcttccagattggctcgaggacactctctctgaaggaataagacagtggtggaagctcaaacctggcccaccaccaccaaggcccgcagagcggcatcaggacgacagcaggggtcttgtgcttcctgggtacaagtacctcggacccttcaacggactcgacaaaggagagccggtcaacgaggcagacgctgcggccctcgagcacgacaaggcctacgaccggcagctcgacagcggagacaacccgtacctcaagtacaaccacgccgacgcggagtttcaggagcgtcttaaagaagatacgtcttttgggggcaacctcggacgagcagtcttccaggcgaaaaagagggttcttgaacctctgggcctggttgaggaacctgttaagacggctccgggaaaaaagaggccggtagagcactctcctgcggagccagactcctcctcgggaaccggaaaagcgggccagcagcctgcaagaaagagattgaatttcggtcagactggagacgcagactccgtacctgacccccagcctctcggacagccaccagcagcccccacaagtttgggatctactacaatggctacaggcagtggcgcaccaatggcagacaataacgagggtgccgatggagtgggtaattcctcaggaaattggcattgcgattcccaatggctgggcgacagagtcatcaccaccagcacccgaacctgggccctgcccacctacaacaaccacctctacaagcaaatctccagccaatcaggagcatcgaacgacaaccactactttggctacagcaccccttgggggtattttgacttcaacagattccactgtcacttctccccacgtgactggcaaagactcatcaacaacaactggggattccgacccaagagactcaacttcaagctctttaacattcaagtcaaagaggtcacgcagaatgacggtacgacgacgattgccaataaccttaccagcacggttcaggtgtttactgactcggagtaccagctcccgtacgtcctcggctcggcgcatcaaggatgcctcccgccgtttccagcggacgtcttcatggtcccacagtatggatacctcaccctgaacaacgggagtcaggcggtaggacgctcttccttttactgcctggagtactttccttctcagatgctgcgtaccggaaacaactttaccttcagctacacctttgaggacgtgcccttccacagcagctacgctcacagccagagtttggaccggctgatgaatcctctgatcgaccagtatctgtattatctgaacaggacacaatcaaatagtggaactcttcagcagtctaggctactgtttagccaagctggacccaccagcatgtcccttcaagctaaaaactggctgcctggaccttgctacagacagcagcgtctgtcaaagcaggcaaacgacaacaacaacagcaactttccctggactgcggctacaaagtatcatctaaatggtcgggactcgttggttaatccaggaccagctatggccagccacaaagacgatgaagaaaagtttttccccatgcatggaaccctgatatttggtaaacaaggaacaaatgctaacgacgcggatttggaacatgtcatgattacagatgaagaagaaatcaggaccaccaatcccgtggctacagagcagtacggaaacgtgtcaaataatttgcaaaactcaaatactggtccaactacagaaaatgtcaatcaccagggagcgttacctggtatggtgtggcaggatcgagacgtgtacctgcagggacccatttgggccaagattcctcacaccgacggacactttcacccttctccactgatgggaggttttggactcaaacacccgcctcctcaaatcatgatcaaaaacactcctgttccagccaatcctcctacaaacttcagcgcggcaaagtttgcttccttcatcacacagtattccacgggacaggtcagcgtggagatcgagtgggagctgcagaaggagaacagcaaacgctggaaccccgagatccagtatacctccaactacaacaagtctgttaatgtggactttactgtggacactaatggcgtgtattcagagcctcgccccattggcacaagatacctgactcgtaatctgtaa

SEQ ID NO: 12216 - DNA, 2208 bp, Artificial Sequence
  source: /note="Description of Artificial Sequence: Synthetic polynucleotide"
atggctgccgatggttatcttccagattggctcgaggacactctctctgaaggaataagacagtggtggaagctcaaacctggcccaccaccaccaaagcccgcagagcggcatcaggacgacagcaggggtcttgtgcttcccgggcacaagtacctcggacccttcaacggactcgacaaaggagagccggtcaacgaggcagacgctgcggccctcgagcacgacaaggcctacgaccggcagctcgacagcggagacaacccgtacctcaagtacaaccacgccgacgcggagtttcaggagcgtcttaaagaagatacgtcttttgggggcaacctcggacgagcagtcttccaggcgaaaaagagggttcttgaacctctgggcctggttgaggaacctgttaagacggctccgggaaaaaagaggccggtagagcactctcctgcggagccagactcctcctcgggaaccggaaaagcgggccagcagcctgcaagaaagagattgaatttcggtcagactggagacgcagactccgtacctgacccccagcctctcggacagccaccagcagcccccacaagtttgggatctactacaatggctacaggcagtggcgcaccaatggcagacaataacgagggtgccgatggagtgggtaattcctcaggaaattggcattgcgattcccaatggctgggcgacagagtcatcaccaccagcacccgaacctgggccctgcccacctacaacaaccacctctataagcaaatctccagccaatcaggagcatcgaacgacaaccactactttggctacagcaccccttgggggtattttgacttcaacagattccactgtcacttctccccacgtgactggcaaagactcatcaacaacaactggggattccgacccaagagactcaacttcaagctctttaacattcaagtcaaagaggtcacgcagaatgacggtacgacgacgattgccaataaccttaccagcacggttcaggtgtttactgactcggagtaccagctcccgtacgtcctcggctcggcgcatcaaggatgcctcccgccgtttccagcggacgtcttcatggtcccacagtatggatacctcaccctgaacaacgggagtcaggcggtaggacactcttcctcttactgcctggagtactttccttctcagatgctgcgtaccggaaacaactttaccttcagctacacctttgaggacgtgcctttccacagcagctacgctcacagccagagtttggaccggctgatgaatcctctgatcgaccagtatctgtattatctgaacaggacacaatcaaatagtggaactcttcagcagtctaggctactgtttagccaagctggacccaccagcatgtctcttcaagctaaaaactggctgcctggaccttgctacagacagcagcgtctgtcaaagcaggcaaacgacaacaacaacagcaactttccctggactgcggctacaaagtatcatctaaatggtcgggactcgttggttaatccaggaccagctatggccagccacaaagacgatgaagaaaagtttttccccatgcatggaaccctgatatttggtaaacaaggaacaaatgctaacgacgcggatttggaacatgtcatgattacagatgaagaagaaatcaggaccaccaatcccgtggctacagagcagtacggaaacgtgtcaaataatttgcaaaactcaaatactggtccaactacagaaaatgtcaatcaccagggagcgttacctggtatggtgtggcaggatcgagacgtgtacctgcagggacccatttgggccaagattcctcacaccgacggacactttcacccttctccactgatgggaggttttggactcaaacacccgcctcctcaaatcatgatcaaaaacactcctgttccagccaatcctcctacaaacttcagcgcggcaaagtttgcttccttcatcacacagtattccacgggacaggtcagcgtggagatcgagtgggagctgcagaaggagaacagcaaacgctggaaccccgagatccagtacacttccaactacaacaaatctgttaatgtggactttactgtggacgctaatggtgtgtattcagagcctcgccccattggcaccagatacctgactcgtaatctgtaa

SEQ ID NO: 12217 - DNA, 2208 bp, Artificial Sequence
  source: /note="Description of Artificial Sequence: Synthetic polynucleotide"
atggctgccgatggttatcttccagattggctcgaggacactctctctgaaggaataagacagtggtggaagctcaaacctggcccaccaccaccaaggcccgcagagcggcatcaggacgacagcaggggtcttgtgcttcctgggtacaagtacctcggacccttcaacggactcgacaaaggagagccggtcaacgaggcagacgctgcggccctcgagcacgacaaggcctacgaccggcagctcgacagcggagacaacccgtacctcaagtacaaccacgccgacgcggagtttcaggagcgtcttaaagaagatacgtcttttgggggcaacctcggacgagcagtcttccaggcgaaaaagagggttcttgaacctctgggcctggttgaggaacctgttaagacggctccgggaaaaaagaggccggtagagcactctcctgcggagccagactcctcctcgggaaccggaaaagcgggccagcagcctgcaagaaagagattgaatttcggtcagactggagacgcagactccgtacctgacccccagcctctcggacagccaccagcagcccccacaagtttgggatctactacaatggctacaggcagtggcgcaccaatggcagacaataacgagggtgccgatggagtgggtaattcctcaggaaattggcattgcgattcccaatggctgggcgacagagtcatcaccaccagcacccgaacctgggccctgcccacctacaacaaccacctctacaagcaaatctccagccaatcaggagcatcgaacgacaaccactactttggctacagcaccccttgggggtattttgacttcaacagattccactgtcacttctccccacgtgactggcaaagactcatcaacaacaactggggattccgacccaagagactcaacttcaagctctttaacattcaagtcaaagaggtcacgcagaatgacggtacgacgacgattgccaataaccttaccagcacggttcaggtgtttactgactcggagtaccagctcccgtacgtcctcggctcggcgcatcaaggatgcctcccgccgtttccagcggacgtcttcatggtcccacagtatggatacctcaccctgaacaacgggagtcaggcggtaggacgctcttccttttactgcctggagtactttccttctcagatgctgcgtaccggaaacaactttaccttcagctacacctttgaggacgtgcccttccacagcagctacgctcacagccagagtttggaccggctgatgaatcctctgatcgaccagtatctgtattatctgaacaggacacaatcaaatagtggaactcttcagcagtctaggctactgtttagccaagctggacccaccagcatgtcccttcaagctaaaaactggctgcctggaccttgctacagacagcagcgtctgtcaaagcaggcaaacgacaacaacaacagcaactttccctggactgcggctacaaagtatcatctaaatggtcgggactcgttggttaatccaggaccagctatggccagccacaaagacgatgaagaaaagtttttccccatgcatggaaccctgatatttggtaaacaaggaacaaatgctaacgacgcggatttggaacatgtcatgattacagatgaagaagaaatcaggaccaccaatcccgtggctacagagcagtacggaaacgtgtcaaataatttgcaaaactcaaatactggtccaactacagaaaatgtcaatcaccagggagcgttacctggtatggtgtggcaggatcgagacgtgtacctgcagggacccatttgggccaagattcctcacaccgacggacactttcacccttctccactgatgggaggttttggactcaaacacccgcctcctcaaatcatgatcaaaaacactcctgttccagccaatcctcctacaaacttcagcgcggcaaagtttgcttccttcatcacacagtattccacgggacaggccagcgtggagatcgagtgggagctgcagaaggagaacagcaaacgctggaaccccgagatccagtacacttccaactacaacaaatctgttaatgtggactttactgtggacgctaatggtgtgtattcagagcctcgccccattggcaccagatacctgactcgtaatctgtaa

SEQ ID NO: 12218 - DNA, 2208 bp, Artificial Sequence
  source: /note="Description of Artificial Sequence: Synthetic polynucleotide"
atggctgccgatggttatcttccagattggctcgaggacactctctctgaaggaataagacagtggtggaagctcaaacctggcccaccaccgccaaagcccgcagggcggcataaggacgacagcaggggtcttgtgcttcctgggtacaagtacctcggacccttcaacggactcgacaagggagagccggtcaacgaggcagacgccgcggccctcgagcacgacaaggcctacgaccggcagctcgacagcggagacaacccgtacctcaagtacaaccacgccggcgcggagtttcaggagcgccttaaagaagatacgtcttttgggggcaacctcggacgagcagtattccaggcgaaaaagagggttcttgaacctctgggcctggttgaggagcctgttaagacggccccgggaaaaaagaggccggtagagcactctcctgtggagccagactcctcctcgggaaccggaaaagcgggccagcagcctgcgaggaagagattgaattttggtcagactggagacgcagactccgtacctgacccccagcctctcggacagccaccagcagcccccacaagtttgggatctactacaatggctacaggcagtggcgcaccaatggcagacaataacgagggtgccgatggagtgggtaattcctcagggaattggcattgcgattcccaatggttgggcgacagagtcatcaccaccagcacccgaacctgggccctgcccacctacaacaaccacctctacaagcaaatctccagccaatcaggagcagcgaacgacaaccactactttggctacagcaccccttgggggtattttgacttcaacagattccactgccacttttcaccacgtgactggcaaagactcatcaacaacaactggggattccgacccaagagactcaacttcaagctctttaacattcaagtcaaagaggtcacgcagaatgacggtacgacgacgattgccaataaccttaccagcacggttcaggtgtttactgactcggagtaccagctcccgtacgtcctcggctcggcgcatcaaggatgcctcccgccgtttccagcggacgtcttcatggtcccacagtatggatacctcaccctgaacaacgggagtcaggcggtaggacgctcttccttttactgcctggagtactttccttctcagatgctgcgtaccggaaacaactttaccttcagctacacctttgaggacgtgcccttccacagcagctacgctcacagccagagtttggaccggctgatgaatcctctgatcgaccagtatctgtattatctgaacaggacacaatcaaatagtggaactcttcagcagtctaggctactgtttagccaagctggacccaccagcatgtcccttcaagctaaaaactggctgcctggaccttgctacagacagcagcgtctgtcaaagcaggcaaacgacaacaacaacagcaactttccctggactgcggctacaaagtatcatctaaatggtcgggactcgttggttaatccaggaccagctatggccagccacaaagacgatgaagaaaagtttttccccatgcatggaaccctgatatttggtaaacaaggaacaaatgctaacgacgcggatttggaacatgtcatgattacagatgaagaagaaatcaggaccaccaatcccgtggctacagagcagtacggaaacgtgtcaaataatttgcaaaactcaaatactggtccaactacagaaaatgtcaatcaccagggagcgttacctggtatggtgtggcaggatcgagacgtgtacctgcagggacccatttgggccaagattcctcacaccgacggacactttcacccttctccactgatgggaggttttggactcaaacacccgcctcctcaaatcatgatcaaaaacactcctgttccagccaatcctcctacaaacttcagcgcggcaaagtttgcttccttcatcacacagtattccacgggacaggtcagcgtggagatcgagtgggagctgcagaaggagaacagcaaacgctggaaccccgagatccagtacacttccaactacaacaaatctgttaatgtggactttactgtggacgctaatggtgtgtattcagagcctcgccccattggcaccagatacctgactcgtaatctgtaa

SEQ ID NO: 12219 - DNA, 2208 bp, Artificial Sequence
  source: /note="Description of Artificial Sequence: Synthetic polynucleotide"
atggctgccgatggttatcttccagattggctcgaggacactctctctgaaggaataagacagtggtggaagctcaaacctggcccaccaccaccaaggcccgcagagcggcatcaggacgacagcaggggtcttgtgcttcctgggtacaagtacctcggacccttcaacggactcgacaaaggagagccggtcaacgaggcagacgctgcggccctcgagcacgacaaggcctacgaccggcagctcgacagcggagacaacccgtacctcaagtacaaccacgccgacgcggagtttcaggagcgtcttaaagaagatacgtcttttgggggcaacctcggacgagcagtcttccaggcgaaaaagagggttcttgaacctctgggcctggttgaggaacctgttaagacggctccgggaaaaaagaggccggtagagcactctcctgcggagccagactcctcctcgggaaccggaaaagcgggccagcagcctgcaagaaagagattgaatttcggtcagactggagacgcagactccgtacctgacccccagcctctcggacagccaccagcagcccccacaagtttgggatctactacaatggctacaggcagtggcgcaccaatggcagacaataacgagggtgccgatggagtgggtaattcctcaggaaattggcattgcgattcccaatggctgggcgacagagtcatcaccaccagcacccgaacctgggccctgcccacctacaacaaccacctctacaagcaaatctccagccaatcaggagcatcgaacgacaaccactactttggctacagcaccccttgggggtattttgacttcaacagattccactgtcacttctccccacgtgactggcaaagactcatcaacaacaactggggattccgacccaagagactcaacttcaagctctttaacattcaagtcaaagaggtcacgcagaatgacggtacgacgacgattgccaataaccttaccagcacggttcaggtgtttactgactcggagtaccagctcccgtacgtcctcggctcggcgcatcaaggatgcctcccgccgtttccagcggacgtcttcatggtcccacagtatggatacctcaccctgaacaacgggagtcaggcggtaggacgctcttccttttactgcctggagtactttccttctcagatgctgcgtaccggaaacaactttaccttcagctacacctttgaggacgtgcccttccacagcagctacgctcacagccagagtttggaccggctgatgaatcctctgatcgaccagtatctgtattatctgaacaggacacaatcaaatagtggaactcttcagcagtctaggctactgtttagccaagctggacccaccagcatgtcccttcaagctaaaaactggctgcctggaccttgctacagacagcagcgtctgtcaaagcaggcaaacgacaacaacaacagcaactttccctggactgcggctacaaagtatcatctaaatggtcgggactcgttggttaatccaggaccagctatggccagccacaaagacgatgaagaaaagtttttccccatgcatggaaccctgatatttggtaaacaaggaacaaatgctaacgacgcggatttggaacatgtcatgattacagatgaagaagaaatcaggaccaccaatcccgtggctacagagcagtacggaaacgtgtcaaataatttgcaaaactcaaatactggtccaactacagaaaatgtcaatcaccagggagcgttacctggtatggtgtggcaggatcgagacgtgtacctgcagggacccatttgggccaagattcctcacaccgacggacactttcacccttctccactgatgggaggttttggactcaaacacccgcctcctcaaatcatgatcaaaaacactcctgttccagcctatcctcctacaaacttcagcgcggcaaagtttgcttccttcatcacacagtattccacgagacaggtcagcgtggagatcgagtgggagctgcagaaggagaacagcaaacgctggaaccccgagatccagtacacttccaactacaacaaatctgttaatgtggactttactgtggacgctaatggtgtgtattcagagcctcgccccattggcaccagatacctgactcgtaatctgtaa

SEQ ID NO: 12220 - DNA, 2208 bp, Artificial Sequence
  source: /note="Description of Artificial Sequence: Synthetic polynucleotide"
atggctgccgatggttatcttccagattggctcgaggacactctctctgaaggaataagacagtggtggaagctcaaacctggcccaccaccaccaaggcccgcagagcggcatcaggacgacagcaggggtcttgtgcttcctgggtacaagtacctcggacccttcaacggactcgacaaaggagagccggtcaacgaggcagacgctgcggccctcgagcacgacaaggcctacgaccggcagctcgacagcggagacaacccgtacctcaagtacaaccacgccgacgcggagtttcaggagcgtcttaaagaagatacgtcttttgggggcaacctcggacgagcagtcttccaggcgaaaaagagggttcttgaacctctgggcctggttgaggaacctgttaagacggctccgggaaaaaagaggccggtagagcactctcctgcggagccagactcctcctcgggaaccggaaaagcgggccagcagcctgcaagaaagagattgaatttcggtcagactggagacgcagactccgtacctgacccccagcctctcggacagccaccagcagcccccacaagtttgggatctactacaatggctacaggcagtggcgcaccaatggcagacaataacgagggtgccgatggagtgggtaattcctcaggaaattggcattgcgattcccaatggctgggcgacagagtcatcaccaccagcacccgaacctgggccctgcccacctacaacaaccacctctacaagcaaatctccagccaatcaggagcatcgaacgacaaccactactttggctacagcaccccttgggggtattttgacttcaacagattccactgtcacttctccccacgtgactggcaaagactcatcaacaacaactggggattccgacccaagagactcaacttcaagctctttaacattcaagtcaaagaggtcacgcagaatgacggtacgacgacgattgccaataaccttaccagcacggttcaggtgtttactgactcggagtaccagctcccgtacgtcctcggctcggcgcatcaaggatgcctcccgccgtttccagcggacgtcttcatggtcccacagtatggatacctcaccctgaacaacgggagtcaggcggtaggacgctcttccttttactgcctggagtactttccttctcagatgctgcgtaccggaaacaactttaccttcagctacacctttgaggacgtgcccttccacagcagctacgctcacagccagagtttggaccggctgatgaatcctctgatcgaccagtatctgtattatctgaacaggacacaatcaaatagtggaactcttcagcagtctaggctactgtttagccaagctggacccaccagcatgtcccttcaagctaaaaactggctgcctggaccttgctacagacagcagcgtctgtcaaagcaggcaaacgacaacaacaacagcaactttccctggactgcggctacaaagtatcatctaaatggccgggactcgttggttaatccaggaccagctatggccagccacaaagacgatgaagaaaagtttttccccatgcatggaaccctgatatttggcaaacaagggacaaatgctaacgacgcggatttggacaatgtcatgattacagatgaagaagaaatccgtaccaccaatcccgtggctacggagcagtacgggactgtgtcaaataatttgcaaaactcaaatactggtccaactactggaactgtcaatcaccaaggagcgttacctggtatggtgtggcaggatcgagacgtgtaccttcagggacccatttgggccaagattcctcacaccgatggacactttcacccttctccgctgatgggaggttttggactcaaacacccgcctcctcagatcatgatcaaaaacactcccgttccagccaatcctcccacaaacttcagttctgccaagtttgcttctttcatcacacagtattccacgggacaggttagcgtggagatcgagtgggagctgcagaaggagaacagcaaacgctggaaccccgagatccagtacacttccaactacaacaagtctgttaatgtggactttactgtggacactaatggtgtgtattcagagcctcgccccattggcaccagatacctgactcgtaatctgtaa

SEQ ID NO: 12221 - DNA, 2208 bp, Artificial Sequence
  source: /note="Description of Artificial Sequence: Synthetic polynucleotide"
atggctgccgatggttatcttccagattggctcgaggacattctctctgaaggaataagacagtggtggaagctcaaacctggcccaccaccaccaaagcccgcagagcggcataaggacgacagcaggggtcttgtgcttcctgggtacaagtacctcggacccttcaacggactcgacaaaggagagccggtcaacgaggcagacgccgcggccctcgagcacgacaaggcctacgaccggcagctcgacagcggagacaacccgtacctcaagtacaaccacgccgacgcggagtttcaggagcgtcttaaagaagatacgtcttttgggggcaacctcggacgagcagtcttccaggcaaaaaagagggttcttgaacctctgggcctggttgaggaacctgttaagacggctccgggaaaaaagaggccggtagagcaatctcctgcggagccagactcctcctcgggaaccggaaaggcgggcaaccagcctgcaagaaagagattgaattttggtcagactggagacgcagactccgtacctgacccccagcctctcggacagccaccagcagccccctctggtctgggatctactacaatggctacaggcagtggcgcaccaatggcagacaataacgagggtgccgatggagtgggtaattcctcaggaaattggcattgcgattcccaatggttgggcgacagagtcatcaccaccagcacccgaacctgggccctgcccacctacaacaatcacctctacaagcaaatctccagccaatcaggagcagcgaacgacaaccactactttggctacagcaccccctgggggtattttgacttcaacagattccactgccacttttcaccacgtgactggcaaagactcatcaacaacaactggggattccgacccaaaagactcaacttcaagctctttaacattcaagtcaaagaggtcacgcagaatgacggtacgacgacgattgccaataaccttaccagcacggttcaggtgtttactgactcggagtaccagctcccgtacgtcctcggctcggcgcatcaaggatgcctcccgccgtttccagcggacgtcttcatggtcccacagtatggatacctcaccctgaacaacgggagtcaggcggtaggacgctcttccttttactgcctggagtactttccttctcagatgcttcgtaccggaaacaactttaccttcagttacacctttgaagacgttcctttccacagcagctacgctcacagtcaaagtctggaccggctgatgaatcctctgatagaccagtacctgtattatctaaacaaaacacaatcaaatagtggaactcttcagcagtctcggctactgtttagtcaagctggacccaccagcatgtctcttcaagctaaaaactggctgcctggaccttgctacagacaacagcgtctgtcaaagcaggcaaacgacaacaacaacagcaactttccctggactgcggctacaaagtatcatctaaatggccgggactcgttggttaatccaggaccagctatggccagccacaaagacgatgaagaaaagtttttccccatgcatggaaccctgatatttggtaaacaaggaacaaatgctaacgacgcggatttggacaatgtcatgattacagatgaagaagaaatccgcaccaccaatcccgtggctacggagcagtacgggactgtgtcaaataatttgcaaaactcaaatactggtccaactactggaactgtcaatcaccaaggagcgttacctggtatggtgtggcaggatcgagacgtgtaccttcagggacccatttgggccaagattcctcacaccgatggacactttcatccttctccactgatgggaggttttggactcaaacacccgcctcctcagatcatgatcaaaaacactcccgttccagccaatcctcctacaaacttcagttctgccaagtttgcttctttcatcacacagtattccacggggcaggtcagcgtggagatagagtgggagctgcagaaggagaacagcaaacgctggaaccccgagatccagtatacttccaactacaacaagtctgttaatgtggactttactgtggacactaatggtgtgtattcagagcctcgccccattggcaccagatacctgactcgtaatctgtaa

SEQ ID NO: 12222 - DNA, 2208 bp, Artificial Sequence
  source: /note="Description of Artificial Sequence: Synthetic polynucleotide"
atggctgccgatggttatcttccagattggctcgaggacactctctctgaaggaataagacagtggtggaagctcaaacctggcccaccaccaccaaggcccgcagagcggcatcaggacgacagcaggggtcttgtgcttcctgggtacaagtacctcggacccttcaacggactcgacaaaggagagccggtcaacgaggcagacgctgcggccctcgagcacgacaaggcctacgaccggcagctcgacagcggagacaacccgtacctcaagtacaaccacgccggcgcggagtttcaggagcgccttaaagaagatacgtcttttgggggcaacctcggacgagcagtattccaggcgaaaaagagggttcttgaacctctgggcctggttgaggagcctgttaagacggccccgggaaaaaagaggccggtagagcactctcctgtggagccagactcctcctcgggaaccggaaaagcgggccagcagcctgcgaggaagagattgaattttggtcagactggagacgcagactccgtacctgacccccagcctctcggacagccaccagcagcccccacaagtttgggatctactacaatggctacaggcagtggcgcaccaatggcagacaataacgagggtgccgatggagtgggtaattcctcagggaattggcattgcgattcccaatggttgggcgacagagtcatcaccaccagcacccgaacctgggccctgcccacctacaacaaccacctctacaagcaaatctccagccaatcaggagcagcgaacgacaaccactactttggctacagcaccccctgggggtattttgacttcaacagattccactgccacttttcaccacgtgactggcaaagactcatcaacaacaactggggattccgacccaagagactcaacttcaagctctttaacattcaagtcaaagaggtcacgcagaatgacggtacgacgacgattgccaataaccttaccagcacggttccggtgtttactgactcggagtaccagctcccgtacgtcctcggctcggcgcatcaaggatgcctcccgccgtttccagcggacgtcttcatggtcccacagtatggatacctcaccctgaacaacgggagtcaggcggtaggacgctcttccttttactgcctggagtactttccttctcagatgcttcgtaccggaaacaactttaccttcagttacacctttgaagacgttcctttccacagcagctacgctcacagtcaaagtctggaccggctgatgaatcctcttatcgaccagtacctgtattatctaaacaaaacacaatcaaatagtggaactcttcagcagtctcggctactgtttagtcaagctggacctaccagcatgtctcttcaagctaaaaactggctgcctggaccttgctacagacaacagcgtctgtcaaagcaggcaaacgacaacaacaacagcaactttccctggactgcggctacaaagtatcatctaaatggccgggactcgttggttaatccaggaccagctatggccagccacaaagacgatgaagaaaagtttttccccatgcatggaaccctgatatttggcaaacaagggacaaatgctaacgacgcggatttggacaatgtcatgattacagatgaagaagaaatccgtaccaccaatcccgtggctacggagcagtacgggactgtgtcaaataatttgcaaaactcaaatactggtccaactactggaactgtcaatcaccaaggagcgttacctggtatggtgtggcaggatcgagacgtgtaccttcagggacccatttgggccaagattcctcacaccgatggacactttcacccttctccgctgatgggaggttttggactcaaacacccgcctcctcagatcatgatcaaaaacactcccgttccagccaatcctcccacaaacttcagttctgccaagtttgcttctttcatcacacagtattccacgggacaggttagcgtggagatcgagtgggagctgcagaaggagaacagcaaacgctggaaccccgagatccagtacacttccaactacaacaagtctgttaatgtggactttactgtggacactaatggtgtgtattcagagcctcgccccattggcaccagatacctgactcgtaatctgtaa

SEQ ID NO: 12223 - DNA, 2205 bp, Artificial Sequence
  source: /note="Description of Artificial Sequence: Synthetic polynucleotide"
atggctgccgatggttatcttccagattggctcgaggacactctctctgaaggaataagacagtggtggaagctcaaacctggcccaccaccaaggcccgcagagcggcatcaggacgacagcaggggtcttgtgcttcctgggtacaagtacctcggacccttcaacggactcgacaaaggagagccggtcaacgaggcagacgctgcggccctcgagcacgacaaggcctacgaccggcagctcgacagcggagacaacccgtacctcaagtacaaccacgccgacgcggagtttcaggagcgtcttaaagaagatacgtcttttgggggcaacctcggacgagcagtcttccaggcgaaaaagagggttcttgaacctctgggcctggttgaggaacctgttaagacggctccgggaaaaaagaggccggtagagcactctcctgcggagccagactcctcctcgggaaccggaaaagcgggccagcagcctgcaagaaagagattgaatttcggtcagactggagacgcagactccgtacctgacccccagcctctcggacagccaccagcagcccccacaagtttgggatctactacaatggctacaggcagtggcgcaccaatggcagacaataacgagggtgccgatggagtgggtaattcctcaggaaattggcattgcgattcccaatggctgggcgacagagtcatcaccaccagcacccgaacctgggccctgcccacctacaacaaccacctctacaagcaaatctccagccaatcaggagcatcgaacgacaaccactactttggctacagcaccccttgggggtattttgacttcaacagattccactgtcacttctccccacgtgactggcaaagactcatcaacaacaactggggattccgacccaagagactcaacttcaagctctttaacattcaagtcaaagaggtcacgcagaatgacggtacgacgacgattgccaataaccttaccagcacggttcaggtgtttactgactcggagtaccagctcccgtacgtcctcggctcggcgcatcaaggatgcctcccgccgtttccagcggacgtcttcatggtcccacagtatggatacctcaccctgaacaacgggagtcaggcggtaggacgctcttccttttactgcctggagtactttccttctcagatgctgcgtaccggaaacaactttaccttcagctacacctttgaggacgtgcccttccacagcagctacgctcacagccagagtttggaccggctgatgaatcctctgatcgaccagtatctgtattatctgaacaggacacaatcaaatagtggaactcttcagcagtctaggctactgtttagccaagctggacccaccagcatgtcccttcaagctaaaaactggctgcctggaccttgctacagacagcagcgtctgtcaaagcaggcaaacgacaacaacaacagcaactttccctggactgcggctacaaagtatcatctaaatggtcgggactcgttggttaatccaggaccagctatggccagccacaaagacgatgaagaaaagtttttccccatgcatggaaccctgatatttggtaaacaaggaacaaatgctaacgacgcggatttggaacatgtcatgattacagatgaagaagaaatcaggaccaccaatcccgtggctacagagcagtacggaaacgtgtcaaataatttgcaaaactcaaatactggtccaactacagaaaatgtcaatcaccagggagcgttacctggtatggtgtggcaggatcgagacgtgtacctgcagggacccatttgggccaagattcctcacaccgacggacactttcacccttctccactgatgggaggttttggactcaaacacccgcctcctcaaatcatgatcaaaaacactcctgttccagccaatcctcctacaaacttcagcgcggcaaagtttgcttccttcatcacacagtattccacgggacaggtcagcgtggagatcgagtgggagctgcagaaggagaacagcaaacgctggaaccccgagatccagtacacttccaactacaacaaatctgttaatgtggactttactgtggacgctaatggtgtgtattcagagcctcgccccattggcaccagatacctgactcgtaatctgtaa

SEQ ID NO: 12224 - DNA, 2208 bp, Artificial Sequence
  source: /note="Description of Artificial Sequence: Synthetic polynucleotide"
atggctgccgatggttatcttccagattggctcgaggacactctctctgaaggaataagacagtggtggaagctcaaacctggcccaccaccaccaaagcccgcagagcggcatcaggacgacagcaggggtcttgtgcttcccgggcacaagtacctcggacccttcaacggactcgacaaaggagagccggtcaacgaggcagacgctgcggccctcgagcacgacaaggcctacgaccggcagctcgacagcggagacaacccgtacctcaagtacaaccacgccgacgcggagtttcaggagcgtcttaaagaagatacgtcttttgggggcaacctcggacgagcagtcttccaggcgaaaaagagggttcttgaacctctgggcctggttgaggaacctgttaagacggctccgggaaaaaagaggccggtagagcactctcctgcggagccagactcctcctcgggaaccggaaaagcgggccagcagcctgcaagaaagagattgaatttcggtcagactggagacgcagactccgtacctgacccccagcctctcggacagccaccagcagcccccacaagtttgggatctactacaatggctacaggcagtggcgcaccaatggcagacaataacgagggtgccgatggagtgggtaattcctcaggaaattggcattgcgattcccaatggctgggcgacagagtcatcaccaccagcacccgaacctgggccctgcccacctacaacaaccacctctacaagcaaatctccagccaatcaggagcatcgaacgacaaccactactttggctacagcaccccttgggggtattttgacttcaacagattccactgtcacttctccccacgtgactggcaaagactcatcaacaacaactggggattccgacccaagagactcaacttcaagctctttaacattcaagtcaaagaggtcacgcagaatgacggtacgacgacgattgccaataaccttaccagcacggttcaggtgtttactgactcggagtaccagctcccgtacgtcctcggctcggcgcatcaaggatgcctcccgccgtttccagcggacgtcttcatggtcccacagtatggatacctcaccctgaacaacgggagtcaggcggtaggacgctcttccttttactgcctggagtactttccttctcagatgctgcgtaccggaaacaactttaccttcagctacacctttgaggacgtgcccttccacagcagctacgctcacagccagagtttggaccggctgatgaatcctctgatcgaccagtatctgtattatctgaacaggacacaatcaaatagtggaactcttcagcagtctaggctactgtttagccaagctggacccaccagcatgtcccttcaagctaaaaactggctgcctggaccttgctacagacagcagcgtctgtcaaagcaggcaaacgacaacaacaacagcaactttccctggactgcggctacaaagtatcatctaaatggtcgggactcgttggttaatccaggaccagctatggccagccacaaagacgatgaagaaaagtttttccccatgcatggaaccctgatatttggtaaacaaggaacaaatgctaacgacgcggatttggaacatgtcatgattacagatgaagaagaaatcaggaccaccaatcccgtggctacagagcagtacggaaacgtgtcaaataatttgcaaaactcaaatactggtccaactacagaaaatgtcaatcaccagggagcgttacctggtatggtgtggcaggatcgagacgtgtacctgcagggacccatttgggccaagattcctcacaccgacggacactttcacccttctccactgatgggaggttttggactcaaacacccgcctcctcaaatcatgatcaaaaacactcctgttccagccaatcctcctacaaacttcagcgcggcaaagtttgcttccttcatcacacagtattccacgggacaggtcagcgtggagatcgagtgggagctgcagaaggagaacagcaaacgctggaaccccgagatccagtacacttccaactacaacaaatctgttaatgtggactttactgtagacactaatggtgtgtattcagagcctcgccccattggcaccagatacctgactcgtaatctgtaa

SEQ ID NO: 12225 - DNA, 2208 bp, Artificial Sequence
  source: /note="Description of Artificial Sequence: Synthetic polynucleotide"
atggctgccgatggttatcttccagattggctcgaggacactctctctgaaggaataagacagtggtggaagctcaaacctggcccaccaccaccaaggcccgcagagcggcatcaggacgacagcaggggtcttgtgcttcctgggtacaagtacctcggacccttcaacggactcgacaaaggagagccggtcaacgaggcagacgctgcggccctcgagcacgacaaggcctacgaccggcagctcgacagcggagacaacccgtacctcaagtacaaccacgccgacgcggagtttcaggagcgtcttaaagaagatacgtcttttgggggcaacctcggacgagcagtcttccaggcgaaaaagagggttcttgaacctctgggcctggttgaggaacctgttaagacggctccgggaaaaaagaggccggtagagcactctcctgcggagccagactcctcctcgggaaccggaaaagcgggccagcagcctgcaagaaagagattgaatttcggtcagactggagacgcagactccgtacctgacccccagcctctcggacagccaccagcagcccccacaagtttgggatctactacaatggctacaggcagtggcgcaccaatggcagacaataacgagggtgccgatggagtgggtaattcctcaggaaattggcattgcgattcccaatggctgggcgacagagtcatcaccaccagcacccgaacctgggccctgcccacctacaacaaccacctctacaagcaaatctccagccaatcaggagcatcgaacgacaaccactactttggctacagcaccccttgggggtattttgacttcaacagattccactgtcacttctccccacgtgactggcaaagactcatcaacaacaactggggattccgacccaagagactcaacttcaagctctttaacattcaagtcaaagaggtcacgcagaatgacggtacgacgacgattgccaataaccttaccagcacggttcaggtgtttactgactcggagtaccagctcccgtacgtcctcggctcggcgcatcaaggatgcctcccgccgtttccagcggacgtcttcatggtcccacagtatggatacctcaccctgaacaacgggagtcaggcggtaggacactcttcctcttactgcctggagtactttccttctcagatgctgcgtaccggaaacaactttaccttcagctacacctttgaggacgtgcctttccacagcagctacgctcacagccagagtttggaccggctgatgaatcctctgatcgaccagtatctgtattatctgaacaggacacaatcaaatagtggaactcttcagcagtctaggctactgtttagccaagctggacccaccagcatgtctcttcaagctaaaaactggctgcctggaccttgctacagacagcagcgtctgtcaaagcaggcaaacgacaacaacaacagcaactttccctggactgcggctacaaagtatcatctaaatggtcgggactcgttggttaatccaggaccagctatggccagccacaaagacgatgaagaaaagtttttccccatgcatggaaccctgatatttggtaaacaaggaacaaatgctaacgacgcggatttggaacatgtcatgattacagatgaagaagaaatcaggaccaccaatcccgtggctacagagcagtacggaaacgtgtcaaataatttgcaaaactcaaatactggtccaactacagaaaatgtcaatcaccagggagcgttacctggtatggtgtggcaggatcgagacgtgtacctgcagggacccatttgggccaagattcctcacaccgacggacactttcacccttctccactgatgggaggttttggactcaaacacccgcctcctcaaatcatgatcaaaaacactcctgttccagccaatcctcctacaaacttcagcgcggcaaagtttgcttccttcatcacacagtattccacgggacaggtcagcgtggagatcgagtgggagctgcagaaggagaacagcaaacgctggaaccccgagatccagtacacttccaactacaacaaatctgttaatgtggactttactgtggacgctaatggtgtgtattcagagcctcgccccattggcaccagatacctgactcgtaatctgtaa

SEQ ID NO: 12226 - DNA, 2208 bp, Artificial Sequence
  source: /note="Description of Artificial Sequence: Synthetic polynucleotide"
atggctgccgatggttatcttccagattggctcgaggacactctctctgaaggaataagacagtggtggaagctcaaacctggcccaccaccaccaaggcccgcagagcggcatcaggacgacagcaggggtcttgtgcttcctgggtacaagtacctcggacccttcaacggactcgacaaaggagagccggtcaacgaggcagacgctgcggccctcgagcacgacaaggcctacgaccggcagctcgacagcggagacaacccgtacctcaagtacaaccacgccgacgcggagtttcaggagcgtcttaaagaagatacgtcttttgggggcaacctcggacgagcagtcttccaggcgaaaaagagggttcttgaacctctgggcctggttgaggaacctgttaagacggctccgggaaaaaagaggccggtagagcactctcctgcggagccagactcctcctcgggaaccggaaaagcgggccagcagcctgcaagaaagagattgaatttcggtcagactggagacgcagactccgtacctgacccccagcctctcggacagccaccagcagcccccacaagtttgggatctactacaatggctacaggcagtggcgcaccaatggcagacaataacgagggtgccgatggagtgggtaattcctcaggaaattggcattgcgattcccaatggctgggcgacagggtcatcaccaccagcacccgaacccgggccctgcccacctacaacaaccacctctacaagcaaatctccagccaatcaggagcatcgaacgacaaccactactttggctacagcaccccttgggggtattttgacttcaacagattccactgtcacttctccccacgtgactggcaaagactcaccaacaacaactggggattccgacccaagagactcaacttcaagctctttaacattcaagtcaaagaggtcacgcagaatgacggtacgacgacgattgccaataaccttaccagcacggttcaggtgtttactgactcggagtaccagctcccgtacgtcctcggctcggcgcatcaaggatgcctcccgccgtttccagcggacgtcttcatggtcccacagtatggatacctcaccctgaacaacgggagtcaggcggtaggacgctcttccttttactgcctggagtactttccttctcagatgctgcgtaccggaaacaactttaccttcagctacacctttgaggacgtgcccttccacagcagctacgctcacagccagagtttggaccggctgatgaatcctctgatcgaccagtatctgtattatctgaacaggacacaatcaaatagtggaactcttcagcagtctaggctactgtttagccaagctggacccaccagcatgtcccttcaagctaaaaactggctgcctggaccttgctacagacagcagcgtctgtcaaagcaggcaaacgacaacaacaacagcaactttccctggactgcggctacaaagtatcatctaaatggtcgggactcgttggttaatccaggaccagctatggccagccacaaagacgatgaagaaaagtttttccccatgcatggaaccctgatatttggtaaacaaggaacaaatgctaacgacgcggatttggaacatgtcatgattacagatgaagaagaaatcaggaccaccaatcccgtggctacagagcagtacggaaacgtgtcaaataatttgcaaaactcaaatactggtccaactacagaaaatgtcaatcaccagggagcgttacctggtatggtgtggcaggatcgagacgtgtacctgcagggacccatttgggccaagattcctcacaccgacggacactttcacccttctccactgatgggaggttttggactcaaacacccgcctcctcaaatcatgatcaaaaacactcctgttccagccaatcctcctacaaacttcagcgcggcaaagtttgcttccttcatcacacagtattccacgggacaggtcagcgtggagatcgagtgggagctgcagaaggagaacagcaaacgctggaaccccgagatccagtacacttccaactacaacaaatctgttaatgtggactttactgtggacgctaatggtgtgtattcagagcctcgccccattggcaccagatacctgactcgtaatctgtaa

SEQ ID NO: 12227 - DNA, 2208 bp, Artificial Sequence
  source: /note="Description of Artificial Sequence: Synthetic polynucleotide"
atggctgccgatggttatcttccagattggctcgaggacactctctctgaaggaataagacagtggtggaagctcaaacctggcccaccaccgccaaagcccgcagagcggcataaggacgacagcaggggtcttgtgcttcctgggtacaagtacctcggacccttcaacggactcgacaaaggagagccggtcaacgaggcagacgccgcggccctcgagcacgacaaggcctacgaccggcagctcgacagcggagacaacccgtacctcaagtacaaccacgccgacgcggagtttcaggagcgccttaaagaagatacgtcttttgggggcaacctcgcaagagcagtattccaggcgaaaaagagggttcttgaacctctgggcctggttgaggagcctgttaagacggctccgggaaaaaagaggccggtagagcactctcctgcggggccagattcctcctccggaactggaaagtcgggccaacagcctgcaagaaagagattgaattttggtcagactggagacgcagactccgtacctgacccccagcctctcggacagccaccagcagccccctctggtctgggaactaatacgatggcttcaggcagtggcgcaccaatggcagacaataacgagggcgccgacggagtgggtaattcctcgggaaattggcattgcgattccacatggatgggcgacagagtcatcaccaccagcacccgcacctgggctctgcccacctacaacaaccatctgtacaagcaaatttccagccagtctggagcagcgaacgacaaccactactttggctacagcaccccttgggggtattttgacttcaacagattccactgtcacttctccccacgtgactggcaaagactcatcaacaacaactggggattccgacccaagagactcaacttcaagctctttaacattcaagtcaaagaggtcacgcagaatgacggtacgacgacgattgccaataaccttaccagcacggttcaggtgtttactgactcggagtaccagctcccgtacgtcctcggctcggcgcatcaaggatgcctcccgccgtttccagcggacgtcttcatggtcccacagtatggatacctcaccctgaacaacgggagtcaggcggtaggacgctcttccttttactgcctggagtactttccttctcagatgctgcgtaccggaaacaactttaccttcagctacacctttgaggacgtgcccttccacagcagctacgctcacagccagagtttggaccggctgatgaatcctctgatcgaccagtatctgtattatctgaacaggacacaatcaaatagtggaactcttcagcagtctaggctactgtttagccaagctggacccaccagcatgtcccttcaagctaaaaactggctgcctggaccttgctacagacagcagcgtctgtcaaagcaggcaaacgacaacaacaacagcaactttccctggactgcggctacaaagtatcatctaaatggtcgggactcgttggttaatccaggaccagctatggccagccacaaagacgatgaagaaaagtttttccccatgcatggaaccctgatatttggtaaacaaggaacaaatgctaacgacgcggatttggaacatgtcatgattacagatgaagaagaaatcaggaccaccaatcccgtggctacagagcagtacggaaacgtgtcaaataatttgcaaaactcaaatactggtccaactacagaaaatgtcaatcaccagggagcgttacctggtatggtgtggcaggatcgagacgtgtacctgcagggacccatttgggccaagattcctcacaccgacggacactttcacccttctccactgatgggaggttttggactcaaacacccgcctcctcaaatcatgatcaaaaacactcctgttccagccaatcctcctacaaacttcagcgcggcaaagtttgcttccttcatcacacagtattccacgggacaggtcagcgtggagatcgagtgggagctgcagaaggagaacagcaaacgctggaaccccgagatccagtacacttccaactacaacaaatctgttaatgtggactttactgtggacgctaatggtgtgtattcagagcctcgccccattggcaccagatacctgactcgtaatctgtaa

SEQ ID NO: 12228 - DNA, 2205 bp, Artificial Sequence
  source: /note="Description of Artificial Sequence: Synthetic polynucleotide"
atggctgccgatggttatcttccagattggctcgaggacactctctctgaaggaataagacagtggtggaagctcaaacctggcccaccaccaccaaggcccgcagagcggcatcaggacgacagcaggggtcttgtgcttcctgggtacaagtacctcggacccttcaacggactcgacaaaggagagccggtcaacgaggcagacgctgcggccctcgagcacgacaaggcctacgaccggcagctcgacagcggagacaacccgtacctcaagtacaaccacgccgacgcggagtttcaggagcgtcttaaagaagatacgtcttttgggggcaacctcggacgagcagtcttccaggcgaaaaagagggttcttgaacctctgggcctggttgaggaacctgttaagacggctccgggaaaaaagaggccggtagagcactctcctgcggagccagactcctcctcgggaaccggaaaagcgggccagcagcctgcaagaaagagattgaatttcggtcagactggagacgcagactccgtacctgacccccagcctctcggacagccaccagcagcccccacaagtttgggatctactacaatggctacaggcagtggcgcaccaatggcagacaataacgagggtgccgatggagtgggtaattcctcaggaaattggcattgcgattcccaatggctgggcgacagagtcatcaccaccagcacccgaacctgggccctgcccacctacaacaaccacctctacaagcaaatctccagccaatcaggagcatcgaacgacaaccactactttggctacagcaccccttgggggtattttgacttcaacagattccactgtcacttctccccacgtgactggcaaagactcatcaacaacaactggggattccgacccaagagactcaacttcaagctctttaacattcaagtcaaagaggtcacgcagaatgacggtacgacgacgattgccaataaccttaccagcacggttcaggtgtttactgactcggagtaccagctcccgtacgtcctcggctcggcgcatcaaggatgcctcccgccgtttccagcggacgtcttcatggtcccacagtatggatacctcaccctgaacaacgggagtcaggcggtaggacgctcttccttttactgcctggagtactttccttctcagatgctgcgtaccggaaacaactttaccttcagctacacctttgaggacgtgcccttccacagcagctacgctcacagccagagtttggaccggctgatgaatcctctgatcgaccagtatctgtattatctgaacaggacacaatcaaatagtggaactcttcagcagtctaggctactgtttagccaagctggacccaccagcatgtcccttcaagctaaaaactggctgcctggaccttgctacagacagcagcgtctgtcaaagcaggcaaacgacaacaacagcaactttccctggactgcggctacaaagtatcatctaaatggtcgggactcgttggttaatccaggaccagctatggccagccacaaagacgatgaagaaaagtttttccccatgcatggaaccctgatatttggtaaacaaggaacaaatgctaacgacgcggatttggaacatgtcatgattacagatgaagaagaaatcaggaccaccaatcccgtggctacagagcagtacggaaacgtgtcaaataatttgcaaaactcaaatactggtccaactacagaaaatgtcaatcaccagggagcgttacctggtatggtgtggcaggatcgagacgtgtacctgcagggacccatttgggccaagattcctcacaccgacggacactttcacccttctccactgatgggaggttttggactcaaacacccgcctcctcaaatcatgatcaaaaacactcctgttccagccaatcctcctacaaacttcagcgcggcaaagtttgcttccttcatcacacagtattccacgggacaggtcagcgtggagatcgagtgggagctgcagaaggagaacagcaaacgctggaaccccgagatccagtacacttccaactacaacaaatctgttaatgtggactttactgtggacgctaatggtgtgtattcagagcctcgccccattggcaccagatacctgactcgtaatctgtaa

SEQ ID NO: 12229 - DNA, 2208 bp, Artificial Sequence
  source: /note="Description of Artificial Sequence: Synthetic polynucleotide"
atggctgccgatggttatcttccagattggctcgaggacactctctctgaaggaataagacagtggtggaagctcaaacctggcccaccaccgccaaagcccgcagagcggcataaggacgacagcaggggtcttgtgcttcctgggtacaagtacctcggacccttcaacggactcgacaaaggagagccggtcaacgaggcagacgccgcggccctcgagcacgacaaggcctacgaccggcagctcgacagcggagacaacccgtacctcaagtacaaccacgccgacgcggagtttcaggagcgccttaaagaagatacgtcttttgggggcaacctcgcaagagcagtattccaggcgaaaaagagggttcttgaacctctgggcctggttgaggagcctgttaagacggctccgggaaaaaagaggccggtagagcactctcctgcggggccagattcctcctccggaactggaaagtcgggccaacagcctgcaagaaagagattgaattttggtcagactggagacgcagactccgtacctgacccccagcctctcggacagccaccagcagcccccacaagtttgggatctactacaatggctacaggcagtggcgcaccaatggcagacaataacgagggtgccgatggagtgggtaattcctcaggaaattggcattgcgattcccaatggctgggcgacagagtcatcaccaccagcacccgaacctgggccctgcccacctacaacaaccacctctacaagcaaatctccagccaatcaggagcatcgaacgacaaccactactttggctacagcaccccttgggggtattttgacttcaacagattccactgtcacttctccccacgtgactggcaaagactcatcaacaacaactggggattccgacccaagagactcaacttcaagctctttaacattcaagtcaaagaggtcacgcagaatgacggtacgacgacgattgccaataaccttaccagcacggttcaggtgtttactgactcggagtaccagctcccgtacgtcctcggctcggcgcatcaaggatgcctcccgccgtttccagcggacgtcttcatggtcccacagtatggatacctcaccctgaacaacgggagtcaggcggtaggacgctcttccttttactgcctggagtactttccttctcagatgctgcgtaccggaaacaactttaccttcagctacacctttgaggacgtgcccttccacagcagctacgctcacagccagagtttggaccggctgatgaatcctctgatcgaccagtatctgtattatctgaacaggacacaatcaaatagtggaactcttcagcagtctaggctactgtttagccaagctggacccaccagcatgtcccttcaagctaaaaactggctgcctggaccttgctacagacagcagcgtctgtcaaagcaggcaaacgacaacaacaacagcaactttccctggactgcggctacaaagtatcatctaaatggtcgggactcgttggttaatccaggaccagctatggccagccacaaagacgatgaagaaaagtttttccccatgcatggaaccctgatatttggtaaacaaggaacaaatgctaacgacgcggatttggaacatgtcatgattacagatgaagaagaaatcaggaccaccaatcccgtggctacagagcagtacggaaacgtgtcaaataatttgcaaaactcaaatactggtccaactacagaaaatgtcaatcaccagggagcgttacctggtatggtgtggcaggatcgagacgtgtacctgcagggacccatttgggccaagattcctcacaccgacggacactttcacccttctccactgatgggaggttttggactcaaacacccgcctcctcaaatcatgatcaaaaacactcctgttccagccaatcctcctacaaacttcagcgcggcaaagtttgcttccttcatcacacagtattccacgggacaggtcagcgtggagatcgagtgggagctgcagaaggagaacagcaaacgctggaaccccgagatccagtacacttccaactacaacaaatctgttaatgtggactttactgtggacgctaatggtgtgtattcagagcctcgccccattggcaccagatacctgactcgtaatctgtaa

SEQ ID NO: 12230 - DNA, 2208 bp, Artificial Sequence
  source: /note="Description of Artificial Sequence: Synthetic polynucleotide"
atggctgccgatggttatcttccagattggctcgaggacactctctctgaaggaataagacagtggtggaagctcaaacctggcccaccaccgccaaagcccgcagggcggcataaggacgacagcaggggtcttgtgcttcctgggtacaagtacctcggacccttcaacggactcgacaagggagagccggtcaacgaggcagacgccgcggccctcgagcacgacaaggcctacgaccggcagctcgacagcggagacaacccgtacctcaagtacaaccacgccggcgcggagtttcaggagcgccttaaagaagatacgtcttttgggggcaacctcggacgagcagtattccaggcgaaaaagagggttcttgaacctctgggcctggttgaggagcctgttaagacggccccgggaaaaaagaggccggtagagcactctcctgtggagccagactcctcctcgggaaccggaaaagcgggccagcagcctgcgaggaagagattgaattttggtcagactggagacgcagactccgtacctgacccccagcctctcggacagccaccagcagcccccacaagtttgggatctactacaatggctacaggcagtggcgcaccaatggcagacaataacgagggtgccgatggagtgggtaattcctcagggaattggcattgcgattcccaatggttgggcgacagagtcatcaccaccagcacccgaacctgggccctgcccacctacaacaaccacctctacaagcaaatctccagccaatcaggagcagcgaacgacaaccactactttggctacagcaccccctgggggtattttgacttcaacagattccactgccacttttcaccacgtgactggcaaagactcatcaacaacaactggggattccgacccaagagactcaacttcaagctctttaacattcaagtcaaagaggtcacgcagaatgacggtacgacgacgattgccaataaccttaccagcacggttccggtgtttactgactcggagtaccagctcccgtacgtcctcggctcggcgcatcaaggatgcctcccgccgtttccagcggacgtcttcatggtcccacagtatggatacctcaccctgaacaacgggagtcaggcggtaggacgctcttccttttactgcctggagtactttccttctcagatgcttcgtaccggaaacaactttaccttcagttacacctttgaagacgttcctttccacagcagctacgctcacagtcaaagtctggaccggctgatgaatcctcttatcgaccagtacctgtattatctaaacaaaacacaatcaaatagtggaactcttcagcagtctcggctactgtttagtcaagctggacctaccagcatgtctcttcaagctaaaaactggctgcctggaccttgctacagacaacagcgtctgtcaaagcaggcaaacgacaacaacaacagcaactttccctggactgcggctacaaagtatcatctaaatggccgggactcgttggttaatccaggaccagctatggccagccacaaagacgatgaagaaaagtttttccccatgcatggaaccctgatatttggtaaacaaggaacaaatgctaacgacgcggatttggaacatgtcatgattacagatgaagaagaaatcaggaccaccaatcccgtggctacagagcagtacggaaacgtgtcaaataatttgcaaaactcaaatactggtccaactacagaaaatgtcaatcaccagggagcgttacctggtatggtgtggcaggatcgagacgtgtacctgcagggacccatttgggccaagattcctcacaccgacggacactttcacccttctccactgatgggaggttttggactcaaacacccgcctcctcaaatcatgatcaaaaacactcctgttccagccaatcctcctacaaacttcagcgcggcaaagtttgcttccttcatcacacagtattccacgggacaggtcagcgtggagatcgagtgggagctgcagaaggagaacagcaaacgctggaaccccgagatccagtacacttccaactacaacaaatctgttaatgtggactttactgtggacgctaatggtgtgtattcagagcctcgccccattggcaccagatacctgactcgtaatctgtaa

SEQ ID NO: 12231 - DNA, 2208 bp, Artificial Sequence
  source: /note="Description of Artificial Sequence: Synthetic polynucleotide"
atggctgccgatggttatcttccagattggctcgaggacactctctctgaaggaataagacagtggtggaagctcaaacctggcccaccaccgccaaagcccgcagggcggcataaggacgacagcaggggtcttgtgcttcctgggtacaagtacctcggacccttcaacggactcgacaagggagagccggtcaacgaggcagacgccgcggccctcgagcacgacaaggcctacgaccggcagctcgacagcggagacaacccgtacctcaagtacaaccacgccggcgcggagtttcaggagcgccttaaagaagatacgtcttttgggggcaacctcggacgagcagtattccaggcgaaaaagagggttcttgaacctctgggcctggttgaggagcctgttaagacggccccgggaaaaaagaggccggtagagcactctcctgtggagccagactcctcctcgggaaccggaaaagcgggccagcagcctgcgaggaagagattgaattttggtcagactggagacgcagactccgtacctgacccccagcctctcggacagccaccagcagcccccacaagtttgggatctactacaatggctacaggcagtggcgcaccaatggcagacaataacgagggtgccgatggagtgggtaattcctcagggaattggcattgcgattcccaatggttgggcgacagagtcatcaccaccagcacccgaacctgggccctgcccacctacaacaaccacctctacaagcaaatctccagccaatcaggagcagcgaacgacaaccactactttggctacagcaccccctgggggtattttgacttcaacagattccactgccacttttcaccacgtgactggcaaagactcatcaacaacaactggggattccgacccaagagactcaacttcaagctctttaacattcaagtcaaagaggtcacgcagaatgacggtacgacgacgattgccaataaccttaccagcacggttccggtgtttactgactcggagtaccagctcccgtacgtcctcggctcggcgcatcaaggatgcctcccgccgtttccagcggacgtcttcatggtcccacagtatggatacctcaccctgaacaacgggagtcaggcggtaggacgctcttccttttactgcctggagtactttccttctcagatgcttcgtaccggaaacaactttaccttcagttacacctttgaagacgttcctttccacagcagctacgctcacagtcaaagtctggaccggctgatgaatcctcttatcgaccagtacctgtattatctaaacaaaacacaatcaaatagtggaactcttcagcagtctcggctactgtttagtcaagctggacctaccagcatgtctcttcaagctaaaaactggctgcctggaccttgctacagacaacagcgtctgtcaaagcaggcaaacgacaacaacaacagcaactttccctggactgcggctacaaagtatcatctaaatggccgggactcgttggttaatccaggaccagctatggccagccacaaagacgatgaagaaaagtttttccccatgcatggaaccctgatatttggcaaacaagggacaaatgctaacgacgcggatttggacaatgtcatgattacagatgaagaagaaatccgtaccaccaatcccgtggctacggagcagtacgggactgtgtcaaataatttgcaaaactcaaatactggtccaactactggaactgtcaatcaccaaggagcgttacctggtatggtgtggcaggatcgagacgtgtacctgcagggacccatttgggccaagattcctcacaccgacggacactttcacccttctccactgatgggaggttttggactcaaacacccgcctcctcaaatcatgatcaaaaacactcctgttccagccaatcctcctacaaacttcagcgcggcaaagtttgcttccttcatcacacagtattccacgggacaggtcagcgtggagatcgagtgggagctgcagaaggagaacagcaaacgctggaaccccgagatccagtacacttccaactacaacaaatctgttaatgtggactttactgtggacgctaatggtgtgtattcagagcctcgccccattggcaccagatacctgactcgtaatctgtaa

SEQ ID NO: 12232 - DNA, 2208 bp, Artificial Sequence
  source: /note="Description of Artificial Sequence: Synthetic polynucleotide"
atggctgccgatggttatcttccagattggctcgaggacactctctctgaaggaataagacagtggtggaagctcaaacctggcccaccaccaccaaggcccgcagagcggcatcaggacgacagcaggggtcttgtgcttcctgggtacaagtacctcggacccttcaacggactcgacaaaggagagccggtcaacgaggcagacgctgcggccctcgagcacgacaaggcctacgaccggcagctcgacagcggagacaacccgtacctcaagtacaaccacgccgacgcggagtttcaggagcgtcttaaagaagatacgtcttttgggggcaacctcggacgagcagtcttccaggcgaaaaagagggttcttgaacctctgggcctggttgaggaacctgttaagacggctccgggaaaaaagaggccggtagagcactctcctgcggagccagactcctcctcgggaaccggaaaagcgggccagcagcctgcaagaaagagattgaatttcggtcagactggagacgcagactccgtacctgacccccagcctctcggacagccaccagcagcccccacaagtttgggatctactacaatggctacaggcagtggcgcaccaatggcagacaataacgagggtgccgatggagtgggtaattcctcaggaaattggcattgcgattcccaatggctgggcgacagagtcatcaccaccagcacccgaacctgggccctgcccacctacaacaaccacctctacaagcaaatctccagccaatcaggagcatcgaacgacaaccactactttggctacagcaccccttgggggtattttgacttcaacagattccactgtcacttctccccacgtgactggcaaagactcatcaacaacaactggggattccgacccaagagactcaacttcaagctctttaacattcaagtcaaagaggtcacgcagaatgacggtacgacgacgattgccaataaccttaccagcacggttcaggtgtttactgactcggagtaccagctcccgtacgtcctcggctcggcgcatcaaggatgcctcccgccgtttccagcggacgtcttcatggtcccacagtatggatacctcaccctgaacaacgggagtcaggcggtaggacgctcttccttttactgcctggagtactttccttctcagatgctgcgtaccggaaacaactttaccttcagctacacctttgaggacgtgcccttccacagcagctacgctcacagccagagtttggaccggctgatgaatcctctgatcgaccagtatctgtattatctgaacaggacacaatcaaatagtggaactcttcagcagtctaggctactgtttagccaagctggacccaccagcatgtcccttcaagctaaaaactggctgcctggaccttgctacagacagcagcgtctgtcaaagcaggcaaacgacaacaacaacagcaactttccctggactgcggctacaaagtatcatctaaatggtcgggactcgttggttaatccaggaccagctatggccagccacaaagacgatgaagaaaagtttttccccatgcatggaaccctgatatttggtaaacaaggaacaaatgctaacgacgcggatttggaacatgtcatgattacagatgaagaagaaatcaggaccaccaatcccgtggctacagagcagtacggaaacgtgtcaaataatttgcaaaactcaaatactggtccaactacagaaaatgtcaatcaccagggagcgttacctggtatggtgtggcaggatcgagacgtgtacctgcagggacccatttgggccaagattcctcacaccgacggacactttcacccttctccgctgatgggaggttttggactcaaacacccgcctcctcagatcatgatcaaaaacactcccgttccagccaatcctcccacaaacttcagttctgccaagtttgcttctttcatcacacagtattccacgggacaggttagcgtggagatcgagtgggagctgcagaaggagaacagcaaacgctggaaccccgagatccagtacacttccaactacaacaagtctgttaatgtggactttactgtggacactaatggtgtgtattcagagcctcgccccattggcaccagatacctgactcgtaatctgtaa

SEQ ID NO: 12233 - DNA, 2208 bp, Artificial Sequence
  source: /note="Description of Artificial Sequence: Synthetic polynucleotide"
atggctgccgatggttatcttccagattggctcgaggacactctctctgaaggaataagacagtggtggaagctcaaacctggcccaccaccaccaaagcccgcagagcggcatcaggacgacagcaggggtcttgtgcttcctgggtacaagtacctcggacccttcaacggactcgacaaaggagagccggtcaacgaggcagacgctgcggccctcgagcacgacaaggcctacgaccggcagctcgacagcggagacaacccgtacctcaagtacaaccacgccgacgcggagtttcaggagcgtcttaaagaagatacgtcttttgggggcaacctcggacgagcagtcttccaggcgaaaaagagggttcttgaacctctgggcctggttgaggaacctgttaagacggctccgggaaaaaagaggccggtagagcactctcctgcggagccagactcctcctcgggaaccggaaaagcgggccagcagcctgcaagaaagagattgaatttcggtcagactggagacgcagactccgtacctgacccccagcctctcggacagccaccagcagcccccacaagtttgggatctactacaatggctacaggcagtggcgcaccaatggcagacaataacgagggtgccgatggagtgggtaattcctcaggaaattggcattgcgattcccaatggctgggcgacagagtcatcaccaccagcacccgaacctgggccctgcccacctacaacaaccacctctacaagcaaatctccagccaatcaggagcagcgaacgacaaccactactttggctacagcaccccctgggggtattttgacttcaacagattccactgccacttttcaccacgtgactggcaaagactcatcaacaacaactggggattccgacccaagagactcaacttcaagctctttaacattcaagtcaaagaggtcacgcagaatgacggtacgacgacgattgccaataaccttaccagcacggttccggtgtttactgactcggagtaccagctcccgtacgtcctcggctcggcgcatcaaggatgcctcccgccgtttccagcggacgtcttcatggtcccacagtatggatacctcaccctgaacaacgggagtcaggcggtaggacgctcttccttttactgcctggagtactttccttctcagatgcttcgtaccggaaacaactttaccttcagttacacctttgaagacgttcctttccacagcagctacgctcacagtcaaagtctggaccggctgatgaatcctcttatcgaccagtacctgtattatctaaacaaaacacaatcaaatagtggaactcttcagcagtctcggctactgtttagtcaagctggacctaccagcatgtctcttcaagctaaaaactggctgcctggaccttgctacagacaacagcgtctgtcaaagcaggcaaacgacaacaacaacagcaactttccctggactgcggctacaaagtatcatctaaatggccgggactcgttggttaatccaggaccagctatggccagccacaaagacgatgaagaaaagtttttccccatgcatggaaccctgatatttggcaaacaagggacaaatgctaacgacgcggatttggacaatgtcatgattacagatgaagaagaaatccgtaccaccaatcccgtggctacggagcagtacgggactgtgtcaaataatttgcaaaactcaaatactggtccaactactggaactgtcaatcaccaaggagcgttacctggtatggtgtggcaggatcgagacgtgtaccttcagggacccatttgggccaagattcctcacaccgatggacactttcacccttctccgctgatgggaggttttggactcaaacacccgcctcctcagatcatgatcaaaaacactcccgttccagccaatcctcccacaaacttcagttctgccaagtttgcttctttcatcacacagtattccacgggacaggttagcgtggagatcgagtgggagctgcagaaggagaacagcaaacgctggaaccccgagatccagtacacttccaactacaacaagtctgttaatgtggactttactgtggacactaatggtgtgtattcagagcctcgccccattggcaccagatacctgactcgtaatctgtaa

SEQ ID NO: 12234 - DNA, 2208 bp, Artificial Sequence
  source: /note="Description of Artificial Sequence: Synthetic polynucleotide"
atggctgccgatggttatcttccagattggctcgaggacactctctctgaaggaataagacagtggtggaagctcaaacctggcccaccaccgccaaagcccgcagagcggcataaggacgacagcaggggtcttgtgcttcctgggtacaagtacctcggacccttcaacggactcgacaaaggagagccggtcaacgaggcagacgccgcggccctcgagcacgacaaggcctacgaccggcagctcgacagcggagacaacccgtacctcaagtacaaccacgccgacgcggagtttcaggagcgccttaaagaagatacgtcttttgggggcaacctcgcaagagcagtattccaggcgaaaaagagggttcttgaacctctgggcctggttgaggagcctgttaagacggctccgggaaaaaagaggccggtagagcactctcctgcggggccagattcctcctccggaactggaaagtcgggccaacagcctgcaagaaagagattgaattttggtcagactggagacgcagactccgtacctgacccccagcctctcggacagccaccagcagccccctctggtctgggaactaatacgatggcttcaggcagtggcgcaccaatggcagacaataacgagggcgccgacggagtgggtaattcctcgggaaattggcattgcgattccacatggatgggcgacagagtcatcaccaccagcacccgcacctgggctctgcccacctacaacaaccatctgtacaagcaaatttccagccagtctggagcagcgaacgacaaccactactttggctacagcaccccttgggggtattttgacttcaacagattccactgccacttctccccacgtgactggcaaagactcatcaacaacaattggggattccggcccaaaagactcaacttcgagctctttaacattcaagtcaaggaggtcacgcagaatgacggtacgacgacgattgccaataaccttaccagcacggttcaggtgtttactgactcggagtaccagctcccgtacgtcctcggctcggcgcatcaaggatgcctcccgccgttcccagcagacgtcttcatggtgccacagtatggatacctcaccctgaacaacgggagtcaggcggtaggacgctcttcattttactgcctggagtactttccttctcagatgctgcgtaccggaaacaactttaccttcagctacacctttgaggacgtgcccttccacagcagctacgctcacagccagagtttggaccggctgatgaatcctctgatcgaccagtatctgtattatctgaacaggacacaatcaaatagtggaactcttcagcagtctaggctactgtttagccaagctggacccaccagcatgtcccttcaagctaaaaactggctgcctggaccttgctacagacagcagcgtctgtcaaagcaggcaaacgacaacaacaacagcaactttccctggactgcggctacaaagtatcatctaaatggtcgggactcgttggttaatccaggaccagctatggccagccacaaagacgatgaagaaaagtttttccccatgcatggaaccctgatatttggtaaacaaggaacaaatgctaacgacgcggatttggaacatgtcatgattacagatgaagaagaaatcaggaccaccaatcccgtggctacagagcagtacggaaacgtgtcaaataatttgcaaaactcaaatactggtccaactacagaaaatgtcaatcaccagggagcgttacctggtatggtgtggcaggatcgagacgtgtacctgcagggacccatttgggccaagattcctcacaccgacggacactttcacccttctccactgatgggaggttttggactcaaacacccgcctcctcaaatcatgatcaaaaacactcctgttccagccaatcctcctacaaacttcagcgcggcaaagtttgcttccttcatcacacagtattccacgggacaggtcagcgtggagatcgagtgggagctgcagaaggagaacagcaaacgctggaaccccgagatccagtacacttccaactacaacaaatctgttaatgtggactttactgtggacgctaatggtgtgtattcagagcctcgccccattggcaccagatacctgactcgtaatctgtaa

SEQ ID NO: 12235 - DNA, 2208 bp, Artificial Sequence
  source: /note="Description of Artificial Sequence: Synthetic polynucleotide"
atggctgccgatggttatcttccagattggctcgaggacattctctctgaaggaataagacagtggtggaagctcaaacctggcccaccaccaccaaagcccgcagagcggcataaggacgacagcaggggtcttgtgcttcctgggtacaagtacctcggacccttcaacggactcgacaaaggagagccggtcaacgaggcagacgccgcggccctcgagcacgacaaggcctacgaccggcagctcgacagcggagacaacccgtacctcaagtacaaccacgccgacgcggagtttcaggagcgtcttaaagaagatacgtcttttgggggcaacctcggacgagcagtcttccaggcgaaaaagagggttcttgaacctctgggcctggttgaggaacctgttaagacggctccgggaaaaaagaggccggtagagcactctcctgcggagccagactcctcctcgggaaccggaaaagcgggccagcagcctgcaagaaagagattgaatttcggtcagactggagacgcagactccgtacctgacccccagcctctcggacagccaccagcagcccccacaagtttgggatctactacaatggctacaggcagtggcgcaccaatggcagacaataacgagggtgccgatggagtgggtaattcctcaggaaattggcattgcgattcccaatggctgggcgacagagtcatcaccaccagcacccgaacctgggccctgcccacctacaacaaccacctctacaagcaaatctccagccaatcaggagcatcgaacgacaaccactactttggctacagcaccccttgggggtattttgacttcaacagattccactgtcacttctccccacgtgactggcaaagactcatcaacaacaactggggattccgacccaagagactcaacttcaagctctttaacattcaagtcaaagaggtcacgcagaatgacggtacgacgacgattgccaataaccttaccagcacggttcaggtgtttactgactcggagtaccagctcccgtacgtcctcggctcggcgcatcaaggatgcctcccgccgtttccagcggacgtcttcatggtcccacagtatggatacctcaccctgaacaacgggagtcaggcggtaggacgctcttccttttactgcctggagtactttccttctcagatgctgcgtaccggaaacaactttaccttcagctacacctttgaggacgtgcccttccacagcagctacgctcacagccagagtttggaccggctgatgaatcctctgatcgaccagtatctgtattatctgaacaggacacaatcaaatagtggaactcttcagcagtctaggctactgtttagccaagctggacccaccagcatgtcccttcaagctaaaaactggctgcctggaccttgctacagacagcagcgtctgtcaaagcaggcaaacgacaacaacaacagcaactttccctggactgcggctacaaagtatcatctaaatggtcgggactcgttggttaatccaggaccagctatggccagccacaaagacgatgaagaaaagtttttccccatgcatggaaccctgatatttggtaaacaaggaacaaatgctaacgacgcggatttggaacatgtcatgattacagatgaagaagaaatcaggaccaccaatcccgtggctacagagcagtacggaaacgtgtcaaataatttgcaaaactcaaatactggtccaactacagaaaatgtcaatcaccagggagcgttacctggtatggtgtggcaggatcgagacgtgtacctgcagggacccatttgggccaagattcctcacaccgacggacactttcacccttctccactgatgggaggttttggactcaaacacccgcctcctcaaatcatgatcaaaaacactcctgttccagccaatcctcctacaaacttcagcgcggcaaagtttgcttccttcatcacacagtattccacgggacaggtcagcgtggagatcgagtgggagctgcagaaggagaacagcaaacgctggaaccccgagatccagtacacttccaactacaacaaatctgttaatgtggactttactgtggacgctaatggtgtgtattcagagcctcgccccattggcaccagatacctgactcgtaatctgtaa

SEQ ID NO: 12236 - DNA, 2208 bp, Artificial Sequence
  source: /note="Description of Artificial Sequence: Synthetic polynucleotide"
atggctgccgatggttatcttccagattggctcgaggacactctctctgaaggaataagacagtggtggaagctcaaacctggcccaccaccaccaaggcccgcagagcggcatcaggacgacagcaggggtcttgtgcttcctgggtacaagtacctcggacccttcaacggactcgacaaaggagagccggtcaacgaggcagacgctgcggccctcgagcacgacaaggcctacgaccggcagctcgacagcggagacaacccgtacctcaagtacaaccacgccgacgcggagtttcaggagcgtcttaaagaagatacgtcttttgggggcaacctcggacgagcagtattccaggcgaaaaagagggttcttgaacctctgggcctggttgaggagcctgttaagacggccccgggaaaaaagaggccggtagagcactctcctgtggagccagactcctcctcgggaaccggaaaagcgggccagcagcctgcgaggaagagattgaattttggtcagactggagacgcagactccgtacctgacccccagcctctcggacagccaccagcagcccccacaagtttgggatctactacaatggctacaggcagtggcgcaccaatggcagacaataacgagggtgccgatggagtgggtaattcctcagggaattggcattgcgattcccaatggttgggcgacagagtcatcaccaccagcacccgaacctgggccctgcccacctacaacaaccacctctacaagcaaatctccagccaatcaggagcagcgaacgacaaccactactttggctacagcaccccctgggggtattttgacttcaacagattccactgccacttttcaccacgtgactggcaaagactcatcaacaacaactggggattccgacccaagagactcaacttcaagctctttaacattcaagtcaaagaggtcacgcagaatgacggtacgacgacgattgccaataaccttaccagcacggttccggtgtttactgactcggagtaccagctcccgtacgtcctcggctcggcgcatcaaggatgcctcccgccgtttccagcggacgtcttcatggtcccacagtatggatacctcaccctgaacaacgggagtcaggcggtaggacgctcttccttttactgcctggagtactttccttctcagatgcttcgtaccggaaacaactttaccttcagttacacctttgaagacgttcctttccacagcagctacgctcacagtcaaagtctggaccggctgatgaatcctcttatcgaccagtacctgtattatctaaacaaaacacaatcaaatagtggaactcttcagcagtctcggctactgtttagtcaagctggacctaccagcatgtctcttcaagctaaaaactggctgcctggaccttgctacagacaacagcgtctgtcaaagcaggcaaacgacaacaacaacagcaactttccctggactgcggctacaaagtatcatctaaatggccgggactcgttggttaatccaggaccagctatggccagccacaaagacgatgaagaaaagtttttccccatgcatggaaccctgatatttggcaaacaagggacaaatgctaacgacgcggatttggacaatgtcatgattacagatgaagaagaaatccgtaccaccaatcccgtggctacggagcagtacgggactgtgtcaaataatttgcaaaactcaaatactggtccaactactggaactgtcaatcaccaaggagcgttacctggtatggtgtggcaggatcgagacgtgtaccttcagggacccatttgggccaagattcctcacaccgatggacactttcacccttctccgctgatgggaggttttggactcaaacacccgcctcctcagatcatgatcaaaaacactcccgttccagccaatcctcccacaaacttcagttctgccaagtttgcttctttcatcacacagtattccacgggacaggttagcgtggagatcgagtgggagctgcagaaggagaacagcaaacgctggaaccccgagatccagtacacttccaactacaacaagtctgttaatgtggactttactgtggacactaatggtgtgtattcagagcctcgccccattggcaccagatacctgactcgtaatctgtaa

SEQ ID NO: 12237 - DNA, 2208 bp, Artificial Sequence
  source: /note="Description of Artificial Sequence: Synthetic polynucleotide"
atggctgccgatggttatcttccagattggctcgaggacactctctctgaaggaataagacagtggtggaagctcaaacctggcccaccaccgccaaagcccgcagagcggcataaggacgacagcaggggtcttgtgcttcctgggtacaagtacctcggacccttcaacggactcgacaaaggagagccggtcaacgaggcagacgccgcggccctcgagcacgacaaggcctacgaccggcagctcgacagcggagacaacccgtacctcaagtacaaccacgccgacgcggagtttcaggagcgccttaaagaagatacgtcttttgggggcaacctcgcaagagcagtattccaggcgaaaaagagggttcttgaacctctgggcctggttgaggagcctgttaagacggctccgggaaaaaagaggccggtagagcactctcctgcggagccagattcctcctccggaaccggaaaagcgggccagcagcctgcaagaaagagattgaatttcggtcagactggagacgcagactccgtacctgacccccagcctctcggacagccaccagcagcccccacaagtttgggatctactacaatggctacaggcagtggcgcaccaatggcagacaataacgagggtgccgatggagtgggtaattcctcaggaaattggcattgcgattcccaatggctgggcgacagagtcatcaccaccagcacccgaacctgggccctgcccacctacaacaaccacctctacaagcaaatctccagccaatcaggagcatcgaacgacaaccactactttggctacagcaccccttgggggtattttgacttcaacagattccactgtcacttctccccacgtgactggcaaagactcatcaacaacaactggggattccgacccaagagactcaacttcaagctctttaacattcaagtcaaagaggtcacgcagaatgacggtacgacgacgattgccaataaccttaccagcacggttcaggtgtttactgactcggagtaccagctcccgtacgtcctcggctcggcgcatcaaggatgcctcccgccgtttccagcggacgtcttcatggtcccacagtatggatacctcaccctgaacaacgggagtcaggcggtaggacgctcttccttttactgcctggagtactttccttctcagatgctgcgtaccggaaacaactttaccttcagctacacctttgaggacgtgcccttccacagcagctacgctcacagccagagtttggaccggctgatgaatcctctgatcgaccagtatctgtattatctgaacaggacacaatcaaatagtggaactcttcagcagtctaggctactgtttagccaagctggacccaccagcatgtcccttcaagctaaaaactggctgcctggaccttgctacagacagcagcgtctgtcaaagcaggcaaacgacaacaacaacagcaactttccctggactgcggctacaaagtatcatctaaatggtcgggactcgttggttaatccaggaccagctatggccagccacaaagacgatgaagaaaagtttttccccatgcatggaaccctgatatttggtaaacaaggaacaaatgctaacgacgcggatttggaacatgtcatgattacagatgaagaagaaatcaggaccaccaatcccgtggctacagagcagtacggaaacgtgtcaaataatttgcaaaactcaaatactggtccaactacagaaaatgtcaatcaccagggagcgttacctggtatggtgtggcaggatcgagacgtgtacctgcagggacccatttgggccaagattcctcacaccgacggacactttcacccttctccactgatgggaggttttggactcaaacacccgcctcctcaaatcatgatcaaaaacactcctgttccagccaatcctcctacaaacttcagcgcggcaaagtttgcttccttcatcacacagtattccacgggacaggtcagcgtggagatcgagtgggagctgcagaaggagaacagcaaacgctggaaccccgagatccagtacacttccaactacaacaaatctgttaatgtggactttactgtggacgctaatggtgtgtattcagagcctcgccccattggcaccagatacctgactcgtaatctgtaa

SEQ ID NO: 12238 - DNA, 2208 bp, Artificial Sequence
  source: /note="Description of Artificial Sequence: Synthetic polynucleotide"
atggctgccgatggttatcttccagattggctcgaggacactctctctgaaggaataagacagtggtggaagctcaaacctggcccaccaccaccaaggcccgcagagcggcatcaggacgacagcaggggtcttgtgcttcctgggtacaagtacctcggacccttcaacggactcgacaaaggagagccggtcaacgaggcagacgctgcggccctcgagcacgacaaggcctacgaccggcagctcgacagcggagacaacccgtacctcaagtacaaccacgccgacgcggagtttcaggagcgtcttaaagaagatacgtcttttgggggcaacctcggacgagcagtcttccaggcgaaaaagagggttcttgaacctctgggcctggttgaggaacctgttaagacggctccgggaaaaaagaggccggtagagcactctcctgcggagccagactcctcctcgggaaccggaaaagcgggccagcagcctgcaagaaagagattgaatttcggtcagactggagacgcagactccgtacctgacccccagcctctcggacagccaccagcagcccccacaagtttgggatctactacaatggctacaggcagtggcgcaccaatggcagacaataacgagggtgccgatggagtgggtaattcctcagggaattggcattgcgattcccaatggttgggcgacagagtcatcaccaccagcacccgaacctgggccctgcccacctacaacaaccacctctacaagcaaatctccagccaatcaggagcagcgaacgacaaccactactttggctacagcaccccctgggggtattttgacttcaacagattccactgccacttttcaccacgtgactggcaaagactcatcaacaacaactggggattccgacccaagagactcaacttcaagctctttaacattcaagtcaaagaggtcacgcagaatgacggtacgacgacgattgccaataaccttaccagcacggttccggtgtttactgactcggagtaccagctcccgtacgtcctcggctcggcgcatcaaggatgcctcccgccgtttccagcggacgtcttcatggtcccacagtatggatacctcaccctgaacaacgggagtcaggcggtaggacgctcttccttttactgcctggagtactttccttctcagatgcttcgtaccggaaacaactttaccttcagttacacctttgaagacgttcctttccacagcagctacgctcacagtcaaagtctggaccggctgatgaatcctcttatcgaccagtacctgtattatctaaacaaaacacaatcaaatagtggaactcttcagcagtctcggctactgtttagtcaagctggacctaccagcatgtctcttcaagctaaaaactggctgcctggaccttgctacagacaacagcgtctgtcaaagcaggcaaacgacaacaacaacagcaactttccctggactgcggctacaaagtatcatctaaatggccgggactcgttggttaatccaggaccagctatggccagccacaaagacgatgaagaaaagtttttccccatgcatggaaccctgatatttggcaaacaagggacaaatgctaacgacgcggatttggacaatgtcatgattacagatgaagaagaaatccgtaccaccaatcccgtggctacggagcagtacgggactgtgtcaaataatttgcaaaactcaaatactggtccaactactggaactgtcaatcaccaaggagcgttacctggtatggtgtggcaggatcgagacgtgtaccttcagggacccatttgggccaagattcctcacaccgatggacactttcacccttctccgctgatgggaggttttggactcaaacacccgcctcctcagatcatgatcaaaaacactcccgttccagccaatcctcccacaaacttcagttctgccaagtttgcttctttcatcacacagtattccacgggacaggttagcgtggagatcgagtgggagctgcagaaggagaacagcaaacgctggaaccccgagatccagtacacttccaactacaacaagtctgttaatgtggactttactgtggacactaatggtgtgtattcagagcctcgccccattggcaccagatacctgactcgtaatctgtaa

SEQ ID NO: 12239 - DNA, 2208 bp, Artificial Sequence
  source: /note="Description of Artificial Sequence: Synthetic polynucleotide"
atggctgccgatggttatcttccagattggctcgaggacactctctctgaaggaataagacagtggtggaagctcaaacctggcccaccaccgccaaagcccgcagggcggcataaggacgacagcaggggtcttgtgcttcctgggtacaagtacctcggacccttcaacggactcgacaagggagagccggtcaacgaggcagacgccgcggccctcgagcacgacaaggcctacgaccggcagctcgacagcggagacaacccgtacctcaagtacaaccacgccggcgcggagtttcaggagcgccttaaagaagatacgtcttttgggggcaacctcggacgagcagtattccaggcgaaaaagagggttcttgaacctctgggcctggttgaggagcctgttaagacggctccgggaaaaaagaggccggtagagcactctcctgtggagccagactcctcctcgggaaccggaaaagcgggccagcagcctgcgaggaagagattgaattttggtcagactggagacgcagactccgtacctgacccccagcctctcggacagccaccagcagcccccacaagtttgggatctactacaatggctacaggcagtggcgcaccaatggcagacaataacgagggtgccgatggagtgggtaattcctcagggaattggcattgcgattcccaatggttgggcgacagagtcatcaccaccagcacccgaacctgggccctgcccacctacaacaaccacctctacaagcaaatctccagccaatcaggagcagcgaacgacaaccactactttggctacagcaccccctgggggtattttgacttcaacagattccactgccacttttcaccacgtgactggcaaagactcatcaacaacaactggggattccgacccaagagactcaacttcaagctctttaacattcaagtcaaagaggtcacgcagaatgacggtacgacgacgattgccaataaccttaccagcacggttccggtgtttactgactcggagtaccagctcccgtacgtcctcggctcggcgcatcaaggatgcctcccgccgtttccagcggacgtcttcatggtcccacagtatggatacctcaccctgaacaacgggagtcaggcggtaggacgctcttccttttactgcctggagtactttccttctcagatgcttcgtaccggaaacaactttaccttcagttacacctttgaagacgttcctttccacagcagctacgctcacagtcaaagtctggaccggctgatgaatcctcttatcgaccagtacctgtattatctaaacaaaacacaatcaaatagtggaactcttcagcagtctcggctactgtttagtcaagctggacctaccagcatgtctcttcaagctaaaaactggctgcctggaccttgctacagacaacagcgtctgtcaaagcaggcaaacgacaacaacaacagcaactttccctggactgcggctacaaagtatcatctaaatggccgggactcgttggttaatccaggaccagctatggccagccacaaagacgatgaagaaaagtttttccccatgcatggaaccctgatatttggcaaacaagggacaaatgctaacgacgcggatttggacaatgtcatgattacagatgaagaagaaatccgtaccaccaatcccgtggctacggagcagtacgggactgtgtcaaataatttgcaaaactcaaatactggtccaactactggaactgtcaatcaccaaggagcgttacctggtatggtgtggcaggatcgagacgtgtaccttcagggacccatttgggccaagattcctcacaccgatggacactttcacccttctccgctgatgggaggttttggactcaaacacccgcctcctcagatcatgatcaaaaacactcccgttccagccaatcctcccacaaacttcagttctgccaagtttgcttctttcatcacacagtattccacgggacaggttagcgtggagatcgagtgggagctgcagaaggagaacagcaaacgctggaaccccgagatccagtacacttccaactacaacaagtctgttaatgtggactttactgtggacactaatggtgtgtattcagagcctcgccccattggcaccagatacctgactcgtaatctgtaa

SEQ ID NO: 12240 - DNA, 2208 bp, Artificial Sequence
  source: /note="Description of Artificial Sequence: Synthetic polynucleotide"
atggctgccgatggttatcttccagattggctcgaggacactctctctgaaggaataagacagtggtggaagctcaaacctggcccaccaccaccaaggcccgcagagcggcatcaggacgacagcaggggtcttgtgcttcctgggtacaagtacctcggacccttcaacggactcgacaaaggagagccggtcaacgaggcagacgctgcggccctcgagcacgacaaggcctacgaccggcagctcgacagcggagacaacccgtacctcaagtacaaccacgccgacgcggagtttcaggagcgtcttaaagaagatacgtcttttgggggcaacctcggacgagcagtcttccaggcgaaaaagagggttcttgaacctctgggcctggttgaggaacctgttaagacggctccgggaaaaaagaggccggtagagcactctcctgcggagccagactcctcctcgggaaccggaaaagcgggccagcagcctgcaagaaagagattgaatttcggtcagactggagacgcagactccgtacctgacccccagcctctcggacagccaccagcagcccccacaagtttgggatctactacaatggctacaggcagtggcgcaccaatggcagacaataacgagggtgccgatggagtgggtaattcctcaggaaattggcattgcgattcccaatggctgggcgacagagtcatcaccaccagcacccgaacctgggccctgcccacctacaacaaccacctctacaagcaaatctccagccaatcaggagcatcgaacgacaaccactactttggctacagcacccctttggggtattttgacttcaacagattccactgtcacttctccccacgtgactggcaaagactcatcaacaacaactggggattccgacccaagagactcaacttcaagctctttaacattcaagtcaaagaggtcacgcagaatgacggtacgacgacgattgccaataaccttaccagcacggttcaggtgtttactgactcggagtaccagctcccgtacgtcctcggctcggcgcatcaaggatgcctcccgccgtttccagcggacgtcttcatggtcccacagtatggatacctcaccctgaacaacgggagtcaggcggtaggacgctcttccttttactgcctggagtactttccttctcagatgctgcgtaccggaaacaactttaccttcagctacacctttgaggacgtgcccttccacagcagctacgctcacagccagagtttggaccggctgatgaatcctctgatcgaccagtatctgtattatctgaacaggacacaatcaaatagtggaactcttcagcagtctaggctactgtttagccaagctggacccaccagcatgtcccttcaagctaaaaactggctgcctggaccttgctacagacagcagcgtctgtcaaagcaggcaaacgacaacaacaacagcaactttccctggactgcggctacaaagtatcatctaaatggtcgggactcgttggttaatccaggaccagctatggccagccacaaagacgatgaagaaaagtttttccccatgcatggaaccctgatatttggtaaacaaggaacaaatgctaacgacgcggatttggaacatgtcatgattacagatgaagaagaaatcaggaccaccaatcccgtggctacagagcagtacggaaacgtgtcaaataatttgcaaaactcaaatactggtccaactacagaaaatgtcaatcaccagggagcgttacctggtatggtgtggcaggatcgagacgtgtacctgcagggacccatttgggccaagattcctcacaccgacggacactttcacccttctccactgatgggaggttttggactcaaacacccgcctcctcaaatcatgatcaaaaacactcctgttccagccaatcctcctacaaacttcagcgcggcaaagtttgcttccttcatcacacagtattccacgggacaggtcagcgtggagatcgagtgggagctgcagaaggagaacagcaaacgctggaaccccgagatccagtacacttccaactacaacaaatctgttaatgtggactttactgtggacgctaatggtgtgtattcagagcctcgccccattggcaccagatacctgactcgtaatctgtaa

SEQ ID NO: 12241 - DNA, 2208 bp, Artificial Sequence
  source: /note="Description of Artificial Sequence: Synthetic polynucleotide"
atggctgccgatggttatcttccagattggctcgaggacactctctctgaaggaataagacagtggtggaagctcaaacctggcccaccaccgccaaagcccgcagggcggcataaggacgacagcaggggtcttgtgcttcctgggtacaagtacctcggacccttcaacggactcgacaagggagagccggtcaacgaggcagacgccgcggccctcgagcacgacaaggcctacgaccggcagctcgacagcggagacaacccgtacctcaagtacaaccacgccggcgcggagtttcaggagcgccttaaagaagatacgtcttttgggggcaacctcggacgagcagtattccaggcgaaaaagagggttcttgaacctctgggcctggttgaggagcctgttaagacggccccgggaaaaaagaggccggtagagcactctcctgtggagccagactcctcctcgggaaccggaaaagcgggccagcagcctgcgaggaagagattgaattttggtcagactggagacgcagactccgtacctgacccccagcctctcggacagccaccagcagcccccacaagtttgggatctactacaatggctacaggcagtggcgcaccaatggcagacaataacgagggtgccgatggagtgggtaattcctcagggaattggcattgcgattcccaatggttgggcgacagagtcatcaccaccagcacccgaacctgggccctgcccacctacaacaaccacctctacaagcaaatctccagccaatcaggagcagcgaacgacaaccactactttggctacagcaccccctgggggtattttgacttcaacagattccactgccacttttcaccacgtgactggcaaagactcatcaacaacaactggggattccgacccaagagactcaacttcaagctctttaacattcaagtcaaagaggtcacgcagaatgacggtacgacgacgattgccaataaccttaccagcacggttccggtgtttactgactcggagtaccagctcccgtacgtcctcggctcggcgcatcaaggatgcctcccgccgtttccagcggacgtcttcatggtcccacagtatggatacctcaccctgaacaacgggagtcaggcggtaggacgctcttccttttactgcctggagtactttccttctcagatgcttcgtaccggaaacaactttaccttcagttacacctttgaagacgttcctttccacagcagctacgctcacagtcaaagtctggaccggctgatgaatcctcttatcgaccagtatctgtattatctgaacaggacacaatcaaatagtggaactcttcagcagtctaggctactgtttagccaagctggacccaccagcatgtcccttcaagctaaaaactggctgcctggaccttgctacagacagcagcgtctgtcaaagcaggcaaacgacaacaacaacagcaactttccctggactgcggctacaaagtatcatctaaatggtcgggactcgttggttaatccaggaccagctatggccagccacaaagacgatgaagaaaagtttttccccatgcatggaaccctgatatttggtaaacaaggaacaaatgctaacgacgcggatttggaacatgtcatgattacagatgaagaagaaatcaggaccaccaatcccgtggctacagagcagtacggaaacgtgtcaaataatttgcaaaactcaaatactggtccaactacagaaaatgtcaatcaccagggagcgttacctggtatggtgtggcaggatcgagacgtgtacctgcagggacccatttgggccaagattcctcacaccgacggacactttcacccttctccactgatgggaggttttggactcaaacacccgcctcctcaaatcatgatcaaaaacactcctgttccagccaatcctcctacaaacttcagcgcggcaaagtttgcttccttcatcacacagtattccacgggacaggtcagcgtggagatcgagtgggagctgcagaaggagaacagcaaacgctggaaccccgagatccagtacacttccaactacaacaaatctgttaatgtggactttactgtggacgctaatggtgtgtattcagagcctcgccccattggcaccagatacctgactcgtaatctgtaa

SEQ ID NO: 12242 - DNA, 2208 bp, Artificial Sequence
  source: /note="Description of Artificial Sequence: Synthetic polynucleotide"
atggctgccgatggttatcttccagattggctcgaggacattctctctgaaggaataagacagtggtggaagctcaaacctggcccaccaccaccaaagcccgcagagcggcataaggacgacagcaggggtcttgtgcttcctgggtacaagtacctcggacccttcaacggactcgacaaaggagagccggtcaacgaggcagacgccgcggccctcgagcacgacaaggcctacgaccggcagctcgacagcggagacaacccgtacctcaagtacaaccacgccgacgcggagtttcaggagcgtcttaaagaagatacgtcttttgggggcaacctcggacgagcagtcttccaggcaaaaaagagggttcttgaacctctgggcctggttgaggaacctgttaagacggctccgggaaaaaagaggccggtagagcaatctcctgcggagccagactcctcctcgggaaccggaaaggcgggcaaccagcctgcaagaaagagattgaattttggtcagactggagacgcagactccgtacctgacccccagcctctcggacagccaccagcagccccctctggtctgggatctactacaatggctacaggcagtggcgcaccaatggcagacaataacgagggtgccgatggagtgggtaattcctcaggaaattggcattgcgattcccaatggttgggcgacagagtcatcaccaccagcacccgaacctgggccctgcccacctacaacaatcacctctacaagcaaatctccagccaatcaggagcagcgaacgacaaccactactttggctacagcaccccctgggggtattttgacttcaacagattccactgccacttttcaccacgtgactggcaaagactcatcaacaacaactggggattccgacccaagagactcaacttcaagctctttaacattcaagtcaaagaggtcacgcagaatgacggtacgacgacgattgccaataaccttaccagcacggttccggtgtttactgactcggagtaccagctcccgtacgtcctcggctcggcgcatcaaggatgcctcccgccgtttccagcggacgtcttcatggtcccacagtatggatacctcaccctgaacaacgggagtcaggcggtaggacgctcttccttttactgcctggagtactttccttctcagatgcttcgtaccggaaacaactttaccttcagttacacctttgaagacgttcctttccacagcagctacgctcacagtcaaagtctggaccggctgatgaatcctcttatcgaccagtacctgtattatctaaacaaaacacaatcaaatagtggaactcttcagcagtctcggctactgtttagtcaagctggacctaccagcatgtctcttcaagctaaaaactggctgcctggaccttgctacagacaacagcgtctgtcaaagcaggcaaacgacaacaacaacagcaactttccctggactgcggctacaaagtatcatctaaatggccgggactcgttggttaatccaggaccagctatggccagccacaaagacgatgaagaaaagtttttccccatgcatggaaccctgatatttggcaaacaagggacaaatgctaacgacgcggatttggacaatgtcatgattacagatgaagaagaaatccgtaccaccaatcccgtggctacggagcagtacgggactgtgtcaaataatttgcaaaactcaaatactggtccaactactggaactgtcaatcaccaaggagcgttacctggtatggtgtggcaggatcgagacgtgtaccttcagggacccatttgggccaagattcctcacaccgatggacactttcacccttctccgctgatgggaggttttggactcaaacacccgcctcctcagatcatgatcaaaaacactcccgttccagccaatcctcccacaaacttcagttctgccaagtttgcttctttcatcacacagtattccacgggacaggttagcgtggagatcgagtgggagctgcagaaggagaacagcaaacgctggaaccccgagatccagtacacttccaactacaacaagtctgttaatgtggactttactgtggacactaatggtgtgtattcagagcctcgccccattggcaccagatacctgactcgtaatctgtaa

SEQ ID NO: 12243 - DNA, 2208 bp, Artificial Sequence
  source: /note="Description of Artificial Sequence: Synthetic polynucleotide"
atggctgccgatggttatcttccagattggctcgaggacactctctctgaaggaataagacagtggtggaagctcaaacctggcccaccaccaccaaggcccgcagagcggcatcaggacgacagcaggggtcttgtgcttcctgggtacaagtacctcggacccttcaacggactcgacaaaggagagccggtcaacgaggcagacgctgcggccctcgagcacgacaaggcctacgaccggcagctcgacagcggagacaacccgtacctcaagtacaaccacgccgacgcggagtttcaggagcgtcttaaagaagatacgtcttttgggggcaacctcggacgagcagtcttccaggcgaaaaagagggttcttgaacctctgggcctggttgaggaacctgttaagacggctccgggaaaaaagaggccggtagagcactctcctgcggagccagactcctcctcgggaaccggaaaagcgggccagcagcctgcaagaaagagattgaatttcggtcagactggagacgcagactccgtacctgacccccagcctctcggacagccaccagcagcccccacaagtttgggatctactacaatggctacaggcagtggcgcaccaatggcagacaataacgagggtgccgatggagtgggtaattcctcaggaaattggcattgcgattcccaatggctgggcgacagagtcatcaccaccagcacccgaacctgggccctgcccacctacaacaaccacctctacaagcaaatctccagccaatcaggagcatcgaacgacaaccactactttggctacagcaccccttgggggtattttgacttcaacagattccactgtcacttctccccacgtgactggcaaagactcatcaacaacaactggggattccgacccaagagactcaacttcaagctctttaacattcaagtcaaagaggtcacgcagaatgacggtacgacgacgattgccaataaccttaccagcacggttcaggtgtttactgactcggagtaccagctcccgtacgtcctcggctcggcgcatcaaggatgcctcccgccgtttccagcggacgtcttcatggtcccacagtatggatacctcaccctgaacaacgggagtcaggcggtaggacgctcttccttttactgcctggagtactttccttctcagatgctgcgtaccggaaacaactttaccttcagctacacctttgaggacgtgcccttccacagcagctacgctcacagccagagtttggaccggctgatgaatcctctgatcgaccagtatctgtattatctgaacaggacacaatcaaatagtggaactcttcagcagtctaggctactgtttagccaagctggacccaccagcatgtcccttcaagctaaaaactggctgcctggaccttgctacagacagcagcgtctgtcaaagcaggcaaacgacaacaacaacagcaactttccctggactgcggctacaaagtatcatctaaatggtcgggactcgttggttaatccaggaccagctatggccagccacaaagacgatgaagaaaagtttttccccatgcatggaaccctgatatttggtaaacaaggaacaaatgctaacgacgcggatttggaacatgtcatgattacagatgaagaagaaatcaggaccaccaatcccgtggctacagagcagtacggaaacgtgtcaaataatttgcaaaactcaaatactggtccaactacagaaaatgtcaatcaccagggagcgttacctggtatggtgtggcaggatcgagacgtgtacctgcagggacccatttgggccaagattcctcacaccgacggacactttcacccttctccactgatgggaggttttggactcaaacacccgcctcctcaaatcatgatcaaaaacactcctgttccagccaatcctcctacaaacttcagcgcggcaaagtttgcttccttcatcacacagtattccacgggacaggtcagcgtggagatcgagtgggagctgcagaaggagaacagcaaacgctggaaccccgagatccagtacacttccaactacaacaaatctgttaatgtggactttactgtggacgctaatggtgtgtattcagagcctcgccccattggcaccagatacctgactcgtaatctgtaa

SEQ ID NO: 12244 - DNA, 2208 bp, Artificial Sequence
  source: /note="Description of Artificial Sequence: Synthetic polynucleotide"
atggctgccgatggttatcttccagattggctcgaggacactctctctgaaggaataagacagtggtggaagctcaaacctggcccaccaccgccaaagcccgcagggcggcataaggacgacagcaggggtcttgtgcttcctgggtacaagtacctcggacccttcaacggactcgacaagggagagccggtcaacgaggcagacgccgcggccctcgagcacgacaaggcctacgaccggcagctcgacagcggagacaacccgtacctcaagtacaaccacgccggcgcggagtttcaggagcgccttaaagaagatacgtcttttgggggcaacctcggacgagcagtattccaggcgaaaaagagggttcttgaacctctgggcctggttgaggagcctgttaagacggctccgggaaaaaagaggccggtagagcactctcctgtggagccagactcctcctcgggaaccggaaaagcgggccagcagcctgcgagaaagagattgaatttcggtcagactggagacgcagactccgtacctgacccccagcctctcggacagccaccagcagcccccacaagtttgggatctactacaatggctacaggcagtggcgcaccaatggcagacaataacgagggtgccgatggagtgggtaattcctcaggaaattggcattgcgattcccaatggctgggcgacagagtcatcaccaccagcacccgaacctgggccctgcccacctacaacaaccacctctataagcaaatctccagccaatcaggagcatcgaacgacaaccactactttggctacagcaccccttgggggtattttgacttcaacagattccactgtcacttctccccacgtgactggcaaagactcatcaacaacaactggggattccgacccaagagactcaacttcaagctctttaacattcaagtcaaagaggtcacgcagaatgacggtacgacgacgattgccaataaccttaccagcacggttcaggtgtttactgactcggagtaccagctcccgtacgtcctcggctcggcgcatcaaggatgcctcccgccgtttccagcggacgtcttcatggtcccacagtatggatacctcaccctgaacaacgggagtcaggcggtaggacactcttccycttactgcctggagtactttccttctcagatgctgcgtaccggaaacaactttaccttcagctacacctttgaggacgtgcctttccacagcagctacgctcacagccagagtttggaccggctgatgaatcctctgatcgaccagtatctgtattatctgaacaggacacaatcaaatagtggaactcttcagcagtctaggctactgtttagccaagctggacccaccagcatgtctcttcaagctaaaaactggctgcctggaccttgctacagacagcagcgtctgtcaaagcaggcaaacgacaacaacaacagcaactttccctggactgcggctacaaagtatcatctaaatggtcgggactcgttggttaatccaggaccagctatggccagccacaaagacgatgaagaaaagtttttccccatgcatggaaccctgatatttggtaaacaaggaacaaatgctaacgacgcggatttggaacatgtcatgattacagatgaagaagaaatcaggaccaccaatcccgtggctacagagcagtacggaaacgtgtcaaataatttgcaaaactcaaatactggtccaactacagaaaatgtcaatcaccagggagcgttacctggtatggtgtggcaggatcgagacgtgtacctgcagggacccatttgggccaagattcctcacaccgacggacactttcacccttctccactgatgggaggttttggactcaaacacccgcctcctcaaatcatgatcaaaaacactcctgttccagccaatcctcctacaaacttcagcgcggcaaagtttgcttccttcatcacacagtattccacgggacaggtcagcgtggagatcgagtgggagctgcagaaggagaacagcaaacgctggaaccccgagatccagtacacttccaactacaacaaatctgttaatgtggactttactgtagacactaatggtgtgtattcagagcctcgccccattggcaccagatacctgactcgtaatctgtaa

SEQ ID NO: 12245 - DNA, 2208 bp, Artificial Sequence
  source: /note="Description of Artificial Sequence: Synthetic polynucleotide"
atggctgccgatggttatcttccagattggctcgaggacactctctctgaaggaataagacagtggtggaagctcaaacctggcccaccaccgccaaagcccgcagagcggcatmaggacgacagcaggggtcttgtgcttcctgggtacaagtacctcggacccttcaacggactcgacaaaggagagccggtcaacgaggcagacgctgcggccctcgagcacgacaaggcctacgaccggcagctcgacagcggagacaacccgtacctcaagtacaaccacgccgacgcggagtttcaggagcgtcttaaagaagatacgtcttttgggggcaacctcggacgagcagtcttccaggcgaaaaagagggttcttgaacctctgggcctggttgaggaacctgttaagacggctccgggaaaaaagaggccggtagagcactctcctgcggagccagactcctcctcgggaaccggaaaagcgggccagcagcctgcaagaaagagattgaatttcggtcagactggagacgcagactccgtacctgacccccagcctctcggacagccaccagcagcccccacaagtttgggatctactacaatggctacaggcagtggcgcaccaatggcagacaataacgagggtgccgatggagtgggtaattcctcaggaaattggcattgcgattcccaatggctgggcgacagagtcatcaccaccagcacccgaacctgggccctgcccacctacaacaaccacctctacaagcaaatctccagccaatcaggagcatcgaacgacaaccactactttggctacagcaccccttgggggtattttgacttcaacagattccactgtcacttctccccacgtgactggcaaagactcatcaacaacaactggggattccgacccaagagactcaacttcaagctctttaacattcaagtcaaagaggtcacgcagaatgacggtacgacgacgattgccaataaccttaccagcacggttcaggtgtttactgactcggagtaccagctcccgtacgtcctcggctcggcgcatcaaggatgcctcccgccgtttccagcggacgtcttcatggtcccacagtatggatacctcaccctgaacaacgggagtcaggcggtaggacgctcttccttttactgcctggagtactttccttctcagatgctgcgtaccggaaacaactttaccttcagctacacctttgaggacgtgcccttccacagcagctacgctcacagccagagtttggaccggctgatgaatcctctgatcgaccagtatctgtattatctgaacaggacacaatcaaatagtggaactcttcagcagtctaggctactgtttagccaagctggacccaccagcatgtcccttcaagctaaaaactggctgcctggaccttgctacagacagcagcgtctgtcaaagcaggcaaacgacaacaacaacagcaactttccctggactgcggctacaaagtatcatctaaatggtcgggactcgttggttaatccaggaccagctatggccagccacaaagacgatgaagaaaagtttttccccatgcatggaaccctgatatttggtaaacaaggaacaaatgctaacgacgcggatttggaacatgtcatgattacagatgaagaagaaatcaggaccaccaatcccgtggctacagagcagtacggaaacgtgtcaaataatttgcaaaactcaaatactggtccaactacagaaaatgtcaatcaccagggagcgttacctggtatggtgtggcaggatcgagacgtgtacctgcagggacccatttgggccaagattcctcacaccgacggacactttcacccttctccactgatgggaggttttggactcaaacacccgcctcctcaaatcatgatcaaaaacactcctgttccagccaatcctcctacaaacttcagcgcggcaaagtttgcttccttcatcacacagtattccacgggacaggtcagcgtggagatcgagtgggagctgcagaaggagaacagcaaacgctggaaccccgagatccagtacacttccaactacaacaaatctgttaatgtggactttactgtagacactaatggtgtgtattcagagcctcgccccattggcaccagatacctgactcgtaatctgtaa

SEQ ID NO: 12246 - DNA, 2208 bp, Artificial Sequence
  source: /note="Description of Artificial Sequence: Synthetic polynucleotide"
atggctgccgatggttatcttccagattggctcgaggacactctctctgaaggaataagacagtggtggaagctcaaacctggcccaccaccaccaaagcccgcagagcggcatcaggacgacagcaggggtcttgtgcttcccgggcacaagtacctcggacccttcaacggactcgacaaaggagagccggtcaacgaggcagacgctgcggccctcgagcacgacaaggcctacgaccggcagctcgacagcggagacaacccgtacctcaagtacaaccacgccgacgcggagtttcaggagcgtcttaaagaagatacgtcttttgggggcaacctcggacgagcagtcttccaggcgaaaaagagggttcttgaacctctgggcctggttgaggaacctgttaagacggctccgggaaaaaagaggccggtagagcactctcctgcggagccagactcctcctcgggaaccggaaaagcgggccagcagcctgcaagaaagagattgaatttcggtcagactggagacgcagactccgtacctgacccccagcctctcggacagccaccagcagcccccacaagtttgggatctactacaatggctacaggcagtggcgcaccaatggcagacaataacgagggtgccgatggagtgggtaattcctcaggaaattggcattgcgattcccaatggctgggcgacagagtcatcaccaccagcacccgaacctgggccctgcccacctacaacaaccacctctataagcaaatctccagccaatcaggagcatcgaacgacaaccactactttggctacagcaccccttgggggtattttgacttcaacagattccactgtcacttctccccacgtgactggcaaagactcatcaacaacaactggggattccgacccaagagactcaacttcaagctctttaacattcaagtcaaagaggtcacgcagaatgacggtacgacgacgattgccaataaccttaccagcacggttcaggtgtttactgactcggagtaccagctcccgtacgtcctcggctcggcgcatcaaggatgcctcccgccgtttccagcggacgtcttcatggtcccacagtatggatacctcaccctgaacaacgggagtcaggcggtaggacactcttcctcttactgcctggagtactttccttctcagatgctgcgtaccggaaacaactttaccttcagctacacctttgaggacgtgcctttccacagcagctacgctcacagccagagtttggaccggctgatgaatcctctgatcgaccagtatctgtattatctgaacaggacacaatcaaatagtggaactcttcagcagtctaggctactgtttagccaagctggacccaccagcatgtctcttcaagctaaaaactggctgcctggaccttgctacagacagcagcgtctgtcaaagcaggcaaacgacaacaacaacagcaactttccctggactgcggctacaaagtatcatctaaatggtcgggactcgttggttaatccaggaccagctatggccagccacaaagacgatgaagaaaagtttttccccatgcatggaaccctgatatttggtaaacaaggaacaaatgctaacgacgcggatttggaacatgtcatgattacagatgaagaagaaatcaggaccaccaatcccgtggctacagagcagtacggaaacgtgtcaaataatttgcaaaactcaaatactggtccaactacagaaaatgtcaatcaccagggagcgttacctggtatggtgtggcaggatcgagacgtgtacctgcagggacccatttgggccaagattcctcacaccgacggacactttcacccttctccactgatgggaggatttggactgaagcaccctcccccgcagattctcatcaagaataccccggtacctgcgaatccttctaccaccttcagcgcggcaaagtttgcttccttcatcacacagtactccacggggcaggtcagcgtggagatcgagtgggagctgcagaaagagaacagcaaacgctggaaccccgagatccagtatacctccaactacaacaagtctgttaatgtggactttactgtggacactaatggcgtgtattcagagcctcgccccattggcacaagatacctgactcgtaatctgtaa

SEQ ID NO: 12247 - DNA, 2208 bp, Artificial Sequence
  source: /note="Description of Artificial Sequence: Synthetic polynucleotide"
atggctgccgatggttatcttccagattggctcgaggacactctctctgaaggaataagacagtggtggaagctcaaacctggcccaccaccgccaaagcccgcagagcggcataaggacgacagcaggggtcttgtgcttcctgggtacaagtacctcggacccttcaacggactcgacaaaggagagccggtcaacgaggcagacgccgcggccctcgagcacgacaaggcctacgaccggcagctcgacagcggagacaacccgtacctcaagtacaaccacgccgacgcggagtttcaggagcgccttaaagaagatacgtcttttgggggcaacctcgcaagagcagtattccaggcgaaaaagagggttcttgaacctctgggcctggttgaggagcctgttaagacggctccgggaaaaaagaggccggtagagcactctcctgcggagccagattcctcctccggaactggaaagtcgggccaacagcctgcaagaaagagattgaattttggtcagactggagacgcagactccgtacctgacccccagcctctcggacagccaccagcagccccctctggtctgggaactaatacgatggcttcaggcagtggcgcaccaatggcagacaataacgagggcgccgacggagtgggtaattcctcgggaaattggcattgcgattccacatggatgggcgacagagtcatcaccaccagcacccgaacctgggccctgcccacctacaacaaccacctctacaagcaaatctccagccaatcaggagcatcgaacgacaaccactactttggctacagcaccccttgggggtattttgacttcaacagattccactgtcacttctccccacgtgactggcaaagactcatcaacaacaactggggattccgacccaagagactcaacttcaagctctttaacattcaagtcaaagaggtcacgcagaatgacggtacgacgacgattgccaataaccttaccagcacggttcaggtgtttactgactcggagtaccagctcccgtacgtcctcggctcggcgcatcaaggatgcctcccgccgtttccagcggacgtcttcatggtcccacagtatggatacctcaccctgaacaacgggagtcaggcggtaggacgctcttccttttactgcctggagtactttccttctcagatgctgcgtaccggaaacaactttaccttcagctacacctttgaggacgtgcccttccacagcagctacgctcacagccagagtttggaccggctgatgaatcctctgatcgaccagtatctgtattatctgaacaggacacaatcaaatagtggaactcttcagcagtctaggctactgtttagccaagctggacccaccagcatgtcccttcaagctaaaaactggctgcctggaccttgctacagacagcagcgtctgtcaaagcaggcaaacgacaacaacaacagcaactttccctggactgcggctacaaagtatcatctaaatggtcgggactcgttggttaatccaggaccagctatggccagccacaaagacgatgaagaaaagtttttccccatgcatggaaccctgatatttggtaaacaaggaacaaatgctaacgacgcggatttggaacatgtcatgattacagatgaagaagaaatcaggaccaccaatcccgtggctacagagcagtacggaaacgtgtcaaataatttgcaaaactcaaatactggtccaactacagaaaatgtcaatcaccagggagcgttacctggtatggtgtggcaggatcgagacgtgtacctgcagggacccatttgggccaagattcctcacaccgacggacactttcacccttctccactgatgggaggttttggactcaaacacccgcctcctcaaatcatgatcaaaaacactcctgttccagccaatcctcctacaaacttcagcgcggcaaagtttgcttccttcatcacacagtattccacgggacaggtcagcgtggagatcgagtgggagctgcagaaggagaacagcaaacgctggaaccccgagatccagtacacttccaactacaacaaatctgttaatgtggactttactgtggacgctaatggtgtgtattcagagcctcgccccattggcaccagatacctgactcgtaatctgtaa

SEQ ID NO: 12248 - DNA, 2208 bp, Artificial Sequence
  source: /note="Description of Artificial Sequence: Synthetic polynucleotide"
atggctgccgatggttatcttccagattggctcgaggacattctctctgaaggaataagacagtggtggaagctcaaacctggcccaccaccaccaaagcccgcagagcggcataaggacgacagcaggggtcttgtgcttcctgggtacaagtacctcggacccttcaacggactcgacaaaggagagccggtcaacgaggcagacgccgcggccctcgagcacgacaaggcctacgaccggcagctcgacagcggagacaacccgtacctcaagtacaaccacgccgacgcggagtttcaggagcgtcttaaagaagatacgtcttttgggggcaacctcggacgagcagtcttccaggcgaaaaagagggttcttgaacctctgggcctggttgaggaacctgttaagacggctccgggaaaaaagaggccggtagagcaatctcctgcggagccagactcctcctcgggaaccggaaaggcgggcaaccagcctgcaagaaagagattgaattttggtcagactggagacgcagactccgtacctgacccccagcctctcggacagccaccagcagccccctctggtctgggatctactacaatggctacaggcagtggcgcaccaatggcagacaataacgagggtgccgatggagtgggtaattcctcaggaaattggcattgcgattcccaatggttgggcgacagagtcatcaccaccagcacccgaacctgggccctgcccacctacaacaatcacctctacaagcaaatctccagccaatcaggagcagcgaacgacaaccactactttggctacagcaccccctgggggtattttgacttcaacagattccactgccacttttcaccacgtgactggcaaagactcatcaacaacaactggggattccgacccaaragactcaacttcaagctctttaacattcaagtcaaagaggtcacgcagaatgacggtacgacgacgattgccaataaccttaccagcacggttcaggtgtttactgactcggagtaccagctcccgtacgtcctcggctcggcgcatcaaggatgcctcccgccgtttccagcggacgtcttcatggtcccacagtatggatacctcaccctgaacaacgggagtcaggcggtaggacgctcttccttttactgcctggagtactttccttctcagatgctgcgtaccggaaacaactttaccttcagctacacctttgaggacgtgcccttccacagcagctacgctcacagccagagtttggaccggctgatgaatcctctgatcgaccagtatctgtattatctgaacaggacacaatcaaatagtggaactcttcagcagtctaggctactgtttagccaagctggacccaccagcatgtcccttcaagctaaaaactggctgcctggaccttgctacagacagcagcgtctgtcaaagcaggcaaacgacaacaacaacagcaactttccctggactgcggctacaaagtatcatctaaatggtcgggactcgttggttaatccaggaccagctatggccagccacaaagacgatgaagaaaagtttttccccatgcatggaaccctgatatttggtaaacaaggaacaaatgctaacgacgcggatttggaacatgtcatgattacagatgaagaagaaatcaggaccaccaatcccgtggctacagagcagtacggaaacgtgtcaaataatttgcaaaactcaaatactggtccaactacagaaaatgtcaatcaccagggagcgttacctggtatggtgtggcaggatcgagacgtgtacctgcagggacccatttgggccaagattcctcacaccgacggacactttcacccttctccactgatgggaggttttggactcaaacacccgcctcctcaaatcatgatcaaaaacactcctgttccagccaatcctcctacaaacttcagcgcggcaaagtttgcttccttcatcacacagtattccacgggacaggtcagcgtggagatcgagtgggagctgcagaaggagaacagcaaacgctggaaccccgagatccagtacacttccaactacaacaaatctgttaatgtggactttactgtggacgctaatggtgtgtattcagagcctcgccccattggcaccagatacctgactcgtaatctgtaa

SEQ ID NO: 12249 - DNA, 2208 bp, Artificial Sequence
  source: /note="Description of Artificial Sequence: Synthetic polynucleotide"
atggctgccgatggttatcttccagattggctcgaggacactctctctgaaggaataagacagtggtggaagctcaaacctggcccaccaccaccaaggcccgcagagcggcatcaggacgacagcaggggtcttgtgcttcctgggtacaagtacctcggacccttcaacggactcgacaaaggagagccggtcaacgaggcagacgctgcggccctcgagcacgacaaggcctacgaccggcagctcgacagcggagacaacccgtacctcaagtacaaccacgccgacgcggagtttcaggagcgtcttaaagaagatacgtcttttgggggcaacctcggacgagcagtcttccaggcgaaaaagagggttcttgaacctctgggcctggttgaggaacctgttaagacggctccgggaaaaaagaggccggtagagcactctcctgcggagccagactcctcctcgggaaccggaaaagcgggccagcagcctgcaagaaagagattgaatttcggtcagactggagacgcagactccgtacctgacccccagcctctcggacagccaccagcagcccccacaagtttgggatctactacaatggctacaggcagtggcgcaccaatggcagacaataacgagggtgccgatggagtgggtaattcctcaggaaattggcattgcgattcccaatggctgggcgacagagtcatcaccaccagcacccgaacctgggccctgcccacctacaacaaccacctctacaagcaaatctccagccaatcaggagcatcgaacgacaaccactactttggctacagcaccccttgggggtattttgacttcaacagattccactgtcacttctccccacgtgactggcaaagactcatcaacaacaactggggattccgacccaagagactcaacttcaagctctttaacattcaagtcaaagaggtcacgcagaatgacggtacgacgacgattgccaataaccttaccagcacggttcaggtgtttactgactcggagtaccagctcccgtacgtcctcggctcggcgcatcaaggatgcctcccgccgtttccagcggacgtcttcatggtcccacagtatggatacctcaccctgaacaacgggagtcaggcggtaggacgctcttccttttactgcctggagtactttccttctcagatgctgcgtaccggaaacaactttaccttcagctacacctttgaggacgtgcccttccacagcagctacgctcacagccagagtttggaccggctgatgaatcctctgatcgaccagtatctgtattatctgaacaggacacaatcaaatagtggaactcttcagcagtctaggctactgtttagccaagctggacccaccagcatgtcccttcaagctaaaaactggctgcctggaccttgctacagacagcagcgtctgtcaaagcaggcaaacgacaacaacaacagcaactttccctggactgcggctacaaagtatcatctaaatggtcgggactcgttggttaatccaggaccagctatggccagccacaaagacgatgaagaaaagtttttccccatgcatggaaccctgatatttggtaaacaaggaacaaatgctaacgacgcggatttggaacatgtcatgattacagatgaagaagaaatcaggaccaccaatcccgtggctacagagcagtacggaaacgtgtcaaataatttgcaaaactcaaatactggtccaactacagaaaatgtcaatcaccagggagcgttacctggtatggtgtggcaggatcgagacgtgtacctgcagggacccatttgggccaagattcctcacaccgacggacactttcacccttctcctcttatgggaggatttggactgaagcaccctcccccgcagattctcatcaagagtaccccggtacctgcgaatccttctaccaccttcagcgcggcaaagtttgcttccttcatcacacagtactccacggggcaggtcagcgtggagatcgagtgggagctgcagaaagagaacagcaaacgctggaaccccgagatccagtatacctccaactacaacaagtctgttaatgtggactttactgtggacactaatggcgtgtattcagagcctcgccccattggcacaagatacctgactcgtaatctgtaa

SEQ ID NO: 12250 - DNA, 2208 bp, Artificial Sequence
  source: /note="Description of Artificial Sequence: Synthetic polynucleotide"
atggctgccgatggttatcttccagattggctcgaggacactctctctgaaggaataagacagtggtggaagctcaaacctggcccaccaccaccaaggcccgcagagcggcatcaggacgacagcaggggtcttgtgcttcctgggtacaagtacctcggacccttcaacggactcgacaaaggagagccggtcaacgaggcagacgctgcggccctcgagcacgacaaggcctacgaccggcagctcgacagcggagacaacccgtacctcaagtacaaccacgccgacgcggagtttcaggagcgtcttaaagaagatacgtcttttgggggcaacctcggacgagcagtcttccaggcgaaaaagagggttcttgaacctctgggcctggttgaggaacctgttaagacggctccgggaaaaaagaggccggtagagcactctcctgcggagccagactcctcctcgggaaccggaaaagcgggccagcagcctgcaagaaagagattgaatttcggtcagactggagacgcagactccgtacctgacccccagcctctcggacagccaccagcagcccccacaagtttgggatctactacaatggctacaggcagtggcgcaccaatggcagacaataacgagggtgccgatggagtgggtaattcctcaggaaattggcattgcgattcccaatggctgggcgacagagtcatcaccaccagcacccgaacctgggccctgcccacctacaacaaccacctctacaagcaaatctccagccaatcaggagcatcgaacgacaaccactactttggctacagcaccccttgggggtattttgacttcaacagattccactgtcacttctccccacgtgactggcaaagactcaccaacaacaactggggattccgacccaagagactcaacttcaagctctttaacattcaagtcaaagaggtcacgcagaatgacggtacgacgacgattgccaataaccttaccagcacggttcaggtgtttactgactcggagtaccagctcccgtacgtcctcggctcggcgcatcaaggatgcctcccgccgtttccagcggacgtcttcatggtcccacagtatggatacctcaccctgaacaacgggagtcaggcggtaggacgctcttccttttactgcctggagtactttccttctcagatgctgcgtaccggaaacaactttaccttcagctacacctttgaggacgtgcccttccacagcagctacgctcacagccagagtttggaccggctgatgaatcctctgatcgaccagtatctgtattatctgaacaggacacaatcaaatagtggaactcttcagcagtctaggctactgtttagccaagctggacccaccagcatgtcccttcaagctaaaaactggctgcctggaccttgctacagacagcagcgtctgtcaaagcaggcaaacgacaacaacaacagcaactttccctggactgcggctacaaagtatcatctaaatggtcgggactcgttggttaatccaggaccagctatggccagccacaaagacgatgaagaaaagtttttccccatgcatggaaccctgatatttggtaaacaaggaacaaatgctaacgacgcggatttggaacatgtcatgattacagatgaagaagaaatcaggaccaccaatcccgtggctacagagcagtacggaaacgtgtcaaataatttgcaaaactcaaatactggtccaactacagaaaatgtcaatcaccagggagcgttacctggtatggtgtggcaggatcgagacgtgtacctgcagggacccatttgggccaagattcctcacaccgacggacactttcacccttctccactgatgggaggttttggactcaaacacccgcctcctcaaatcatgatcaaaaacactcctgttccagccaatcctcctacaaacttcagcgcggcaaagtttgcttccttcatcacacagtattccacgggacaggtcagcgtggagatcgagtgggagctgcagaaggagaacagcaaacgctggaaccccgagatccagtacacttccaactacaacaaatctgttaatgtggactttactgtggacgctaatggtgtgtattcagagcctcgccccattggcaccagatacctgactcgtaatctgtaa

SEQ ID NO: 12251 - DNA, 2208 bp, Artificial Sequence
  source: /note="Description of Artificial Sequence: Synthetic polynucleotide"
atggctgccgatggttatcttccagattggctcgaggacactctctctgaaggaataagacagtggtggaagctcaaacctggcccaccaccgccaaagcccgcagggcggcataaggacgacagcaggggtcttgtgcttcctgggtacaagtacctcggacccttcaacggactcgacaagggagagccggtcaacgaggcagacgccgcggccctcgagcacgacaaggcctacgaccggcagctcgacagcggagacaacccgtacctcaagtacaaccacgccggcgcggagtttcaggagcgccttaaagaagatacgtcttttgggggcaacctcggacgagcagtattccaggcgaaaaagagggttcttgaacctctgggcctggttgaggagcctgttaagacggccccgggaaaaaagaggccggtagagcactctcctgtggagccagactcctcctcgggaaccggaaaagcgggccagcagcctgcgaggaagagattgaattttggtcagactggagacgcagactccgtacctgacccccagcctctcggacagccaccagcagcccccacaagtttgggatctactacaatggctacaggcagtggcgcaccaatggcagacaataacgagggtgccgatggagtgggtaattcctcagggaattggcattgcgattcccaatggttgggcgacagagtcatcaccaccagcacccgaacctgggccctgcccacctacaacaaccacctctacaagcaaatctccagccaatcaggagccagcaacgacaaccactactttggctacagcaccccctgggggtattttgacttcaacagattccactgccacttttcaccacgtgactggcaaagactcatcaacaacaactggggattccgacccaagagactcaacttcaagctctttaacattcaagtcaaagaggtcacgcagaatgacggtacgacgacgattgccaataaccttaccagcacggttccggtgtttactgactcggagtaccagctcccgtacgtcctcggctcggcgcatcaaggatgcctcccgccgtttccagcggacgtcttcatggtcccacagtatggatacctcaccctgaacaacgggagtcaggcggtaggacgctcttccttttactgcctggagtactttccttctcagatgcttcgtaccggaaacaactttaccttcagttacacctttgaagacgttcctttccacagcagctacgctcacagtcaaagtctggaccggctgatgaatcctcttatcgaccagtacctgtattatctaaacaaaacacaatcaaatagtggaactcttcagcagtctcggctactgtttagtcaagctggacctaccagcatgtctcttcaagctaaaaactggctgcctggaccttgctacagacaacagcgtctgtcaaagcaggcaaacgacaacaacaacagcaactttccctggactgcggctacaaagtatcatctaaatggccgggactcgttggttaatccaggaccagctatggccagccacaaagacgatgaagaaaagtttttccccatgcatggaaccctgatatttggcaaacaagggacaaatgctaacgacgcggatttggacaatgtcatgattacagatgaagaagaaatccgtaccaccaatcccgtggctacggagcagtacgggactgtgtcaaataatttgcaaaactcaaatactggtccaactactggaactgtcaatcaccaaagagcgttacctggtatggtgtggcaggatcgagacgtgtaccttcagggacccatttgggccaagattcctcacaccgatggacactttcacccttctccgctgatgggaggttttggactcaaacacccgcctcctcagatcatgatcaaaaacactcccgttccagccaatcctcccacaaacttcagttctgccaagtttgcttctttcatcacacagtattccacgggacaggttagcgtggagatcgagtgggagctgcagaaggagaacagcaaacgctggaaccccgagatccagtacacttccaactacaacaagtctgttaatgtggactttactgtggacactaatggtgtgtattcagagcctcgccccattggcaccagatacctgactcgtaatctgtaa

SEQ ID NO: 12252 - DNA, 2208 bp, Artificial Sequence
  source: /note="Description of Artificial Sequence: Synthetic polynucleotide"
atggctgccgatggttatcttccagattggctcgaggacactctctctgaaggaataagacagtggtggaagctcaaacctggcccaccaccgccaaagcccgcagggcggcataaggacgacagcaggggtcttgtgcttcctgggtacaagtacctcggacccttcaacggactcgacaagggagagccggtcaacgaggcagacgccgcggccctcgagcacgacaaggcctacgaccggcagctcgacagcggagacaacccgtacctcaagtacaaccacgccggcgcggagtttcaggagcgccttaaagaagatacgtcttttgggggcaacctcggacgagcagtattccaggcgaaaaagagggttcttgaacctctgggcctggttgaggagcctgttaagacggccccgggaaaaaagaggccggtagagcactctcctgtggagccagactcctcctcgggaaccggaaaagcgggccagcagcctgcgaggaagagattgaattttggtcagactggagacgcagactccgtacctgacccccagcctctcggacagccaccagcagcccccacaagtttgggatctactacaatggctacaggcagtggcgcaccaatggcagacaataacgagggtgccgatggagtgggtaattcctcagggaattggcattgcgattcccaatggttgggcgacagagtcatcaccaccagcacccgaacctgggccctgcccacctacaacaaccacctctacaagcaaatctccagccaatcaggagccagcaacgacaaccactactttggctacagcaccccctgggggtattttgacttcaacagattccactgccacttttcaccacgtgactggcaaagactcatcaacaacaactggggattccgacccaagagactcaacttcaagctctttaacattcaagtcaaagaggtcacgcagaatgacggtacgacgacgattgccaataaccttaccagcacggttccggtgtttactgactcggagtaccagctcccgtacgtcctcggctcggcgcatcaaggatgcctcccgccgtttccagcggacgtcttcatggtcccacagtatggatacctcaccctgaacaacgggagtcaggcggtaggacgctcttccttttactgcctggagcactttccttctcagatgcttcgtaccggaaacaactttaccttcagttacacctttgaagacgttcctttccacagcagctacgctcacagtcaaagtctggaccggctgatgaatcctcttatcgaccagtacctgtattatctaaacaaaacacaatcaaatagtggaactcttcagcagtctcggctactgtttagtcaagctggacctaccagcatgtctcttcaagctaaaaactggctgcctggaccttgctacagacaacagcgtctgtcaaagcaggcaaacgacaacaacaacagcaactttccctggactgcggctacaaagtatcatctaaatggccgggactcgttggttaatccaggaccagctatggccagccacaaagacgatgaagaaaagtttttccccatgcatggaaccctgatatttggcaaacaagggacaaatgctaacgacgcggatttggacaatgtcatgattacagatgaagaagaaatccgtaccaccaatcccgtggctacggagcagtacgggactgtgtcaaataatttgcaaaactcaaatactggtccaactactggaactgtcaatcaccaaagagcgttacctggtatggtgtggcaggatcgagacgtgtaccttcagggacccatttgggccaagattcctcacaccgatggacactttcacccttctccgctgatgggaggttttggactcaaacacccgcctcctcagatcatgatcaaaaacactcccgttccagccaatcctcccacaaacttcagttctgccaagtttgcttctttcatcacacagtattccacgggacaggttagcgtggagatcgagtgggagctgcagaaggagaacagcaaacgctggaaccccgagatccagtacacttccaactacaacaagtctgttaatgtggactttactgtggacactaatggtgtgtattcagagcctcgccccattggcaccagatacctgactcgtaatctgtaa

SEQ ID NO: 12253 - DNA, 2208 bp, Artificial Sequence
  source: /note="Description of Artificial Sequence: Synthetic polynucleotide"
atggctgccgatggttatcttccagattggctcgaggacactctctctgaaggaataagacagtggtggaagctcaaacctggcccaccaccgccaaagcccgcagggcggcataaggacgacagcaggggtcttgtgcttcctgggtacaagtacctcggacccttcaacggactcgacaagggagagccggtcaacgaggcagacgccgcggccctcgagcacgacaaggcctacgaccggcagctcgacagcggagacaacccgtacctcaagtacaaccacgccggcgcggagtttcaggagcgccttaaagaagatacgtcttttgggggcaacctcggacgagcagtattccaggcgaaaaagagggttcttgaacctctgggcctggttgaggagcctgttaagacggccccgggaaaaaagaggccggtagagcactctcctgtggagccagactcctcctcgggaaccggaaaagcgggccagcagcctgcgaggaagagattgaattttggtcagactggagacgcagactccgtacctgacccccagcctctcggacagccaccagcagcccccacaagtttgggatctactacaatggctacaggcagtggcgcaccaatggcagacagtaacgagggtgccgatggagtgggtaattcctcagggaattggcattgcgattcccaatggttgggcgacagagtcatcaccaccagcacccgaacctgggccctgcccacctacaacaaccacctctacaagcaaatctccagccaatcaggagccagcaacgacaaccactactttggctacagcaccccctgggggtattttgacttcaacagattccactgccacttttcaccacgtgactggcaaagactcatcaacaacaactggggattccgacccaagagactcaacttcaagctctttaacattcaagtcaaagaggtcacgcagaatgacggtacgacgacgattgccaataaccttaccagcacggttccggtgtttactgactcggagtaccagctcccgtacgtcctcggctcggcgcatcaaggatgcctcccgccgtttccagcggacgtcttcatggtcccacagtatggatacctcaccctgaacaacgggagtcaggcggtaggacgctcttccttttactgcctggagtactttccttctcagatgcttcgtaccggaaacaactttaccttcagttacacctttgaagacgttcctttccacagcagctacgctcacagtcaaagtctggaccggctgatgaatcctcttatcgaccagtacctgtattatctaaacaaaacacaatcaaatagtggaactcttcagcagtctcggctactgtttagtcaagctggacctaccagcatgtctcttcaagctaaaaactggctgcctggaccttgctacagacaacagcgtctgtcaaagcaggcaaacgacaacaacaacagcaactttccctggactgcggctacaaagtatcatctaaatggccgggactcgttggttaatccaggaccagctatggccagccacaaagacgatgaagaaaagtttttccccatgcatggaaccctgatatttggcaaacaagggacaaatgctaacgacgcggatttggacaatgtcatgattacagatgaagaagaaatccgtaccaccaatcccgtggctacggagcagtacgggactgtgtcaaataatttgcaaaactcaaatactggtccaactactggaactgtcaatcaccaaagagcgttacctggtatggtgtggctggatcgagacgtgtaccttcagggacccatttgggccaagattcctcacaccgatggacactttcacccttctccgctgatgggaggttttggactcaaacacccgcctcctcagatcatgatcaaaaacactcccgttccagccaatcctcccacaaacttcagttctgccaagtttgcttctttcatcacacagtattccacgggacaggttagcgtggagatcgagtgggagctgcagaaggagaacagcaaacgctggaaccccgagatccagtacacttccaactacaacaagtctgttaatgtggactttactgtggacactaatggtgtgtattcagagcctcgccccattggcaccagatacctgactcgtaatctgtaa

SEQ ID NO: 12254 - DNA, 2208 bp, Artificial Sequence
  source: /note="Description of Artificial Sequence: Synthetic polynucleotide"
atggctgccgatggttatcttccagattggctcgaggacactctctctgaaggaataagacagtggtggaggctcaaacctggcccaccaccgccaaagcccgcagggcggcataaggacgacagcaggggtcttgtgcttcctgggtacaagtacctcggacccttcaacggactcgacaagggagagccggtcaacgaggcagacgccgcggccctcgagcacgacaaggcctacgaccggcagctcgacagcggagacaacccgtacctcaagtacaaccacgccggcgcggagtttcaggagcgccttaaagaagatacgtcttttgggggcaacctcggacgagcagtattccaggcgaaaaagagggttcttgaacctctgggcctggttgaggagcctgttaagacggccccgggaaaaaagaggccggtagagcactctcctgtggagccagactcctcctcgggaaccggaaaagcgggccagcagcctgcgaggaagagattgaattttggtcagactggagacgcagactccgtacctgacccccagcctctcggacagccaccagcagcccccacaagtttgggatctactacaatggctacaggcagtggcgcaccaatggcagacaataacgagggtgccgatggagtgggtaattcctcagggaattggcattgcgattcccaatggttgggcgacagagtcatcaccaccagcacccgaacctgggccctgcccacctacaacaaccacctctacaagcaaatctccagccaatcaggagccagcaacgacaaccactactttggctacagcaccccctgggggtattttgacttcaacagattccactgccacttttcaccacgtgactggcaaagactcatcaacaacaactggggattccgacccaagagactcaacttcaagctctttaacattcaagtcaaagaggtcacgcagaatgacggtacgacgacgattgccaataaccttaccagcacggttccggtgtttactgactcggagtaccagctcccgtacgtcctcggctcggcgcatcaaggatgcctcccgccgtttccagcggacgtcttcatggtcccacagtatggatacctcaccctgaacaacgggagtcaggcggtaggacgctcttccttttactgcctggagtactttccttctcagatgcttcgtaccggaaacaactttaccttcagttacacctttgaagacgttcctttccacagcagctacgctcacagtcaaagtctggaccggctgatgaatcctcttatcgaccagtacctgtattatctaaacaaaacacaatcaaatagtggaactcttcagcagtctcggctactgtttagtcaagctggacctaccagcatgtctcttcaagctaaaaactggctgcctggaccttgctacagacaacagcgtctgtcaaagcaggcaaacgacaacaacaacagcaactttccctggactgcggctacaaagtatcatctaaatggccgggactcgttggttaatccaggaccagctatggccagccacaaagacgatgaagaaaagtttttccccatgcatggaaccctgatatttggcaaacaagggacaaatgctaacgacgcggatttggacaatgtcatgattacagatgaagaagaaatccgtaccaccaatcccgtggctacggagcagtacgggactgtgtcaaataatttgcaaaactcaaatactggtccaactactggaactgtcaatcaccaaagagcgttacctggtatggtgtggcaggatcgagacgtgtaccttcagggacccatttgggccaagattcctcacaccgatggacactttcacccttctccgctgatgggaggttttggactcaaacacccgcctcctcagatcatgatcaaaaacactcccgttccagccaatcctcccacaaacttcagttctgccaagtttgcttctttcatcacacagtattccacgggacaggttagcgtggagatcgagtgggagctgcagaaggagaacagcaaacgctggaaccccgagatccagtacacttccaactacaacaagtctgttaatgtggactttactgtggacactaatggtgtgtattcagagcctcgccccattggcaccagatacctgactcgtaatctgtaa

SEQ ID NO: 12255 - DNA, 2208 bp, Artificial Sequence
  source: /note="Description of Artificial Sequence: Synthetic polynucleotide"
atggctgccgatggttatcttccagattggctcgaggacactctctctgaaggaataagacagtggtggaagctcaaacctggcccaccaccgccaaagcccgcagggcggcataaggacgacagcaggggtcttgtgcttcctgggtacaagtacctcggacccttcaacggactcgacaagggagagccggtcaacgaggcagacgccgcggccctcgagcacgacaaggcctacgaccggcagctcgacagcggagacaacccgtacctcaagtacaaccacgccggcgcggagtttcaggagcgccttaaagaagatacgtcttttgggggcaacctcggacgagcagtattccaggcgaaaaagagggttcttgaacctctgggcctggttgaggagcctgttaagacggccccgggaaaaaagaggccggtagagcactctcctgtggagccagactcctcctcgggaaccggaaaagcgggccagcagcctgcgaggaagagattgaattttggtcagactggagacgcagactccgtacctgacccccagcctctcggacagccaccagcagcccccacaagtttgggatctactacaatggctacaggcagtggcgcaccaatggcagacaataacgagggtgccgatggagtgggtaattcctcagggaattggcattgcgattcccaatggttgggcgacagagtcatcaccaccagcacccgaacctgggccctgcccacctacaacaaccacctctacaagcaaatctccagccaatcaggagccagcaacgacaaccactactttggctacagcaccccctgggggtattttgacttcaacagattccactgccacttttcaccacgtgactggcaaagactcatcaacaacaactggggattccgacccaagagactcaacttcaagctctttaacattcaagtcaaagaggtcacgcagaatgacggtacgacgacgattgccaataaccttaccagcacggttccggtgtttactgactcggagtaccagctcccgtacgtcctcggctcggcgcatcaaggatgcctcccgccgtttccagcggacgtcttcatggtcccacagtatggatacctcaccctgaacaacgggagtcaggcggtaggacgctcttccttttactgcctggagtactttccttctcagatgcttcgtaccggaaacaactttaccttcagttacacctttgaagacgttcctttccacagcagctacgctcacagtcaaagtctggaccggctgatgaatcctcttatcgaccagtacctgtattatctaaacaaaacacaatcaaatagtggaactcttcagcagtctcggctactgtttagtcaagctggacctaccagcatgtctcttcaagctaaaaactggctgcctggaccttgctacagacaacagcgtctgtcaaagcaggcaaacgacaacaacaacagcaactttccctggactgcggctacaaagtatcatctaaatggccgggactcgttggttaatccaggaccagctatggccagccacaaagacgatgaagaaaagtttttccccatgcatggaaccctgatatttggcaaacaagggacaaatgctaacgacgcggatttggacaatgtcatgattacagatgaagaagaaatccgtaccaccaatcccgtggctacggagcagtacgggactgtgtcaaataatttgcaaaactcaaatactggtccaactactggaactgtcaatcaccaaagagcgttacctggtatggtgtggcaggatcgagacgtgtaccttcagggacccatttgggccaagattcctcacaccgatggacactttcacccttctccgctgatgggaggttttggactcaaacacccgcctcctcagatcatgatcaaaaacactcccgttccagccaatcctcccacaaacttcagttctgccaagtttgcttctttcatcacacagtattccacgggacaggttagcgtggagatcgagtgggagctgcagaaggagaacagcaaacgctggaaccccgagatccagtacacttccaactacaacaagtctgttaatgtggaccttactgtggacactaatggtgtgtattcagagcctcgccccattggcaccagatacctgactcgtaatctgtaa

SEQ ID NO: 12256 - DNA, 2208 bp, Artificial Sequence
  source: /note="Description of Artificial Sequence: Synthetic polynucleotide"
atggctgccgatggttatcttccagattggctcgaggacactctctctgaaggaataagacagtggyggaagctcaaacctggcccaccaccgccaaagcccgcagggcggcataaggacgacagcaggggtcttgtgcttcctgggtacaagtacctcggacccttcaacggactcgacaagggagagccggtcaacgaggcagacgccgcggccctcgagcacgacaaggcctacgaccggcagctcgacagcggagacaacccgtacctcaagtacaaccacgccggcgcggagtttcaggagcgccttaaagaagatacgtcttttgggggcaacctcggacgagcagtattccaggcgaaaaagagggttcttgaacctctgggcctggttgaggagcctgttaagacggccccgggaaaaaagaggccggtagagcactctcctgtggagccagactcctcctcgggaaccggaaaagcgggccagcagcctgcgaggaagagattgaattttggtcagactggagacgcagactccgtacctgacccccagcctctcggacagccaccagcagcccccacaagtttgggatctactacaatggctacaggcagtggcgcaccaatggcagacaataacgagggtgccgatggagtgggtaattcctcagggaattggcattgcgattcccaatggttgggcgacagagtcatcaccaccagcacccgaacctgggccctgcccacctacaacaaccacctctacaagcaaatctccagccaatcaggagccagcaacgacaaccactactttggctacagcaccccctgggggtattttgacttcaacagattccactgccacttttcaccacgtgactggcaaagactcatcaacaacaactggggattccgacccaagagactcaacttcaagctctttaacattcaagtcaaagaggtcacgcagaatgacggtacgacgacgattgccaataaccttaccagcacggttccggtgtttactgactcggagtaccagctcccgtacgtcctcggctcggcgcatcaaggatgcctcccgccgtttccagcggacgtcttcatggtcccacagtatggataccccaccctgaacaacgggagtcaggcggtaggacgctcttccttttactgcctggagtactttccttctcagatgcttcgtaccggaaacaactttaccttcagttacacctttgaagacgttcctttccacagcagctacgctcacagtcaaagtctggaccggctgatgaatcctcttatcgaccagtacctgtattatctaaacaaaacacaatcaaatagtggaactcttcagcagtctcggctactgtttagtcaagctggacctaccagcatgtctcttcaagctaaaaactggctgcctggaccttgctacagacaacagcgtctgtcaaagcaggcaaacgacaacaacaacagcaactttccctgggctgcggctacaaagtatcatctaaatggccgggactcgttggttaatccaggaccagctatggccagccacaaagacgatgaagaaaagtttttccccatgcatggaaccctgatatttggcaaacaagggacaaatgctaacgacgcggatttggacaatgtcatgattacagatgaagaagaaatccgtaccaccaatcccgtggctacggagcagtacgggactgtgtcaaataatttgcaaaactcaaatactggtccaactactggaactgtcaatcaccaaagagcgttacctggtatggtgtggcaggatcgagacgtgtaccttcagggacccatttgggccaagattcctcacaccgatggacactttcacccttctccgctgatgggaggttttggactcaaacacccgcctcctcagatcatgatcaaaaacactcccgttccagccaatcctcccacaaacttcagttctgccaagtttgcttctttcatcacacagtattccacgggacaggttagcgtggagatcgagtgggagctgcagaaggagaacagcaaacgctggaaccccgagatccagtacacttccaactacaacaagtctgttaatgtggactttactgtggacactaatggtgtgtattcagagcctcgccccattggcaccagatacctgactcgtaatctgtaa

SEQ ID NO: 12257 - DNA, 2208 bp, Artificial Sequence
  source: /note="Description of Artificial Sequence: Synthetic polynucleotide"
atggctgccgatggttatcttccagattggctcgaggacactctctctgaaggaataagacagtggtggaagctcaaacctggcccaccaccaccaaagcccgcagagcggcatcaggacgacagcaggggtcttgtgcttcctgggtacaagtacctcggacccttcaacggactcgacaaaggagagccggtcaacgaggcagacgctgcggccctcgagcacgacaaggcctacgaccggcagctcgacagcggagacaacccgtacctcaagtacaaccacgccgacgcggagtttcaggagcgtcttaaagaagatacgtcttttgggggcaacctcggacgagcagtcttccaggcgaaaaagagggttcttgaacctctgggcctggttgaggaacctgttaagacggctccgggaaaaaagaggccggtagagcactctcctgcggagccagactcctcctcgggaaccggaaaagcgggccagcagcctgcaagaaagagattgaatttcggtcagactggagacgcagactccgtacctgacccccagcctctcggacagccaccagcagcccccacaagtttgggatctactacaatggctacaggcagtggcgcaccaatggcagacaataacgagggtgccgatggagtgggtaattcctcaggaaattggcattgcgattcccaatggctgggcgacagagtcatcaccaccagcacccgaacctgggccctgcccacctacaacaaccacctctacaagcaaatctccagccaatcaggagcatcgaacgacaaccactactttggctacagcaccccttgggggtattttgacttcaacagattccactgtcacttctccccacgtgactggcaaagactcatcaacaacaactggggattccgacccaagagactcaacttcaagctctttaacattcaagtcaaagaggtcacgcagaatgacggtacgacgacgattgccaataaccttaccagcacggttcaggtgtttactgactcggagtaccagctcccgtacgtcctcggctcggcgcatcaaggatgcctcccgccgtttccagcggacgtcttcatggtcccacagtatggatacctcaccctgaacaacgggagtcaggcggtaggacgctcttccttttactgcctggagtactttccttctcagatgctgcgtaccggaaacaactttaccttcagctacacctttgaggacgtgcctttccacagcagctacgctcacagccagagtttggaccggctgatgaatcctctgatcgaccagtatctgtattatctgaacaggacacaatcaaatagtggaactcttcagcagtctaggctactgtttagccaagctggacccaccagcatgtctcttcaagctaaaaactggctgcctggaccttgctacagacagcagcgtctgtcaaagcaggcaaacgacaacaacaacagcaactttccctggactgcggctacaaagtatcatctaaatggtcgggactcgttggttaatccaggaccagctatggccagccacaaagacgatgaagaaaagtttttccccatgcatggaaccctgatatttggtaaacaaggaacaaatgctaacgacgcggatttggaacatgtcatgattacagatgaagaagaaatcaggaccaccaatcccgtggctacagagcagtacggaaacgtgtcaaataatttgcaaaactcaaatactggtccaactacagaaaatgtcaatcaccagggagcgttacctggtatggtgtggcaggatcgagacgtgtacctgcagggacccatttgggccaagattcctcacaccgacggacactttcacccttctccactgatgggaggttttggactcaaacacccgcctcctcaaatcatgatcaaaaacactcctgttccagccaatcctcctacaaacttcagcgcggcaaagtttgcttccttcatcacacagtattccacgggacaggtcagcgtggagatcgagtgggagctgcagaaggagaacagcaaacgctggaaccccgagatccagtacacttccaactacaacaaatctgttaatgtggactttactgtggacactaatggtgtgtattcagagcctcgccccattggcaccagatacctgactcgtaatctgtaa

SEQ ID NO: 12258 - DNA, 2205 bp, Artificial Sequence
  source: /note="Description of Artificial Sequence: Synthetic polynucleotide"
atggctgccgatggttatcttccagattggctcgaggacactctctctgaaggaataagacagtggtggaagctcaaacctggcccaccaccaccaaagcccgcagagcggcatcaggacgacagcaggggtcttgtgcttcctgggtacaagtacctcggacccttcaacggactcgacaaaggagagccggtcaacgaggcagacgctgcggccctcgagcacgacaaggcctacgaccggcagctcgacagcggagacaacccgtacctcaagtacaaccacgccgacgcggagtttcaggagcgtcttaaagaagatacgtcttttgggggcaacctcggacgagcagtcttccaggcgaaaaagagggttcttgaacctctgggcctggttgaggaacctgttaagacggctccgggaaaaaagaggccggtagagcactctcctgcggagccagactcctcctcgggaaccggaaaagcgggccagcagcctgcaagaaagagattgaatttcggtcagactggagacgcagactccgtacctgacccccagcctctcggacagccaccagcagcccccacaagtttgggatctactacaatggctacaggcagtggcgcaccaatggcagacaataacgagggtgccgatggagtgggtaattcctcaggaaattggcattgcgattcccaatggctgggcgacagagtcatcaccaccagcacccgaacctgggccctgcccacctacaacaaccacctctacaagcaaatctccagccaatcaggagcatcgaacgacaaccactactttggctacagcaccccttgggggtattttgacttcaacagattccactgtcacttctccccacgtgactggcaaagactcatcaacaacaactggggattccgacccaagagactcaacttcaagctctttaacattcaagtcaaagaggtcacgcagaatgacggtacgacgacgattgccaataaccttaccagcacggttcaggtgtttactgactcggagtaccagctcccgtacgtcctcggctcggcgcatcaaggatgcctcccgccgtttccagcggacgtcttcatggtcccacagtatggatacctcaccctgaacaacgggagtcaggcggtaggacgctcttccttttactgcctggagtactttccttctcagatgctgcgtaccggaaacaactttaccttcagctacacctttgaggacgtgcctttccacagcagctacgctcacagccagagtttggaccggctgatgaatcctctgatcgaccagtatctgtattatctgaacaggacacaatcaaatagtggaactcttcagcagtctaggctactgtttagccaagctggacccaccagcatgtctcttcaagctaaaaactggctgcctggaccttgctacagacagcagcgtctgtcaaagcaggcaaacgacaacaacagcaactttccctggactgcggctacaaagtatcatctaaatggtcgggactcgttggttaatccaggaccagctatggccagccacaaagacgatgaagaaaagtttttccccatgcatggaaccctgatatttggtaaacaaggaacaaatgctaacgacgcggatttggaacatgtcatgattacagatgaagaagaaatcaggaccaccaatcccgtggctacagagcagtacggaaacgtgtcaaataatttgcaaaactcaaatactggtccaactacagaaaatgtcaatcaccagggagcgttacctggtatggtgtggcaggatcgagacgtgtacctgcagggacccatttgggccaagattcctcacaccgacggacactttcacccttctccactgatgggaggttttggactcaaacacccgcctcctcaaatcatgatcaaaaacactcctgttccagccaatcctcctacaaacttcagcgcggcaaagtttgcttccttcatcacacagtattccacgggacaggtcagcgtggagatcgagtgggagctgcagaaggagaacagcaaacgctggaaccccgagatccagtacacttccaactacaacaaatctgttaatgtggactttactgtggacactaatggtgtgtattcagagcctcgccccattggcaccagatacctgactcgtaatctgtaa

SEQ ID NO: 12259 - DNA, 2205 bp, Artificial Sequence
  source: /note="Description of Artificial Sequence: Synthetic polynucleotide"
atggctgccgatggttatcttccagattggctcgaggacactctctctgaaggaataagacagtggtggaagctcaaacctggcccaccaccaaagcccgcagagcggcatcaggacgacagcaggggtcttgtgcttcctgggtacaagtacctcggacccttcaacggactcgacaaaggagagccggtcaacgaggcagacgctgcggccctcgagcacgacaaggcctacgaccggcagctcgacagcggagacaacccgtacctcaagtacaaccacgccgacgcggagtttcaggagcgtcttaaagaagatacgtcttttgggggcaacctcggacgagcagtcttccaggcgaaaaagagggttcttgaacctctgggcctggttgaggaacctgttaagacggctccgggaaaaaagaggccggtagagcactctcctgcggagccagactcctcctcgggaaccggaaaagcgggccagcagcctgcaagaaagagattgaatttcggtcagactggagacgcagactccgtacctgacccccagcctctcggacagccaccagcagcccccacaagtttgggatctactacaatggctacaggcagtggcgcaccaatggcagacaataacgagggtgccgatggagtgggtaattcctcaggaaattggcattgcgattcccaatggctgggcgacagagtcatcaccaccagcacccgaacctgggccctgcccacctacaacaaccacctctacaagcaaatctccagccaatcaggagcatcgaacgacaaccactactttggctacagcaccccttgggggtattttgacttcaacagattccactgtcacttctccccacgtgactggcaaagactcatcaacaacaactggggattccgacccaagagactcaacttcaagctctttaacattcaagtcaaagaggtcacgcagaatgacggtacgacgacgattgccaataaccttaccagcacggttcaggtgtttactgactcggagtaccagctcccgtacgtcctcggctcggcgcatcaaggatgcctcccgccgtttccagcggacgtcttcatggtcccacagtatggatacctcaccctgaacaacgggagtcaggcggtaggacgctcttccttttactgcctggagtactttccttctcagatgctgcgtaccggaaacaactttaccttcagctacacctttgaggacgtgcctttccacagcagctacgctcacagccagagtttggaccggctgatgaatcctctgatcgaccagtatctgtattatctgaacaggacacaatcaaatagtggaactcttcagcagtctaggctactgtttagccaagctggacccaccagcatgtctcttcaagctaaaaactggctgcctggaccttgctacagacagcagcgtctgtcaaagcaggcaaacgacaacaacaacagcaactttccctggactgcggctacaaagtatcatctaaatggtcgggactcgttggttaatccaggaccagctatggccagccacaaagacgatgaagaaaagtttttccccatgcatggaaccctgatatttggtaaacaaggaacaaatgctaacgacgcggatttggaacatgtcatgattacagatgaagaagaaatcaggaccaccaatcccgtggctacagagcagtacggaaacgtgtcaaataatttgcaaaactcaaatactggtccaactacagaaaatgtcaatcaccagggagcgttacctggtatggtgtggcaggatcgagacgtgtacctgcagggacccatttgggccaagattcctcacaccgacggacactttcacccttctccactgatgggaggttttggactcaaacacccgcctcctcaaatcatgatcaaaaacactcctgttccagccaatcctcctacaaacttcagcgcggcaaagtttgcttccttcatcacacagtattccacgggacaggtcagcgtggagatcgagtgggagctgcagaaggagaacagcaaacgctggaaccccgagatccagtacacttccaactacaacaaatctgttaatgtggactttactgtggacactaatggtgtgtattcagagcctcgccccattggcaccagatacctgactcgtaatctgtaa

SEQ ID NO: 12260 - DNA, 2208 bp, Artificial Sequence
  source: /note="Description of Artificial Sequence: Synthetic polynucleotide"
atggctgccgatggttatcttccagattggctcgaggacactctctctgaaggaataagacagtggtggaagctcaaacctggcccaccaccaccaaagcccgcagagcggcatcaggacgacagcaggggtcttgtgcttcctgggtacaagtacctcggacccttcaacggactcgacaaaggagagccggtcaacgaggcagacgctgcggccctcgagcacgacaaggcctacgaccggcagctcgacagcggagacaacccgtacctcaagtacaaccacgccgacgcggagtttcaggagcgtcttaaagaagatacgtcttttgggggcaacctcggacgagcagtcttccaggcgaaaaagagggttcttgaacctctgggcctggttgaggaacctgttaagacggctccgggaaaaaagaggccggtagagcactctcctgcggagccagactcctcctcgggaaccggaaaagcgggccagcagcctgcaagaaagagattgaatttcggtcagactggagacgcagactccgtacctgacccccagcctctcggacagccaccagcagcccccacaagtttgggatctactacaatggctacaggcagtggcgcaccaatggcagacaataacgagggtgccgatggagtgggtaattcctcaggaaattggcattgcgattcccaatggctgggcgacagagtcatcaccaccagcacccgaacctgggccctgcccacctacaacaaccacctctacaagcaaatctccagccaatcaggagcatcgaacgacaaccactactttggctacagcaccccttgggggtattttgacttcaacagattccactgtcacttctccccacgtgactggcaaagactcatcaacaacaactggggattccgacccaagagactcaacttcaagctctttaacattcaagtcaaagaggtcacgcagaatgacggtacgacgacgattgccaataaccttaccagcacggttcaggtgtttactgactcggagtaccagctcccgtacgtcctcggctcggcgcatcaaggatgcctcccgccgtttccagcggacgtcttcatggtcccacagtatggatacctcaccctgaacaacgggagtcaggcggtaggacgctcttccttttactgcctggagtactttccttctcagatgctgcgtaccggaaacaactttaccttcagctacacctttgaggacgtgcctttccacagcagctacgctcacagccagagtttggaccggctgatgaatcctctgatcgaccagtatctgtattatctgaacaggacacaatcaaatagtggaactcttcagcagtctaggctactgtttagccaagctggacccaccagcatgtctcttcaagctaaaaactggctgcctggaccttgctacagacagcagcgtctgtcaaagcaggcaaacgacaacaacaacagcaactttccctggactgcggctacaaagtatcatctaaatggtcgggactcgttggttaatccaggaccagctatggccagccacaaagacgatgaagaaaagtttttccccatgcatggaaccctgatatttggtaaacaaggaacaaatgctaacgacgcggatttggaacatgtcatgattacagatgaagaagaaatcaggaccaccaatcccgtggctacagagcagtacggaaacgtgtcaaataatttgcaaaactcaaatactggtccaactacagaaaatgtcaatcaccagggagcgttacctggtatggtgtggcaggatcgagacgcgtacctgcagggacccatttgggccaagattcctcacaccgacggacactttcacccttctccactgatgggaggttttggactcaaacacccgcctcctcaaatcatgatcaaaaacactcctgttccagccaatcctcctacaaacttcagcgcggcaaagtttgcttccttcatcacacagtattccacgggacaggtcagcgtggagatcgagtgggagctgcagaaggagaacagcaaacgctggaaccccgagatccagtacacttccaactacaacaaatctgttaatgtggactttactgtggacactaatggtgtgtattcagagcctcgccccattggcaccagatacctgactcgtaatctgtaa

SEQ ID NO: 12261 - DNA, 2208 bp, Artificial Sequence
  source: /note="Description of Artificial Sequence: Synthetic polynucleotide"
atggctgccgatggttatcttccagattggctcgaggacactctctctgaaggaataagacagtggtggaagctcaaacctggcccaccaccaccaaagcccgcagagcggcatcaggacgacagcaggggtcttgtgcttcctgggtacaagtacctcggacccttcaacggactcgacaaaggagagccggtcaacgaggcagacgctgcggccctcgagcacgacaaggcctacgaccggcagctcgacagcggagacaacccgtacctcaagtacaaccacgccgacgcggagtttcaggagcgtcttaaagaagatacgtcttttgggggcaacctcggacgagcagtcttccaggcgaaaaagagggttcttgaacctctgggcctggttgaggaacctgctaagacggctccgggaaaaaagaggccggtagagcactctcctgcggagccagactcctcctcgggaaccggaaaagcgggccagcagcctgcaagaaagagattgaatttcggtcagactggagacgcagactccgtacctgacccccagcctctcggacagccaccagcagcccccacaagtttgggatctactacaatggctacaggcagtggcgcaccaatggcagacaataacgagggtgccgatggagtgggtaattcctcaggaaattggcattgcgattcccaatggctgggcgacagagtcatcaccaccagcacccgaacctgggccctgcccacctacaacaaccacctctacaagcaaatctccagccaatcaggagcatcgaacgacaaccactactttggctacagcaccccttgggggtattttgacttcaacagattccactgtcacttctccccacgtgactggcaaagactcatcaacaacaactggggattccgacccaagagactcaacttcaagctctttaacattcaagtcaaagaggtcacgcagaatgacggtacgacgacgattgccaataaccttaccagcacggttcaggtgtttactgactcggagtaccagctcccgtacgtcctcggctcggcgcatcaaggatgcctcccgccgtttccagcggacgtcttcatggtcccacagtatggatacctcaccctgaacaacgggagtcaggcggtaggacgctcttccttttactgcctggagtactttccttctcagatgctgcgtaccggaaacaactttaccttcagctacacctttgaggacgtgcctttccacagcagctacgctcacagccagagtttggaccggctgatgaatcctctgatcgaccagtatctgtattatctgaacaggacacaatcaaatagtggaactcttcagcagtctaggctactgtttagccaagctggacccaccagcatgtctcttcaagctaaaaactggctgcctggaccttgctacagacagcagcgtctgtcaaagcaggcaaacgacaacaacaacagcaactttccctggactgcggctacaaagtatcatctaaatggtcgggactcgttggttaatccaggaccagctatggccagccacaaagacgatgaagaaaagtttttccccatgcatggaaccctgatatttggtaaacaaggaacaaatgctaacgacgcggatttggaacatgtcatgattacagatgaagaagaaatcaggaccaccaatcccgtggctacagagcagtacggaaacgtgtcaaataatttgcaaaactcaaatactggtccaactacagaaaatgtcaatcaccagggagcgttacctggtatggtgtggcaggatcgagacgtgtacctgcagggacccatttgggccaagattcctcacaccgacggacactttcacccttctccactgatgggaggttttggactcaaacacccgcctcctcaaatcatgatcaaaaacactcctgttccagccaatcctcctacaaacttcagcgcggcaaagtttgcttccttcatcacacagtattccacgggacaggtcagcgtggagatcgagtgggagctgcagaaggagaacagcaaacgctggaaccccgagatccagtacacttccaactacaacaaatctgttaatgtggactttactgtggacactaatggtgtgtattcagagcctcgccccattggcaccagatacctgactcgtaatctgtaa

SEQ ID NO: 12262 - DNA, 2208 bp, Artificial Sequence
  source: /note="Description of Artificial Sequence: Synthetic polynucleotide"
atggctgccgatggttatcttccagattggctcgaggacactctctctgaaggaataagacagtggtggaagctcaaacctggcccaccaccaccaaagcccgcagagcggcatcaggacgacagcaggggtcttgtgcttcctgggtacaagtacctcggacccttcaacggactcgacaaaggagagccggtcaacgaggcagacgctgcggccctcgagcacgacaaggcctacgaccggcagctcgacagcggagacaacccgtacctcaagtacaaccacgccgacgcggagtttcaggagcgtcttaaagaagatacgtcttttgggggcaacctcggacgagcagtcttccaggcgaaaaagagggttcttgaacctctgggcctggttgaggaacctgttaagacggctccgggaaaaaagaggccggtagagcactctcctgcggagccagactcctcctcgggaaccggaaaagcgggccagcagcctgcaagaaagagattgaatttcggtcagactggagacgcagactccgtacctgacccccagcctctcggacagccaccagcagcccccacaagtttgggatctactacaatggctacaggcagtggcgcaccaatggcagacaataacgagggtgccgatggagtgggtaattcctcaggaaattggcattgcgattcccaatggctgggcgacagagtcatcaccaccagcacccgaacctgggccctgcccacctacaacaaccacctctacaagcaaatctccagccaatcaggagcatcgaacgacaaccactactttggctacagcaccccttgggggtattttgacttcaacagattccactgtcacttctccccacgtgactggcaaagactcatcaacaacaactggggattccgacccaagagactcaacttcaagctctttaacattcaagtcaaagaggtcacgcagaatgacggtacgacgacgattgccaataaccttaccagcacggttcaggtgtttactgactcggagtaccagctcccgtacgtcctcggctcggcgcatcaaggatgcctcccgccgtttccagcggacgtcttcatggtcccacagtatggatacctcaccctgaacaacgggagtcaggcggtaggacgctcttccttttactgcctggagtactttccttctcagatgctgcgtaccggaaacaactttaccttcagctacacctttgaggacgtgcctttccacagcagctacgctcacagccagagtttggaccggctgatgaatcctctgatcgaccagtatctgtattatctgaacaggacacaatcaaatagtggaactcttcagcagtctaggctactgtttagccaagctggacccaccagcatgtctcttcaagctaaaaactggctgcctggaccttgctacagacagcagcgtctgtcaaagcaggcaaacgacaacaacaacagcaactttccctggactgcggctacaaagtatcatctaaatggtcgggactcgttggttaatccaggaccagctatggccagccacaaagacgatgaagaaaagtttttccccatgcatggaaccctgatatttggtaaacaaggaacaaatgctaacgacgcggatttggaacatgtcatgattacagatgaagaagaaatcaggaccaccaatcccgtggctacagagcagtacggaaacgtgtcaaataatttgcaaaactcaaatactggtccaactacagaaaatgtcaatcaccagggagcgttacctggtatggtgtggcaggatcgagacgtgtacctgcagggacccatttgggccaagattcctcacaccgacggacactttcacccttctccactgatgggaggttttggactcaaacacccgcctcctcaaatcatgatcaaaaacactcctgttccagccaatcctcctacaaacttcagcgcggcaaagtttgcttccttcatcacacagtattccacgggacaggtcagcgtggagatcgagtgggagctgcagaaggagaacagcaaacgctggaaccccgagatccagtacacttccaactacaacaaatctgttaatgtggactttactgtggacactaatggtgcgtattcagagcctcgccccattggcaccagatacctgactcgtaatctgtaa

SEQ ID NO: 12263 - DNA, 2208 bp, Artificial Sequence
  source: /note="Description of Artificial Sequence: Synthetic polynucleotide"
atggctgccgatggttatcttccagattggctcgaggacactctctctgaaggaataagacagtggtggaagctcaaacctggcccaccaccgccaaagcccgcagagcggcataaggacgacagcaggggtcttgtgcttcctgggtacaagtacctcggacccttcaacggactcgacaagggagagccggtcaacgaggcagacgccgcggccctcgagcacgacaaggcctacgaccggcagctcgacagcggagacaacccgtacctcaagtacaaccacgccgacgcggagtttcaggagcgccttaaagaagatacgtcttttgggggcaacctcggacgagcagtattccaggcgaaaaagagggttcttgaacctctgggcctggttgaggagcctgttaagacggctccgggaaaaaagaggccggtagagcactctcctgtggagccagactcctcctcgggaaccggaaaagcgggccagcagcctgcgagaaagagattgaattttggtcagactggagacgcagactccgtacctgacccccagcctctcggacagccaccagcagcccccacaagtttgggatctactacaatggctacaggcagtggcgcaccaatggcagacaataacgagggtgccgatggagtgggtaattcctcaggaaattggcattgcgattcccaatggtcgggcgacagagtcatcaccaccagcacccgaacctgggccctgcccacctacaacaaccacctctacaagcaaatctccagccaatcaggagccagcaacgacaaccactactttggctacagcaccccctgggggtattttgacttcaacagattccactgccacttttcaccacgtgactggcaaagactcatcaacaacaactggggattccgacccaagagactcaacttcaagctctttaacattcaagtcaaagaggtcacgcagaatgacggtacgacgacgattgccaataaccttaccagcacggttcaggtgtttactgactcggagtaccagctcccgtacgtcctcggctcggcgcatcaaggatgcctcccgccgtttccagcggacgtcttcatggtcccacagtatggatacctcaccctgaacaacgggagtcaggcggtaggacgctcttccttttactgcctggagtactttccttctcagatgcttcgtaccggaaacaactttaccttcagttacacctttgaagacgttcctttccacagcagctacgctcacagtcaaagtctggaccggctgatgaatcctcttatcgaccagtacctgtattatctaaacaaaacacaatcaaatagtggaactcttcagcagtctcggctactgtttagtcaagctggacctaccagcatgtctcttcaagctaaaaactggctgcctggaccttgctacagacaacagcgtctgtcaaagcaggcaaacgacaacaacaacagcaactttccctggactgcggctacaaagtatcatctaaatggccgggactcgttggttaatccaggaccagctatggccagccacaaagacgatgaagaaaagtttttccccatgcatggaaccctgatatttggcaaacaaggaacaaatgctaacgacgcggatttggacaatgtcatgattacagatgaagaagaaatccgtaccaccaatcccgtggctacggagcagtacgggactgtgtcaaataatttgcaaaactcaaatactggtccaactactggaactgtcaatcaccaaggagcgttacctggtatggtgtggcaggatcgagacgtgtaccttcagggacccatttgggccaagattcctcacaccgatggacactttcacccttctccgctgatgggaggttttggactcaaacacccgcctcctcagatcatgatcaaaaacactcccgttccagccaatcctcccacaaacttcagttctgccaagtttgcttctttcatcacacagtattccacgggacaggttagcgtggagatcgagtgggagctgcagaaggagaacagcaaacgctggaaccccgagatccagtacacttccaactacaacaagtctgttaatgtggactttactgtggacactaatggtgtgtattcagagcctcgccccattggcaccagatacctgactcgtaatctgtaa

SEQ ID NO: 12264 - DNA, 2208 bp, Artificial Sequence
  source: /note="Description of Artificial Sequence: Synthetic polynucleotide"
atggctgccgatggttatcttccagattggctcgaggacgctctctctgaaggaataagacagtggtggaagctcaaacctggcccaccaccgccaaagcccgcagagcggcataaggacgacagcaggggtcttgtgcttcctgggtacaagtacctcggacccttcaacggactcgacaagggagagccggtcaacgaggcagacgccgcggccctcgagcacgacaaggcctacgaccggcagctcgacagcggagacaacccgtacctcaagtacaaccacgccgacgcggagtttcaggagcgccttaaagaagatacgtcttttgggggcaacctcggacgagcagtattccaggcgaaaaagagggttcttgaacctctgggcctggttgaggagcccgttaagacggctccgggaaaaaagaggccggtagagcactctcctgtggagccagactcctcctcgggaaccggaaaagcgggccagcagcctgcgagaaagagattgaattttggtcagactggagacgcagactccgtacctgacccccagcctctcggacagccaccagcagcccccacaagtttgggatctactacaatggctacaggcagtggcgcaccaatggcagacaataacgagggtgccgatggagtgggtaattcctcaggaaattggcattgcgattcccaatggtcgggcgacagagtcatcaccaccagcacccgaacctgggccctgcccacctacaacaaccacctctacaagcaaatctccagccaatcaggagccagcaacgacaaccactactttggctacagcaccccctgggggtattttgacttcaacagattccactgccacttttcaccacgtgactggcaaagactcatcaacaacaactggggattccgacccaagagactcaacttcaagctctttaacattcaagtcaaagaggtcacgcagaatgacagtacgacgacgattgccaataaccttaccagcacggttcaggtgtttactgactcggagtaccagctcccgtacgtcctcggctcggcgcatcaaggatgcctcccgccgtttccagcggacgtcttcatggtcccacagtatggatacctcaccctgaacaacgggagtcaggcggtaggacgctcttccttttactgcctggagtactttccttctcagatgcttcgtaccggaaacaactttaccttcagttacacctttgaagacgttcctttccacagcagctacgctcacagtcaaagcctggaccggctgatgaatcctcttatcgaccagtacctgtattatctaaacaaaacacaatcaaatagtggaactcttcagcagtctcggctactgtttagtcaagctggacctaccagcatgtctcctcaagctaaaaactggctgcctggaccttgctacagacaacagcgtctgtcaaagcaggcaaacgacaacaacaacagcaactttccctggactgcggctacaaagtatcatctaaatggccgggactcgttggttaatccaggaccagctatggccagccacaaagacgatgaagaaaagtttttccccatgcatggaaccctgatatttggcaaacaaggaacaaatgctaacgacgcggatttggacaatgtcatgattacagatgaagaagaaatccgtaccaccaatcccgtggctacggagcagtacgggactgtgtcaaataatttgcaaaactcaaatactggtccaactactggaactgtcaatcaccaaggagcgttacctggtatggtgtggcaggatcgagacgtgtaccttcagggacccatttgggccaagattcctcacaccgatggacactttcacccttctccgctgatgggaggttttggactcaaacacccgcctcctcagatcatgatcaaaaacactcccgttccagccaatcctcccacaaacttcagttctgccaagtttgcttctttcatcacacagtattccacgggacaggttagcgtggagatcgagtgggagctgcagaaggagaacagcaaacgctggaaccccgagatccagtacacttccaactacaacaagtctgttaatgtggactttactgtggacactaatggtgtgtattcagagcctcgccccattggcaccagatacctgactcgtaatctgtaa

SEQ ID NO: 12265 - DNA, 2208 bp, Artificial Sequence
  source: /note="Description of Artificial Sequence: Synthetic polynucleotide"
atggctgccgatggttatcttccagattggctcgaggacactctctctgaaggaataagacagtggtggaagctcaaacctggcccaccaccgccaaagcccgcagagcggcataaggacgacagcaggggtcttgtgcttcctgggtacaagtacctcggacccttcaacggactcgacaagggagagccggtcaacgaggcaaacgccgcggccctcgagcacgacaaggcctacgaccggcagctcgacagcggagacaacccgtacctcaagtacgaccacgccgacgcggagtttcaggagcgccttaaagaagatacgtcttttgggggcaacctcggacgagcagtattccaggcgaaaaagagggttcttgaacctctgggcctggttgaggagcctgttaagacggctccgggaaaaaagaggtcggtagagcactctcctgtggagccagactcctcctcgggaaccggaaaagcgggccagcagcctgcgagaaagagattgaattttggtcagactggagacgcagactccgtacctgacccccagcctctcggacagccaccagcagcccccacaagtttgggatctactacaatggctacaggcagtggcgcaccaatggcagacaataacgagggtgccgatggagtgggtaattcctcaggaaattggcattgcgattcccaatggtcgggcgacagagtcatcaccaccagcacccgaacctgggccctgcccacctacaacaaccacctctacaagcaaatctccagccaatcaggagccagcaacgacaaccactactttggccacagcaccccctgggggtattttgacttcaacagattccactgccacttttcaccacgtgactggcaaagactcatcaacaacaactggggattccgacccaagagactcaacttcaagctctttaacattcaagtcaaagaggtcacgcagaatgacggtacgacgacgattgccaataaccttaccagcacggttcaggtgtttactgactcggagtaccggctcccgtacgtcctcggctcggcgcatcaaggatgcctcccgccgtttccagcggacgtcttcatggtcccacagtatggatacctcaccctgaacaacgggagtcaggcggtaggacgctcctccttttactgcctggagtactttccttctcagatgcttcgtaccggaaacaactttaccttcagttacacctttgaagacgttcctttccacagcagctacgctcacagtcaaagtctggaccggctgatgaatcctcttatcgaccagtacctgtattatctaaacaaaacacaatcaaatagtggaactcttcagcagtctcggctactgtttagtcaagctggacctaccagcatgtctcttcaagctaaaaactggctgcctggaccttgctacagacaacagcgtctgtcaaagcaggcaaacgacaacaacaacagcaactttccctggactgtggctacaaagtatcatctaaatggccgggactcgttggttaatccaggaccagctatggccagccacaaagacgatgaagaaaagtttttccccatgcatggaaccctgatatttggcaaacaaggaacaaatgctaacgacgcggatttggacaatgtcatgattacagatgaagaagaaatccgtaccaccaatcccgtggctacggagcagtacgggactgtgtcaaataatttgcaaaactcaaatactggtccaactactggaactgtcaatcaccaaggagcgttacctggtatggtgtggcaggatcgagacgtgtaccttcagggacccatttgggccaagattcctcacaccgatggacactttcacccttctccgctgatgggaggttttggactcaaacacccgcctcctcagatcatgatcaaaaacactcccgttccagccaatcctcccacaaacttcagttctgccaagtttgcttctttcatcacacagtattccacgggacaggttagcgtggagatcgagtgggagctgcagaaggagaacagcaaacgctggaaccccgagacccagtacacttccaactacaacaagtctgttaatgtggactttactgtggacactaatggtgtgtattcagagcctcgccccattggcaccagatacctgactcgtaatctgtaa

SEQ ID NO: 12266 - DNA, 2208 bp, Artificial Sequence
  source: /note="Description of Artificial Sequence: Synthetic polynucleotide"
atggctgccgatggttatcttccagattggctcgaggacactctctctgaaggaataagacagtggtggaagctcaaacctggcccaccaccgccaaagcccgcagagcggcataaggacgacagcaggggtcttgtgcttcctgggtacaagtacctcggacccttcaacggactcgacaagggagagccggtcaacgaggcaaacgccgcggccctcgagcacgacaaggcctacgaccggcagctcgacagcggagacaacccgtacctcaagtacaaccacgccgacgcggagtttcaggagcgccttaaagaagatacgtcttttgggggcaacctcggacgagcagtattccaggcgaaaaagagggttcttgaacctctgggcctggttgaggagcctgttaagacggctccgggaaaaaagaggccggtagagcactctcctgtggagccagactcctcctcgggaaccggaaaagcgggccagcagcctgcgagaaagagattgaattttggtcagactggagacgcagactccgtacctgacccccagcctctcggacagccaccagcagcccccacaagtttgggatctactacaatggctacaggcagtggcgcaccaatggcagacaataacgagggtgccgatggagtgggtaattcctcaggaaattggcattgcgattcccaatggtcgggcgacagagtcatcaccaccagcacccgaacctgggccctgcccacctacaacaaccacctctacaagcaaatctccagccaatcaggagccagcaacgacaaccactactttggctacagcaccccctgggggtattttgacttcaacagattccactgccgcttttcaccacgtgactggcaaagactcatcaacaacaactggggattccgacccaagagactcaacttcaagctccttaacattcaagtcaaagaggtcacgcagaatgacggtacgacgacgattgccaataaccttaccagcacggttcaggtgtttactgactcggagtaccagctcccgtacgtcctcggctcggcgcatcaaggatgcctcccgccgtttccagcggacgtcttcatggtcccacagtatggatacctcaccctgaacaacgggagtcaggcggtaggacgctcttccttttactgcctggagtactttccttctcagatgcttcgtaccggaaacaactttaccttcagttacacctttgaagacgttcctttccacagcagctacgctcacagtcaaagtctggaccggctgatgaatcctcttatcgaccagtacctgtattatctaaacaaaacacaatcaaatagtggaactcttcagcagtctcggctactgtttagtcaagctggacctaccagcatgtctcttcaagctaaaaactggctgcctggaccttgctacagacaacagcgtctgtcaaagcaggcaaacgacaacaacaacagcaactttccctggactgcggctacaaagtatcatctaaatggccgggactcgttggttaatccaggaccagctatggccagccacaaagacgatgaagaaaagtttttccccatgcatggaaccctgatatttggcaaacaaggaacaaatgctaacgacgcggatttggacaatgtcatggttacagatgaagaagaaatccgtaccaccaatcccgtggctacggagcagtacgggactgtgtcaaataatttgcaaaactcaaatactggtccaactactggaactgtcaatcaccaaggagcgttacctggtatggtgtggcaggatcgagacgtgtaccttcagggacccatttgggccaagattcctcacaccgatggacactttcacccttctccgctgatgggaggttttggactcaaacacccgcctcctcagatcatgatcaaaaacactcccgttccagccaatcctcccacaaacttcagttctgccaagtttgcttctttcatcacacagtattccacgggacaggttagcgtggagatcgagtgggagctgcagaaggagaacagcaaacgctggaaccccgagacccagtacacttccaactacaacaagtctgttaatgtggactttactgtggacactaatggtgtgtattcagagcctcgccccattggcaccagatacctgactcgtaatctgtaa

SEQ ID NO: 12267 - DNA, 2208 bp, Artificial Sequence
  source: /note="Description of Artificial Sequence: Synthetic polynucleotide"
atggctgccgatggttatcttccagattggctcgaggacactctctctgaaggaataagacagtggtggaagctcaaacctggcccaccaccgccaaagcccgcagagcggcataaggacgacagcaggggccttgtgcttcctgggtacaagtacctcggacccttcaacggactcgacaagggagagccggtcaacgaggcagacgccgcggccctcgagcacgacaaggcctacgaccggcagctcgacagcggagacaacccgtacctcaagtacaaccacgccgacgcggagtttcaggagcgccttaaagaagatacgtcttttgggggcaacctcggacgagcagtattccaggcgaaaaagagggttcttgaacctctgggcctggttgaggagcctgttaagacggctccgggaaaaaagaggccggtagagcactctcctgtggagccagactcctcctcgggaaccggaaaagcgggccagcagcctgcgagaaagggattgaattttggtcagactggagacgcagactccgtacctgacccccggcctctcggacagccaccagcagcccccgcaagtttgggatctactacaatggctacaggcagtggcgcaccaatggcagacaataacgagggtgccgatggagtgggtaattcctcaggaaattggcattgcgattcccaatggttgggcgacagagtcatcaccaccagcacccgaacctgggccctgcccacctacaacaaccacctctacaagcaaatctccagccaatcaggagccagcaacgacaaccactactttggctacagcaccccctgggggtattttgacttcaacagattccactgccacttttcaccacgtgactggcaaagactcatcaacaacaactggggattccgacccaagagactcaacttcaagctctttaacattcaagtcaaagaggtcacgcagaatgacggtacgacgacgattgccaataaccttaccagcacggttccggtgtttactgactcggagtaccagctcccgtacgtcctcggctcggcgcatcaaggatgcctcccgccgtttccagcggacgtcttcatggtcccacagtatggatacctcaccctgaacaacgggagtcaggcggtaggacgctcttccttttactgcctggagtactttccttctcagatgcttcgtaccggaaacaactttaccttcagttacacctttgaagacgttcctttccacagcagctacgctcacagtcaaagtctggaccggctgatgaatcctcttatcgaccagtacctgtattatctaaacaaaacacaatcaaatagtggaactcttcagcagtctcggctactgtttagtcaagctggacctaccagcatgtctctccaagctaaaaactggctgcctggaccttactacagacaacagcgtctgtcaaagcaggcaaacgacaacaacaacagcaactttccctggactgcggctacaaagtatcatccaaatggccgggactcgttggttgatccaggaccagctatggccagccacaaagacgatgaagaaaagtttttccccatgcatggaaccctgatatttggcaaacaagggacaaatgctaacgacgcggatttggacaatgtcatgattacagatgaagaagaaatccgtaccaccaatcccgtggctacggggcagtacgggactgtgtcaaataatttgcaaaactcaaatactggtccaactactggaactgtcaatcaccaaggagcgttacctggtatggtgtggcaggatcgagacgtgtaccttcagggacccatttgggccaagattcctcacaccgatggacactttcacccttctccgctgatgggaggttttggactcaaacacccgcctcctcagatcatggtcaaaaacactcccgttccagccaatcctcccacaaacttcagttctgccaagtttgtttctttcatcacacggtattccacgggacaggttagcgtggagatcgagtgggagctgcagaaggagaacagcaaacgctggaaccccgagatccagtacacttccaactacaacaagtctgttaatgtggactttactgtggacactaatggtgtgtattcagagcctcgccccattggcaccagatacctgactcgtaatctgtaa

SEQ ID NO: 12268 - DNA, 2208 bp, Artificial Sequence
  source: /note="Description of Artificial Sequence: Synthetic polynucleotide"
atggctgccgatggttatcttccagattggctcgaggacactctctctgaaggaataagacagtggtggaagctcaaacctggcccaccaccgccaaagcccgcagagcggcataaggacgacagcaggggtcttgtgcttcctgggtacaagtacctcggacccttcaacggacccgacaagggagagccggtcaacgaggcagacgccgcggccctcgagcacgacaaggcctacgaccggcagctcgacagcggagacaacccgtacctcaagtacaaccacgccgacgcggagtttcaggagcgccttaaagaagatacgtcttttgggggcaacctcggacgagcagtattccaggcgaaaaagagggttcttgaacctctgggcctggttgaggagcctgttaagacggctccgggaaaaaagaggccggtagagcactctcctgtggagccagactcctcctcgggaaccggaaaagcgggccagcagcctgcgagaaagagattgaattttggtcagactggagacgcagactccgtacctgacccccagcctctcggacagccaccagcagcccccacaagtttgggatctactacaatggctacaggcagtggcgcaccaatggcagacaataacgagggtgccgatggagtgggtaattcctcaggaaattggcattgcgattcccaatggtcgggcgacagagtcatcaccaccagcacccgaacctgggccctgcccacctacaacaaccacctctacaagcaaatctccagccaatcaggagccagcaacgacaaccactactttggctacagcaccccctgggggtattttgacttcaacagattccactgccacttttcaccacgtgactggcaaagactcatcaacaacaactggggattccgacccaagagactcaacttcaagctctttaacattcaagtcaaagaggtcacgcagaatgacggtacgacgacgattgccaataaccttaccagcacggttcaggtgtttactgactcggagtaccagctcccgtacgtcctcggctcggcgcatcaaggatgcctcccgccgtttccagcggacgtcttcatggtcccacagtatggatacctcaccctgaacaacgggagtcaggcggtaggacgctcttccttttactgcctggagtactttccttctcagatgcttcgtaccggaaacaactttaccttcagttacacctttgaagacgttcctttccacagcagctacgctcacagtcaaagtctggaccggctgatgaatcctcttatcgaccagtacctgtattatctaaacaaaacacaatcaaatagtggaactcttcagcagtctcggctactgtttagtcaagctggacctaccagcatgtctcttcaagctaaaaactggctgcctggaccttgctacagacaacagcgtctgtcaaagcaggcaaacgacaacaacaacagcaactttccctggactgcggctacaaagtatcatctaaatggccgggactcgttggttaatccaggaccagctatggccagccacaaagacgatgaagaaaagtttttccccatgcatggaaccctgatatttggcaaacaaggaacaaatgctaacgacgcggatttggacaatgtcatgattacagatgaagaagaaatccgtaccaccaatcccgtggctacggagcagtacgggactgtgtcaaataatttgcaaaactcaaatactggtccaactactggaactgtcaatcaccaaggagcgttacctggtatggtgtggcaggatcgagacgtgtaccttcagggacccatttgggccaagattcctcacaccgatggacactttcacccttctccgctgatgggaggttttggactcaaacacccgcctcctcagatcatgatcaaaaacactcccgttccagccaatcctcccacaaacttcagttctgccaagtttgcttctttcatcacacagtattccacgggacaggttagcgtggagatcgagtgggagctgcagaaggagaacagcaaacgctggaaccccgagatccagtacacttccaactacaacaagtctgttaatgtggactttactgtggacactaatggtgtgtattcagagcctcgccccattggcaccagatacctgactcgtaatctgtaa

SEQ ID NO: 12269 - DNA, 2208 bp, Artificial Sequence
  source: /note="Description of Artificial Sequence: Synthetic polynucleotide"
atggctgccgatggttatcttccagattggctcgaggacactctctctgaaggaataagacagtggtggaagctcaaacctggcccaccaccgccaaagcccgcagagcggcataaggacgacagcaggggtcttgtgcttcctgggtacaagtacctcggacccttcaacggactcgacaagggagagccggtcaacgaggcagacgccgcggccctcgagcacgacaaggcctacgaccggcagctcgacagcggagacaacccgtacctcaagtacaaccacgccgacgcggagtttcaggagcgccttaaagaagatacgtcttttgggggcaacctcggacgagcagtattccaggcgaaaaagagggttcttgaacctctgggcctggttgaggagcctgttaagacggctccgggaaaaaagaggccggtagagcactctcctgtggagccagactcctcctcgggaaccggaaaagcgggccagcagcctgcgagaaagagattgaattttggtcagactggagacgcagactccgtacctgacccccagcctctcggacagccaccagcagcccccacaagtttgggatctactacaatggctacaggcagtggcgcaccaatggcagacaataacgagggtgccgatggagtgggtaattcctcaggaaattggcattgcgattcccaatggtcgggcgacagagtcatcaccaccagcacccgaacctgggccctgcccacctacaacaaccacctctacaagcaaatctccagccaatcaggagccagcaacgacaaccactactttggctacagcaccccctgggggtattttgacttcaacagattccactgccacttttcaccacgtgactggcaaagactcatcaacaacaactggggattccgacccaagagactcaacttcaagctctttaacattcaagtcaaagaggtcacgcagaatgacggtacgacgacgattgccaataaccttaccagcacggttcaggtgtttactgactcggagtaccagctcccgtacgtcctcggctcggcgcatcaaggatgcctcccgccgtttccagcggacgtcttcatggtcccacagtatggatacctcaccctgaacaacgggagtcaggcggtaggacgctcttccttttactgcctggagtactttccttctcagatgcttcgtaccggaaacaactttaccttcagttacacctttgaagacgttcctttccacagcagctacgctcacagtcaaagtctggaccggctgatgaatcctcttatcgaccagtacctgtattatctaaacaaaacacaatcaaatagtggaactcttcagcagtctcggctactgtttagtcaagctggacctaccagcatgtctcttcaagctaaaaactggctgcctggaccttgctacagacaacagcgtctgtcaaagcaggcaaacgacaacaacaacagcaactttccctggactgcggctacaaagtatcatctaaatggccgggactcgttggttaatccaggaccagctatggccagccacaaagacgatgaagaaaagtttttccccatgcatggaaccctgatatttggcaaacaaggaacaaatgctaacgacgcggatttggacaatgtcatgattacagatgaagaagaaatccgtaccaccaatcccgtggctacggagcagtacgggactgtgtcaaataatttgcaaaactcaaatactggtccaactactggaactgtcaatcaccaaggagcgttacctggtatggtgtggcaggatcgagacgtgtaccttcagggacccatttgggccaagattcctcacaccgatggacactttcacccttctccgctgatgggaggttttggactcaaacacccgcctcctcagatcatgatcaaaaacactcccgttccagccaatcctcccacaaacttcagttctgccaagtttgcttctttcatcacacagtattccacgggacaggttagcgtggagatcgagtgggagctgcagaaggagaacagcaaacgctggaaccccgagacccagtacacttccaactacaacaagtctgttaatgtggactttactgtggacactaatggtgtgtattcagagcctcgccccattggcaccagatacctgactcgtaatctgtaa

SEQ ID NO: 12270 - DNA, 2208 bp, Artificial Sequence
  source: /note="Description of Artificial Sequence: Synthetic polynucleotide"
atggctgccgatggttatcttccagattggctcgaggacactctctctgaaggaataagacagtggtggaagctcaaacctggcccaccaccgccaaagcccgcagagcggcataaggacgacagcaggggccttgtgcttcctgggtacaagtacctcggacccttcaacggactcgacaagggagagccggtcaacgaggcagacgccgcggccctcgagcacgacaaggcctacgaccggcagctcgacagcggagacaacccgtacctcaagtacaaccacgccgacgcggagtttcaggagcgccttaaagaagatacgtcttttgggggcaacctcggacgagcagtattccaggcgaaaaagagggttcttgaacctctgggcctggttgaggagcctgttaagacggctccgggaaaaaagaggccggtagagcactctcctgtggagccagactcctcctcgggaaccggaaaagcgggccagcagcctgcgagaaagggattgaattttggtcagactggagacgcagactccgtacctgacccccggcctctcggacagccaccagcagcccccgcaagtttgggatctactacaatggctacaggcagtggcgcaccaatggcagacaataacgagggtgccgatggagtgggtaattcctcaggaaattggcattgcgattcccaatggttgggcgacagagtcatcaccaccagcacccgaacctgggccctgcccacctacaacaaccacctctacaagcaaatctccagccaatcaggagccagcaacgacaaccactactttggctacagcaccccctgggggtattttgacttcaacagattccactgccacttttcaccacgtgactggcaaagactcatcaacaacaactggggattccgacccaagagactcaacttcaagctctttaacattcaagtcaaagaggtcacgcagaatgacggtacgacgacgattgccaataaccttaccagcacggttccggtgtttactgactcggagtaccagctcccgtacgtcctcggctcggcgcatcaaggatgcctcccgccgtttccagcggacgtcttcatggtcccacagtatggatacctcaccctgaacaacgggagtcaggcggtaggacgctcttccttttactgcctggagtactttccttctcagatgcttcgtaccggaaacaactttaccttcagttacacctttgaagacgttcctttccacagcagctacgctcacagtcaaagtctggaccggctgatgaatcctcttatcgaccagtacctgtattatctaaacaaaacacaatcaaatagtggaactcttcagcagtctcggctactgtttagtcaagctggacctaccagcatgtctctccaagctaaaaactggctgcctggaccttactacagacaacagcgtctgtcaaagcaggcaaacgacaacaacaacagcaactttccctggactgcggctacaaagtatcatccaaatggccgggactcgttggttgatccaggaccagctatggccagccacaaagacgatgaagaaaagtttttccccatgcatggaaccctgatatttggcaaacaagggacaaatgctaacgacgcggatttggacaatgtcatgattacagatgaagaagaaatccgtaccaccaatcccgtggctacggrgcagtacgggactgtgtcaaataatttgcaaaactcaaatactggtccaactactggaactgtcaatcaccaaggagcgttacctggtatggtgtggcaggatcgagacgtgtaccttcagggacccatttgggccaagattcctcacaccgatggacactttcacccttctccgctgatgggaggttttggactcaaacacccgcctcctcagatcatggtcaaaaacactcccgttccagccaatcctcccacaaacttcagttctgccaagtttgcttctttcatcacacggtattccacgggacaggttagcgtggagatcgagtgggagctgcagaaggagaacagcaaacgctggaaccccgagatccagtacacttccaactacaacaagtctgttaatgtggactttactgtggacactaatggtgtgtattcagagcctcgccccattggcaccagatacctgactcgtaatctgtaa

SEQ ID NO: 12271 - DNA, 2208 bp, Artificial Sequence
  source: /note="Description of Artificial Sequence: Synthetic polynucleotide"
atggctgccgatggttatcttccagattggctcgaggacactctctctgaaggaataagacagtggtggaagctcaaacctggcccaccaccgccaaagcccgcagagcggcataaggacgacagcaggggtcttgtgcttcctgggtacaagtacctcggacccttcaacggactcgacaagggagagccggtcaacgaggcagacgccgcggcccccgagcacgacaaggcctacgaccggcagctcgacagcggagacaacccgtaccccaagtacaaccacgccgacgcggagtttcaggagcgccttaaagaagatacgtcttttgggggcaacctcggacgagcagtattccaggcgaaaaagagggttcttgaacctctgggcctggttgaggagcctgttaagacggctccgggaaaaaagaggccggtagagcactctcctgtggagccagactcctcctcgggaaccggaaaagcgggccagcagcctgcgagaaagagattgaattttggtcagactggagacgcagactccgtacctgacccccagcctctcggacagccaccagcagcccccacaagtttgggatctactacaatggctacaggcagtggcgcaccaatggcagacaataacgagggtgccgatggagtgggtaattcctcaggaaattggcattgcgattcccaatggtcgggcgacagagtcatcaccaccagcacccgaacctgggccctgcccacctacaacaaccacctctacaagcaaatctccagccaatcaggagccagcaacgacaaccactactttggctacagcaccccctgggggtattttgacttcaacagattccactgccacttttcaccacgtgactggcaaagactcatcaacaacaactggggattccgacccaagagactcaacttcaagctctttaacattcaagtcaaagaggtcacgcagaatgacggtacgacgacgattgccaataaccttaccagcacggttcaggtgtttactgactcggagtaccagctcccgtacgtcctcggctcggcgcatcaaggatgcctcccgccgtttccagcggacgtcttcatggtcccacagtatggatacctcaccctgaacaacgggagtcaggcggtaggacgctcttccttttactgcctggagtactttccttctcagatgcttcgtaccggaaacaactttaccttcagttacacctttgaagacgttcctttccacagcagctacgctcacagtcaaagtctggaccggctgatgaatcctcttatcgaccagtacctgtattatctaaacaaaacacaatcaaatagtggaactcttcagcagtctcggctactgtttagtcaagctggacctaccagcatgtctcttcaagctaaaaactggctgcctggaccttgctacagacaacagcgtctgtcaaagcaggcaaacgacaacaacaacagcaactttccctggactgcggctacaaagtatcatctaaatggccgggactcgttggttaatccaggaccagctatggccagccacaaagacgatgaagaaaagtttttccccatgcatggaaccctgatatttggcaaacaaggaacaaatgctaacgacgcggatttggacaatgtcatgattacagatgaagaagaaatccgtaccaccaatcccgtggctacggagcagtacgggactgtgtcaaataatttgcaaaactcaaatactggtccaactactggaactgtcaatcaccaaggagcgttacctggtatggtgtggcaggatcgagacgtgtaccttcagggacccatttgggccaagattcctcacaccgatggacactttcacccttctccgctgatgggaggttttggactcaaacacccgcctcctcagatcatgatcaaaaacactcccgttccagccaatcctcccacaaacttcagttctgccaagtttgcttctttcatcacacagtattccacgggacaggttagcgtggagatcgagtgggagctgcagaaggagaacagcaaacgctggaaccccgagatccagtacacttccaactacaacaagtctgttaatgtggactttactgtggacactaatggtgtgtattcagagcctcgccccattggcaccagatacctgactcgtaatctgtaa

SEQ ID NO: 12272 - DNA, 2208 bp, Artificial Sequence
  source: /note="Description of Artificial Sequence: Synthetic polynucleotide"
atggctgccgatggttatcttccagattggctcgaggacactctctctgaaggaataagacagtggtggaagctcaaacctggcccaccaccgccaaagcccgcagagcggcataaggacgacagcaggggtcttgtgcttcctgggtataagtacctcggacccttcaacggactcgacaagggagagccggtcaacgaggcagacgccgcggccctcgagcacgacaaggcctacgaccggcagctcgacagcggagacaacccgtacctcaagtacaaccacgccgacgcggagtttcaggagcgccttaaagaagatacgtcttttgggggcaacctcggacgagcagtattccaggcgaaaaagagggttcttgaacctctgggcctggttgtggagcctgttaagacggctccgggaaaaaagaggccggtagagcactctcctgtggagccagactcctcctcgggaaccggaaaagcgggccagcagcctgcgagaaagagattgaattttggtcagactggagacgcagactccgtacctgacccccagcctctcggacagccaccagcagcccccacaagtttgggatctactacaatggctacaggcagtggcgcaccaatggcagacaataacgagggtgccgatggagtgggtaattcctcaggaaattggcattgcgattcccaatggtcgggcgacagagtcatcaccaccagcacccgaacctgggccctgcccacctacaacaaccacctctacaagcaaatctccagccgatcaggagccagcaacgacaaccactactttggctacagcaccccctgggggtattttgacttcaacggattccactgccacttttcaccacgtgactggcaaagactcatcaacaacaactggggattccgacccaagagactcaacttcaagctctttaacattcaagtcaaagaggtcacgcagaatgacggtacgacgacgattgccaataaccttaccagcacggttcaggtgtttactgactcggagtaccagctcccgcacgtcctcggctcggcgcatcaaggatgcctcccgccgtttccagcggacgtcttcatggtcccacagtatggatacctcaccctgaacaacgggagtcaggcggtaggacgctcttccttttactgcccggagtactttccttctcagatgcttcgtaccggaaacaactttaccttcagttacacctttgaagacgttcctttccacagcagctacgctcacagtcaaagtctggaccggctgatgaatcctcttatcgaccagtacctgtattatctaaacaaaacacaatcaaatagtggaactcttcagcagtctcggctactgtttagtcaagctggacctaccagcatgtctcttcaagctaaaaactggctgcctggaccttgctacagacaacagcgtctgtcaaagcaggcaaacggcaacaacaacagcaactttccctggactgcggctacaaagtatcatctaaatggccgggactcgttggttaatccaggaccagctatggccagccacaaagacgatgaagaaaagtttttccccatgcatggaaccctgatatttggcaaacaaggaacaaatgctaacgacgcggatttggacaatgtcatgattacagatgaagaagaaatccgtaccaccaatcccgtggctacggagcagtacgggactgtgtcaaataatttgcaaaactcaaatactggtccaactactggaactgtcaatcaccaaggagcgttacctggtatggtgtggcaggatcgagacgtgtaccttcagggacccatttgggccaagattcctcacaccgatggacactttcacccttctccgctgatgggaggttttggactcaaacacccgcctcctcagatcatgatcaaaaacactcccgttccagccaatcctcccacaaacttcagttctgccaagtttgcttctttcatcacacagtattccacgggacaggttagcgtggagatcgagtgggagctgcagaaggagaacagcaaacgctggaaccccgagatccagtacacttccaactacaacaagtctgttaatgtggactttactgtggacactaatggtgtgtattcagagcctcgccccattggcaccagatacctgactcgtaatctgtaa

SEQ ID NO: 12273 - DNA, 2208 bp, Artificial Sequence
  source: /note="Description of Artificial Sequence: Synthetic polynucleotide"
atggctgccgatggttatcttccagattggctcgaggacactctctctgaaggaataagacagtggtggaagctcaaacctggcccaccgccgccaaagcccgcagagcggcataaggacgacagcaggggtcttgtgcttcctgggtacaagtacctcggacccttcaacggactcgacaagggagagccggtcaacgaggcagacgccgcggccctcgagcacgacaaggcctacgaccggcagctcgacagcggagacaacccgtacctcaagtacaaccacgccgacgcggagtttcaggagcgccttaaagaagatacgtcttttgggggcaacctcggacgagcagtattccaggcgaaaaagagggttcttgaacctctgggcctggttgaggagcctgttaagacggttccgggaaaaaagaggccggtagagcactctcctgtggagccagactcctcctcgggaaccggaaaagcgggccagcagcctgcgagaaagagattgaattttggtcagactggagacgcagactccgtacctgacccccagcctctcggacagccaccagcagcccccacaagtttgggatctactacaatggctacaggcagtggcgcaccaatggcagacaataacgagggtgccgatggagtgggtaattcctcaggaaattggcattgcgattcccaatggtcgggcgacagagtcatcaccaccagcacccgaacctgggccctgcccacctacaacaaccacccctacaagcaaatctccagccaatcaggagccagcaacgacaaccactactttggctacagcaccccctgggggtattttgacttcaacagattccactgccacttttcaccacgtgactggcaaagactcatcaacaacaactggggattccgacccaagagactcaacttcaagctctttaacattcaagtcaaagaggtcacgcagaatgacggtacgacgacgattgccaataaccttaccagcacggttcaggtgtttactgactcggagtaccagctcccgtacgtcctcggctcggcgcatcaaggacgcctcccgccgtttccagcggacgtcttcatggtcccacagtatggatacctcaccctgaacaacgggagtcaggcggtaggacgctcttccttttactgcctggagtactttccttctcagatgcttcgtaccggaaacaactttaccttcagttacacctttgaagacgttcctttccacagcagctacgctcacagtcaaagtctggaccggctgatgaatcctcttatcgaccagtacctgtattatctaaacaaaacacaatcaaatagtggaactcttcagcagtctcggctactgtttagtcaagctggacctactagcatgtctcttcaagctaaaaactggctgcctggaccttgctacagacaacagcgtctgtcaaagcaggcagacgacaacaacaacagcaactttccctggactgcggctacaaagtatcatctaaatggccgggactcgttggttaatccaggaccagctatggccagccacaaagacgatgaagaaaagtttttccccatgcatggaaccctgatatttggcaaacaaggaacaaatgctaacgacgcggatttggacaatgtcatgattacagatgaagaagaaatccgtaccaccaatcccgtggctacggagcagtacgggactgtgtcaaataatttgcaaaactcaaatactggtccaactactggaactgtcaatcaccaaggagcgttacctggtatggtgtggcaggatcgagacgtgtaccttcagggacccatttgggccaagattcctcacaccgatggacactttcacccttctccgctgatgggaggttttggactcaaacacccgcctcctcagatcatgatcaaaaacactcccgttccagccaatccccccacaaacttcagttctgccaagtttgcttctttcatcacacagtattccacgggacaggttagcgtggagatcgagtgggagctgcagaaggagaacagcaaacgctggaaccccgagatccagtacacttccaactacaacaagtctgttaatgtggactttactgtggacgctaatggtgtgtattcagagcctcgccccattggcaccagatacctgactcgtaatctgtaa

SEQ ID NO: 12274 - DNA, 2208 bp, Artificial Sequence
  source: /note="Description of Artificial Sequence: Synthetic polynucleotide"
atggctgccgatggttatcttccagattggctcgaggacactctctctgaaggaataagacagtggtggaagctcaaacctggcccaccaccgccaaagcccgcagagcggcataaggacgacagcaggggtcttgtgctttctgggtacaagtacctcggacccttcaacggactcgacaagggagagccggtcaacgaggcagacgccgcggccctcgagcacgacaaggcctacgaccggcagctcgacagcggagacaacccgtacctcaagtacaaccacgccgacgcggagtttcaggagcgccttaaagaagatacgtcttttgggggcaacctcggacgagcagtattccaggcgaaaaagagggttcttgaacctctgggcctggttgaggagcctgttaagacggctccgggaaaaaagaggccggtagagcactctcctgtggagccagactcctcctcgggaaccggaaaagcgggccagcagcctgcgagaaagagattgaattttggtcagactggagacgcagactccgtacctgacccccagcctctcggacagccaccagcagcccccacaagtttgggatctactacaatggctacaggcagtggcgcaccaatggcagacaataacgagggtgccgatggagtgggtaattcctcaggaaattggcattgcgattcccaatggtcgggcgacagagtcatcaccaccagcacccgaacctgggccctgcccacctacaacaaccacctctacaagcaaatctccagccaatcaggagccagcaacgacaaccactactttggctacagcaccccctgggggtattttgacttcaacagattccactgccacttttcaccacgtgactggcaaagactcatcaacaacaactggggattccgacccaagagactcaacttcaagctctttaacattcaagtcaaagaggtcacgcagaatgacggtacgacgacgattgccaataaccttaccagcacggttcaggtgtttactgactcggagtaccagctcccgtacgtcctcggctcggcgcatcaaggatgcctcccgccgtttccagcggacgtcttcatggtcccacagtatggatacctcaccctgaacaacgggagtcaggcggtaggacgctcttccttttactgcctggagtactttccttctcagatgcttcgtaccggaaacaactttaccttcagttacacctttgaagacgttcctttccacagcagctacgctcacagtcaaagtctggaccggctgatgaatcctcttatcgaccagtacctgtattatctaaacaaaacacaatcaaatagtggaactcttcagcagtctcggctactgtttagtcaagctggacctaccagcatgtctcttcaagctaaaaactggctgcctggaccttgctacagacaacagcgtctgtcaaagcaggcaaacgacaacaacaacagcaactttccctggactgcggctacaaagtatcatctaaatggccgggactcgttggttaatccaggaccagctatggccagccacaaagacgatgaagaaaagtttttccccatgcatggaaccctgatatttggcaaacaaggaacaaatgctaacgacgcggatttggacaatgtcatgattacagatgaagaagaaatccgtaccaccaatcccgtggctacggagcagtacgggactgtgtcaaataatttgcaaaactcaaatactggtccaactactggaactgtcaatcaccaaggagcgttacctggtatggtgtggcaggatcgagacgtgtaccttcagggacccatttgggccaagattcctcacaccgatggacactttcacccttctccgctgatgggaggttttggactcaaacacccgcctcctcagatcatgatcaaaaacactcccgttccagccaatccccccacaaacttcagttctgccaagtttgcttctttcatcacacagtattccacgggacaggttagcgtggagatcgagtgggagctgcagaaggagaacagcaaacgctggaaccccgagatccagtacacttccaactacaacaagtctgttaatgtggactttactgtggacactaatggtgtgtattcagagcctcgccccattggcaccagatacctgactcgtaatctgtaa

SEQ ID NO: 12275 - DNA, 2208 bp, Artificial Sequence
  source: /note="Description of Artificial Sequence: Synthetic polynucleotide"
atggctgccgatggttatcttccagattggctcgaggacactctctctgaaggaataagacagtggtggaagctcaaacctggcccaccaccgccaaagcccgcagagcggcataaggacgacagcaggggtcttgtgcttcctgggtacaagtacctcggacccttcaacggactcgacaagggagagccggtcaacgaggcagacgccgcggccctcgagcacgacaaggcctacgaccggcagctcgacagcggagacaacccgtacctcaagtacaaccacgccgacgcggagtttcaggagcgccttaaagaagatacgtcttttgggggcaacctcggacgagcagtattccaggcgaaaaagagggttcttgaacctctgggcctggttgaggagcctgttaagacggctccgggaaaaaagaggccggtagagcactctcctgtggagccagactcctcctcgggaaccggaaaagcgggccagcagcctgcgagaaagagattgaattttggtcagactggagacgcagactccgtacctgacccccagcctctcggacagccaccagcagcccccacaagtttgggatctactacaatggctacaggcagtggcgcaccaatggcagacaataacgagggtgccgatggagtgggtaattcctcaggaaattggcattgcgattcccaatggtcgggcgacagagtcatcaccaccagcacccgaacctgggccctgcccacctacaacaaccacctctacaagcaaatctccagccaatcaggagccagcaacgacaaccactactttggctacagcaccccctgggggtattttgacttcaacagattccactgccacttttcaccacgtgactggcaaagactcatcaacaacaactggggattccgacccaagagactcaacttcaagctctttaacattcaagtcaaagaggtcacgcagaatgacggtacgacgacgattgccaataaccttaccagcacggttcaggtgtttactgactcggagtaccagctcccgtacgtcctcggctcggcgcatcaaggatgcctcccgccgtttccagcggacgtcttcatggtcccacagtatggatacctcaccctgaacaacgggagtcaggcggtaggacgctcctccttttactgcctggagtactttccttctcagatgcttcgtaccggaaacaactttaccttcagttacacctttgaagacgttcctttccacagcagctgcgctcacagtcaaagtctggaccggctgatgaatcctcttatcgaccagtacctgtattatctaaacaaaacacaatcaaatagtggaactcttcagcagtctcggctactgtttagtcaagctggacctaccagcatgtctcttcaagctaaaaactggctgcctggaccttgctacagacaacagcgtctgtcaaagcaggcaaacgacaacaacaacagcaactttccctggactgcggctacaaagtatcatctaaatggccgggactcgttggttaatccaggaccagctatggccagccacaaagacgatgaagaaaagtttttccccatgcatggaaccctgatatttggcaaacaaggaacaaatgctaacgacgcggatttggacaatgtcatgattacagatgaagaagaaatccgtaccaccaatcccgtggctacggagcagtacgggactgtgtcaaataatttgcaaaactcaaatactggtccaactactggaactgtcaatcaccaaggagcgttacctggtatggtgtggcaggatcgagacgtgtaccttcagggacccatttgggccaagattcctcacaccgatggacactttcacccttctccgctgatgggaggttttggactcaaacacccgcctcctcagatcatgatcaaaaacactcccgttccagccaatcctcccacaaacttcagttctgccaagtttgcttctttcatcacacagtattccacgggacaggttagcgtggagatcgagtgggagctgcagaaggagaacagcaaacgctggaaccccgagatccagtacacttccaactacaacaagtctgttaatgtggactttactgtggacactaatggtgtgtattcagagcctcgccccattggcaccagatacctgactcgtaatctgtaa

SEQ ID NO: 12276 - DNA, 2208 bp, Artificial Sequence
  source: /note="Description of Artificial Sequence: Synthetic polynucleotide"
atggctgccgatggttatcttccagattggctcgaggacactctctctgaaggaataagacagtggtggaagctcaaacctggcccaccaccgccaaagcccgcagagcggcataaggacgacagcaggggtcttgtgcttcctgggtacaagtacctcggacccttcaacggactcgacaagggagagccggtcaacgaggcagacgccgcggccctcgagcacgacaaggcctacgaccggcagctcgacagcggagacaacccgtacctcaagtacaaccacgccgacgcggagtttcaggagcgccttaaagaagatacgtcttttgggggcaacctcggacgagcagtattccaggcgaaaaagagggttcttgaacctctgggcctggttgaggagcctgttaagacggctccgggaaaaaagaggccggtagagcactctcctgtggagccagactcctcctcgggaaccggaaaagcgggccagcagcctgcgagaaagagattgaattttggtcagactggagacgcagactccgtacctgacccccagcctctcggacagccaccagcagcccccacaagtttgggatctactacaatggctacaggcagtggcgcaccaatggcagacaataacgagggtgccgatggagtgggtaattcctcaggaaattggcattgcgattcccaatggtcgggcgacagagtcatcaccaccagcacccgaacctgggccctgcccacctacaacaaccacctctacaagcaaatctccagccaatcaggagccagcaacgacaaccactactttggctacagcaccccctgggggtattttgacttcaacagattccactgccacttttcaccacgtgactggcaaagactcatcaacaacaactggggattccgacccaagagactcaacttcaagctctttaacattcaagtcaaagaggtcacgcagaatgacggtacgacgacgattgccaataaccttaccagcacggttccggtgtttactgactcggagtaccagctcccgtacgtcctcggctcggcgcatcaaggatgcctcccgccgtttccagcggacgtcttcatggtcccacagtatggatacctcaccctgaacaacgggagtcaggcggtaggacgctcttccttttactgcctggagtactttccttctcagatgcttcgtaccggaaacaactttaccttcagttacacctttgaagacgttcctttccacagcagctacgctcacagtcaaagtctggaccggctgatgaatcctcttatcgaccagtacctgtattatctaaacaaaacacaatcaaatagtggaactcttcagcagtctcggctactgtttagtcaagctggacctaccagcatgtctctccaagctaaaaactggctgcctggaccttactacagacaacagcgtctgtcaaagcaggcaaacgacaacaacaacagcaactttccctggactgcggctacaaagtatcatccaaatggccgggactcgttggttgatccaggaccagctatggccagccacaaagacgatgaagaaaagtttttccccatgcatggaaccctgatatttggcaaacaagggacaaatgctaacgacgcggatttggacaatgtcatgattacagatgaagaagaaatccgtaccaccaatcccgtggctacggggcagtacgggactgtgtcaaataatttgcaaaactcaaatactggtccaactactggaactgtcaatcaccaaggagcgttacctggtatggtgtggcaggatcgagacgtgtaccttcagggacccatttgggccaagattcctcacaccgatggacactttcacccttctccgctgatgggaggttttggactcaaacacccgcctcctcagatcatggtcaaaaacactcccgttccagccaatcctcccacaaacttcagttctgccaagtttgcttctttcatcacacggtattccacgggacaggttagcgtggagatcgagtgggagctgcagaaggagaacagcaaacgctggaaccccgagatccagtacacttccaactacaacaagtctgttaatgtggactttactgtggacactaatggtgtgtattcagagcctcgccccattggcaccagatacctgactcgtaatctgtaa

SEQ ID NO: 12277 - DNA, 2208 bp, Artificial Sequence
  source: /note="Description of Artificial Sequence: Synthetic polynucleotide"
atggctgccgatggttatcttccagattggctcgaggacactctctctgaaggaataagacagtggtggaagctcaaacctggcccaccaccgccaaagcccgcagagcggcataaggacgacagcaggggtcttgtgcttcctgggtacaagtacctcggacccttcaacggacccgacaagggagagccggtcaacgaggcagacgccgcggccctcgagcacgacaaggcctacgaccggcagctcgacagcggagacaacccgtacctcaagtacaaccacgccgacgcggagtttcaggagcgccttaaagaagatacgtcttttgggggcaacctcggacgagcagtattccaggcgaaaaagagggttcttgaacctctgggcctggttgaggagcctgttaagacggctccgggaaaaaagaggccggtagagcactctcctgtggagccagactcctcctcgggaaccggaaaagcgggccagcagcctgcgagaaagagattgaattttggtcagactggagacgcagactccgtacctgacccccagcctctcggacagccaccagcagcccccacaagtttgggatctactacaatggctacaggcagtggcgcaccaatggcagacaataacgagggtgccgatggagtgggtaattcctcaggaaattggcattgcgattcccaatggtcgggcgacagagtcatcaccaccagcacccgaacctgggccctgcccacctacaacaaccacctctacaagcaaatctccagccaatcaggagccagcaacgacaaccactactttggctacagcaccccctgggggtattttgacttcaacagattccactgccacttttcaccacgtgactggcaaagactcatcaacaacaactggggattccgacccaagagactcaacttcaggctctttaacattcaagtcaaagaggtcacgcagaatgacggtacgacgacgattgccaataaccttaccagcacggttcaggtgtttactgactcggagtaccagctcccgtacgtcctcggctcggcgcatcaaggatgcctcccgccgtttccagcggacgtcttcatggtcccacagtatggatacctcaccctgaacaacgggagtcaggcggtaggacgctcttccttttactgcctggagtactttccttctcagatgcttcgtaccggaaacaactttaccttcagttacacctttgaagacgttcctttccacagcagctacgctcacagtcaaagtctggaccggctgatgaatcctcttatcgaccagtacctgtattatctaaacaaaacacaatcaaatagtggaactcttcagcagtctcggctactgtttagtcaagctggacctaccagcatgtctcttcaagctaaaaactggctgcctggaccttgctacagacaacagcgtctgtcaaagcaggcaaacgacaacaacaacagcaactttccctggactgcggctacaaagtatcatctaaatggccgggactcgttggttaatccaggaccagctatggccagccacaaagacgatgaagaaaagtttttccccatgcatggaaccctgatatttggcaaacaaggaacaaatgctaacgacgcggatttggacaatgtcatgattacagatgaagaagaaatccgtaccaccaatcccgtggctacggagcagtacgggactgtgtcaaataatttgcaaaactcaaatactggtccaactactggaactgtcaatcaccaaggagcgttacctggtatggtgtggcaggatcgagacgtgtaccttcagggacccatttgggccaagattcctcacaccgatggacactttcacccttctccgctgatgggaggttttggactcaaacacccgcctcctcagatcatgatcaaaaacactcccgttccagccaatccccccacaaacttcagttctgccaagtttgcttctttcatcacacagtattccacgggacaggttagcgtggagatcgagtgggagctgcagaaggagaacagcaaacgctggaaccccgagatccagtacacttccaactacaacaagtctgttaatgtggactttactgtggacactaatggtgtgtattcagagcctcgccccattggcaccagatacctgactcgtaatctgtaa

SEQ ID NO: 12278 - DNA, 2208 bp, Artificial Sequence
  source: /note="Description of Artificial Sequence: Synthetic polynucleotide"
atggctgccgatggttatcttccagattggctcgaggacactctctctgaaggaataagacagtggtggaagctcaaacctggcccaccaccgccaaagcccgcagagcggcataaggacgacagcaggggtcttgtgcttcctgggtacaagtacctcggacccttcaacggacccgacaagggagagccggtcaacgaggcagacgccgcggccctcgagcacgacaaggcctacgaccggcagctcgacagcggagacaacccgtacctcaagtacaaccacgccgacgcggagtttcaggagcgccttaaagaagatacgtcttttgggggcaacctcggacgagcagtattccaggcgaaaaagagggttcttgaacctctgggcctggttgaggagcctgttaagacggctccgggaaaaaagaggccggtagagcactctcctgtggagccagactcctcctcgggaaccggaaaagcgggccagcagcctgcgagaaagagattgaattttggtcagactggagacgcagactccgtacctgacccccagcctctcggacagccaccagcagcccccacaagtttgggatctactacaatggctacaggcagtggcgcaccaatggcagacaataacgagggtgccgatggagtgggtaattcctcaggaaattggcattgcgattcccaatggtcgggcgacagagtcatcaccaccagcacccgaacctgggccctgcccacctacaacaaccacctctacaagcaaatctccagccaatcaggagccagcaacgacaaccactactttggctacagcaccccctgggggtattttgacttcaacagattccactgccacttttcaccacgtgactggcaaagactcatcaacaacaactggggattccgacccaagagactcaacttcaggctctttaacattcaagtcaaagaggtcacgcagaatgacggtacgacgacgattgccaataaccttaccagcacggttcaggtgtttactgactcggagtaccagctcccgtacgtcctcggctcggcgcatcaaggatgcctcccgccgtttccagcggacgtcttcatggtcccacagtatggatacctcaccctgaacaacgggggtcaggcggtaggacgctcttccttttactgcctggagtactttccttctcagatgcttcgtaccggagacaactttaccttcagttacacctttgaagacgttcctttccacagcagctacgctcacagtcaaagtctggaccggctgatgaatcctcttatcgaccagtacctgtattatctaaacaaaacacaatcaaatagtggaactcttcagcagtctcggctactgtttagtcaagctggacctaccagcatgtctcttcaagctaaaaactggctgcctggaccttgctacagacaacagcgtctgtcaaagcaggcaaacgacaacaacaacagcaactttccctggactgcggctacaaagtatcatctaaatggccgggactcgttggttaatccaggaccagctatggccagccacaaagacgatgaagaaaagtttttccccatgcatggaaccctgatatttggcaaacaaggaacaaatgctaacgacgcggatttggacaatgtcatgattacagatgaagaagaaatccgtaccaccaatcccgtggctacggagcagtacgggactgtgtcaaataatttgcaaaactcaaatactggtccaactactggaactgtcaatcaccaaggagcgttacctggtatggtgtggcaggatcgagacgtgtaccttcagggacccatttgggccaagattcctcacaccgatggacactttcacccttctccgctgatgggaggttttggactcaaacacccgcctcctcagatcatgatcaaaaacactcccgttccagccaatcctcccacaaacttcagttctgccaagtttgcttctttcatcacacagtattccacgggacaggttagcgtggagatcgagtgggagctgcagaaggagaacagcaaacgctggaaccccgagatccagtacacttccaactacaacaagtctgttaatgtggactttactgtggacactaatggtgtgtattcagagcctcgccccattggcaccagatacctgactcgtaatctgtaa

SEQ ID NO: 12279 - DNA, 2208 bp, Artificial Sequence
  source: /note="Description of Artificial Sequence: Synthetic polynucleotide"
atggctgccgatggttatcttccagattggctcgaggacactctctctgaaggaataagacagtggtggaagctcaaacctggcccaccaccgccaaagcccgcagagcggcataaggacgacagcaggggtcttgtgcttcctgggtacaagtacctcggacccttcaacggactcgacaagggagagccggtcaacgaggcagacgccgcggccctcgagcacgacaaggcctacgaccggcagctcgacagcggagacaacccgtacctcaagtacaaccacgccgacgcggagtttcaggagcgccttaaagaagatacgtcttttgggggcaacctcggacgagcagtattccaggcgaaaaagagggttcttgaacctctgggcctggttgaggagcctgttaagacggctccgggaaaaaagaggccggtagagcactctcctgtggagccagactcctcctcgggaaccggaaaagcgggccagcagcctgcgagaaagagattgaattttggtcagactggagacgcagactccgtacctgacccccagcctctcggacagccaccagcagcccccacaagtttgggatctactacaatggctacaggcagtggcgcaccaatggcagacaataacgagggtgccgatggagtgggtaattcctcaggaaattggcattgcgattcccaatggtcgggcgacagagtcatcaccaccagcacccgaacctgggccctgcccacctacaacaaccacctctacaagcaaatctccagccaatcaggagccagcaacgacaaccactactttggctacagcaccccctgggggtattttgacttcaacagattccactgccacttttcaccacgtgactggcaaagactcatcaacaacaactggggattccgacccaagagactcaacttcaagctctttaacattcaagtcaaagaggtcacgcagaatgacggtacgacgacgattgccaataaccttaccagcacggttcaggtgtttactgactcggagtaccagctcccgtacgtcctcggctcggcgcatcaaggatgcctcccgccgtttccagcggacgtcttcatggtcccacagtatggatacctcaccctgaacaacgggagtcaggcggtaggacgctcttccttttactgcctggagtactttccttctcagatgcttcgtaccggaaacaactttaccttcagttacacctttgaagacgttcctttccacagcagttacgctcacagtcaaagtctggaccggctgatgaatcctcttatcgaccagtacctgtattatctaaacaaaacacaatcaaatagtggaactcttcagcagtctcggctactgtttagtcaagctggacctaccagcatgtctcttcaagctaaaaactggctgcctggaccttgctacagacaacagcgtctgtcaaagcaggcaaacgacaacaacaacagcaactttccctggactgcggctacaaagtatcatctaaatggccgggactcgttggttaatccaggaccagctatggccagccacaaagacgatgaagaaaagtttttccccatgcatggaaccctgatatttggcaaacaaggaacaaatgctaacgacgcggatttggacaatgccatgattacagatgaagaagaaatccgtaccaccaatcccgtggctacggagcagtacgggactgtgtcaaataatttgcaaaactcaaatactggtccaactactggaactgtcaatcaccaaggagcgttacctggtatggtgtggcaggatcgagacgtgtaccttcagggacccatttgggccaagattcctcacaccgatggacactttcacccttctccgctgatgggaggttttggactcaaacacccgcctcctcagatcatgatcaaaaacactcccgttccagccaatcctcccacaaacttcagttctgccaagtttgcttctttcatcacacagtattccacgggacaggttagcgtggagatcgagtgggagctgcagaaggagaacagcaaacgctggaaccccgagatccagtacacttccaactacaacaagtctgttaatgtggactttactgtggacactaatggtgtgtattcagagcctcgccccattggcaccagatacctgactcgtaatctgtaa

SEQ ID NO: 12280 - DNA, 2208 bp, Artificial Sequence
  source: /note="Description of Artificial Sequence: Synthetic polynucleotide"
atggctgccgatggttatcttccagattggctcgaggacactctctctgaaggaataagacagtggtggaagctcaaacctggcccaccaccgccaaagcccgcagagcggcataaggacgacagcaggggtcttgtgcttcctgggtacaagtacctcggacccttcaacggactcgacaagggagagccggtcaacgaggcaaacgccgcggccctcgagcacgacaaggcctacgaccggcagctcgacagcggagacaacccgtacctcaagtacaaccacgccgacgcggagtttcaggagcgccttaaagaagatacgtcttttgggggcaacctcggacgagcagtattccaggcgaaaaagagggttcttgaacctctgggcctggttgaggagcctgttaagacggctccgggaaaaaagaggccggtagagcactctcctgtggagccagactcctcctcgggaaccggaaaagcgggccagcagcctgcgagaaagagattgaattttggtcagactggagacgcagactccgtacctgacccccagcctctcggacagccaccagcagcccccacaagtttgggatctactacaatggctacaggcagtggcgcaccaatggcagacaataacgagggtgccgatggagtgggtaattcctcaggaaattggcattgcgattcccaatggtcgggcgacagagtcatcaccaccagcacccgaacctgggccctgcccacctacaacaaccacctctacaagcaaatctccagccaatcaggagccagcaacgacaaccactactttggctacagcaccccctgggggtattttgacttcaacagattccactgccacttttcaccacgtgactggcaaagactcatcaacaacaactggggattccgacccaagagactcaacttcaagctctttaacattcaagtcaaagaggtcacgcagaatgacggtacgacgacgattgccaataaccttaccagcacggttcaggtgtttactgactcggagtaccagctcccgtacgtcctcggctcggcgcatcaaggatgcctcccgccgtttccagcggacgtcttcatggtcccacagtatggatacctcaccctgaacaacgggagtcaggcggtaggacgctcttccttttactgcctggagtactttccttctcagatgcttcgtaccggaaacaactttaccttcagttacacctttgaagacgttcctttccacagcagctacgctcacagtcaaagtctggaccggctgatgaatcctcttatcgaccagtacctgtattatctaaacaaaacacaatcaaatagtggaactcttcagcagtctcggctactgtttagtcaagctggacctaccagcatgtctcttcaagctaaaaactggctgcctggaccttgctacagacaacagcgtctgtcaaagcaggcaaacgacaacaacaacagcaactttccctggactgcggctacaaagtatcatctaaatggccgggactcgttggttaatccaggaccagctatggccagccacaaagacgatgaagaaaagtttttccccatgcatggaaccctgatatttggcaaacaaggaacaaatgctaacgacgcggatttggacaatgtcatgattacagatgaagaagaaatccgtaccaccaatcccgtggctacggagcagtacgggactgtgtcaaataatttgcaaaactcaaatactggtccaactactggaactgtcaatcaccaaggagcgttacctggtatggtgtggcaggatcgagacgtgtaccttcagggacccatttgggccaagattcctcacaccgatggacactttcacccttctccgctgatgggaggttttggactcaaacacccgcctcctcagatcatgatcaaaaacactcccgttccagccaatcctcccacaaacttcagttctgccaagtttgcttctttcatcacacagtattccacgggacaggttagcgtggagatcgagtgggagctgcagaaggagaacagcaaacgctggaaccccgagacccagtacacttccaactacaacaagtctgttaatgtggactttactgtggacactaatggtgtgtattcagagcctcgccccattggcaccagatacctgactcgtaatctgtaa

SEQ ID NO: 12281 - DNA, 2208 bp, Artificial Sequence
  source: /note="Description of Artificial Sequence: Synthetic polynucleotide"
atggctgccgatggttatcttccagattggctcgaggacactctctctgaaggaataagacagtggtggaagctcaaacctggcccaccaccgccaaagcccgcagagcggcataaggacgacagcaggggtcttgtgcttcctgggtacaagtacctcggacccttcaacggacccgacaagggagagccggtcaacgaggcagacgccgcggccctcgagcacgacaaggcctacgaccggcagctcgacagcggagacaacccgtacctcaagtacaaccacgccgacgcggagtttcaggagcgccttaaagaagatacgtcttttgggggcaacctcggacgagcagtattccaggcgaaaaagagggttcttgaacctctgggcctggttgaggagcctgttaagacggctccgggaaaaaagaggccggtagagcactctcctgtggagccagactcctcctcgggaaccggaaaagcgggccagcagcctgcgagaaagagattgaattttggtcagactggagacgcagactccgtacctgacccccagcctctcggacagccaccagcagcccccacaagtttgggatctactacaatggctacaggcagtggcgcaccaatggcagacaataacgagggtgccgatggagtgggtaattcctcaggaaattggcattgcgattcccaatggtcgggcgacagagtcatcaccaccagcacccgaacctgggccctgcccacctacaacaaccacctctacaagcaaatctccagccaatcaggagccagcaacgacaaccactactttggctacagcaccccctgggggtattttgacttcaacagattccactgccacttttcaccacgtgactggcaaagactcatcaacaacaactggggattccgacccaagagactcaacttcaggctctttaacattcaagtcaaagaggtcacgcagaatgacggtacgacgacgattgccaataaccttaccagcacggttcaggtgtttactgactcggagtaccagctcccgtacgtcctcggctcggcgcatcaaggatgcctcccgccgtttccagcggacgtcttcatggtcccacagtatggatacctcaccctgaacaacgggagtcaggcggtaggacgctcttccttttactgcctggagtactttccttctcagatgcttcgtaccggagacaactttaccttcagttacacctttgaagacgttcctttccacagcagctacgctcacagtcaaagtctggaccggctgatgaatcctcttatcgaccagtacctgtattatctaaacaaaacacaatcaaatagtggaactcttcagcagtctcggctactgtttagtcaagctggacctaccagcatgtctcttcaagctaaaaactggctgcctggaccttgctacagacaacagcgtctgtcaaagcaggcaaacgacaacaacaacagcaactttccctggactgcggctacaaagtatcatctaaatggccgggactcgttggttaatccaggaccagctatggccagccacaaagacgatgaagaaaagtttttccccatgcatggaaccctgatatttggcaaacaaggaacaaatgctaacgacgcggatttggacaatgtcatgattacagatgaagaagaaatccgtaccaccaatcccgtggctacggagcagtacgggactgtgtcaaataatttgcaaaactcaaatactggtccaactactggaactgtcaatcaccaaggagcgttacctggtatggtgtggcaggatcgagacgtgtaccttcagggacccatttgggccaagattcctcacaccgatggacactttcacccttctccgctgatgggaggttttggactcaaacacccgcctcctcagatcatgatcaaaaacactcccgttccagccaatcctcccacaaacttcagttctgccaagtttgcttctttcatcacacagtattccacgggacaggttagcgtggagatcgagtgggagctgcagaaggagaacagcaaacgctggaaccccgagatccagtacacttccaactacaacaagtctgttaatgtggactttactgtggacactaatggtgtgtattcagagcctcgccccattggcaccagatacctgactcgtaatctgtaa

SEQ ID NO: 12282 - DNA, 2208 bp, Artificial Sequence
  source: /note="Description of Artificial Sequence: Synthetic polynucleotide"
atggctgccgatggttatcttccagattggctcgaggacactctctctgaaggaataagacagtggtggaagctcaaacctggcccaccaccgccaaagcccgcagagcggcataaggacgacagcaggggccttgtgcttcctgggtacaagtacctcggacccttcaacggactcgacaagggagagccggtcaacgaggcagacgccgcggccctcgagcacgacaaggcctacgaccggcagctcgacagcggagacaacccgtacctcaagtacaaccacgccgacgcggagtttcaggagcgccttaaagaagatacgtcttttgggggcaacctcggacgagcagtattccaggcgaaaaagagggttcttgaacctctgggcctggttgaggagcctgttaagacggctccgggaaaaaagaggccggtagagcactctcctgtggagccagactcctcctcgggaaccggaaaagcgggccagcagcctgcgagaaagggattgaattttggtcagactggagacgcagactccgtacctgacccccggcctctcggacagccaccagcagcccccgcaagtttgggatctactacaatggctacaggcagtggcgcaccaatggcagacaataacgagggtgccgatggagtgggtaattcctcaggaaattggcattgcgattcccaatggttgggcgacagagtcatcaccaccagcacccgaacctgggccctgcccacctacaacaaccacctctacaagcaaatctccagccaatcaggagccagcaacgacaaccactactttggctacagcaccccctgggggtattttgacttcaacagattccactgccacttttcaccacgtgactggcaaagactcatcaacaacaactggggattccgacccaagagactcaacttcaagctctttaacattcaagtcaaagaggtcacgcagaatgacggtacgacgacgattgccaataaccttaccagcacggttccggtgtttactgactcggagtaccagctcccgtacgtcctcggctcggcgcatcaaggatgcctcccgccgtttccagcggacgtcttcatggtcccacagtatggatacctcaccctgaacaacgggagtcaggcggtaggacgctcttccttttactgcctggagtactttccttctcagatgcttcgtaccggaaacaactttaccttcagttacacctttgaagacgttcctttccacagcagctacgctcacagtcaaagtctggaccggctgatgaatcctcttatcgaccagtacctgtattatctaaacaaaacacaatcaaatagtggaactcttcagcagtctcggctactgtttagtcaagctggacctaccagcatgtctctccaagctaaaaactggctgcctggaccttactacagacaacagcgtctgtcaaagcaggcaaacgacaacaacaacagcaactttccctggactgcggctacaaagtatcatccaaatggccgggactcgttggttgatccaggaccagctatggccagccacaaagacgatgaagaaaagtttttccccatgcatggaaccctgatatttggcaaacaagggacaaatgctaacgacgcggatttggacaatgtcatgattacagatgaagaagaaatccgtaccaccaatcccgtggctacggggcagtacgggactgtgtcaaataatttgcaaaactcaaatactggtccaactactggaactgtcaatcaccaaggagcgttacctggtatggtgtggcaggatcgagacgtgtaccttcagggacccatttgggccaagattcctcacaccgatggacactttcacccttctccgctgatgggaggttttggactcaaacacccgcctcctcagatcatggtcaaaaacactcccgttccagccaatcctcccacaaacttcagttctgccaagtttgcttctttcatcacacggtattccacgggacaggttagcgtggagatcgagtgggagctgcagaaggagaacagcaaacgctggaaccccgagatccagtacacttccaactacaacaagtctgttaatgtggactttactgtggacactaatggtgtgtattcagagcctcgccccattggcaccagatacctgactcgtaatctgtaa

SEQ ID NO: 12283 - DNA, 2208 bp, Artificial Sequence
  source: /note="Description of Artificial Sequence: Synthetic polynucleotide"
atggctgccgatggttatcttccagattggctcgaggacactctctctgaaggaataagacagtggtggaagctcaaacctggcccaccgccgccaaagcccgcagagcggcataaggacgacagcaggggtcttgtgcttcctgggtacaagtacctcggacccttcaacggactcgacaagggagagccggtcaacgaggcagacgccgcggccctcgagcacgacaaggcctacgaccggcagctcgacagcggagacaacccgtacctcaagtacaaccacgccgacgcggagtttcaggagcgccttaaagaagatacgtcttttgggggcaacctcggacgagcagtattccaggcgaaaaagagggttcttgaacctctgggcctggttgaggagcctgttaagacggttccgggaaaaaagaggccggtagagcactctcctgtggagccagactcctcctcgggaaccggaaaagcgggccagcagcctgcgagaaagagattgaattttggtcagactggagacgcagactccgtacctgacccccagcctctcggacagccaccagcagcccccacaagtttgggatctactacaatggctacaggcagtggcgcaccaatggcagacaataacgagggtgccgatggagtgggtaattcctcaggaaattggcattgcgattcccaatggtcgggcgacagagtcatcaccaccagcacccgaacctgggccctgcccacctacaacaaccacccctacaagcaaatctccagccaatcaggagccagcaacgacaaccactactttggctacagcaccccctgggggtattttgacttcaacagattccactgccacttttcaccacgtgactggcaaagactcatcaacaacaactggggattccgacccaagagactcaacttcaagctctttaacattcaagtcaaagaggtcacgcagaatgacggtacgacgacgattgccaataaccttaccagcacggttcaggtgtttactgactcggagtaccagctcccgtacgtcctcggctcggcgcatcaaggacgcctcccgccgtttccagcggacgtcttcatggtcccacagtatggatacctcaccctgaacaacgggagtcaggcggtaggacgctcttccttttactgcctggagtactttccttctcagatgcttcgtaccggaaacaactttaccttcagttacacctttgaagacgttcctttccacagcagctacgctcacagtcaaagtctggaccggctgatgaatcctcttatcgaccagtacctgtattatctaaacaaaacacaatcaaatagtggaactcttcagcagtctcggctactgtttagtcaagctggacctaccagcatgtctcttcaagctaaaaactggctgcctggaccttgctacagacaacagcgtctgtcaaagcaggcagacgacaacaacaacagcaactttccctggactgcggctacaaagtatcatctaaatggccgggactcgttggttaatccaggaccagctatggccagccacaaagacgatgaagaaaagtttttccccatgcatggaaccctgatatttggcaaacaaggaacaaatgctaacgacgcggatttggacaatgtcatgattacagatgaagaagaaatccgtaccaccaatcccgtggctacggagcagtacgggactgtgtcaaataatttgcaaaactcaaatactggtccaactactggaactgtcaatcaccaaggagcgttacctggtatggtgtggcaggatcgagacgtgtaccttcagggacccatttgggccaagattcctcacaccgatggacactttcacccttctccgctgatgggaggttttggactcaaacacccgcctcctcagatcatgatcaaaaacactcccgttccagccaatccccccacaaacttcagttctgccaagtttgcttctttcatcacacagtattccacgggacaggttagcgtggagatcgagtgggagctgcagaaggagaacagcaaacgctggaaccccgagatccagtacacttccaactacaacaagtctgttaatgtggactttactgtggacactaatggtgtgtattcagagcctcgccccattggcaccagatacctgactcgtaatctgtaa

SEQ ID NO: 12284 - DNA, 2208 bp, Artificial Sequence
  source: /note="Description of Artificial Sequence: Synthetic polynucleotide"
atggctgccgatggttatcttccagattggctcgaggacactctctctgaaggaataagacagtggtggaagctcaaacctggcccaccaccaccaaagcccgcagagcggcataaggacgacagcaggggtcttgtgcttcctgggtacaagtacctcggacccttcaacggactcgacaaaggagagccggtcaacgaggcagacgccgcggccctcgagcacgacaaggcctacgaccggcagctcgacagcggagacaacccgtacctcaagtacaaccacgccgacgcggagtttcaggagcgtcttaaagaagatacgtcttttgggggcaacctcggacgagcagtcttccaggcaaaaaagagggttcttgaacctctgggcctggttgaggaacctgttaagacggctccgggaaaaaagaggccggtagagcaatctcctgcggagccagactcctcctcgggaaccggaaaggcgggcaaccagcctgcaagaaagagattgaattttggtcagactggagacgcagactccgtacctgacccccagcctctcggacagccaccagcagccccctctggtctgggatctactacaatggctacaggcagtggcgcaccaatggcagacaataacgagggtgccgatggagtgggtaattcctcaggaaattggcattgcgattcccaatggttgggcgacagagtcatcaccaccagcacccgaacctgggccctgcccacctacaacaatcacctctacaagcaaatctccagccaatcaggagccagcaacgacaaccactactttggctacagcaccccctgggggtattttgacttcaacagattccactgccacttttcaccacgtgactggcaaagactcatcaacaacaactggggattccgacccaaaagactcaacttcaagctctttaacattcaagtcaaagaggtcacgcagaatgacggtacgacgacgattgccaataaccttaccagcacggttcaggtgtttactgactcggagtaccagctcccgtacgtcctcggctcggcgcatcaaggatgcctcccgccgtttccagcggacgtcttcatggtcccacagtatggatacctcaccctgaacaacgggagtcaggcggtaggacgctcttccttttactgcctggagtactttccttctcagatgcttcgtaccggaaacaactttaccttcagttacacctttgaagacgttcctttccacagcagctacgctcacagtcaaagtctggaccggctgatgaatcctctgatagaccagtacctgtattatctaaacaaaacacaatcaaatagtggaactcttcagcagtctcggctactgtttagtcaagctggacccaccagcatgtctcttcaagctaaaaactggctgcctggaccttgctacagacaacagcgtctgtcaaagcaggcaaacgacaacaacaacagcaactttccctggactgcggctacaaagtatcatctaaatggccgggactcgttggttaatccaggaccagctatggccagccacaaagacgatgaagaaaagtttttccccatgcatggaaccctgatatttggtaaacaaggaacaaatgctaacgacgcggatttggacaatgtcatgattacagatgaagaagaaatccgcaccaccaatcccgtggctacggagcagtacgggactgtgtcaaataatttgcaaaactcaaatactggtccaactactggaactgtcaatcaccaaggagcgttacctggtatggtgtggcaggatcgagacgtgtaccttcagggacccatttgggccaagattcctcacaccgatggacactttcatccttctccactgatgggaggttttggactcaaacacccgcctcctcagatcatgatcaaaaacactcccgttccagccaatcctcctacaaacttcagttctgccaagtttgcttctttcatcacacagtattccacggggcaggtcagcgtggagatagagtgggagctgcagaaggagaacagcaaacgctggaaccccgagatccagtatacttccaactacaacaagtctgttaatgtggactttactgtggacactaatggtgtgtattcagagcctcgccccattggcaccagatacctgactcgtaatctgtaa

SEQ ID NO: 12285 - DNA, 2205 bp, Artificial Sequence
  source: /note="Description of Artificial Sequence: Synthetic polynucleotide"
atggctgccgatggttatcttccagattggctcgaggacactctctctgaaggaataagacagtggtggaagctcaaacctggcccaccaccaaagcccgcagagcggcataaggacgacagcaggggtcttgtgcttcctgggtacaagtacctcggacccttcaacggactcgacaaaggagagccggtcaacgaggcagacgccgcggccctcgagcacgacaaggcctacgaccggcagctcgacagcggagacaacccgtacctcaagtacaaccacgccgacgcggagtttcaggagcgtcttaaagaagatacgtcttttgggggcaacctcggacgagcagtcttccaggcaaaaaagagggttcttgaacctctgggcctggttgaggaacctgttaagacggctccgggaaaaaagaggccggtagagcaatctcctgcggagccagactcctcctcgggaaccggaaaggcgggcaaccagcctgcaagaaagagattgaattttggtcagactggagacgcagactccgtacctgacccccagcctctcggacagccaccagcagccccctctggtctgggatctactacaatggctacaggcagtggcgcaccaatggcagacaataacgagggtgccgatggagtgggtaattcctcaggaaattggcattgcgattcccaatggttgggcgacagagtcatcaccaccagcacccgaacctgggccctgcccacctacaacaatcacctctacaagcaaatctccagccaatcaggagccagcaacgacaaccactactttggctacagcaccccctgggggtattttgacttcaacagattccactgccacttttcaccacgtgactggcaaagactcatcaacaacaactggggattccgacccaaaagactcaacttcaagctctttaacattcaagtcaaagaggtcacgcagaatgacggtacgacgacgattgccaataaccttaccagcacggttcaggtgtttactgactcggagtaccagctcccgtacgtcctcggctcggcgcatcaaggatgcctcccgccgtttccagcggacgtcttcatggtcccacagtatggatacctcaccctgaacaacgggagtcaggcggtaggacgctcttccttttactgcctggagtactttccttctcagatgcttcgtaccggaaacaactttaccttcagttacacctttgaagacgttcctttccacagcagctacgctcacagtcaaagtctggaccggctgatgaatcctctgatagaccagtacctgtattatctaaacaaaacacaatcaaatagtggaactcttcagcagtctcggctactgtttagtcaagctggacccaccagcatgtctcttcaagctaaaaactggctgcctggaccttgctacagacaacagcgtctgtcaaagcaggcaaacgacaacaacaacagcaactttccctggactgcggctacaaagtatcatctaaatggccgggactcgttggttaatccaggaccagctatggccagccacaaagacgatgaagaaaagtttttccccatgcatggaaccctgatatttggtaaacaaggaacaaatgctaacgacgcggatttggacaatgtcatgattacagatgaagaagaaatccgcaccaccaatcccgtggctacggagcagtacgggactgtgtcaaataatttgcaaaactcaaatactggtccaactactggaactgtcaatcaccaaggagcgttacctggtatggtgtggcaggatcgagacgtgtaccttcagggacccatttgggccaagattcctcacaccgatggacactttcatccttctccactgatgggaggttttggactcaaacacccgcctcctcagatcatgatcaaaaacactcccgttccagccaatcctcctacaaacttcagttctgccaagtttgcttctttcatcacacagtattccacggggcaggtcagcgtggagatagagtgggagctgcagaaggagaacagcaaacgctggaaccccgagatccagtatacttccaactacaacaagtctgttaatgtggactttactgtggacactaatggtgtgtattcagagcctcgccccattggcaccagatacctgactcgtaatctgtaa

SEQ ID NO: 12286 - DNA, 2208 bp, Artificial Sequence
  source: /note="Description of Artificial Sequence: Synthetic polynucleotide"
atggctgccgatggttatcttccagattggctcgaggacactctctctgaaggaataagacagtggtggaagctcaaacctggcccaccaccaccaaagcccgcagagcggcataaggacgacagcaggggtcttgtgcttcctgggtacaagtacctcggacccttcaacggactcgacaaaggagagccggtcaacgaggcagacgccgcggccctcgagcacgacaaggcctacgaccggcagctcgacagcggagacaacccgtacctcaagtacaaccacgccgacgcggagtttcaggagcgtcttaaagaagatacgtcttttgggggcaacctcggacgagcagtcttccaggcaaaaaagagggttcttgaacctctgggcctggttgaggaacctgttaagacggctccgggaaaaaagaggccggtagagcaatctcctgcggagccagactcctcctcgggaaccggaaaggcgggcaaccagcctgcaagaaagagattgaattttggtcagactggagacgcagactccgtacctgacccccagcctctcggacagccaccagcagccccctctggtctgggatctactacaatggctacaggcagtggcgcaccaatggcagacaataacgagggtgccgatggagtgggtaattcctcaggaaattggcattgcgattcccaatggttgggcgacagagtcatcaccaccagcacccgaacctgggccctgcccacctacaacaatcacctctacaagcaaatctccagccaatcaggagccagcaacgacaaccactactttggctacagcaccccctgggggtattttgacttcaacagattccaccgccacttttcaccacgtgactggcaaagactcatcaacaacaactggggattccgacccaaaagactcaacttcaagctctttaacattcaagtcaaagaggtcacgcagaatgacggtacgacgacgattgccaataaccttaccagcacggttcaggtgtttactgactcggagtaccagctcccgtacgtcctcggctcggcgcatcaaggatgcctcccgccgtttccagcggacgtcttcatggtcccacagtatggatacctcaccctgaacaacgggagtcaggcggtaggacgctcttccttttactgcctggagtactttccttctcagatgcttcgtaccggaaacaactttaccttcagttacacctttgaagacgttcctttccacagcagctacgctcacagtcaaagtctggaccggctgatgaatcctctgatagaccagtacctgtattatctaaacaaaacacaatcaaatagtggaactcttcagcagtctcggctactgtttagtcaagctggacccaccagcatgtctcttcaagctaaaaactggctgcctggaccttgctacagacaacagcgtctgtcaaagcaggcaaacgacaacaacaacagcaactttccctggactgcggctacaaagtatcatctaaatggccgggactcgttggttaatccaggaccagctatggccagccacaaagacgatgaagaaaagtttttccccatgcatggaaccctgatatttggtaaacaaggaacaaatgctaacgacgcggatttggacaatgtcatgattacagatgaagaagaaatccgcaccaccaatcccgtggctacggagcagtacgggactgtgtcaaataatttgcaaaactcaaatactggtccaactactggaactgtcaatcaccaaggagcgttacctggtatggtgtggcaggatcgagacgtgtaccttcagggacccatttgggccaagattcctcacaccgatggacactttcatccttctccactgatgggaggttttggactcaaacacccgcctcctcagatcatgatcaaaaacactcccgttccagccaatcctcctacaaacttcagttctgccaagtttgcttctttcatcacacagtattccacggggcaggtcagcgtggagatagagtgggagctgcagaaggagaacagcaaacgctggaaccccgagatccagtatacttccaactacaacaagtctgttaatgtggactttactgtggacactaatggtgtgtattcagagcctcgccccattggcaccagatacctgactcgtaatctgtaa

SEQ ID NO: 12287 - DNA, 2205 bp, Artificial Sequence
  source: /note="Description of Artificial Sequence: Synthetic polynucleotide"
atggctgccgatggttatcttccagattggctcgaggacactctctctgaaggaataagacagtggtggaagctcaaacctggcccaccaccaccaaagcccgcagagcggcataaggacgacagcaggggtcttgtgcttcctgggtacaagtacctcggacccttcaacggactcgacaaaggagagccggtcaacgaggcagacgccgcggccctcgagcacgacaaggcctacgaccggcagctcgacagcggagacaacccgtacctcaagtacaaccacgccgacgcggagtttcaggagcgtcttaaagaagatacgtcttttgggggcaacctcggacgagcagtcttccaggcaaaaaagagggttcttgaacctctgggcctggttgaggaacctgttaagacggctccgggaaaaaagaggccggtagagcaatctcctgcggagccagactcctcctcgggaaccggaaaggcgggcaaccagcctgcaagaaagagattgaattttggtcagactggagacgcagactccgtacctgacccccagcctctcggacagccaccagcagccccctctggtctgggatctactacaatggctacaggcagtggcgcaccaatggcagacaataacgagggtgccgatggagtgggtaattcctcaggaaattggcattgcgattcccaatggttgggcgacagagtcatcaccaccagcacccgaacctgggccctgcccacctacaacaatcacctctacaagcaaatctccagccaatcaggagccagcaacgacaaccactactttggctacagcaccccctgggggtattttgacttcaacagattccactgccacttttcaccacgtgactggcaaagactcatcaacaacaactggggattccgacccaaaagactcaacttcaagctctttaacattcaagtcaaagaggtcacgcagaatgacggtacgacgacgattgccaataaccttaccagcacggttcaggtgtttactgactcggagtaccagctcccgtacgtcctcggctcggcgcatcaaggatgcctcccgccgtttccagcggacgtcttcatggtcccacagtatggatacctcaccctgaacaacgggagtcaggcggtaggacgctcttccttttactgcctggagtactttccttctcagatgcttcgtaccggaaacaactttaccttcagttacacctttgaagacgttcctttccacagcagctacgctcacagtcaaagtctggaccggctgatgaatcctctgatagaccagtacctgtattatctaaacaaaacacaatcaaatagtggaactcttcagcagtctcggctactgtttagtcaagctggacccaccagcatgtctcttcaagctaaaaactggctgcctggaccttgctacagacaacagcgtctgtcaaagcaggcaaacgacaacaacagcaactttccctggactgcggctacaaagtatcatctaaatggccgggactcgttggttaatccaggaccagctatggccagccacaaagacgatgaagaaaagtttttccccatgcatggaaccctgatatttggtaaacaaggaacaaatgctaacgacgcggatttggacaatgtcatgattacagatgaagaagaaatccgcaccaccaatcccgtggctacggagcagtacgggactgtgtcaaataatttgcaaaactcaaatactggtccaactactggaactgtcaatcaccaaggagcgttacctggtatggtgtggcaggatcgagacgtgtaccttcagggacccatttgggccaagattcctcacaccgatggacactttcatccttctccactgatgggaggttttggactcaaacacccgcctcctcagatcatgatcaaaaacactcccgttccagccaatcctcctacaaacttcagttctgccaagtttgcttctttcatcacacagtattccacggggcaggtcagcgtggagatagagtgggagctgcagaaggagaacagcaaacgctggaaccccgagatccagtatacttccaactacaacaagtctgttaatgtggactttactgtggacactaatggtgtgtattcagagcctcgccccattggcaccagatacctgactcgtaatctgtaa

SEQ ID NO: 12288 - DNA, 2208 bp, Artificial Sequence
  source: /note="Description of Artificial Sequence: Synthetic polynucleotide"
atggctgccgatggttatcttccagattggctcgaggacactctctctgaaggaataagacagtggtggaagctcaaacctggcccaccaccaccaaggcccgcagagcggcatcaggacgacagcaggggtcttgtgcttcctgggtacaagtacctcggacccttcaacggactcgacaaaggagagccggtcaacgaggcagacgctgcggccctcgagcacgacaaggcctacgaccggcagctcgacagcggagacaacccgtacctcaagtacaaccacgccgacgcggagtttcaggagcgtcttaaagaagatacgtcttttgggggcaacctcggacgagcagtcttccaggcgaaaaagagggttcttgaacctctgggcctggttgaggaacctgttaagacggctccgggaaaaaagaggccggtagagcactctcctgcggagccagactcctcctcgggaaccggaaaagcgggccagcagcctgcaagaaagagattgaatttcggtcagactggagacgcagactccgtacctgacccccagcctctcgggcagccaccagcagcccccacaagtttgggatctactacaatggctacaggcagtggcgcaccaatggcagacaataacgagggtgccgatggagtgggtaattcctcaggaaattggcattgcgattcccaatggctgggcgacagagtcatcaccaccagcacccgaacctgggccctgcccacctacaacaaccacctctacaagcaaatctccagccaatcaggagcatcgaacgacaaccactactttggctacagcaccccttgggggtattttgacttcaacagattccactgtcacttctccccacgtgaccggcaaagactcatcaacaacaactggggattccgacccaagagactcaacttcaagctctttaacattcaagtcaaagaggtcacgcagaatgacggtacgacgacgattgccaataaccttaccagcacggttcaggtgtttactgactcggagtaccagctcccgtacgtcctcggctcggcgcatcaaggatgcctcccgccgtttccagcggacgtcttcatggtcccacagtatggatacctcaccctgaacaacgggagtcaggcggtaggacgctcttccttttactgcctggagtactttccttctcagatgctgcgtaccggaaacaactttaccttcagctacacctttgaggacgtgcccttccacagcagctacgctcacagccagagtttggaccggctgatgaatcctctgatcgaccagtatctgtattatctgaacaggacacaatcaaatagtggaactcttcagcagtctaggctactgtttagccaagctggacctaccagcatgtcccttcaagctaaaaactggctgcctggaccttgctacagacagcagcgtctgtcaaagcaggcaaacgacaacaacaacagcaactttccctggactgcggctacaaagtatcatctaaatggtcgggactcgttggttaatccaggaccagctatggccagccacaaagacgatgaagaaaagtttttccccatgcatggaaccctgatatttggtaaacaaggaacaaatgctaacgacgcggatttggaacatgtcatgattacagatgaagaagaaatcaggaccaccaatcccgtggctacagagcagtacggaaacgtgtcaaataatttgcaaaactcaaatactggtccaactacagaaaatgtcaatcaccagggagcgttacctggtatggtgtggcaggatcgagacgtgtacctgcagggacccatttgggccaagattcctcacaccgacggacactttcacccttctccactgatgggaggttttggactcaaacacccgcctcctcaaatcatgatcaaaaacactcctgttccagccaatcctcctacaaacttcagcgcggcaaagtttgcttccttcatcacacagtattccacgggacaggtcagcgtggagatcgagtgggagctgcagaaggagaacagcaaacgctggaaccccgagatccagtacacttccaactacaacaaatctgttaatgtggactttactgtggacgctaatggtgtgtattcagagcctcgccccattggcaccagatacctgactcgtaatctgtaa

SEQ ID NO: 12289 - DNA, 2208 bp, Artificial Sequence
  source: /note="Description of Artificial Sequence: Synthetic polynucleotide"
atggctgccgatggttatcttccagattggctcgaggacactctctctgaaggaataagacagtggtggaagctcaaacctggcccaccaccaccaaggcccgcagagcggcatcaggacgacagcaggggtcttgtgcttcctgggtacaagtacctcggacccttcaacggactcgacaaaggagagccggtcaacgaggcagacgctgcggccctcgagcacgacaaggcctacgaccggcagctcgacagcggagacaacccgtacctcaagtacaaccacgccgacgcggagtttcaggagcgtcttaaagaagatacgtcttttgggggcaacctcggacgagcagtcttccaggcgaaaaagagggttcttgaacctctgggcctggttgaggaacctgttaagacggctccgggaaaaaagaggccggtagagcactctcctgcggagccagactcctcctcgggaaccggaaaagcgggccagcagcctgcaagaaagagattgaatttcggtcagactggagacgcagactccgtacctgacccccagcctctcggacagccaccagcagcccccacaagtttgggatctactacaatggctacaggcagtggcgcaccaatggcagacaataacgagggtgccgatggagtgggtaattcctcaggaaattggcattgcgattcccaatggctgggcgacagagtcatcaccaccagcacccgaacctgggccctgcccacctacaacaaccacctctacaagcaaatctccagccaatcaggagcatcgaacgacaaccactactttggctacagcaccccttgggggtattttgacttcaacagattccactgtcacttctccccacgtgactggcaaagactcatcaacaacaactggggattccgacccaagagactcaacttcaagctctttaacattcaagtcaaagaggtcacgcagaatgacggtacgacgacgattgccaataaccttaccagcacggttcaggtgtttactgactcggagtaccagctcccgtacgtcctcggctcggcgcatcaaggatgcctcccgccgtttccagcggacgtcttcatggtcccacagtatggatacctcaccctgaacaacgggagtcaggcggtaggacgctcttccttttactgcctggagtactttccttctcagatgctgcgtaccggaaacaactttaccttcagctacacctttgaggacgtgcccttccacagcagctacgctcacagccagagtttggaccggctgatgaatcctctgatcgaccagtatctgtattatctgaacaggacacaatcaaatagtggaactcttcagcagtctaggctactgtttagccaagctggacccaccagcatgtcccttcaagctaaaaactggctgcctggaccttgctacagacagcagcgtctgtcaaagcaggcaaacgacaacaacaacagcaactttccctggactgcggctacaaagtatcgtctaaatggtcgggactcgttggttaatccaggaccagctatggccagccacaaagacgatgaagaaaagtttttccccatgcatggaaccctgatatttggtaaacaaggaacaaatgctaacgacgcggatttggaacatgtcatgattacagatgaagaagaaatcaggaccaccaatcccgtggctacagagcagtacggaaacgtgtcaaataatttgcaaaactcaaatactggtccaactacagaaaatgtcaatcaccagggagcgttacctggtatggtgtggcaggatcgagacgtgtacctgcagggacccatttgggccaagattcctcacaccgacggacactttcacccttctccactgatgggaggttttggactcaaacacccgcctcctcaaatcatgatcaaaaacactcctgttccagccaatcctcctacaaacttcagcgcggcaaagtttgcttccttcatcacacagtattccacgggacaggtcagcgtggagatcgagtgggagctgcagaaggagaacagcaaacgctggaaccccgagatccagtacacttccaactacaacaaatctgttaatgtggactttactgtggacgctaatggtgtgtattcagagcctcgccccattggcaccagatacctgactcgtaatctgtaa

SEQ ID NO: 12290 - DNA, 2208 bp, Artificial Sequence
  source: /note="Description of Artificial Sequence: Synthetic polynucleotide"
atggctgccgatggttatcttccagattggctcgaggacactctctctgaaggaataagacagtggtggaagctcaaacctggcccaccaccaccaaggcccgcagagcggcatcaggacgacagcaggggtcttgtgcttcctgggtacaagtacctcggacccttcaacggactcgacaaaggagagccggtcaacgaggcagacgctgcggccctcgagcacgacaaggcctacgaccggcagctcgacagcggagacaacccgtacctcaagtacaaccacgccgacgcggagtttcaggagcgtcttaaagaagatacgtcttttgggggcaacctcggacgagcagtcttccaggcgaaaaagagggttcttgaacctctgggcctggttgaggaacctgttaagacggctccgggaaaaaagaggccggtagagcactctcctgcggagccagactcctcctcgggaaccggaaaagcgggccagcagcctgcaagaaagagattgaatttcggtcagactggagacgcagactccgtacctgacccccagcctctcgggcagccaccagcagcccccacaagtttgggatctactacaatggctacaggcagtggcgcaccaatggcagacaataacgagggtgccgatggagtgggtaattcctcaggaaattggcattgcgattcccaatggctgggcgtcagagtcatcaccaccagcacccgaacctgggccctgcccacctacaacaaccacctctacaagcaaatctccagccaatcaggagcatcgaacgacaatcactactttggctacagcaccccttgggggtattttgacttcaacagattccactgtcacttctccccacgtgaccggcaaagactcatcaacaacaactggggattccgacccaagagactcaacttcaagctctttaacattcaagtcaaagaggtcacgcagaatgacggtacgacgacgattgccaataaccttaccagcacggttcaggtgtttactgactcggagtaccagctcccgtacgtcctcggctcggcgcatcaaggatgcctcccgccgtttccagcggacgtcttcatggtcccacagtatggatacctcaccctgaacaacgggagtcaggcggtaggacgctcttccttttactgcctggagtactttccttctcagatgctgcgtaccggaaacaactttaccttcagctacacctttgaggacgtgcccttccacagcagctacgctcacagccagagtttggaccggctgatgaatcctctgatcgaccagtatctgtattatctgaacaggacacaatcaaatagtggaactcttcagcagtctaggctactgtttagccaagctggacctaccagcatgtcccttcaagctaaaaactggctgcctggaccttgctacagacagcagcgtctgtcaaagcaggcaaacgacaacaacaacagcaactttccctggactgcggctacaaagtatcatctaaatggtcgggactcgttggttaatccaggaccagctatggccagccacaaagacgatgaagaaaagtttttccccatgcatggaaccctgatatttggtaaacaaggaacaaatgctaacgacgcggatttggaacatgtcatgattacagatgaagaagaaatcaggaccaccaatcccgtggctacagagcagtacggaaacgtgtcaaataatttgcaaaactcaaatactggtccaactacagaaaatgtcaatcaccagggagcgttacctggtatggtgtggcaggatcgagacgtgtacctgcagggacccatttgggccaagattcctcacaccgacggacactttcacccttctccactgatgggaggttttggactcaaacacccgcctcctcaaatcatgatcaaaaacactcctgttccagccaatcctcctacaaacttcagcgcggcaaagtttgcttccttcatcacacagtattccacgggacaggtcagcgtggagatcgagtgggagctgcagaaggagaacagcaaacgctggaaccccgagatccagtacacttccaactacaacaaatctgttaatgtggactttactgtggacgctaatggtgtgtattcagagcctcgccccattggcaccagatacctgactcgtaatctgtaa

SEQ ID NO: 12291 - DNA, 2208 bp, Artificial Sequence
  source: /note="Description of Artificial Sequence: Synthetic polynucleotide"
atggctgccgatggttatcttccagattggctcgaggacactctctctgaaggaataagacagtggtggaagctcaaacctggcccaccaccaccaaggcccgcagagcggcatcaggacgacagcaggggtcttgtgcttcctgggtacaagtacctcggacccttcaacggactcgacaaaggagagccggtcaacgaggcagacgctgcggccctcgagcacgacaaggcctacgaccggcagctcgacagcggagacaacccgtacctcaagtacaaccacgccgacgcggagtttcaggagcgtcttaaagaagatacgtcttttgggggcaacctcggacgagcagtcttccaggcgaaaaagagggttcttgaacctctgggcctggttgaggaacctgttaagacggctccgggaaaaaagaggccggtagagcactctcctgcggagccagactcctcctcgggaaccggaaaagcgggccagcagcctgcaagaaagagattgaatttcggtcagactggagacgcagactccgtacctgacccccagcctctcggacagccaccagcagcccccacaagtttgggatctactacaatggctataggcagtggcgcaccaatggcagacaataacgagggtgccgatggagtgggtaattcctcaggaaattggcattgcgattcccaatggctgggcgacagagtcatcaccaccagcacccgaacctgggccctgcccacctacaacaaccacctctacaagcaaatctccagccaatcaggagcatcgaacgacaaccactactttggctacagcaccccttgggggtattttgacttcaacagattccactgtcacttctccccacgtgactggcaaagactcatcaacaacaactggggattccgacccaagagactcaacttcaagctctttaacattcaagtcaaagaggtcacgcagaatgacggtacgacgacgattgccaataaccttaccagcacggttcaggtgtttactgactcggagtaccagctcccgtacgtcctcggctcggcgcatcaaggatgcctcccgccgtttccagcggacgtcttcatggtcccacagtatggatacctcaccctgaacaacgggagtcaggcggtaggacgctcttccttttactgcctggagtactttccttctcagatgctgcgtaccggaaacaactttaccttcagctacacctttgaggacgtgcccttccacagcagctacgctcacagccagagtttggaccggctgatgaatcctctgatcgaccagtatctgtattatctgaacaggacacaatcaaatagtggaactcttcagcagtctaggctactgtttagccaagctggacccaccagcatgtcccttcaagctaaaaactggctgcctggaccttgctacagacagcagcgtctgtcaaagcaggcaaacgacaacaacaacagcaactttccctggactgctgctacaaagtatcatctaaatggtcgggactcgttggttaatccaggaccagctatggccagccacaaagacgatgaagaaaagtttttccccatgcatggaaccctgatatttggtaaacaaggaacaaatgctaacgacgcggatttggaacatgtcatgattacagatgaagaagaaatcaggaccaccaatcccgtggctacagagcagtacggaaacgtgtcaaataatttgcaaaactcaaatactggtccaactacagaaaatgtcaatcaccagggagcgttacctggtatggtgtggcaggatcgagacgtgtacctgcagggacccatttgggccaagattcctcacaccgacggacactttcacccttctccactgatgggaggttttggactcaaacacccgcctcctcaaatcatgatcaaaaacactcctgttccagccaatcctcctacaaacttcagcgcggcaaagtttgcttccttcatcacacagtattccacgggacaggtcagcgtggagatcgagtgggagctgcagaaggagaacagcaaacgctggaaccccgagatccagtacacttccaactacaacaaatctgttaatgtggactttactgtggacgctaatggtgtgtattcagagcctcgccccattggcaccagatacctgactcgtaatctgtaa

SEQ ID NO: 12292 - DNA, 2208 bp, Artificial Sequence
  source: /note="Description of Artificial Sequence: Synthetic polynucleotide"
atggctgccgatggttatcttccagattggctcgaggacactctctctgaaggaataagacagtggtggaagctcaaacctggcccaccaccaccaaggcccgcagagcggcatcaggacgacagcaggggtcttgtgcttcctgggtacaagtacctcggacccttcaacggactcgacaaaggagagccggtcaacgaggcagacgctgcggccctcgagcacgacaaggcctacgaccggcagctcgacagcggagacaacccgtacctcaagtacaaccacgccgacgcggagtttcaggagcgtcttaaagaagatacgtcttttgggggcaacctcggacgagcagtcttccaggcgaaaaagagggttcttgaacctctgggcctggttgaggaacctgttaagacggctccgggaaaaaagaggccggtagagcactctcctgcggagccagactcctcctcgggaaccggaaaagcgggccagcagcctgcaagaaagagattgaatttcggtcagactggagacgcagactccgtacctgacccccagcctctcggacagccaccagcagcccccacaagtttgggatctactacaatggctacaggcagtggcgcaccaatggcagacaataacgagggtgccgatggagtgggtaattcctcaggaaattggcattgcgattcccaatggctgggcgacagagtcatcaccaccagcacccgaacctgggccctgcctacctacaacaaccacctctacaagcaaatctccagccaatcaggagcatcgaacgacaaccactactttggctacagcaccccttgggggtatcttgacttcaacagattccactgtcacttctccccacgtgactggcaaagactcatcaacaacaactggggattccgacccaagagactcaacttcaagctctttaacattcaagtcaaagaggtcacgcagaatgacggtacgacgacgattgccaacaaccttaccagcacggttcaggtgtttactgactcggagtaccagctcccgtacgtcctcggctcggcgcatcaaggatgcctcccgccgtttccagcggacgtcttcatggtcccacagtatggatacctcaccctgaacaacgggagtcaggcggtaggacgctcttccttttactgcctggagtactttccttctcagatgctgcgtaccggaaacaactttaccttcagctacacctttgaggacgtgcccttccacagcagctacgctcacagccagagtttggaccggctgatgaatcctctgatcgaccagtatctgtattatctgaacaggacacaatcaaatagtggaactcttcagcagtctaggctactgtttagccaagctggacccaccagcatgtcccttcaagctaaaaactggctgcctggaccttgctacagacagcagcgtctgtcaaagcaggcaaacgacaacaacaacagcaactttccctggactgcggctacaaagtatcatctaaatggtcgggactcgttggttaatccaggaccagctatggccagccacaaagacgatgaagaaaagtttttccccatgcatggaaccctgatatttggtaaacaaggaacaaatgctaacgacgcggatttggaacatgtcatgattacagatgaagaagaaatcaggaccaccaatcccgtggctacagagcagtacggaaacgtgtcaaataatttgcaaaactcaaatactggtccaactacagaaaatgtcaatcaccagggagcgttacctggtatggtgtggcaggatcgagacgtgtacctgcagggacccatttgggccaagattcctcacaccgacggacactttcacccttctccactgatgggaggttttggactcaaacacccgcctcctcaaatcatgatcaaaaacactcctgttccagccaatcctcctacaaacttcagcgcggcaaagtttgcttccttcatcacacagtattccacgggacaggtcagcgtggagatcgagtgggagctgcagaaggagaacagcaaacgctggaaccccgagatccagtacacttccaactacaacaaatctgttaatgtggactttactgtggacgctaatggtgtgtattcagagcctcgccccattggcaccagatacctgactcgtaatctgtaa

SEQ ID NO: 12293 - DNA, 2208 bp, Artificial Sequence
  source: /note="Description of Artificial Sequence: Synthetic polynucleotide"
atggctgccgatggttatcttccagattggctcgaggacactctctctgaaggaataagacagtggtggaagctcaaacctggcccaccaccgccaaagcccgcagagcggcataaggacgacagcaggggtcttgtgcttcctgggtacaagtacctcggacccttcaacggactcgacaagggagagccggtcaacgaggcagacgccgcggccctcgagcacgacaaggcctacgaccggcagctcgacagcggagacaacccgtacctcaagtacaaccacgccgacgcggagtttcaggagcgccttaaagaagatacgtcttttgggggcaacctcggacgagcagtattccaggcgaaaaagagggttcttgaacctctgggcctggttgaggagcctgttaagacggctccgggaaaaaagaggccggtagagcactctcctgtggagccagactcctcctcgggaaccggaaaagcgggccagcagcctgcgagaaagagattgaattttggtcagactggagacgcagactccgtacctgacccccagcctctcggacagccaccagcagcccccacaagtttgggatctactacaatggctacaggcagtggcgcaccaatggcagacaataacgagggtgccgatggagtgggtaattcctcaggaaattggcattgcgattcccaatggttgggcgacagagtcatcaccaccagcacccgaacctgggccctgcccacctacaacaaccacctctacaagcaaatctccagccaatcaggagcagcgaacgacaaccactactttggctacagcaccccctgggggtattttgacttcaacagattccactgccacttttcaccacgtgactggcaaagactcatcaacaacaactggggattccgacccaagagactcaacttcaagctctttaacattcaagtcaaagaggtcacgcagaatgacggtacgacgacgattgccaataaccttaccagcacggttcaggtgtttactgactcggagtaccagctcccgtacgtcctcggctcggcgcatcaaggatgcctcccgccgtttccagcggacgtcttcatggtcccacagtatggatacctcaccctgaacaacgggagtcaggcggtaggacgctcttccttttactgcctggagtactttccttctcagatgcttcgtaccggaaacaactttaccttcagttacacctttgaagacgttcctttccacagcagctacgctcacagtcaaagtctggaccggctgatgaatcctcttatcgaccagtacctgtattatctaaacaaaacacaatcaaatagtggaactcttcagcagtctcggctactgtttagtcaagctggacctaccagcatgtctcttcaagctaaaaactggctgcctggaccttgctacagacaacagcgtctgtcaaagcaggcaaacgacaacaacaacagcaactttccctggactgcggctacaaagtatcatctaaatggccgggactcgttggttaatccaggaccagctatggccagccacaaagacgatgaagaaaagtttttccccatgcatggaaccctgatatttggcaaacaaggaacaaatgctaacgacgcggatttggacaatgtcatgattacagatgaagaagaaatccgtaccaccaatcccgtggctacggagcagtacgggactgtgtcaaataatttgcaaaactcaaatactggtccaactactggaactgtcaatcaccaaggagcgttacctggtatggtgtggcaggatcgagacgtgtaccttcagggacccatttgggccaagattcctcacaccgatggacactttcacccttctccgctgatgggaggttttggactcaaacacccgcctcctcagatcatgatcaaaaacactcccgttccagccaatcctcccacaaacttcagttctgccaagtttgcttctttcatcacacagtattccacgggacaggttagcgtggagatcgagtgggagctgcagaaggagaacagcaaacgctggaaccccgagatccagtacacttccaactacaacaagtctgttaatgtggactttactgtggacactaatggtgtgtattcagagcctcgccccattggcaccagatacctgactcgtaatctgtaa

SEQ ID NO: 12294 - DNA, 2208 bp, Artificial Sequence
  source: /note="Description of Artificial Sequence: Synthetic polynucleotide"
atggctgccgatggttatcttccagattggctcgaggacactctctctgaaggaataagacagtggtggaagctcaaacctggcccaccaccaccaaggcccgcagagcggcatcaggacgacagcaggggtcttgtgcttcctgggtacaagtacctcggacccttcaacggactcgacaaaggagagccggtcaacgaggcagacgctgcggccctcgagcacgacaaggcctacgaccggcagctcgacagcggagacaacccgtacctcaagtacaaccacgccgacgcggagtttcaggagcgtcttaaagaagatacgtcttttgggggcaacctcggacgagcagtcttccaggcgaaaaagagggttcttgaacctctgggcctggttgaggaacctgttaagacggctccgggaaaaaagaggccggtagagcactctcctgcggagccagactcctcctcgggaaccggaaaagcgggccagcagcctgcaagaaagagattgaatttcggtcagactggagacgcagactccgtacctgacccccagcctctcggacagccaccagcagcccccacaagtttgggatctactacaatggctacaggcagtggcgcaccaatggcagacaataacgagggtgccgatggagtgggtaattcctcaggaaattggcattgcgattcccaatggctgggcgacagagtcatcaccaccagcacccgaacctgggccctgcccacctacaacaaccacctctacaagcaaatctccagccaatcaggagcatcgaacgacaaccactactttggctacagcaccccttgggggtattttgacttcaacagattccactgtcacttctccccacgtgactggcaaagactcatcaacaacaactggggattccgacccaagagactcaacttcaagctctttaacattcaagtcaaagaggtcacgcagaatgacggtacgacgacgattgccaataaccttaccagcacggttcaggtgtttactgactcggagtaccagctcccgtacgtcctcggctcggcgcatcaaggatgcctcccgccgtttccagcggacgtcttcatggtcccacagtatgggtacctcaccctgaacaacgggagtcaggcggtaggacgctcttccttttactgcctggagtactttccttctcagatgctgcgtaccggaaacaactttaccttcagctacacctttgaggacgtgcccttccacagcagctacgctcacagccagagtttggaccggctgatgaatcctctgatcgaccagtatctgtattatctgaacaggacacaatcaaatagtggaactcttcagcagtctaggctactgtttagccaagctggacccaccagcatgtcccttcaagctaaagactggctgcctggaccttgctacagacagcagcgtctgtcaaagcaggcaaacgacaacaacaacagcaactttccctggactgcggctacaaagtatcatctaaatggtcgggactcgttggttaatccaggaccagctatggccagccacaaagacgatgaagaaaagtttttccccatgcatggaaccctgatatttggtaaacaaggaacaaatgctaacgacgcggatttggaacatgtcatgattacagatgaagaagaaatcaggaccaccaatcccgtggctacagagcagtacggaaacgtgtcaaataatttgcaaaactcaaatactggtccaactacagaaaatgtcaatcaccagggagcgttacctggtatggtgtggcaggatcgagacgtgtacctgcagggacccatttgggccaagattcctcacaccgacggacactttcacccttctccaccgatgggaggttttggactcaaacacccgcctcctcaaatcatgatcaaaaacactcctgttccagccaatcctcctacaaacttcagcgcggcaaagtttgcttccttcatcacacagtattccacgggactggtcagcgtggagatcgagtgggagctgcagaaggagaacagcaaacgctggaaccccgagatccagtacacttccaactacaacaaatctgttaatgtggactttactgtggacgctaatggtgtgtattcagagcctcgccccattggcaccagatacctgactcgtaatctgtaa

SEQ ID NO: 12295 - DNA, 2208 bp, Artificial Sequence
  source: /note="Description of Artificial Sequence: Synthetic polynucleotide"
atggctgccgatggttatcttccagattggctcgaggacactctctctgaaggaataagacagtggtggaagctcaaacctggcccaccaccgccaaagcccgcagagcggcataaggacgacagcaggggtcttgtgcttcctgggtacaagtacctcggacccttcaacggactcgacaagggggagccggtcaacgaggcagacgccgcggccctcgagcacgacaaggcctacgaccggcagctcgacagcggagacaacccgtacctcaagtacaaccacgccgacgcggagtttcaggagcgtcttaaagaagatacgtcttttgggggcaacctcggacgagcagtcttccaggcgaaaaagagggttcttgaacctctgggcctggttgaggaacctgttaagacggctccgggaaaaaagaggccggtagagcactctcctgtggagccagactcctcctcgggaaccggaaaggcgggccagcagcctgcaagaaaaagattgaatttcggtcagactggagacgcagactccgtacctgacccccagcctctcggacagccaccagcagccccctctggtctgggaactaatacgatggctacaggcagtggcgcaccaatggcagacaataacgagggcgccgacggagtgggtaattcctcgggaaattggcattgcgattccacatggatgggcgacagagtcatcaccaccagcacccgcacctgggctctgcccacctacaacaaccatctgtacaagcaaatttccagccaatcaggagcatcgaacgacaaccactactttggctacagcaccccctgggggtattttgacttcaacagattccactgccacttttcgccacgtgactggcaaagactcatcaacaacaactggggattccggcccaagagactcagcttcaagctctttaacattcaagtcaaggaggtcacgcagaatgacggtacgacgacgattgccaataaccttaccagcacggttcaggtctttactgactcggagtaccagctcccgtacgtcctcggctcggcgcatcaaggatgcctcccgccgttcccagcagacgtcttcatggtgccacagtatggatacctcaccctgaacaacgggagtcaggcggtaggacgctcttcattttactgcctggagtacttcccttctcagatgcttcgcacgggaaacaactttaccttcagctacacctttgaggacgtgccttttcacagcagctacgctcacagccaaagtctggaccgtctcatgaatcctctcatcgaccaatacctgtattacttgagcaaaacaaacgctccaagcggaactcaccagatgtccaggcttcagttttctcaggccggagcgagtgacatgtcgggaccagctagaaactggcttcctggaccctgttaccgccagcagcgagtatcaaagcaggctgcggacaacaacaacagtgacttaccgtggactggagctaccaagtaccacctcaatggaagagactctctggtgaacccgggcccagctatggccagccacaaggatgatgaagaaaaatttttcctcatgagcggggttctcatcttcgggaaacaaggctcaaatgaaaacaatgtggacattgaaaaggttatgattacagacgaagaggaaatcaggaccaccaatcccgtggctacggagcagtatggttctgtatctaccaaccttcaaagcgcaaacacaagtccagctacctcagatgtcaatcaccaaggcgttcttcctggcatggtctggcaggacagagatgtgtacctgcaggggcccatctgggcaaagattcctcacacggacggacactttcacccttctcccctcatgggcggatttggattgaagcaccctcccccacagattctcatcaagaataccccggtacctgcgaatccttcgaccaccttcagtgcggcaaagtttgcttccttcatcacacagtattccacgggacaggtcagcgtggagatagagtgggagctgcagaaggagaacagcaaacgctggaaccccgagatccagtatacttccaactacaacaaatctgttaatgtggactttactgtggacactaatggtgtgtattcagagcctcgccccattggcaccagatacctgactcgtaatctgtaa

SEQ ID NO: 12296 - DNA, 2208 bp, Artificial Sequence
  source: /note="Description of Artificial Sequence: Synthetic polynucleotide"
atggctgccgatggttatcttccagattggctcgaggacactctctctgaaggaataagacagtggtggaagctcaaacctggcccaccaccaccaaggcccgcagagcggcatcaggacgacagcaggggtcttgtgcttcctgggtacaagtacctcggacccttcaacggactcgacaaaggagagccggtcaacgaggcagacgctgcggccctcgagcacgacaaggcctacgaccggcagctcgacagcggagacaacccgtacctcaagtacaaccacgccgacgcggagtttcaggagcgtcttaaagaagatacgtcttttgggggcaacctcggacgagcagtcttccaggcgaaaaagagggttcttgaacctctgggcctggttgaggaacctgttaagacggctccgggaaaaaagaggccggtagagcactctcctgcggagccagactcctcctcgggaaccggaaaagcgggccagcagcctgcaagaaagagattgaatttcggtcagactggagacgcagactccgtacctgacccccagcctctcggacagccaccagcagcccccacaagtttgggatctactacaatggctacaggcagtggcgcaccaatggcagacaataacgagggtgccgatggagtgggtaattcctcaggaaattggcattgcgattcccaatggctgggcgacagagtcatcaccaccagcacccgaacctgggccctgcccacctacaacaaccacctctacaagcaaatctccagccaatcaggagcatcgaacgacaaccactactttggctacagcaccccttgggggtattttgacttcaacagattccactgtcacttctccccacgtgactggcaaagactcatcaacaacaactggggattccgacccaagagactcaacttcaagctctttaacattcaagtcaaagaggtcacgcagaatgacggtacgacgacgattgccaataaccttaccagcacggttcaggtgtttactgactcggagtaccagctcccgtacgtcctcggctcggcgcatcaaggatgcctcccgccgtttccagcggacgtcttcatggtcccacagtatgggtacctcaccctgaacaacgggagtcaggcggtaggacgctcttccttttactgcctggagtactttccttctcagatgctgcgtaccggaaacaactttaccttcagctacacctttgaggacgtgtccttccacagcagctacgctcacagccagagtttggaccggctgatgaatcctctgatcgaccagtatctgtattatctgaacaggacacaatcaaatagtggaactcttcagcagtctaggctactgtttagccaagctggacccaccagcatgtcccttcaagctaaaaactggctgcctggaccttgctacagacagcagcgtctgtcaaagcaggcaaacgacaacaacaacagcaactttccctggactgcggctacaaagtatcatctaaatggtcgggactcgttggttaatccaggaccagctatggccagccacaaagacgatgaagaaaagtttttccccatgcatggaaccctgatatttggtaaacaaggaacaaatgctaacgacgcggatttggaacatgtcatgattacagatgaagaagaaatcaggaccaccaatcccgtggctacagagcagtacggaaacgtgtcaaataatttgcaaaactcaaatactggtccaactacagaaaatgtcaatcaccagggagcgttacctggtatggtgtggcaggatcgagacgtgtacctgcagggacccatttgggccaagattcctcacaccgacggacactttcacccttctccactgatgggaggttttggactcaaacacccgcctcctcaaatcatgatcaaaaacactcctgttccagccaatcctcctacaaacttcagcgcggcaaagtttgcttccttcatcacacagtattccacgggacaggtcagcgtggagatcgagtgggagctgcagaaggagaacagcaaacgctggaaccccgagatccagtacacttccaactacaacaaatctgttaatgtggactttactgtggacgctaatggtgtgtattcagagcctcgccccattggcaccagatacctgactcgtaatctgtaa

SEQ ID NO: 12297 - DNA, 2208 bp, Artificial Sequence
  source: /note="Description of Artificial Sequence: Synthetic polynucleotide"
atggctgccgatggttatcttccagattggctcgaggacactctctctgaaggaataagacagtggtggaagctcaaacctggcccaccaccaccaaggcccgcagagcggcatcaggacgacagcaggggtcttgtgcttcctgggtacaagtacctcggacccttcaacggactcgacaaaggagagccggtcaacgaggcagacgctgcggccctcgagcacgacaaggcctacgaccggcagctcgacagcggagacaacccgtacctcaagtacaaccacgccgacgcggagtttcaggagcgtcttaaagaagatacgtcttttgggggcaacctcggacgagcagtcttccaggcgaaaaagagggttcttgaacctctgggcctggttgaggaacctgttaagacggctccgggaaaaaagaggccggtagagcactctcctgcggagccagactcctcctcgggaaccggaaaagcgggccagcagcctgcaagaaagagattgaatttcggtcagactggagacgcagactccgtacctgacccccagcctctcggacagccaccagcagcccccacaagtttgggatctactacaatggctacaggcagtggcgcaccaatggcagacaataacgagggtgccgatggagtgggtaattcctcaggaaattggcattgcgattcccaatggctgggcgacagagtcatcaccaccagcacccgaacctgggccctgcccacctacaacaaccacctctacaagcaaatctccagccaatcaggagcatcgaacgacaaccactactttggctacagcaccccttgggggtattttgacttcaacagattccactgtcacttctccccacgtgactggcaaagactcatcaacaacaactggggattccgacccaagagactcaacttcaagctctttaacattcaagtcaaagaggtcacgcagaatgacggtacgacgacgattgccaataaccttaccagcacggttcaggtgtttactgactcggagtaccagctcccgtacgtcctcggctcggcgcatcaaggatgcctcccgccgtttccagcggacgtcttcatggtcccacagtatggatacctcaccctgaacaacgggagtcaggcggtaggacgctcttccttttactgcctggagtactttccttctcagatgctgcgtaccggaaacaactttaccttcagctacacctttgaggacgtgcccttccacagcagctacgctcacagccagagtttggaccggctgatgaatcctctgatcgaccagtatctgtattatctgaacaggacacaatcaaatagtggaactcttcagcagtctaggctactgtttagccaagctggacccaccagcatgtcccttcaagctaaaaactggctgcctggaccttgctacagacagcagcgtctgtcaaagcaggcaaacgacaacaacaacagcaactttccctggactgcggctacaaagtatcatctaaatggtcgggactcgttggttaatccaggaccagctatggccagccacaaagacgatgaagaaaagtttttccccatgcatggaaccctgatatttggtaaacaaggaacaaatgctaacgacgcggatttggaacatgtcatgattacagatgaagaagaaatcaggaccaccaatcccgtggctacagagcagtacggaaacgtgtcaaataatttgcaaaactcaaatactggcccaactacagaaaatgtcaatcaccagggagcgttacttggtatggtgtggcaggatcgagacgtgtacctgcagggacccatttgggccaagattcctcacaccgacggacactttcacccttctccactgatgggaggttttggactcaaacacccgcctcctcaaatcatgatcaaaaacactcctgttccagccaatcctcctacaaacttcagcgcggcaaagtttgcttccttcatcacacagtattccacgggacaggtcagcgtggagatcgagtgggagctgcagaaggagaacagcaaacgctggaaccccgagatccagtacacttccaactacaacaaatctgttaatgtggactttactgtggacgctaatggtgtgtattcagagcctcgccccattggcaccagatacctgactcgtaatctgtaa

SEQ ID NO: 12298 - DNA, 2208 bp, Artificial Sequence
  source: /note="Description of Artificial Sequence: Synthetic polynucleotide"
atggctgccgatggttatcttccagattggctcgaggacactctctctgaaggaataagacagtggtggaagctcaaacctggcccaccaccaccaaggcccgcagagcggcatcaggacgacagcaggggtcttgtgcttcctgggtacaagtacctcggacccttcaacggactcgacaaaggagagccggtcaacgaggcagacgctgcggccctcgagcacgacaaggcctacgaccggcagctcgacagcggagacaacccgtacctcaagtacaaccacgccgacgcggagtttcaggagcgtcttaaagaagatacgtcttttgggggcaacctcggacgagcagtcttccaggcgaaaaagagggttcttgaacctctgggcctggttgaggaacctgttaagacggctccgggaaaaaagaggccggtagagcactctcctgcggagccagactcctcctcgggaaccggaaaagcgggccagcagcctgcaagaaagagattgaatttcggtcagactggagacgcagactccgtacctgacccccagcctctcggacagccaccagcagcccccacaagtttgggatctactacaatggctacaggcagtggcgcaccaatggcagacaataacgagggtgccgatggagtgggtaattcctcaggaaattggcattgcgattcccaatggctgggcgacagagtcatcaccaccagcacccgaacctgggccctgcccacctacaacaaccacctctacaagcaaatctccagccaatcaggagcatcgaacgacaaccactactttggctacagcaccccttgggggtattttgacttcaacagattccactgtcacttctccccacgtgactggcaaagactcatcaacaacaactggggattccgacccaagagactcaacttcaagctctttaacattcaagtcaaagaggtcacgcagaatgacggtacggcgacgattgccaataaccttaccagcacggttcaggtgtttactgactcggagtaccagctcccgtacgtcctcggctcggcgcatcaaggatgcctcccgccgtttccagcggacgtcttcatggtcccacagtatggatacctcaccctgaacaacgggagtcaggcggtaggacgctcttccttttactgcctggagtactttccttctcagatgctgcgtaccggaaacaactttaccttcagctacacctttgaggacgtgcccttccacagcagctacgctcacagccagagtttggaccggctgatgaatcctctgatcgaccagtatctgtattatctgaacaggacacaatcaaatagtggaactcttcagcagtctaggctactgtttagccaagctggacccaccagcatgtcccttcaagctaaaaactggctgcctggaccttgctacagacagcagcgtctgtcaaagcaggcaaacgacaacaacaacagcaactttccctggactgcggctacaaagtatcatctaaatggtcgggactcgttggttaatccaggaccagctatggccagccacaaagacgatgaagaaaagtttttccccatgcatggaaccctgatatttggtaaacaaggaacaaatgctaacgacgcggatttggaacatgtcatgattacagatgaagaagaaatcaggaccaccaatcccgtggctacagagcagtacggaaacgtgtcaaataatttgcaaaactcaaatactggtccaactacagaaaatgtcaatcaccagggagcgttacctggtatggtgtggcaggatcgagacgtgtacctgcagggacccatttgggccaagattcctcacaccgacggacactttcacccttctccactgatgggaggttttggactcaaacacccgcctcctcaaatcatgatcaaaaacactcctgttccagccaatcctcctacaaacttcagcgcggcaaagtttgcttccttcatcacacagtattccacgggacaggtcagcgtggagatcgagtgggagctgcagaaggagaacagcaaacgctggaaccccgagatccagtacacttccaactacaacaaatctgttaatgtggactttactgtggacgctaatggtgtgtattcagagcctcgccccattggcaccagatacctgactcgtaatctgtaa

SEQ ID NO: 12299 - DNA, 2208 bp, Artificial Sequence
  source: /note="Description of Artificial Sequence: Synthetic polynucleotide"
atggctgccgatggttatcttccagattggctcgaggacactctctctgaaggaataagacagtggtggaagctcaaacctggcccaccaccgccaaagcccgcagagcggcataaggacgacagcaggggtcttgtgcttcctgggtacaagtacctcggacccttcaacggactcgacaagggagagccggtcaacgaggcagacgccgcggccctcgagcacgacaaggcctacgaccggcagctcgacagcggagacaacccgtacctcaagtacaaccacgccgacgcggagtttcaggagcgccttaaagaagatacgtcttttgggggcaacctcggacgagcagtattccaggcgaaaaagagggttcttgaacctctgggcctggttgaggagcctgttaagacggctccgggaaaaaagaggccggtagagcactctcctgtggagccagactcctcctcgggaaccggaaaagcgggccagcagcctgcgagaaagagattgaattttggtcagactggagacgcagactccgtacctgacccccagcctctcggacagccaccagcagcccccacaagtttgggatctactacaatggctacaggcagtggcgcaccaatggcagacaataacgagggtgccgatggagtgggtaattcctcaggaaattggcattgcgattcccaatggttgggcgacagagtcatcaccaccagcacccgaacctgggccctgcccacctacaacaaccacctctacaagcaaatctccagccaatcaggagccagcaacgacaaccactactttggctacagcaccccctgggggtattttgacttcaacagattccactgccacttttcaccacgtgactggcaaagactcatcaacaacaactggggattccgacccaagagactcaacttcaagctctttaacattcaagtcaaagaggtcacgcagaatgacggtacgacgacgattgccaataaccttaccagcacggttcaggtgtttactgactcggagtaccagctcccgtacgtcctcggctcggcgcatcaaggatgcctcccgccgtttccagcggacgtcttcatggtcccacagtatggatacctcaccctgaacaacgggagtcaggcggtaggacgctcttccttttactgcctggagtactttccttctcagatgcttcgtaccggaaacaactttaccttcagttacacctttgaagacgttcctttccacagcagctacgctcacagtcaaagtctggaccggctgatgaatcctcttatcgaccagtacctgtattatctaaacaaaacacaatcaaatagtggaactcttcagcagtctcggctactgtttagtcaagctggacctaccagcatgtctcttcaagctaaaaactggctgcctggaccttgctacagacaacagcgtctgtcaaagcaggcaaacgacaacaacaacagcaactttccctggactgcggctacaaagtatcatctaaatggccgggactcgttggttaatccaggaccagctatggccagccacaaagacgatgaagaaaagtttttccccatgcatggaaccctgatatttggcaaacaaggaacaaatgctaacgacgcggatttggacaatgtcatgattacagatgaagaagaaatccgtaccaccaatcccgtggctacggagcagtacgggactgtgtcaaataatttgcaaaactcaaatactggtccaactactggaactgtcaatcaccaaggagcgttacctggtatggtgtggcaggatcgagacgtgtaccttcagggacccatttgggccaagattcctcacaccgatggacactttcacccttctccgctgatgggaggttttggactcaaacacccgcctcctcagatcatgatcaaaaacactcccgttccagccaatcctcccacaaacttcagttctgccaagtttgcttctttcatcacacagtattccacgggacaggttagcgtggagatcgagtgggagctgcagaaggagaacagcaaacgctggaaccccgagatccagtacacttccaactacaacaagtctgttaatgtggactttactgtggacactaatggtgtgtattcagagcctcgccccattggcaccagatacctgactcgtaatctgtaa

SEQ ID NO: 12300 - DNA, 2208 bp, Artificial Sequence
  source: /note="Description of Artificial Sequence: Synthetic polynucleotide"
atggctgccgatggttatcttccagattggctcgaggacactctctctgaaggaataagacagtggtggaagctcaaacctggcccaccaccgccaaagcccgcagagcggcataaggacgacagcaggggtcttgtgcttcctgggtacaagtacctcggacccttcaacggactcgacaagggagagccggtcaacgaggcagacgccgcggccctcgagcacgacaaggcctacgaccggcagctcgacagcggagacaacccgtacctcaagtacaaccacgccgacgcggagtttcaggagcgccttaaagaagatacgtcttttgggggcaacctcggacgagcagtattccaggcgaaaaagagggttcttgaacctctgggcctggttgaggagcctgttaagacggctccgggaaaaaagaggccggtagagcactctcctgtggagccagactcctcctcgggaaccggaaaagcgggccagcagcctgcgagaaagagattgaattttggtcagactggagacgcagactccgtacctgacccccagcctctcggacagccaccagcagcccccacaagtttgggatctactacaatggctacaggcagtggcgcaccaatggcagacaataacgagggtgccgatggagtgggtaattcctcaggaaattggcattgcgattcccaatggttgggcgacagagtcatcaccaccagcacccgaacctgggccctgcccacctacaacaaccacctctacaagcaaatctccagccaatcaggagccagcaacgacaaccactactttggctacagcaccccctgggggtattttgacttcaacagattccactgccacttttcaccacgtgactggcaaagactcatcaacaacaactggggattccgacccaagagactcaacttcaagctctttaacattcaagtcaaagaggtcacgcagaatgacggtacgacgacgattgccaataaccttaccagcacggttcaggtgtttactgactcggagtaccagctcccgtacgtcctcggctcggcgcatcaaggatgcctcccgccgtttccagcggacgtcttcatggtcccacagtatggatacctcaccctgaacaacgggagtcaggcggtaggacgctcttccttttactgcctggagtactttccttctcagatgcttcgtaccggaaacaactttaccttcagttacacctttgaagacgttcctttccacagcagctacgctcacagtcaaagtctggaccggctgatgaatcctcttatcgaccagtacctgtattatctaaacaaaacacaatcaaatagtggaactcttcagcagtctcggctactgtttagtcaagctggacctaccagcatgtctcttcaagctaaaaactggctgcctggaccttgctacagacaacagcgtctgtcaaagcaggcaaacgacaacaacaacagcaactttccctgggctgcggctacaaagtatcatctaaatggccgggactcgttggttaatccaggaccagctatggccagccacaaagacgatgaagaaaagtttttccccatgcatggaaccctgatatttggcaaacaaggaacaaatgctaacgacgcggatttggacaatgtcatgattacagatgaagaagaaatccgtaccaccaatcccgtggctacggagcagtacgggactgtgtcaaataatttgcaaaactcaaatactggtccaactactggaactgtcaatcaccaaggagcgttacctggtatggtgtggcaggatcgagacgtgtaccttcagggacccatttgggccaagattcctcacaccgatggacactttcacccttctccgctgatgggaggttttggactcaaacacccgcctcctcagatcatgatcaaaaacactcccgttccagccaatcctcccacaaacttcagttctgccaagtttgcttctttcatcacacagtattccacgggacaggttagcgtggagatcgagtgggagctgcagaaggagaacagcaaacgctggaaccccgagatccagtacacttccaactacaacaagtctgttaatgtggactttactgtggacactaatggtgtgtattcagagcctcgccccattggcaccagatacctgactcgtaatctgtaa

SEQ ID NO: 12301 - DNA, 2208 bp, Artificial Sequence
  source: /note="Description of Artificial Sequence: Synthetic polynucleotide"
atggctgccgatggttatcttccagattggctcgaggacactctctctgaaggaataagacagtggtggaagctcaaacctggcccaccaccgccaaagcccgcagagcggcataaggacgacagcaggggtcttgtgcttcctgggtacaagtacctcggacccttcaacggactcgacaagggagagccggtcaacgaggcagacgccgcggccctcgagcacgacaaggcctacgaccggcagctcgacagcggagacaacccgtacctcaagtacaaccacgccgacgcggagtttcaggagcgccttaaagaagatacgtcttttgggggcaacctcggacgagcagtattccaggcgaaaaagagggttcttgaacctctgggcctggttgaggagcctgttaagacggctccgggaaaaaagaggccggtagagcactctcctgtggagccagactcctcctcgggaaccggaaaagcgggccagcagcctgcgagaaagagattgaattttggtcagactggagacgcagactccgtacctgacccccagcctctcggacagccaccagcagcccccacaagtttgggatctactacaatggctacaggcagtggcgcaccaatggcagacaataacgagggtgccgatggagtgggtaattcctcaggaaattggcattgcgattcccaatggttgggcgacagagtcatcaccaccagcacccgaacctgggccctgcccacctacaacaaccacctctacaagcaaatctccagccaatcaggagccagcaacgacaaccactactttggctacagcaccccctgggggtattttgacttcaacagattccactgccacttttcaccacgtgactggcaaagactcatcaacaacaactggggattccgacccaagagactcaacttcaagctctttaacattcaagtcaaagaggtcacgcagaatgacggtacgacgacgattgccaataaccttaccagcacggttcaggtgtttactgactcggagtaccagctcccgtacgtcctcggctcggcgcatcaaggatgcctcccgccgtttccagcggacgtcttcatggtcccacagtatggatacctcaccctgaacaacgggagtcaggcggtaggacgctcttccttttactgcctggagtactttccttctcagatgcttcgtaccggaaacaactttaccctcagttacacctttgaagacgttcctttccacagcagctacgctcacagtcaaagtctggaccggctgatgaatcctcttatcgaccagtacctgtattatctaaacaaaacacaatcaaatagtggaactcttcagcagtctcggctactgtttagtcaagctggacctaccagcatgtctcttcaagctaaaaactggctgcctggaccttgctacagacaacagcgtctgtcaaagcaggcaaacgacaacaacaacagcaactttccctggactgcggctacaaagtatcatctaaatggccgggactcgttggttaatccaggaccagctatggccagccacaaagacgatgaagaaaagtttttccccatgcatggaaccctgatatttggcaaacaaggaacaaatgctaacgacgcggatttggacaatgtcatgattacagatgaagaagaaatccgtaccaccaatcccgtggctacggagcagtacgggactgtgtcaaataatttgcaaaactcaaatactggtccaactactggaactgtcaatcaccaaggagcgttacctggtatggtgtggcaggatcgagacgtgtaccttcagggacccatttgggccaagattcctcacaccgatggacactttcacccttctccgctgatgggaggttttggactcaaacacccgcctcctcagatcatgatcaaaaacactcccgttccagccaatcctcccacaaacttcagttctgccaagtttgcttctttcatcacacagtattccacgggacaggttagcgtggagatcgagtgggagctgcagaaggagaacagcaaacgctggaaccccgagatccagtacacttccaactacaacaagtctgttaatgtggactttactgtggacactaatggtgtgtattcagagcctcgccccattggcaccagatacctgactcgtaatctgtaa

SEQ ID NO: 12302 - DNA, 2208 bp, Artificial Sequence
  source: /note="Description of Artificial Sequence: Synthetic polynucleotide"
atggctgccgatggttatcttccagattggctcgaggacactctctctgaaggaataagacagtggtggaagctcaaacctggcccaccaccgccaaagcccgcagagcggcataaggacgacagcaggggtcttgtgcttcctgggtacaagtacctcggacccttcaacggactcgacaagggagagccggtcaacgaggcagacgccgcggccctcgagcacgacaaggcctacgaccggcagctcgacagcggagacaacccgtacctcaagtacaaccacgccgacgcggagtttcaggagcgccttaaagaagatacgtcttttgggggcaacctcggacgagcagtattccaggcgaaaaggagggttcttgaacctctgggcctggttgaggagcctgttaagacggctccgggaaaaaagaggccggtagagcactctcctgtggagccagactcctcctcgggaaccggaaaagcgggccagcagcctgcgagaaagagattgaattttggtcagactggagacgcagactccgtacctgacccccagcctctcggacagccaccagcagcccccacaagtttgggatctactacaatggctacaggcagtggcgcaccaatggcagacaataacgagggtgccgatggagtgggtaattcctcaggaaattggcattgcgattcccaatggttgggcgacagagtcatcaccaccagcacccgaacctgggccctgcccacctacaacaaccacctctacaagcaaatctccagccaatcaggagccagcaacgacaaccactactttggctacagcaccccctgggggtattttgacttcaacagattccactgccacttttcaccacgtgactggcaaagactcatcaacaacaactggggattccgacccaagagactcaacttcaagctctttaacattcaagtcaaagaggtcacgcagaatgacggtacgacgacgattgccaataaccttaccagcacggttcaggtgtttactgactcggagtaccagctcccgtacgtcctcggctcggcgcatcaaggatgcctcccgccgtttccagcggacgtcttcatggtcccacagtatggatacctcaccctgaacaacgggagtcaggcggtaggacgctcttccttttactgcctggagtactttccttctcagatgcttcgtaccggaaacaactttaccttcagttacacctttgaagacgttcctttccacagcagctacgctcacagtcaaagtctggaccggctgatgaatcctcttatcgaccagtacctgtattatctaaacaaaacacaatcaaatagtggaactcttcagcagtctcggctactgtttagtcaagctggacctaccagcatgtctcttcaagctaaaaactggctgcctggaccttgctacagacaacagcgtctgtcaaagcaggcaaacgacaacaacaacagcaactttccctggactgcggctacaaagtatcatctaaatggccgggactcgttggttaatccaggaccagctatggccagccacaaagacgatgaagaaaagtttttccccatgcatggaaccctgatatttggcaaacaaggaacaaatgctaacgacgcggatttggacaatgtcatgattacagatgaagaagaaatccgtaccaccaatcccgtggctacggagcagtacgggactgtgtcaaataatttgcaaaactcaaatactggtccaactactggaactgtcaatcaccaaggagcgttacctggtatggtgtggcaggatcgagacgtgtaccttcagggacccatttgggccaagattcctcacaccgatggacactttcacccttctccgctgatgggaggttttggactcaaacacccgcctcctcagatcatgatcaaaaacactcccgttccagccaatcctcccacaaacttcagttctgccaagtttgcttctttcatcacacagtattccacgggacaggttagcgtggagatcgagtgggagctgcagaaggagaacagcaaacgctggaaccccgagatccagtacacttccaactacaacaagtctgttaatgtggactttactgtggacactaatggtgtgtattcagagcctcgccccattggcaccagatacctgactcgtaatctgtaa

SEQ ID NO: 12303 - DNA, 2208 bp, Artificial Sequence
  source: /note="Description of Artificial Sequence: Synthetic polynucleotide"
atggctgccgatggttatcttccagattggctcgaggacactctctctgaaggaataagacagtggtggaagctcaaacctggcccaccaccgccaaagcccgcagagcggcataaggacgacagcaggggtcttgtgcttcctgggtacaagtacctcggacccttcaacggactcgacaagggagagccggtcaacgaggcagacgccgcggccctcgagcacgacaaggcctacgaccggcagctcgacagcggagacaacccgtacctcaagtacaaccacgccgacgcggagtttcaggagcgccttaaagaagatacgtcttttgggggcaacctcggacgagcagtattccaggcgaaaaagagggttcttgaacctctgggcctggttgaggagcctgttaagacggctccgggaaaaaagaggccggtagagcactctcctgtggagccagactcctcctcgggaaccggaaaagcgggccagcagcctgcgagaaagagattgaattttggtcagactggagacgcagactccgtacctgacccccagcctctcggacagccaccagcagcccccacaagtttgggatctactacaatggctacaggcagtggcgcaccaatggcagacaataacgagggtgccgatggagtgggtaattcctcaggaaattggcattgcgattcccaatggttgggcggcagagtcatcaccaccagcacccgaacctgggccctgcccacctacaacaaccacctctacaagcaaatctccagccaatcaggagccagcaacgacaaccactactttggctacagcaccccctgggggtattttgacttcaacagattccactgccacttttcaccacgtgactggcaaagactcatcaacaacaactggggattccgacccaagagactcaacttcaagctctttaacattcaagtcaaagaggtcacgcagaatgacggtacgacgacgattgccaataaccttaccagcacggttcaggtgtttactgactcggagtaccagctcccgtacgtcctcggctcggcgcatcaaggatgcctcccgccgtttccagcggacgtcttcatggtcccacagtatggatacctcaccctgaacaacgggagtcaggcggtaggacgctcttccttttactgcctggagtactttccttctcagatgcttcgtaccggaaacaactttaccttcagttacacctttgaagacgttcctttccacagcagctacgctcacagtcaaagtctggaccggctgatgaatcctcttatcgaccagtacctgtattatctaaacaaaacacaatcaaatagtggaactcttcagcagtctcggctactgtttagtcaagctggacctaccagcatgtctcttcaagctaaaaactggctgcctggaccttgctacagacaacagcgtctgtcaaagcaggcaaacgacaacaacaacagcaactttccctggactgcggctacaaagtatcatctaaatggccgggactcgttggttaatccaggaccagctatggccagccacaaagacgatgaagaaaagtttttccccatgcatggaaccctgatatttggcaaacaaggaacaaatgctaacgacgcggatttggacaatgtcatgattacagatgaagaagaaatccgtaccaccaatcccgtggctacggagcagtacgggactgtgtcaaataatttgcaaaactcaaatactggtccaactactggaactgtcaatcaccaaggagcgttacctggtatggtgtggcaggatcgagacgtgtaccttcagggacccatttgggccaagattcctcacaccgatggacactttcacccttctccgctgatgggaggttttggactcaaacacccgcctcctcagatcatgatcaaaaacactcccgttccagccaatcctcccacaaacttcagttctgccaagtttgcttctttcatcacacagtattccacgggacaggttagcgtggagatcgagtgggagctgcagaaggagaacagcaaacgctggaaccccgagatccagtacacttccaactacaacaagtctgttaatgtggactttactgtggacactaatggtgtgtattcagagcctcgccccattggcaccagatacctgactcgtaatctgtaa

SEQ ID NO: 12304 - DNA, 2205 bp, Artificial Sequence
  source: /note="Description of Artificial Sequence: Synthetic polynucleotide"
atggctgccgatggttatcttccagattggctcgaggacactctctctgaaggaataagacagtggtggaagctcaaacctggcccaccaccgccaaagcccgcagagcggcataaggacgacagcaggggtcttgtgcttcctgggtacaagtacctcggacccttcaacggactcgacaagggagagccggtcaacgaggcagacgccgcggccctcgagcacgacaaggcctacgaccggcagctcgacagcggagacaacccgtacctcaagtacaaccacgccgacgcggagtttcaggagcgccttaaagaagatacgtcttttgggggcaacctcggacgagcagtattccaggcgaaaaagagggttcttgaacctctgggcctggttgaggagcctgttaagacggctccgggaaaaaagaggccggtagagcactctcctgtggagccagactcctcctcgggaaccggaaaagcgggccagcagcctgcgagaaagagattgaattttggtcagactggagacgcagactccgtacctgacccccagcctctcggacagccaccagcagcccccacaagtttgggatctactacaatggctacaggcagtggcgcaccaatggcagacaataacgagggtgccgatggagtgggtaattcctcaggaaattggcattgcgattcccaatggttgggcgacagagtcatcaccaccagcacccgaacctgggccctgcccacctacaacaaccacctctacaagcaaatctccagccaatcaggagccagcaacgacaaccactactttggctacagcaccccctgggggtattttgacttcaacagattccactgccacttttcaccacgtgactggcaaagactcatcaacaacaactggggattccgacccaagagactcaacttcaagctctttaacattcaagtcaaagaggtcacgcagaatgacggtacgacgacgattgccaataaccttaccagcacggttcaggtgtttactgactcggagtaccagctcccgtacgtcctcggctcggcgcatcaaggatgcctcccgccgtttccagcggacgtcttcatggtcccacagtatggatacctcaccctgaacaacgggagtcaggcggtaggacgctcttccttttactgcctggagtactttccttctcagatgcttcgtaccggaaacaactttaccttcagttacacctttgaagacgttcctttccacagcagctacgctcacagtcaaagtctggaccggctgatgaatcctcttatcgaccagtacctgtattatctaaacaaaacacaatcaaatagtggaactcttcagcagtctcggctactgtttagtcaagctggacctaccagcatgtctcttcaagctaaaaactggctgcctggaccttgctacagacaacagcgtctgtcaaagcaggcaaacgacaacaacagcaactttccctggactgcggctacaaagtatcatctaaatggccgggactcgttggttaatccaggaccagctatggccagccacaaagacgatgaagaaaagtttttccccatgcatggaaccctgatatttggcaaacaaggaacaaatgctaacgacgcggatttggacaatgtcatgattacagatgaagaagaaatccgtaccaccaatcccgtggctacggagcagtacgggactgtgtcaaataatttgcaaaactcaaatactggtccaactactggaactgtcaatcaccaaggagcgttacctggtatggtgtggcaggatcgagacgtgtaccttcagggacccatttgggccaagattcctcacaccgatggacactttcacccttctccgctgatgggaggttttggactcaaacacccgcctcctcagatcatgatcaaaaacactcccgttccagccaatcctcccacaaacttcagttctgccaagtttgcttctttcatcacacagtattccacgggacaggttagcgtggagatcgagtgggagctgcagaaggagaacagcaaacgctggaaccccgagatccagtacacttccaactacaacaagtctgttaatgtggactttactgtggacactaatggtgtgtattcagagcctcgccccattggcaccagatacctgactcgtaatctgtaa

SEQ ID NO: 12305 - DNA, 2208 bp, Artificial Sequence
  source: /note="Description of Artificial Sequence: Synthetic polynucleotide"
atggctgccgatggttatcttccagattggctcgaggacactctctctgaaggaataagacagtggtggaagctcaaacctggcccaccaccgccaaagcccgcagagcggcataaggacgacagcaggggtcttgtgcttcctgggtacaagtacctcggacccttcaacggactcgacaagggagagccggtcaacgaggcagacgccgcggccctcgagcacgacaaggcctacgaccggcagctcgacagcggagacaacccgtacctcaagtacaaccacgccgacgcggagtttcaggagcgccttaaagaagatacgtcttttgggggcaacctcggacgagcagtattccaggcgaaaaagagggttcttgaacctctgggcctggttgaggagcctgttaagacggctccgggaaaaaagaggccggtagagcactctcctgtggagccagactcctcctcgggaaccggaaaagcgggccagcagcctgcgagaaagagattgaattttggtcagactggagacgcagactccgtacctgacccccagcctctcggacagccaccagcagcccccacaagtttgggatctactacaatggctacaggcagtggcgcaccaatggcagacaataacgagggtgccgatggagtgggtaattcctcaggaaattggcattgcgattcccaatggttgggcgacagagtcatcaccaccagcacccgaacctgggccctgcccacctacaacaaccacctctacaagcaaatctccagccaatcaggagccagcaacgacaaccactactttggctacagcaccccctgggggtattttgacttcaacagattccactgccacttttcaccacgtgactggcaaagactcatcaacaacaactggggattccgacccaagagactcaacttcaagctctttaacattcaagtcaaagaggtcacgcagaatgacggtacgacgacgattgccaataaccttaccagcacggttcaggtgtttactgactcggagtaccagctcccgtacgtcctcggctcggcgcatcaaggatgcctcccgccgtttccagcggacgtcttcatggtcccacagtatggatacctcaccctgaacaacgggagtcaggcggtaggacgctcttccttttactgcctggagtactttccttctcagatgcttcgtaccggaaacaactttaccttcagttacacctttgaagacgttcctttccacagcagctacgctcacagtcaaagtctggaccggctgatgaatcctcttatcgaccagtacctgtattatctaaacaaaacacaatcaaatagtggaactcttcagcagcctcggctactgtttagtcaagctggacctaccagcatgtctcttcaagctaaaaactggctgcctggaccttgctacagacaacagcgtctgtcaaagcaggcaaacgacaacaacaacagcaactttccctggactgcggctacaaagtatcatctaaatggccgggactcgttggttaatccaggaccagctatggccagccacaaagacgatgaagaaaagtttttccccatgcatggaaccctgatatttggcaaacaaggaacaaatgctaacgacgcggatttggacaatgtcatgattacagatgaagaagaaatccgtaccaccaatcccgtggctacggagcagtacgggactgtgtcaaataatttgcaaaactcaaatactggtccaactactggaactgtcaatcaccaaggagcgttacctggtatggtgtggcaggatcgagacgtgtaccttcagggacccatttgggccaagattcctcacaccgatggacactttcacccttctccgctgatgggaggttttggactcaaacacccgcctcctcagatcatgatcaaaaacactcccgttccagccaatcctcccacaaacttcagttctgccaagtttgcttctttcatcacacagtattccacgggacaggttagcgtggagatcgagtgggagctgcagaaggagaacagcaaacgctggaaccccgagatccagtacacttccaactacaacaagtctgttaatgtggactttactgtggacactaatggtgtgtattcagagcctcgccccattggcaccagatacctgactcgtaatctgtaa

SEQ ID NO: 12306 - DNA, 2205 bp, Artificial Sequence
  source: /note="Description of Artificial Sequence: Synthetic polynucleotide"
atggctgccgatggttatcttccagattggctcgaggacactctctctgaaggaataagacagtggtggaagctcaaacctggcccaccaccgccaaagcccgcagagcggcataaggacgacagcaggggtcttgtgcttcctgggtacaagtacctcggacccttcaacggactcgacaagggagagccggtcaacgaggcagacgccgcggccctcgagcacgacaaggcctacgaccggcagctcgacagcggagacaacccgtacctcaagtacaaccacgccgacgcggagtttcaggagcgccttaaagaagatacgtcttttgggggcaacctcggacgagcagtattccaggcgaaaaagagggttcttgaacctctgggcctggttgaggagcctgttaagacggctccgggaaaaaagaggccggtagagcactctcctgtggagccagactcctcctcgggaaccggaaaagcgggccagcagcctgcgagaaagagattgaattttggtcagactggagacgcagactccgtacctgacccccagcctctcggacagccaccagcagcccccacaagtttgggatctactacaatggctacaggcagtggcgcaccaatggcagacaataacgagggtgccgatggagtgggtaattcctcaggaaattggcattgcgattcccaatggttgggcgacagagtcatcaccaccagcacccgaacctgggccctgcccacctacaacaaccacctctacaagcaaatctccagccaatcaggagccagcaacgacaaccactactttggctacagcaccccctgggggtattttgacttcaacagattccactgccacttttcaccacgtgactggcaaagactcatcaacaacaactggggattccgacccaagagactcaacttcaagctctttaacattcaagtcaaagaggtcacgcagaatgacggtacgacgacgattgccaataaccttaccagcacggttcaggtgtttactgactcggagtaccagctcccgtacgtcctcggctcggcgcatcaaggatgcctcccgccgtttccagcggacgtcttcatggtcccacagtatggatacctcaccctgaacaacgggagtcaggcggtaggacgctcttccttttactgcctggagtactttccttctcagatgcttcgtaccggaaacaactttaccttcagttgcacctttgaagacgttcctttccacagcagctacgctcacagtcaaagtctggaccggctgatgaatcctcttatcgaccagtacctgtattatctaaacaaaacacaatcaaatagtggaactcttcagcagtctcggctactgtttagtcaagctggacctaccagcatgtctcttcaagctaaaaactggctgcctggaccttgctacagacaacagcgtctgtcaaagcaggcaaacgacaacaacagcaactttccctggactgcggctacaaagtatcatctaaatggccgggactcgttggttaatccaggaccagctatggccagccacaaagacgatgaagaaaagtttttccccatgcatggaaccctgatatttggcaaacaaggaacaaatgctaacgacgcggatttggacaatgtcatgattacagatgaagaagaaatccgtaccaccaatcccgtggctacggagcagtacgggactgtgtcaaataatttgcaaaactcaaatactggtccaactactggaactgtcaatcaccaaggagcgttacctggtatggtgtggcaggatcgagacgtgtaccttcagggacccatttgggccaagattcctcacaccgatggacactttcacccttctccgctgatgggaggttttggactcaaacacccgcctcctcagatcatgatcaaaaacactcccgttccagccaatcctcccacaaacttcagttctgccaagtttgcttctttcatcacacagtattccacgggacaggttagcgtggagatcgagtgggagctgcagaaggagaacagcaaacgctggaaccccgagatccagtacacttccaactacaacaagtctgttaatgtggactttactgtggacactaatggtgtgtattcagagcctcgccccattggcaccagatacctgactcgtaatctgtaa

SEQ ID NO: 12307 - DNA, 2208 bp, Artificial Sequence
  source: /note="Description of Artificial Sequence: Synthetic polynucleotide"
atggctgccgatggttatcttccagattggctcgaggacactctctctgaaggaataagacagtggtggaagctcaaacctggcccaccaccgccaaagcccgcagagcggcataaggacgacagcaggggtcttgtgcttcctgggtacaagtacctcggacccttcaacggactcgacaagggagagccggtcaacgaggcagacgccgcggccctcgagcacgacaaggcctacgaccggcagctcgacagcggagacaacccgtacctcaagtacaaccacgccgacgcggagtttcaggagcgccttaaagaagatacgtcttttgggggcaacctcggacgagcagtattccaggcgaaaaagagggttcttgaacctctgggcctggttgaggagcctgttaagacggctccgggaaaaaagaggccggtagagcactctcctgtggagccagactcctcctcgggaaccggaaaagcgggccagcagcctgcgagaaagagattgaattttggtcagactggagacgcagactccgtacctgacccccagcctctcggacagccaccagcagcccccacaagtttgggatctactacaatggctacaggcagtggcgcaccaatggcagacaataacgagggtgccgatggagtgggtaattcctcaggaaattggcattgcgattcccaatggttgggcgacagagtcatcaccaccagcacccgaacctgggccctgcccacctacaacaaccacctctacaagcaaatctccagccaatcaggagccagcaacgacaaccactactttggctacagcaccccctgggggtattttgacttcaacagattccactgccacttttcaccacgtgactggcaaagactcatcaacaacaactggggattccgacccaagagactcaacttcaagctctttaacattcaagtcaaagaggtcacgcagaatgacggtacgacgacgattgccaataaccttaccagcacggttcaggtgtttactgactcggagtaccagctcccgtacgtcctcggctcggcgcatcaaggatgcctcccgccgtttccagcggacgtcttcatggtcccacagtatggatacctcaccctgaacaacgggagtcaggcggtaggacgctcttccttttactgcctggagtactttccttctcagatgcttcgtaccggaaacaactttaccttcagttgcacctttgaagacgttcctttccacagcagctacgctcacagtcaaagtctggaccggctgatgaatcctcttatcgaccagtacctgtattatctaaacaaaacacaatcaaatagtggaactcttcagcagtctcggctactgtttagtcaagctggacctaccagcatgtctcttcaagctaaaaactggctgcctggaccttgctacagacaacagcgtctgtcaaagcaggcaaacgacaacaacaacagcaactttccctggactgcggctacaaagtatcatctaaatggccgggactcgttggttaatccaggaccagctatggccagccacaaagacgatgaagaaaagtttttccccatgcatggaaccctgatatttggcaaacaaggaacaaatgctaacgacgcggatttggacaatgtcatgattacagatgaagaagaaatccgtaccaccaatcccgtggctacggagcagtacgggactgtgtcaaataatttgcaaaactcaaatactggtccaactactggaactgtcaatcaccaaggagcgttacctggtatggtgtggcaggatcgagacgtgtaccttcagggacccatttgggccaagattcctcacaccgatggacactttcacccttctccgctgatgggaggttttggactcaaacacccgcctcctcagatcatgatcaaaaacactcccgttccagccaatcctcccacaaacttcagttctgccaagtttgcttctttcatcacacagtattccacgggacaggttagcgtggagatcgagtgggagctgcagaaggagaacagcaaacgctggaaccccgagatccagtacacttccaactacaacaagtctgttaatgtggactttagtgtggacactaatggtgtgtattcagagcctcgccccattggcaccagatacctgactcgtaatctgtaa

SEQ ID NO: 12308 - DNA, 2208 bp, Artificial Sequence
  source: /note="Description of Artificial Sequence: Synthetic polynucleotide"
atggctgccgatggttatcttccagattggctcgaggacactctctctgaaggaataagacagtggtggaagctcaaacctggcccaccaccgccaaagcccgcagagcggcataaggacgacagcaggggtcttgtgcttcctgggtacaagtacctcggacccttcaacggactcgacaagggagagccggtcaacgaggcagacgccgcggccctcgagcacgacaaggcctacgaccggcagctcgacagcggagacaacccgtacctcaagtacaaccacgccgacgcggagtttcaggagcgccttaaagaagatacgtcttttgggggcaacctcggacgagcagtattccaggcgaaaaagagggttcttgaacctctgggcctggttgaggagcctgttaagacggctccgggaaaaaagaggccggtagagcactctcctgtggagccagactcctcctcgggaaccggaaaagcgggccagcagcctgcgagaaagagattgaattttggtcagactggagacgcagactccgtacctgacccccagcctctcggacagccaccagcagcccccacaagtttgggatctactacaatggctacaggcagtggcgcaccaatggcagacaataacgagggtgccgatggagtgggtaattcctcaggaaattggcattgcgattcccaatggttgggcgacagagtcatcaccaccagcacccgaacctgggccctgcccacctacaacaaccacctctacaagcaaatctccagccaatcaggagccagcaacgacaaccactactttggctacagcaccccctgggggtattttgacttcaacagattccactgccacttttcaccacgtgactggcaaagactcatcaacaacaactggggattccgacccaagagactcaacttcaagctctttaacattcaagtcaaagaggtcacgcagaatgacggtacgacgacgattgccaataaccttaccagcacggttcaggtgtttactgactcggagtaccagctcccgtacgtcctcggctcggcgcatcaaggatgcctcccgccgtttccagcggacgtcttcatggtcccacagtatggatacctcaccctgaacaacgggagtcaggcggtaggacgctcttccttttactgcctggagtactttccttctcagatgcttcgtaccggaaacaactttaccttcagttgcacctttgaagacgttcctttccacagcagctacgctcacagtcaaagtctggaccggctgatgaatcctcttatcgaccagtacctgtattatctaaacaaaacacaatcaaatagtggaactcttcagcagtctcggctactgtttagtcaagctggacctaccagcatgtctcttcaagctaaaaactggctgcctggaccttgctacagacaacagcgtctgtcaaagcaggcaaacgacaacaacaacagcaactttccctggactgcggctacaaagtatcatctaaatggccgggactcgttggttaatccaggaccagctatggccagccacaaagacgatgaagaaaagtttttccccatgcatggaaccctgatatttggcaaacaaggaacaaatgctaacgacgcggatttggacaatgtcatgattacagatgaagaagaaatccgtaccaccaatcccgtggctacggagcagtacgggactgtgtcaaataatttgcaaaactcaaatactggtccaactactggaactgtcaatcaccaaggagcgttacctggtatggtgtggcaggatcgagacgtgtaccttcagggacccatttgggccaagattcctcacaccgatggacactttcacccttctccgctgatgggaggttttggactcaaacacccgcctcctcagatcatgatcaaaaacactcccgttccagccaatcctcccacaaacttcagttctgccaagtttgcttctttcatcacacagtattccacgggacaggttagcgtggagatcgagtgggagctgcagaaggagaacagcaaacgctggaaccccgagatccagtacacttccaactacaacaagtctgttaatgtggactttactgtggacactaatggtgtgtattcagagcctcgccccattggcaccagatacctgactcgtaatctgtaa

SEQ ID NO: 12309 - DNA, 2208 bp, Artificial Sequence
  source: /note="Description of Artificial Sequence: Synthetic polynucleotide"
atggctgccgatggttatcttccagattggctcgaggacactctctctgaaggaataagacagtggtggaagctcaaacctggcccaccaccgccaaagcccgcagagcggcataaggacgacagcaggggtcttgtgcttcctgggtacaagtacctcggacccttcaacggactcgacaagggagagccggtcaacgaggcagacgccgcggccctcgagcacgacaaggcctacgaccggcagctcgacagcggagacaacccgtacctcaagtacaaccacgccgacgcggagtttcaggagcgccttaaagaagatacgtcttttgggggcaacctcggacgagcagtattccaggcgaaaaagagggttcttgaacctctgggcctggttgaggagcctgttaagacggctccgggaaaaaagaggccggtagagcactctcctgtggagccagactcctcctcgggaaccggaaaagcgggccagcagcctgcgagaaagagattgaattttggtcagactggagacgcagactccgtacctgacccccagcctctcggacagccaccagcagcccccacaagtttgggatctactacaatggctacaggcagtggcgcaccaatggcagacaataacgagggtgccgatggagtgggtaattcctcaggaaattggcattgcgattcccaatggttgggcgacagagtcatcaccaccagcacccgaacctgggccctgcccacctacaacaaccacctctacaagcaaatctccagccaatcaggagccagcaacgacaaccactactttggctacagcaccccctgggggtattttgacttcaacagattccactgccacttttcaccacgtgactggcaaagactcatcaacaacaactggggattccgacccaagagactcaacttcaagctctttaacattcaagtcaaagaggtcacgcagaatgacggtacgacgacgattgccaataaccttaccagcacggttcaggtgtttactgactcggagtaccagctcccgtacgtcctcggctcggcgcatcaaggatgcctcccgccgtttccagcggacgtcttcatggtcccacagtatggatacctcaccctgaacaacgggagtcaggcggtaggacgctcttccttttactgcctggagtactttccttctcagatgcttcgtaccggaaacaactttaccttcagttacacctttgaagacgttcctttccacagcagctacgctcacagtcaaagtctggaccggctgatgaatcctcttatcgaccagtacctgtattatctaaacaaaacacaatcaaatagtggaactcttcagcagtctcggctactgtttagtcaagctggacctaccagcatgtctcttcaagctaaaaactggctgcctggaccttgctacagacaacagcgtctgtcaaagcaggcaaacgacaacaacaacagcaactttccctggactgcggctacaaagtatcatctaaatggccgggactcgttggttaatccaggaccagctatggccagccacaaagacgatgaagaaaagtttttccccatgcatggaaccctgatatttggcaaacaaggaacaaatgctaacgacgcggatttggacaatgtcatgattacagatgaagaagaaatccgtaccaccaatcccgtggctacggagcagtacgggactgtgtcaaataatttgcaaaactcaaatactggtccaactactggaactgtcaatcaccaaggagcgttacctggtatggtgtggcaggatcgagacgtgtaccttcagggacccatttgggccaagattcctcacaccgatggacactttcacccttctccgctgatgggaggttttggactcaaacacccgcctcctcagatcatgatcaaaaacactcccgttccagccaatcctcccacaaacttcagttctgccaagtttgcttctttcatcacacagtattccacgggacaggttagcgtggagatcgagtgggagctgcagaaggagaacagcaaacgctggaaccccgagatccagtacacttccaactacaacaagtctgttaatgtggactttagtgtggacactaatggtgtgtattcagagcctcgccccattggcaccagatacctgactcgtaatctgtaa

SEQ ID NO: 12310 - DNA, 2208 bp, Artificial Sequence
  source: /note="Description of Artificial Sequence: Synthetic polynucleotide"
atggctgccgatggttatcttccagattggctcgaggacactctctctgaaggaataagacagtggtggaagctcaaacctggcccaccaccgccaaagcccgcagagcggcataaggacgacagcaggggtcttgtgcttcctgggtacaagtacctcggacccttcaacggactcgacaagggagagccggtcaacgaggcagacgccgcggccctcgagcacgacaaggcctacgaccggcagctcgacagcggagacaacccgtacctcaagtacaaccacgccgacgcggagtttcaggagcgccttaaagaagatacgtcttttgggggcaacctcggacgagcagtattccaggcgaaaaagagggttcttgaacctctgggcctggttgaggagcctgttaagacggctccgggaaaaaagaggccggtagagcactctcctgtggagccagactcctcctcgggaaccggaaaagcgggccagcagcctgcgagaaagagattgaattttggtcagactggagacgcagactccgtacctgacccccagcctctcggacagccaccagcagcccccacaagtttgggatctactacaatggctacaggcagtggcgcaccaatggcagacaataacgagggtgccgatggagtgggtaattcctcaggaaattggcattgcgattcccaatggttgggcgacagagtcatcaccaccagcacccgaacctgggccctgcccacctacaacaaccacctctacaagcaaatctccagccaatcaggagccagcaacgacaaccactactttggctacagcaccccctgggggtattttgacttcaacagattccactgccacttttcaccacgtgactggcaaagactcatcaacaacaactggggattccgacccaagagactcaacttcaagctctttaacattcaagtcaaagaggtcacgcagaatgacggtacgacgacgattgccaataaccttaccagcacggttcaggtgtttactgactcggagtaccagctcccgtacgtccccggctcggcgcatcaaggatgcctcccgccgtttccagcggacgtcttcatggtcccacagtatggatacctcaccctgaacaacgggagtcaggcggtaggacgctcttccttttactgcctggagtactttccttctcagatgcttcgtaccggaaacaactttaccttcagttgcacctttgaagacgttcctttccacagcagctacgctcacagtcaaagtctggaccggctgatgaatcctcttatcgaccagtacctgtattatctaaacaaaacacaatcaaatagtggaactcttcagcagcctcggctactgtttagtcaagctggacctaccagcatgtctcttcaagctaaaaactggctgcctggaccttgctacagacaacagcgtctgtcaaagcaggcaaacgacaacaacaacagcaactttccctggactgcggctacaaagtatcatctaaatggccgggactcgttggttaatccaggaccagctatggccagccacaaagacgatgaagaaaagtttttccccatgcatggaaccctgatatttggcaaacaaggaacaaatgctaacgacgcggatttggacaatgtcatgattacagatgaagaagaaatccgtaccaccaatcccgtggctacggagcagtacgggactgtgtcaaataatttgcaaaactcaaatactggtccaactactggaactgtcaatcaccaaggagcgttacctggtatggtgtggcaggatcgagacgtgtaccttcagggacccatttgggccaagattcctcacaccgatggacactttcacccttctccgctgatgggaggttttggactcaaacacccgcctcctcagatcatgatcaaaaacactcccgttccagccaatcctcccacaaacttcagttctgccaagtttgcttctttcatcacacagtattccacgggacaggttagcgtggagatcgagtgggagctgcagaaggagaacagcaaacgctggaaccccgagatccagtacacttccaactacaacaagtctgttaatgtggactttactgtggacactaatggtgtgtattcagagcctcgccccattggcaccagatacctgactcgtaatctgtaa

SEQ ID NO: 12311 - DNA, 2208 bp, Artificial Sequence
  source: /note="Description of Artificial Sequence: Synthetic polynucleotide"
atggctgccgatggttatcttccagattggctcgaggacactctctctgaaggaataagacagtggtggaagctcaaacctggcccaccaccgccaaagcccgcagagcggcataaggacgacagcaggggtcttgtgcttcctgggtacaagtacctcggacccttcaacggactcgacaagggagagccggtcaacgaggcagacgccgcggccctcgagcacgacaaggcctacgaccggcagctcgacagcggagacaacccgtacctcaagtacaaccacgccgacgcggagtttcaggagcgccttaaagaagatacgtcttttgggggcaacctcggacgagcagtattccaggcgaaaaagagggttcttgaacctctgggcctggttgaggagcctgttaagacggctccgggaaaaaagaggccggtagagcactctcctgtggagccagactcctcctcgggaaccggaaaagcgggccagcagcctgcgagaaagagattgaattttggtcagactggagacgcagactccgtacctgacccccagcctctcggacagccaccagcagcccccacaagtttgggatctactacaatggctacaggcagtggcgcaccaatggcagacaataacgagggtgccgatggagtgggtaattcctcaggaaattggcattgcgattcccaatggttgggcgacagagtcatcaccaccagcacccgaacctgggccctgcccacctacaacaaccacctctacaagcaaatctccagccaatcaggagccagcaacgacaaccactactttggctacagcaccccctgggggtattttgacttcaacagattccactgccacttttcaccacgtgactggcaaagactcatcgacaacaactggggattccgacccaagagactcaacttcaagctctttaacattcaagtcaaagaggtcacgcagaatgacggtacgacgacgattgccaataaccttaccagcacggttcaggtgtttactgactcggagtaccagctcccgtacgtcctcggctcggcgcatcaaggatgcctcccgccgttttcagcggacgtcttcatggtcccacagtatggatacctcaccctgaacaacgggagtcaggcggtaggacgctcttccttttactgcctggagtactttccttctcagatgcttcgtaccggaaacaactttaccttcagttacacctttgaagacgttcctttccacagcagctacgctcacagtcaaagtctggaccggctgatgaatcctcttatcgaccagtacctgtattatctaaacaaaacacaatcaaatagtggaactcttcagcagtctcggctactgtttagtcaagctggacctaccagcatgtctcttcaagctaaaaactggctgcctggaccttgctacagacaacagcgtctgtcaaagcaggcaaacgacaacaacaacagcaactttccctggactgcggctacaaagtatcatctaaatggccgggactcgttggttaatccaggaccagctatggccagccacaaagacgatgaagaaaagtttttccccatgcatggaaccctgatatttggcaaacaaggaacaaatgctaacgacgcggatttggacaatgtcatgattacagatgaagaagaaatccgtaccaccaatcccgtggctacggagcagtacgggactgtgtcaaataatttgcaaaactcaaatactggtccaactactggaactgtcaatcaccaaggagcgttacctggtatggtgtggcaggatcgagacgtgtaccttcagggacccatttgggccaagattcctcacaccgatggacactttcacccttctccgctgatgggaggttttggactcaaacacccgcctcctcagatcatgatcaaaaacactcccgttccagccaatcctcccgcaaacttcagttctgccaagtttgcttctttcatcacacagtattccacgggacaggttagcgtggagatcgagtgggagctgcagaaggagaacagcaaacgctggaaccccgagatccagtacacttccaactacaacaagtctgttaatgtggactttactgtggacactaatggtgtgtattcagagcctcgccccattggcaccagatacctgactcgtaatctgtaa

SEQ ID NO: 12312 - DNA, 2208 bp, Artificial Sequence
  source: /note="Description of Artificial Sequence: Synthetic polynucleotide"
atggctgccgatggttatcttccagattggctcgaggacactctctctgaaggaataagacagtggtggaagctcaaacctggcccaccaccgccaaagcccgcagagcggcataaggacgacagcaggggtcttgtgcttcctgggtacaagtacctcggacccttcaacggactcgacaagggagagccggtcaacgaggcagacgccgcggccctcgagcacgacaaggcctacgaccggcagctcgacagcggagacaacccgtacctcaagtacaaccacgccgacgcggagtttcaggagcgccttaaagaagatacgtcttttgggggcaacctcggacgagcagtattccaggcgaaaaagagggttcttgaacctctgggcctggttgaggagcctgttaagacggctccgggaaaaaagaggccggtagagcactctcctgtggagccagactcctcctcgggaaccggaaaagcgggccagcagcctgcgagaaagagattgaattttggtcagactggagacgcagactccgtacctgacccccagcctctcggacagccaccagcagcccccacaagtttgggatctactacaatggctacaggcagtggcgcaccaatggcagacaataacgagggtgccgatggagtgggtaattcctcaggaaattggcattgcgattcccaatggttgggcgacagagtcatcaccaccagcacccgaacctgggccctgcccacctacaacaaccacctctacaagcaaatctccagccaatcaggagccagcaacgacaaccactactttggctacagcaccccctgggggtattttgacttcaacagattccactgccacttttcaccacgtgactggcaaagactcatcaacaacaactggggattccgacccaagagactcaacttcaagctctttaacattcaagtcaaagaggtcacgcagaatgacggtacgacgacgattgccaataaccttaccggcacggttcaggtgtttactgactcggagtaccagctcccgtacgtcctcggctcggcgcatcaaggatgcctcccgccgtttccagcggacgtcttcatggtcccacagtatggatacctcaccctgaacaacgggagtcaggcggtaggacgctcttccttttactgcctggagtactttccttctcagatgcttcgtaccggaaacaactttaccttcagttacacctttgaagacgttcctttccacagcagctacgctcacagtcaaagtctggaccggctgatgaatcctcttatcgaccagtacctgtattatctaaacaaaacacaatcaaatagtggaactcttcagcagtctcggctactgtttagtcaagctggacctaccagcatgtctcttcaagctaaaaactggctgcctggaccttgctacagacaacagcgtctgtcaaagcaggcaaacgacaacaacaacagcaactttccctggactgcggctacaaagtatcatctaaatggccgggactcgttggttaatccaggaccagctatggccagccacaaagacgatgaagaaaagtttttccccatgcatggaaccctgatatttggcaaacaaggaacaaatgctaacgacgcggatttggacaatgtcatgattacagatgaagaagaaatccgtaccaccaatcccgtggctacggagcagtacgggactgtgtcaaataatttgcaaaactcaaatactggtccaactactggaactgtcaatcaccaaggagcgttacctggtatggtgtggcaggatcgagacgtgtaccttcagggacccatttgggccaagattcctcacaccgatggacactttcacccttctccgctgatgggaggttttggactcaaacacccgcctcctcagatcatgatcaaaaacactcccgttccagccaatcctcccacaaacttcagttctgccaagtttgcttctttcatcacacagtattccacgggacaggttagcgtggagatcgagtgggagctgcagaaggagaacagcaaacgctggaaccccgagatccagtacacttccaactacaacaagtctgttaatgtggactttactgtggacactaatggtgtgtattcagagcctcgccccattggcaccagatacctgactcgtaatctgtaa

SEQ ID NO: 12313 - DNA, 2208 bp, Artificial Sequence
  source: /note="Description of Artificial Sequence: Synthetic polynucleotide"
atggctgccgatggttatcttccagattggctcgaggacactctctctgaaggaataagacagtggtggaagctcaaacctggcccaccaccgccaaagcccgcagagcggcataaggacgacagcaggggtcttgtgcttcctgggtacaagtacctcggacccttcaacggactcgacaagggagagccggtcaacgaggcagacgccgcggccctcgagcacgacaaggcctacgaccggcagctcgacagcggagacaacccgtacctcaagtacaaccacgccgacgcggagtttcaggagcgccttaaagaagatacgtcttttgggggcaacctcggacgagcagtattccaggcgaaaaagagggttcttgaacctctgggcctggctgaggagcctgttaagacggctccgggaaaaaagaggccggtagagcactctcctgtggagccagactcctcctcgggaaccggaaaagcgggccagcagcctgcgagaaagagattgaattttggtcagactggagacgcagactccgtacctgacccccagcctctcggacagccaccagcagcccccacaagtttgggatctactacaatggctacaggcagtggcgcaccaatggcagacaataacgagggtgccgatggagtgggtaattcctcaggaaattggcattgcgattcccaatggttgggcgacagagtcatcaccaccagcacccgaacctgggccctgcccacctacaacaaccacctctacaagcaaatctccagccaatcaggagccagcaacgacaaccactactttggctacagcaccccctgggggtattttgacttcaacagattccactgccacttttcaccacgtgactggcaaagactcatcaacaacaactggggattccgacccaagagactcaacttcaagctctttaacattcaagtcaaagaggtcacgcagaatgacggtacgacgacgattgccaataaccttaccagcacggttcaggtgtttactgactcggagtaccagctcccgtacgtcctcggctcggcgcatcaaggatgcctcccgccgtttccagcggacgtcttcatggtcccacagtatggatacctcaccctgaacaacgggagtcaggcggtaggacgctcttccttttactgcctggagtactttccttctcagatgcttcgtaccggaaacaactttaccttcagttacacctttgaagacgttcctttccacagcagctacgctcacagtcaaagtctggaccggctgatgaatcctcttatcgaccagtacctgtattatctaaacaaaacacaatcaaatagtggaactcttcagcagtctcggctactgtttagtcaagctggacctaccagcatgtctcttcaagctaaaaactggctgcctggaccttgctacagacaacagcgtctgtcaaagcaggcaaacgacaacaacaacagcaactttccctggactgcggctacaaagtatcatctaaatggccgggactcgttggttaatccaggaccagctatggccagccacaaagacgatgaagaaaagtttttccccatgcatggaaccctgatatttggcaaacaaggaacaaatgctaacgacgcggatttggacaatgtcatgattacagatgaagaagaaatccgtaccaccaatcccgtggctacggagcagtacgggactgtgtcaaataatttgcaaaactcaaatactggtccaactactggaactgtcaatcaccaaggagcgttacctggtatggtgtggcaggatcgagacgtgtaccttcagggacccatttgggccaagattcctcacaccgatggacactttcacccttctccgctgatgggaggttttggactcaaacacccgcctcctcagatcatgatcaaaaacactcccgttccagccaatcctcccacaaacttcagttctgccaagtttgcttctttcatcacacagtattccacgggacaggttagcgtggagatcgagtgggagctgcagaaggagaacagcaaacgctggaaccccgagatccagtacacttccaactacaacaagtctgttaatgtggactttactgtggacactaatggtgtgtattcagagcctcgccccattggcaccagatacctgactcgtaatctgtaa

SEQ ID NO: 12314 - DNA, 2208 bp, Artificial Sequence; identical to SEQ ID NO: 12243
  source: /note="Description of Artificial Sequence: Synthetic polynucleotide"

SEQ ID NO: 12315 - DNA, 2208 bp, Artificial Sequence
  source: /note="Description of Artificial Sequence: Synthetic polynucleotide"
atggctgccgatggttatcttccagattggctcgaggacactctctctgaaggaataagacagtggtggaagctcaaacctggcccaccaccaccaaggcccgcagagcggcatcaggacgacagcaggggtcttgtgcttcctgggtacaagtacctcggacccttcaacggactcgacaaaggagagccggtcaacgaggcagacgctgcggccctcgagcacgacaaggcctacgaccggcagctcgacagcggagacaacccgtacctcaagtacaaccacgccgacgcggagtttcaggagcgtcttaaagaagatacgtcttttgggggcaacctcggacgagcagtcttccaggcgaaaaagagggttcttgaacctctgggcctggttgaggaacctgttaagacggctccgggaaaaaagaggccggtagagcactctcctgcggagccagactcctcctcgggaaccggaaaagcgggccagcagcctgcaagaaagagattgaatttcggtcagactggagacgcagactccgtacctgacccccagcctctcggacagccaccagcagcccccacaagtttgggatctactacaatggctacaggcagtggcgcaccaatggcagacaataacgagggtgccgatggagtgggtaattcctcaggaaattggcattgcgattcccaatggctgggcgacagagtcatcaccaccagcacccgaacctgggccctgcccacctacaacaaccacctctacaagcaaatctccagccaatcaggagcatcgaacgacaaccactactttggctacagcaccccttgggggtattttgacttcaacagattccactgtcacttctccccacgtgactggcaaagactcatcaacaacaactggggattccgacccaagagactcaacttcaagctctttaacattcaagtcaaagaggtcacgcagaatgacggtacgacgacgattgccaataaccttaccagcacggttcaggtgtttactgactcggagtaccagctcccgtacgtcctcggctcggcgcatcaaggatgcctcccgccgtttccagcggacgtcttcatggtcccacagtatggatacctcaccctgaacaacgggagtcaggcggtaggacgctcttccttttactgcctggagtactttccttctcagatgctgcgtaccggaaacaactttaccttcagctacacctttgaggacgtgcccttccacagcagctacgctcacagccagagtttggaccggctgatgaatcctctgatcgaccagtatctgtattatctgaacaggacacaatcaaatagtggaactcttcagcagtctaggctactgtttagccaagctggacccaccagcatgtcccttcaagctaaaaactggctgcctggaccttgctacagacagcagcgtctgtcaaagcaggcaaacgacaacaacaacagcaactttccctggactgcggctacaaagtatcatctaaatggtcgggactcgttggttaatccaggaccagctatggccagccacaaagacgatgaagaaaagtttttccccatgcatggaaccctgatatttggtaaacaaggaacaaatgctaacgacgcggatttggaacatgtcatgattacaggtgaagaagaaatcaggaccaccaatcccgtggctacagagcagtacggaaacgtgtcaaataatttgcaaaactcaaatactggtccaactacagaaaatgtcaatcaccagggagcgttacctggtatggtgtggcaggatcgagacgtgtacctgcagggacccatttgggccaagattcctcacaccgacggacactttcacccttctccactgatgggaggttttggactcaaacacccgcctcctcaaatcatgatcaaaaacactcctgttccagccaatcctcctacaaacttcagcgcggcaaagtttgcttccttcatcacacagtattccacgggacaggtcagcgtggagatcgagtgggagctgcagaaggagaacagcaaacgctggaaccccgagatccagtacacttccaactacaacaaatctgttaatgtggactttactgtggacgctaatggtgtgtattcagagcctcgccccattggcaccagatacctgactcgtaatctgtaa

SEQ ID NO: 12316 - DNA, 2208 bp, Artificial Sequence
  source: /note="Description of Artificial Sequence: Synthetic polynucleotide"
atggctgccgatggttatcttccagattggctcgaggacactctctctgaaggaataagacagtggtggaagctcaaacctggcccaccaccaccaaggcccgcagagcggcatcaggacgacagcaggggtcttgtgcttcctgggtacaagtacctcggacccttcaacggactcgacaaaggagagccggtcaacgaggcagacgctgcggccctcgagcacgacaaggcctacgaccggcagctcgacagcggagacaacccgtacctcaagtacaaccacgccgacgcggagtttcaggagcgtcttaaagaagatacgtcttttgggggcaacctcggacgagcagtcttccaggcgaaaaagagggttcttgaacctctgggcctggttgaggaacctgttaagacggctccgggaaaaaagaggccggtagagcactctcctgcggagccagactcctcctcgggaaccggaaaagcgggccagcagcctgcaagaaagagattgaatttcggtcagactggagacgcagactccgtacctgacccccagcctctcggacagccaccagcagcccccacaagtttgggatctactacaatggctacaggcagtggcgcaccaatggcagacaataacgagggtgccgatggagtgggtaattcctcaggaaattggcattgcgattcccaatggctgggcgacagagtcatcaccaccagcacccgaacctgggccctgcccacctacaacaaccacctctacaagcaaatctccagccaatcaggagcatcgaacgacaaccactactttggctacagcaccccyttggggtattttgacttcaacagattccactgtcacttctccccacgtgactggcaaagactcatcaacaacaactggggattccgacccaagagactcaacttcaagctctttaacattcaagtcaaagaggtcacgcagaatgacggtacgacgacgattgccaataaccttaccagcacggttcaggtgtttactgactcggagtaccagctcccgtacgtcctcggctcggcgcatcaaggatgcctcccgccgtttccagcggacgtcttcatggtcccacagtatggatacctcaccctgaacaacgggagtcaggcggtaggacgctcttccttttactgcctggagtactttccttctcagatgctgcgtaccggaaacaactttaccttcagctacacctttgaggacgtgcccttccacagcagctacgctcacagccagagtttggaccggctgatgaatcctctgatcgaccagtatctgtattatctgaacaggacacaatcaaatagtggaactcttcagcagtctaggctactgtttagccaagctggacccaccagcatgtcccttcaagctaaaaactggctgcctggaccttgctacagacagcagcgtctgtcaaagcaggcaaacgacaacaacaacagcaactttccctggactgcggctacaaagtatcatctaaatggtcgggactcgttggttaatccaggaccagctatggccagccacaaagacgatgaagaaaagtttttccccatgcatggaaccctgatatttggtaaacaaggaacaaatgctaacgacacggatttggaacatgtcatgattacagatgaagaagaaatcaggaccaccaatcccgtggctacagagcagtacggaaacgtgtcaaataatttgcaaaactcaaatactggtccaactacagaaaatgtcaatcaccagggagcgttacctggtatggtgtggcaggatcgagacgtgtacctgcagggacccatttgggccaagattcctcacaccgacggacactttcacccttctccactgatgggaggttttggactcaaacacccgcctcctcaaatcatgatcaaaaacactcctgttccagccaatcctcctacaaacttcagcgcggcaaagtttgcttccttcatcacacagtattccacgggacaggtcagcgtggagatcgagtgggagctgcagaaggagaacagcaaacgctggaaccccgagatccagtacacttccaactacaacaaatctgttaatgtggactttactgtggacgctaatggtgtgtattcagagcctcgccccattggcaccagatacctgactcgtaatctgtaa

SEQ ID NO: 12317 - DNA, 2208 bp, Artificial Sequence
  source: /note="Description of Artificial Sequence: Synthetic polynucleotide"
atggctgccgatggttatcttccagattggctcgaggacactctctctgaaggaataagacagtggtggaagctcaaacctggcccaccaccaccaaggcccgcagagcggcatcaggacgacagcaggggtcttgtgcttcctgggtacaagtacctcggacccttcaacggactcgacaaaggagagccggtcaacgaggcagacgctgcggccctcgagcacgacaaggcctacgaccggcagctcgacagcggagacaacccgtacctcaagtacaaccacgccgacgcggagtttcaggagcgtcttaaagaagatacgtcttttgggggcaacctcggacgagcagtcttccaggcgaaaaagagggttcttgaacctctgggcctggttgaggaacctgttaagacggctccgggaaaaaagaggccggtagagcactctcctgcggagccagactcctcctcgggaaccggaaaagcgggccagcagcctgcaagaaagagattgaatttcggtcagactggagacgcagactccgtacctgacccccagcctctcggacagccaccagcagcccccacaagtttgggatctactacaatggctacaggcagtggcgcaccaatggcagacaataacgagggtgccgatggagtgggtaattcctcaggaaattggcattgcgattcccaatggctgggcgacagagtcatcaccaccagcacccgaacctgggccctgcccacctacaacaaccacctctacaagcaaatctccagccaatcaggagcatcgaacgacaaccactactttggctacagcaccccttgggggtattttgacttcaacagattccactgtcacttctccccacgtgactggcaaagactcatcaacaacaactggggattccgacccaagagactcaacttcaagctctttaacattcaagtcaaagaggtcacgcagaatgacggtacgacgacgattgccaataaccttaccagcacggttcaggtgtttactgactcggagtaccagctcccgtacgtcctcggctcggcgcatcaaggatgcctcccgccgtttccagcggacgtcttcatggtcccacagtatggatacctcaccctgaacaacgggagtcaggcggtaggacgctcttccttttactgcctggagtactttccttctcagatgctgcgtaccggaaacaactttaccttcagctacacctttgaggacgtgcccttccacagcagctacgctcacagccagagtttggaccggctgatgaatcctctgatcgaccagtatctgtattatctgaacaggacacaatcaaatagtggaactcttcagcagtctaggctactgtttagccaagctggacccaccagcatgtcccttcaagctaaaaactggctgcctggaccttgctacagacagcagcgtctgtcaaagcaggcaaacgacaacaacaacagcaactttccctggactgcggctacaaagtatcatctaaatggtcgggactcgttggttaatccaggaccagctatggccagccacaaagacgatgaagaaaagtttttccccatgcatggaaccctgatatttggtaaacaaggaacaaatgctaacgacgcggatttggaacgtgtcatgattacagatgaagaagaaatcaggaccaccaatcccgtggctacagagcagtacggaaacgtgtcaaataatttgcaaaactcaaatactggtccaactacagaaaatgtcaatcaccagggagcgttacctggtatggtgtggcaggatcgagacgtgtacctgcagggacccatttgggccaagattcctcacgccgacggacactttcacccttctccactgatgggaggttttggactcaaacacccgcctcctcaaatcatgatcaaaaacactcctgttccagccaatcctcctacaaacttcagcgcggcaaagtttgcttccttcatcacacagtattccacgggacaggtcagcgtggagatcgagtgggagctgcagaaggagaacagcaaacgctggaaccccgagatccagtacacttccaactacaacaaatctgttaatgtggactttactgtggacgctaatggtgtgtattcagagcctcgccccattggcaccagatacctgactcgtaatctgtaa

SEQ ID NO: 12318 - DNA, 2208 bp, Artificial Sequence
  source: /note="Description of Artificial Sequence: Synthetic polynucleotide"
atggctgccgatggttatcttccagattggctcgaggacactctctctgaaggaataagacagtggtggaagctcaaacctggcccaccaccaccaaggcccgcagagcggcatcaggacgacagcaggggtcttgtgcttcctgggtacaagtacctcggacccttcaacggactcgacaaaggagagccggtcaacgaggcagacgctgcggccctcgagcacgacaaggcctacgaccggcagctcgacagcggagacaacccgtacctcaagtacaaccacgccgacgcggagtttcaggagcgtcttaaagaagatacgtcttttgggggcaacctcggacgagcagtcttccaggcgaaaaagagggttcttgaacctctgggcctggttgaggaacctgttaagacggctccgggaaaaaagaggccggtagagcactctcctgcggagccagactcctcctcgggaaccggaaaagcgggccagcagcctgcaagaaagagattgaatttcggtcagactggagacgcagactccgtacctgacccccagcctctcggacagccaccagcagcccccacaagtttgggatctactacaatggcaacaggcagtggcgcaccaatggcagacaataacgagggtgccgatggagtgggtaattcctcaggaaattggcattgcgattcccaatggctgggcgacagagtcatcaccaccagcacccgaacctgggccctgcccacctacaacaaccacctctacaagcaaatctccagccaatcaggagcatcgaacgacaaccactactttggctacagcaccccttgggggtattttgacttcaacagattccactgtcacttctccccacgtgactggcaaagactcatcaacaacaactggggattccgacccaagagactcaacttcaagctctttaacattcaagtcaaagaggtcacgcagaatgacggtacgacgacgattgccaataaccttaccagcacggttcaggtgtttactgactcggagtaccagctcccgtacgtcctcggctcggcgcatcaaggatgcctcccgccgtttccagcggacgtcttcatggtcccacagtatggatacctcaccctgaacaacgggagtcaggcggtaggacgctcttccttttactgcctggagtactttccttctcagatgctgcgtaccggaaacaactttaccttcagctacacctttgaggacgtgcccttccacagcagctacgctcacagccagagtttggaccggctgatgaatcctctgatcgaccagtatctgtattatctgaacaggacacaatcaaatagtggaactcttcagcagtctaggctactgtttagccaagctggacccaccagcatgtcccttcaagctaaaaactggctgcctggaccttgctacagacagcagcgtctgtcaaagcaggcaaacgacaacaacaacagcaactttccctggactgcggctacaaagtatcatctaaatggtcgggactcgttggttaatccaggaccagctatggccagccacaaagacgatgaagaaaagtttttccccatgcatggaaccctgatatttggtaaacaaggaacaaatgctaacgacgcggatttggaacatgtcatgattacagatgaagaagaaatcaggaccaccaatcccgtggctacagagcagtacggaaacgtgtcaaataatttgcaaaactcaaatactggtccaactacagaaaatgtcaatcaccagggagcgttacctggtatggtgtggcaggatcgagacgtgtacctgcagggacccatttgggccaagattcctcacaccgacggacactttcacccttctccactgatgggaggttttggactcaaacacccgcctcctcaaatcatgatcaaaaacactcctgttccagccaatcctcctacaaacttcagcgcggcaaagtttgcttccttcatcacacggtattccacgggacaggtcagcgcggagatcgagtgggagctgcagaaggagaacagcaaacgctggaaccccgagatccagtacacttccaactacaacaaatctgttaatgtggactttactgtggacgctaatggtgtgtattcagagcctcgccccattggcaccagatacctgactcgtaatctgtaa

SEQ ID NO: 12319 - DNA, 2208 bp, Artificial Sequence
  source: /note="Description of Artificial Sequence: Synthetic polynucleotide"
atggctgccgatggttatcttccagattggctcgaggacattctctctgaaggaataagacagtggtggaagctcaaacctggcccaccaccaccaaagcccgcagagcggcataaggacgacagcaggggtcttgtgcttcctgggtacaagtacctcggacccttcaacggactcgacaaaggagagccggtcaacgaggcagacgccgcggccctcgagcacgacaaggcctacgaccggcagctcgacagcggagacaacccgtacctcaagtacaaccacgccgacgcggagtttcaggagcgtcttaaagaagatacgtcttttgggggcaacctcggacgagcagtcttccaggcaaaaaagagggttcttgaacctctgggcctggttgaggaacctgttaagacggctccgggaaaaaagaggccggtagagcaatctcctgcggagccagactcctcctcgggaaccggaaaggcgggcaaccagcctgcaagaaagagattgaattttggtcagactggagacgcagactccgtacctgacccccagcctctcggacagccaccagcagccccctctggtctgggatctactacaatggctacaggcagtggcgcaccaatggcagacaataacgagggtgccgatggagtgggtaattcctcaggaaattggcattgcgattcccaatggttgggcgacagagtcatcaccaccagcacccgaacctgggccctgcccacctacaacaatcacctctacaagcaaatctccagccaatcaggagcagcgaacgacaaccactactttggctacagcaccccctgggggtattttgacttcaacagattccactgccacttttcaccacgtgactggcaaagactcatcaacaacaactggggattccgacccaaaagactcaacttcaagctctttaacattcaagtcaaagaggtcacgcagaatgacggtacgacgacgattgccaataaccttaccagcacggttcaggtgtttactgactcggagtaccagctcccgtacgtcctcggctcggcgcatcaaggatgcctcccgccgtttccagcggacgtcttcatggtcccacagtatggatacctcaccctgaacaacgggagtcaggcggtaggacgctcttccttttactgcctggagtactttccttctcagatgcttcgtaccggaaacaactttaccttcagttacacctttgaagacgttcctttccacagcagctacgctcacagtcaaagtctggaccggctgatgaatcctctgatagaccagtacctgcattatctaaacaaaacacaatcaaatagtggaactcttcagcagtctcggctactgtttagtcaagctggacccaccagcatgtctcttcaagctaaaaactggctgcctggaccttgctacagacaacagcgtctgtcaaagcaggcaaacgacaacaacaacagcaactttccctggactgcggctacaaagtatcatctaaatggccgggactcgttggttaatccaggaccagctatggccagccacaaagacgatgaagaaaagtttttccccatgcatggaaccctgatatttggtaaacaaggaacaaatgctaacgacgcggatttggacaatgtcatgattacagatgaagaagaaatccgcaccaccaatcccgtggctacggagcagtacgggactgtgtcaaataatttgcaaaactcaaatactggtccaactactggaactgtcaatcaccaaggagcgttacctggtatggtgtggcaggatcgagacgtgtaccttcagggacccatttgggccaagattcctcacaccgatggacactttcatccttctccactgatgggaggttttggactcaaacacccgcctcctcagatcatgatcaaaaacactcccgttccagccaatcctcctacaaacttcagttctgccaagtttgcttctttcatcacacagtattccacggggcaggtcagcgtggagatagagtgggagctgcagaaggagaacagcaaacgctggaaccccgagatccagtatacttccaactacaacaagtctgttaatgtggactttactgtggacactaatggtgtgtattcagagcctcgccccattggcaccagatacctgactcgtaatctgtaa

SEQ ID NO: 12320 - DNA, 2208 bp, Artificial Sequence
  source: /note="Description of Artificial Sequence: Synthetic polynucleotide"
atggctgccgatggttatcttccagattggctcgaggacactctctctgaaggaataagacagtggtggaagctcaaacctggcccaccaccaccaaggcccgcagagcggcatcaggacgacagcaggggtcttgtgcttcctgggtacaagtacctcggacccttcaacggactcgacaaaggagagccggtcaacgaggcagacgctgcggccctcgagcacgacaaggcctacgaccggcagctcgacagcggagacaacccgtacctcaagtacaaccacgccgacgcggagtttcaggagcgtcttaaagaagatacgtcttttgggggcaacctcggacgagcagtcttccaggcgaaaaagagggttcttgaacctctgggcctggttgaggaacctgttaagacggctccgggaaaaaagaggccggtagagcactctcctgcggagccagactcctcctcgggaaccggaaaagcgggccagcagcctgcaagaaagagattgaatttcggtcagactggagacgcagactccgtacctgacccccagcctctcggacagccaccagcagcccccacaagtttgggatctactacaatggctacaggcagtggcgcaccaatggcagacaataacgagggtgccgatggagtgggtaattcctcaggaaattggcattgcgattcccaatggctgggcgacagagtcatcaccaccagcacccgaacctgggccctgcccacctacaacaaccacctctacaagcaaatctccagccaatcaggagcatcgaacgacaaccactactttggctacagcaccccttgggggtattttgacttcaacagattccactgtcacttctccccacgtgactggcaaagactcatcaacaacaactggggattccgacccaagagactcaacttcaagctctttaacattcaagtcaaagaggtcacgcagaatgacggtacgacgacgattgccaataaccttaccagcacggttcaggtgtttactgactcggagtaccagctcccgtacgtcctcggctcggcgcatcaaggatgcctcccgccgtttccagcggacgtcttcatggtcccacagtatggatacctcaccctgaacaacgggagtcaggcggtaggacgctcttccttttactgcctggagtactttccttctcagatgctgcgtaccggaaacaactttaccttcagctacacctttgaggacgtgcccttccacagcagctacgctcacagccagagtttggaccggctgatgaatcctctgatcgaccagtatctgtattatctgaacaggacacaatcaaatagtggaactcttcagcagtctaggctactgtttagccaagctggacccaccagcatgtcccttcaagctaaaaactggctgcctggaccttgctacagacagcagcgtctgtcaaagcaggcaaacgacaacaacaacagcaactttccctggactgcggctacaaagtatcatctaaatggtcgggactcgttggttaatccaggaccagctatggccagccacaaagacgatgaagaaaagtttttccccatgcatggaaccctgatatttggtaaacaaggaacaaatgctaacgacgcggatttggaacatgtcatgattacagatgaagaagaaatcaggaccaccaatcccgtggctacagagcagtacggaaacgtgtcaaataatttgcaaaactcaaatactggtccgactacagaaaatgtcaatcgccagggagcgttacctggtatggtgtggcaggatcgagacgtgtacctgcagggacccatttgggccaagattcctcacaccgacggacactttcacccttctccactgatgggaggttttggactcaaacacccgcctcctcaaatcatgatcaaaaacactcctgttccagccaatcctcctacaaacttcagcgcggcaaagtttgcttccttcatcacacagtattccacgggacaggtcagcgtggagatcgagtgggagctgcagaaggagaacagcaaacgctggaaccccgagatccagtacacttccaactacaacaaatctgttaatgtggactttactgtggacgctaatggtgtgtattcagagcctcgccccattggcaccagatacctgactcgtaatctgtaa

SEQ ID NO: 12321 - DNA, 2208 bp, Artificial Sequence
  source: /note="Description of Artificial Sequence: Synthetic polynucleotide"
atggctgccgatggttatcttccagattggctcgaggacactctctctgaaggaataagacagtggtggaagctcaaacctggcccaccaccaccaaggcccgcagagcggcatcaggacgacagcaggggtcttgtgcttcctgggtacaagtacctcggacccttcaacggactcgacaaaggagagccggtcaacgaggcagacgctgcggccctcgagcacgacaaggcctacgaccggcagctcgacagcggagacaacccgtacctcaagtacaaccacgccgacgcggagtttcaggagcgtcttaaagaagatacgtcttttgggggcaacctcggacgagcagtcttccaggcgaaaaagagggttcttgaacctctgggcctggttgaggaacctgttaagacggctccgggaaaaaagaggccggtagagcactctcctgcggagccagactcctcctcgggaaccggaaaagcgggccagcagcctgcaagaaagagattgaatttcggtcagactggagacgcagactccgtacctgacccccagcctctcggacagccaccagcagcccccacaagtttgggatctactacaatggctacaggcagtggcgcaccaatggcagacaataacgagggtgccgatggagtgggtaattcctcaggaaattggcattgcgattcccaatggctgggcgacagagtcatcaccaccagcacccgaacctgggccctgcccacctacaacaaccacctctacaagcaaatctccagccaatcaggagcatcgaacgacaaccactactttggctacagcaccccttgggggtattttgacttcaacagattccactgtcacttctccccacgtgactggcaaagactcatcaacaacaactggggattccgacccaagagactcaacttcaagctctttaacattcaagtcaaagaggtcacgcagaatgacggtacgacgacgattgccaataaccttaccagcacggttcaggtgtttactgactcggagtaccagctcccgtacgtcctcggctcggcgcatcaaggatgcctcccgccgtttccagcggacgtcttcatggtcccacagtatggatacctcaccctgaacaacgggagtcaggcggtaggacgctcttccttttactgcctggagtactttccttctcagatgctgcgtaccggaaacaactttaccttcagctacacctttgaggacgtgcccttccacagcagctacgctcacagccagagtttggaccggctgatgaatcctctgatcgaccagtatctgtattatctgaacaggacacaatcaaatagtggaactcttcagcagtctaggctactgtttagccaagctgcacccaccagcatgtcccttcaagctaaaaactggctgcctggaccttgctacagacagcagcgtctgtcaaagcaggcaaacgacaacaacaacagcaactttccctggactgcggctacaaagtatcatctaaatggtcgggactcgttggttaatccaggaccagctatggccagccacaaagacgatgaagaaaagtttttccccatgcatggaaccctgatatttggtaaacaaggaacaaatgctaacgacacggatttggaacatgtcatgattacagatgaagaagaaatcaggaccaccaatcccgtggctacagagcagtacggaaacgtgtcaaataatttgcaaaactcaaatactggtccaactacagaaaatgtcaatcaccagggagcgttacctggtatggtgtggcaggatcgagacgtgtacctgcagggacccatttgggccaagattcctcacaccgacggacactttcacccttctccactgatgggaggttttggactcaaacacccgcctcctcaaatcatgatcaaaaacactcctgttccagccaatcctcctacaaacttcagcgcggcaaagtttgcttccttcatcacacagtattccacgggacaggtcagcgtggagatcgagtgggagctgcagaaggagaacagcaaacgctggaaccccgagatccagtacacttccaactacaacaaatctgttaatgtggactttactgtggacgctaatggtgtgtattcagagcctcgccccattggcaccagatacctgactcgtaatctgtaa

SEQ ID NO: 12322 - DNA, 2208 bp, Artificial Sequence
  source: /note="Description of Artificial Sequence: Synthetic polynucleotide"
atggctgccgatggttatcttccagattggctcgaggacattctctctgaaggaataagacagtggtggaagctcaaacctggcccaccaccaccaaagcccgcagagcggcataaggacgacagcaggggtcttgtgcttcctgggtacaagtacctcggacccttcaacggactcgacaaaggagagccggtcaacgaggcagacgccgcggccctcgagcacgacaaggcctacgaccggcagctcgacagcggagacaacccgtacctcaagtacaaccacgccgacgcggagtttcaggagcgtcttaaagaagatacgtcttttgggggcaacctcggacgagcagtcttccaggcaaaaaagagggttcttgaacctctgggcctggttgaggaacctgttaagacggctccgggaaaaaagaggccggtagagcaatctcctgcggagccagactcctcctcgggaaccggaaaggcgggcaaccagcctgcaagaaagagattgaattttggtcagactggagacgcagactccgtacctgacccccagcctctcggacagccaccagcagccccctctggtctgggatctactacaatggctacaggcagtggcgcaccaatggcagacaataacgagggtgccgatggagtgggtaattcctcaggaaattggcattgcgattcccaatggttgggcgacagagtcatcaccaccagcacccgaacctgggccctgcccacctacaacaatcacctctacaagcaaatctccagccaatcaggagcagcgaacgacaaccactactttggctacagcaccccctgggggtattttgacttcaacagattccactgccacttttcaccacgtgactggcaaagactcatcaacaacaactggggattccgacccaaaagactcaacttcaagctctttaacattcaagtcaaagaggtcacgcagaatgacggtacgacgacgattgccaataaccttaccagcacggttcaggtgtttactgactcggagtaccagctcccgtacgtcctcggctcggcgcatcaaggatgcctcccgccgtttccagcggacgtcttcatggtcccacagtatggatacctcaccctgaacaacgggagtcaggcggtaggacgctcttccttttactgcctggagtactttccttctcagatgcttcgtaccggaaacaactttaccttcagttacacctttgaagacgttcctttccacagcagctacgctcacagtcaaagtctggaccggctgatgaatcctctgatagaccagtacctgtattatctaaacaaaacacaatcaaatagtggaactcttcagcagtctcggctactgtttagtcaagctggacccaccagcatgtctcttcaagctaaaaactggctgcctggaccttgctacagacaacagcgtctgtcaaagcaggcaaacgacaacaacaacagcaactttccctggactgcggctacaaagtatcatctaaatggccgggactcgttggttaatccaggaccagctatggccagccacaaagacgatgaagaaaagtttttccccatgcatggaaccctgatatttggtaaacaaggaacaaatgctaacgacgcggatttggacaatgtcatgattacagatgaagaagaaatccgcaccaccaatcccgtggctacggagcagtacgggactgtgtcaaataatttgcaaaactcaaatactggtccaactactggaactgtcaatcaccaaggagcgttacctggtatggtgtggcaggatcgagacgtgtaccttcagggacccatttgggccaagattcctcacaccgatggacactttcatccttctccactgatgggaggttttggactcaaacacccgcctcctcagatcatgatcaaaaacactcccgttccagccaatcctcctacaaacttcagttctgccaagtttgcttctttcgtcacacagtattccacggggcaggtcagcgtggagatagagtgggagctgcagaaggagaacagcaaacgctggaaccccgagatccagtatacttccaactacaacaagtctgttaatgtggactttactgtggacactaatggtgtgtattcagagcctcgccccattggcaccagatacctgactcgtaatctgtaa

SEQ ID NO: 12323 - DNA, 2208 bp, Artificial Sequence
  source: /note="Description of Artificial Sequence: Synthetic polynucleotide"
atggctgccgatggttatcttccagattggctcgaggacactctctctgaaggaataagacagtggtggaagctcaaacctggcccaccaccaccaaggcccgcagagcggcatcaggacgacagcaggggtcttgtgcttcctgggtacaagtacctcggacccttcaacggactcgacaaaggagagccggtcaacgaggcagacgctgcggccctcgagcacgacaaggcctacgaccggcagctcgacagcggagacaacccgtacctcaagtacaaccacgccgacgcggagtttcaggagcgtcttaaagaagatacgtcttttgggggcaacctcggacgagcagtcttccaggcgaaaaagagggttcttgaacctctgggcctggttgaggaacctgttaagacggctccgggaaaaaagaggccggtagagcactctcctgcggagccagactcctcctcgggaaccggaaaagcgggccagcagcctgcaagaaagagattgaatttcggtcagactggagacgcagactccgtacctgacccccagcctctcggacagccaccagcagcccccacaagtttgggatctactacaatggctacaggcagtggcgcaccaatggcagacaataacgagggtgccgatggagtgggtaattcctcaggaaattggcattgcgattcccaatggctgggcgacagagtcatcaccaccagcacccgaacctgggccctgcccacctacaacaaccacctctacaagcaaatctccagccaatcaggagcatcgaacgacaaccactactttggctacagcaccccttgggggtattttgacttcaacagattccactgtcacttctccccacgtgactggcaaagactcatcaacaacaactggggattccgacccaagagactcaacttcaagctctttaacattcaagtcaaagaggtcacgcagaatgacggtacgacgacgattgccaataaccttaccagcacggttcaggtgtttactgactcggagtaccagctcccgtacgccctcggctcggcgcatcaaggatgcctcccgccgtttccagcggacgtcttcatggtcccacagtatggatacctcaccctgaacaacgggagtcaggcggtaggacgctcttccttttactgcctggagtactttccttctcagatgctgcgtaccggaaacaactttaccttcagctacacctttgaggacgtgcccttccatagcagctacgctcacagccagagtttggaccggctgatgaatcctctgatcgaccagtatctgtattatctgaacaggacacaatcaaatagtggaactcttcagcagtctaggctactgtttagccaagctggacccaccagcatgtcccttcaagctaaaaactggctgcctggaccttgctacagacagcagcgtctgtcaaagcaggcaaacgacaacaacaacagcaactttccctggactgcggctacaaagtatcatctaaatggtcgggactcgttggttaatccaggaccagctatggccagccacaaagacgatgaagaaaagtttttccccatgcatggaaccctgatatttggtaaacaaggaacaaatgctaacgacacggatttggaacatgtcatgattacagatgaagaagaaatcaggaccaccaatcccgtggctacagagcagtacggaaacgtgtcaaataatttgcaaaactcaaatactggtccaactacagaaaatgtcaatcaccagggagcgttacctggtatggtgtggcaggatcgagacgtgtacctgcagggacccatttgggccaagattcctcacaccgacggacactttcacccttctccactgatgggaggttttggactcaaacacccgcctcctcaaatcatgatcaaaaacactcctgttccagccaatcctcctacaaacttcagcgcggcaaagtttgcttccttcatcacacagtattccacgggacaggtcagcgtggagatcgagtgggagctgcagaaggagaacagcaaacgctggaaccccgagatccagtacacttccaactacaacaaatctgttaatgtggactttactgtggacgctaatggtgtgtattcagagcctcgccccattggcaccagatacctgactcgtaatctgtaa

SEQ ID NO: 12324 - DNA, 2208 bp, Artificial Sequence
  source: /note="Description of Artificial Sequence: Synthetic polynucleotide"
atggctgccgatggttatcttccagattggctcgaggacattctctctgaaggaataagacagtggtggaagctcaaacctggcccaccaccaccaaagcccgcagagcggcataaggacgacagcaggggtcttgtgcttcctgggtacaagtacctcggacccttcaacggactcgacaaaggagagccggtcaacgaggcagacgccgcggccctcgagcacgacaaggcctacgaccggcagctcgacagcggagacaacccgtacctcaagtacaaccacgccgacgcggagtttcaggagcgtcttaaagaagatacgtcttttgggggcaacctcggacgagcagtcttccaggcaaaaaagagggttcttgaacctctgggcctggttgaggaacctgttaagacggctccgggaaaaaagaggccggtagagcaatctcctgcggagccagactcctcctcgggaaccggaaaggcgggcaaccagcctgcaagaaagagattgaattttggtcagactggagacgcagactccgtacctgacccccagcctctcggacagccaccagcagccccctctggtctgggatctactacaatggctacaggcagtggcgcaccaatggcagacaataacgagggtgccgatggggtgggtaattcctcaggaaattggcattgcgattcccaatggttgggcgacagagtcatcaccaccagcacccgaacctgggccctgcccacctacaacaatcacctctacaagcaaatctccagccaatcaggagcagcgaacgacaaccactactttggctacagcaccccctgggggtattttgacttcaacagattccactgccacttttcaccacgtgactggcaaagactcatcaacaacaactggggattccgacccaaaagactcaacttcaagctctttagcattcaagtcaaagaggtcacgcagaatgacggtacgacgacgattgccaataaccttaccagcacggttcaggtgtttactgactcggagtaccagctcccgtacgtcctcggctcggcgcatcaaggatgcctcccgccgtttccagcggacgtcttcatggtcccacagtatggatacctcaccctgaacaacgggagtcaggcggtaggacgctcttccttttactgcctggagtactttccttctcagatgcttcgtaccggaaacaactttaccttcagttacacctttgaagacgttcctttccacagcagctacgctcacagtcaaagtctggaccggctgatgaatcctctgatagaccagtacctgtattatctaaacaaaacacaatcaaatagtggaactcttcagcagtctcggctactgtttagtcaagctggacccaccagcatgtctcttcaagctaaaaactggctgcctggaccttgctacagacaacagcgtctgtcaaagcaggcaaacgacaacaacaacagcaactttccctggactgcggctacaaagtatcatctaaatggccgggactcgttggttaatccaggaccagctatggccagccacaaagacgatgaagaaaagtttttccccatgcatggaaccctgatatttggtaaacaaggaacaaatgctaacgacgcggatttggacaatgtcatgattacagatgaagaagaaatccgcaccaccaatcccgtggctacggagcagtacgggactgtgtcaaataatttgcaaaactcaaatactggtccaactactggaactgtcaatcaccaaggagcgttacctggtatggtgtggcaggatcgagacgtgtaccttcagggacccatttgggccaagattcctcacaccgatggacactttcatccttctccactgatgggaggttttggactcaaacacccgcctcctcagatcatgatcaaaaacactcccgttccagccaatcctcctacaaacttcagttctgccaagtttgcttctttcatcacacagtattccacggggcaggtcagcgtggagatagagtgggagctgcagaaggagaacagcaaacgctggaaccccgagatccagtatacttccaactacaacaagtctgttaatgtggactttactgtggacactaatggtgtgtattcagagcctcgccccattggcaccagatacctgactcgtaatctgtaa

SEQ ID NO: 12325 - DNA, 2208 bp, Artificial Sequence
  source: /note="Description of Artificial Sequence: Synthetic polynucleotide"
atggctgccgatggttatcttccagattggctcgaggacactctctctgaaggaataagacagtggtggaagctcaaacctggcccaccaccaccaaggcccgcagagcggcatcaggacgacagcaggggtcttgtgcttcctgggtacaagtacctcggacccttcaacggactcgacaaaggagagccggtcaacgaggcagacgctgcggccctcgagcacgacaaggcctacgaccggcagctcgacagcggagacaacccgtacctcaagtacaaccacgccgacgcggagtttcaggagcgtcttaaagaagatacgtcttttgggggcaacctcggacgagcagtcttccaggcgaaaaagagggttcttgagcctctgggcctggttgaggaacctgttaagacggctccgggaaaaaagaggccggtagagcactctcctgcggagccagactcctcctcgggaaccggaaaagcgggccagcagcctgcaagaaagagattgaatttcggtcagactggagacgcagactccgtacctgacccccagcctctcggacagccaccagcagcccccacaagtttgggatctactacaatggctacaggcagtggcgcaccaatggcagacaataacgagggtgccgatggagtgggtaattcctcaggaaattggcattgcgattcccaatggctgggcgacagagtcatcaccaccagcacccgaacctgggccctgcccacctacaacaaccacctctacaagcaaatctccagccaatcaggagcatcgaacgacaaccactaccttggctacagcaccccttgggggtattttgacttcaacagattccactgtcacttctccccacgtgactggcaaagactcatcaacaacaactggggattccgacccaagagactcaacttcaagctctttaacattcaagtcaaagaggtcacgcagaatgacggtacgacgacgattgccaataaccttaccagcacggttcaggtgtttactgactcggagtaccagctcccgtacgtcctcggctcggcgcatcaaggatgcctcccgccgtttccagcggacgtcttcatggtcccacagtatggatacctcaccctgaacaacgggagtcaggcggtaggacgctcttccttttactgcctggagtactttccttctcagatgctgcgtaccggaaacaactttaccttcagctacacctttgaggacgtgcccttccacagcagctacgctcacagccagagtttggaccggctgatgaatcctctgatcgaccagtatctgtattatctgaacaggacacaatcaaatagtggaactcttcagcagtctaggctactgtttagccaagctgcacccaccagcatgtcccttcaagctaaaaactggctgcctggaccttgctacagacagcagcgtctgtcaaagcaggcaaacgacaacaacaacagcaactttccctggactgcggctacaaagtatcctctaaatggtcgggactcgttggttaatccaggaccagctatggccagccacaaagacgatgaagaaaagtttttccccatgcatggaaccctgatatttggtaaacaaggaacaaatgctaacgacacggatttggaacatgtcatgattacagatgaagaagaaatcaggaccaccaatcccgtggctacagagcagtacggaaacgtgtcaaataatttgcaaaactcaaatactggtccaactacagaaaatgtcaatcaccagggagcgttacctggtatggtgtggcaggatcgagacgtgtacctgcagggacccatttgggccaagattcctcacaccgacggacactttcacccttctccactgatgggaggttttggactcaaacacccgcctcctcaaatcatgatcaaaaacactcctgttccagccaatcctcctacaaacttcagcgcggcaaagtttgcttccttcatcacacagtattccacgggacaggtcagcgtggagatcgagtgggagctgcagaaggagaacagcaaacgctggaaccccgagatccagtacacttccaactacaacaaatctgttaatgtggactttactgtggacgctaatggtgtgtattcagagcctcgccccattggcaccagatacctgactcgtaatctgtaa

SEQ ID NO: 12326 - DNA, 2208 bp, Artificial Sequence
  source: /note="Description of Artificial Sequence: Synthetic polynucleotide"
atggctgccgatggttatcttccagattggctcgaggacattctctctgaaggaataagacagtggtggaagctcaaacctggcccaccaccaccaaagcccgcagagcggcataaggacgacagcaggggtcttgtgcttcctgggtacaagtacctcggacccttcaacggactcgacaaaggagagccggtcaacgaggcagacgccgcggccctcgagcacgacaaggcctacgaccggcagctcgacagcggagacaacccgtacctcaagtacaaccacgccgacgcggagtttcaggagcgtcttaaagaagatacgtcttttgggggcaacctcggacgagcagtcttccaggcaaaaaagagggttcttgaacctctgggcctggttgaggaacctgttaagacggctccgggaaaaaagaggccggtagagcaatctcctgcggagccagactcctcctcgggaaccggaaaggcgggcaaccagcctgcaagaaagagattgaattttggtcagactggagacgcagactccgtacctgacccccagcctctcggacagccaccagcagccccctctggtctgggatctactacaatggctacaggcagtggcgcaccaatggcagacaataacgagggtgccgatggagtgggtaattcctcaggaaattggcattgcgattcccaatggttgggcgacagagtcatcaccaccagcacccgaacctgggccctgcccacctacaacaatcacctctacaagcaaatctccagccaatcaggagcagcgaacgacaaccactactttggctacagcaccccctgggggtattttgacttcaacagattccactgccacttttcaccacgtgactggcaaagactcatcaacaacaactggggattccgacccaaaagactcaacttcaagctctttaacattcaagtcaaagaggtcacgcagaatgacggtacgacgacgattgccaataaccttaccagcacggttcaggtgtttactgactcggagtaccagctcccgtacgtcctcggctcggcgcatcaaggatgcctcccgccgtttccagcggacgtcttcatggtcccacagtatggatacctcaccctgaacaacgggagtcaggcggtaggacgctcttccttttactgcctggagtactttccttctcagatgcttcgtaccggaaacaactttaccttcagttacgcctttgaagacgttcctttccacagcagctacgctcacagtcaaagtctggaccggctgatgaatcctctgatagaccagtacctgtattatctaaacaaaacacaatcaaatagtggaactcttcagcagtctcggctactgtttagtcaagctggacccaccagcatgtctcttcaagctaaaaactggctgcctggaccttgctacagacaacagcgtctgtcaaagcaggcaaacgacaacaacaacagcaactttccctggactgcggctacaaagtatcatctaaatggccgggactcgttggttaatccaggaccagctatggccagccacaaagacgatgaagaaaagtttttccccatgcatggaaccctgatatttggtaaacaaggaacaaatgctaacgacgcggatttggacaatgtcatgattacagatgaagaagaaatccgcaccaccaatcccgtggctacggagcagtacgggactgtgtcaaataatttgcaaaactcaaatactggtccaactactggaactgtcaatcaccaaggagcgttacctggtatggtgtggcaggatcgagacgtgtaccttcagggacccatttgggccaagattcctcacaccgatggacactttcatccttctccactgatgggaggttttggactcaaacacccgcctcctcagatcatgatcaaaaacactcccgttccagccaatcctcctacaaacttcagttctgccaagtttgctcctttcatcacacagtattccacggggcaggtcagcgtggagatagagtgggagctgcagaaggagaacagcaaacgctggaaccccgagatccagtatacttccaactacaacaagtctgttaatgtggactttactgtggacactaatggtgtgtattcagagcctcgccccattggcaccagatacctgactcgtaatctgtaa
